United States Patent Application Publication US 2022/0290142 A1 - sequence listing, part 8

SEQ ID NO: 11687 - DNA, 6941 bp, Homo sapiens
gctcctggcaaagactcggtccttctggaatcttgtaacggttctaacagctgggtgcgggtggagctgcgggtgagtcctcggctccggatccatttctctttgttccctaggaccccctcccacagagtccgcctcctcttccccgctctcccagccccctcctttgcctgttaacgtcttcccctacctgcatcctgaccatcatttgctgtgcctgctcctcggctttctgtcttcacgacctccttaggctgtgggcgaagacgtcatgggactggggctctgctgccttcgagtgacgacctgttaacccgtttttcaggcgatcgccagctcgagtgcagattccttgctgtgaccgaggttcagagtgagctctgtcggtgtgtcagtttgcctcttcaggtgattgcacgtctgtgtgcgagtctctccgtgtatgggtggctatgattagggtgagcctcagactggaactcaagtctaagttcattcactgctccagcaggcactcttcaatgaaacctcatcagcagatcgggctctcttcccttgccttgcctcctaacccccctaggccaggtgagggggacagggtactgggaggtaagaaggaactcttctgcaaggagggctctcacgtctgtcttaggcctgctccttaccagagtctttggggaagcagtagggagggcctgagggtctcaggaaaggctctctgctggtctggctctgctctgtagctccatctatttccctgtcccaggtcctttcttcctcctaaccccattgactctgaccatcccctgcccagagcctgaggtcccttctctggcccctctgctgggctggcccatgcaggtgaggccccgcatctggcatcctggaactggcagttggagcctgagctatgggcaaggtcacttcgacagcagttgaatgcccagctcctcatggtcccggaggagaggagggtaggtttgtcttctgatgagacatcatctgattcccttaagtcttggcactccatatgtgtcttggacagcaaagaacagcccttggcctgccagcagaaacagaggcagttcgtgaagccagtgactgagtcagagcagcccacagtgctggaactcctgctagctgagctccgaactctgttctcagctgtgttgcaggacagtagccctgcagcttggcgctatcttcatgcagtactgggtctactgcctccatatcgtgagttgctagttggccaccttgatttgctgcccttcctggagcagctgtactgctgggcaccctgggtccaaacccacctccatctggacctgctaggtgccattgtccaggcctttcctccagacagctctttgttagacagtgcttcccatgctgactgctgtccccagaagcggaggctccatcacaggcccccatgcccagcttgcccttttgtgcaggcccagtggagcaggcagcaagtaaaggaggagctggccacctggctgcgaccattgacactgcctgagctacagcgctgcctgggcattgttggtgctcaggtggccctagaagaggctgtgtggctggatggacttagtctccttcccttggcactggcagcggacatccctgtacggtatgaaagcagtgacactgacaatgcagaggtggagcctgttggaagaaaagagaccaggtaagtgagggactcagtctagggcttgagcagaggagaaaaagttgctgttttatgggtgcctctggggtcacttggaagtttagatccagctctctgtttatcacagggattagcccaactccacacaaagctagtgtgaggctactttcctcttcctttttctctgcaaaataaacccagtggtgttagtcttaatccccatagagaaatacagaaattaatgaaaatcagaagtcagctatgaggcagccaaagctttagaataacagcttgacttttcagtttccaggtttttttcttagatgatgtcagaagtctccttaattatttttctataattcattcataatcactgaacattgcctgggcctactgtgagttgattcctggatgttgggtctttccctcaaggtacccctggggaatgtgtgtccgagtgtccttcccacatgtctatgtgacttaaaccggctccaaggcagagtggagttggcagcactactggatagaatttcattttgacccttccagagtcttcttcttgccctgccagtgtgggcactctggccccttgagtgatatatttttcttttgtttctttctttctttctttccttttttgagatagagtctcactctgtcgcccaggctggagtgcaacggcatggtctcggttcaccgcaacctccgcctcccgggttcaagtgattctcctgcctcagcctcctgagtagctgggactacaggcacgtgccaccatactcagctaatttttatatttttagtagagacggagtttcactatgttggccaggctggtctcgaattcctgacctcatgatccgcccacctctgcctcccaaagtgctgggattacaggcgtgagtcactgcgcccggccctattgttttcttttttaaaatatctggctatcagagctctctacaggatttcagaatgcttacagagaccttctcttctcagcgttctctaactttcgatttttttttttttttctgaaacagagtctcactctgtcgcccaggctagagtgcagtggcctgaccttggctcactgcaacctctgcctcacaggttcaagcgattcttttgcctcagcctcccgagtagctgggattacaggctcatgccaccacgctcagctgatttttgtattttcagtagagacagtgtttcgccatgttgaccaggctaggtttccaactcctggtctcaagtgatctgctcacctcggcctcccaaaatgctgggattacaggcataagccaccgtgcccaagagagttttttaactttagttttggaattctccttgtcctctggcctcattttctagacaatgctttgcagctgtctgtggcacatttactgttcgggaagaaggctagttttacctttaattaaggttggcttcctcagtttttgctgtaagtttatggctgggtcaagtctttccattaaagcctaatgttagatagataggcaggctcctggggccctaatgggaggtggccaatgccataaatttatggtggccctattggaatcttttcctttttcaaagagctgccctgtgccttgagtacaagtttcctttcctgggagaacttgactgaattggcatgggctgagatgttgggaagggatcaagttctttgccctccctttgaacctggcagtaaacctctgaggtctagctaatatggcttaatttgcattacgttctcccggagtggtttgccaggcattcattcattcaataagtgttggatagctacatttattaggatctgcaagatgctagggatacagaagtgaatgagacagactcaatcccttcacttgaggtattacagtttagttagggagatatagttaagttgataacaagtaaaatataattacaaattgtaataagtgctataaaacaaaagaatactgtcttttgcctggctgcttctctgcaggtgggagagagagagagagggagtgtagttagggggaaagcatgtggggggagtgttcaagtctagattagattaacaaaaacatcaaacagagtttcaaggaggagggagcagtcagtagtattacatgttaaatgagacaagtaagaagaatgaaaatgttcattggatgtagtaacaaggaagaggttaagttttgtggggaggaagctagattgtggtgcattgaggagtgaatggaagatgaagtggaaatcgcattttacgattttttttgtgaagcttagcttgaagggaaaagacaaatagcagggcagcagcttgaaagaattttggtgtctgggtagggattttttttttttttttgatagagagatgtttatatcccttaacacagtgcttgagaagtaggtgctcaataaatattcgtagactaaatgaataaatagactaaggtaagaagaagagtagattaaaaatatatcatagagaataaggggtccagagcactgatggaggaattaatcttacagagaagaaaggatacctcttcctctgaaatcgggggacagataagtgtgtgggggaaggcaactgaagttgagggaattggctaatggctgaaaacttcagctttctccaggcagagaaggagacagagaatgggatggaactgggagctcagcagggcttgcatggggttagggatagcagtttgagaggcctgaaagaggtagctgtctgaggacttgtgtgaagacatcaggcagaatgagcccacagctgattggacaccaggaacccgtagaggagcaaatgtccttggttttgcgatcttctgaatatactatataatataggactttgctgagaaaatgaacctataagagcaattataccatttaagatgtcctgatccaacacaacagttcatcaaggacatatgtataaaggttataaaccatattgttgatatgaattctagaataggattgcactgttatccctggggaaacttgtgttgatctaagtttgggtcagttaatgatactggtatattctgactggctaagtctaagttaaatcattccagagttttttttgtgtgtgtgctctcaggtctccccaactaaaaattattagtcattcacttttgagttattggtaactaatttccataccaattttgttgaccagaatgcagaagagtaagaggatgagtgtattggtgcaggcttgagggggccaccattggatcttggcaggaaaggaaagaatatgaagctagaggttgggtgatggtaggggaagagcagaaaatgtaacaggcatggagatcattcagggttggaaagcaggtataatggaatcaaagataggatattaaatctgaaaggccaagaaggttgagctgggaggggaaatccagtactgtgggcttacagagcaatgagttgggaaaataaagtcttcccattatttgtacacagtattatgtaatactgacttcatggtaattccaatcaatccagaatgattatttgtttatcagaaagggagaggttgctcacacacatgtttgtgtcaatattgttgcctaactgtgttctatgatacgctatatttgcccagtatgtggtatctttgagtatagatggtagtcaggctcgacaatgccacgtcaggtctcctcaggcacctgatctagtcctcctttcactagccaacagtggcaaggcctccctctaaggtacttgacctttttactctgccttttctctcctgattttctgtcacacaggtctcagcttgactatgaagttcccagggaaaaggccttccaaaagagcagcaccggcttttcacctgagacttccttcctggatagccaggtgatgactgctctgaagatggagagatacctgaagaagatccacttcctctatctcaatgtggctcccagccggtactttaggtgatagcctatgtccaggccccttctcctccccctgcctggtttccttctatgctatcttccccctcctctttctccacgtgcgcacccttctccctgtcctttctccacatactcctcctctgactctagtgtccctctctcttcccttctcctcagcctcctcctcctttccactctctacctccccttcactccctgttgcttacacagccttttgtcttacacatccttttctcacattttgctctttcttttttattctatcctagaatgatagaaacatttgttcacagccttagaagtaaattttatggtgatctattccaactccaatggaagaaacatgtgtttgtttaaatctttacagtgtcaggaaaatttttttccaggtatcttgttccttagactgaatcaaaatctgcattcttttaacttctacctcctggctctagtttatctatggggctataaaaacaggtctcctccttccccatgactcaagagacatttattcacttcctctcattagatccaaatcacacctacttttaaaaatttcttcttattattttgaagcaagggctcactctgtcacccaggctggagtgcagtggcacaatcatggctcactgcagtctcaatctctctggctcaagcaatcctctcacttcagcctcctgagtagctgggattacaggcatgaatcaccacactcggccagttttctaaaatttattttttgtagaatgaggtctcactgtgttgccaggctggtctcaaactcctgggttcaagcctcagcctgccaaattgccagaattacaggcatgagccaccatgcctggctcaaatcctcgcctattttaaaaagccctattcaagtccatctcctcccagaaataattgtaataattgcctttaaccaaactcttcaatatattaggcattgtgctaataaactcatgacatgtgttacttaatcctcatctaccaggtaggtgctattattatttctatatatgagatgagtggactgatacataagagaggttaagtaatttatccaaagctacataataaatggtgtaactaggatttaaacctaggactatcttaatccaaaagttcatgctcttaagcagtatctaatacagcctcccaaataaccttatttcctgtgcacactgatctcttgaacttaggtagcactaatgatcaatatcattcattcatttactgatcaattcatttaataaatgttcactgagagc

SEQ ID NO: 11688 - DNA, 1842 bp, Homo sapiens
gctcctggcaaagactcggtccttctggaatcttgtaacggttctaacagctgggtgcgggtggagctgcgggcgatcgccagctcgagtgcagattccttgctgtgaccgaggttcagagtgagctctgtcggtgtgtcagtttgcctcttcaggcccagtggagcaggcagcaagtaaaggaggagctggccacctggctgcgaccattgacactgcctgagctacagcgctgcctgggcattgttggtgctcaggtggccctagaagaggctgtgtggctggatggacttagtctccttcccttggcactggcagcggacatccctgtacggtatgaaagcagtgacactgacaatgcagaggtggagcctgttggaagaaaagagaccaggtctcagcttgactatgaagttcccagggaaaaggccttccaaaagagcagcaccggcttttcacctgagacttccttcctggatagccaggtgatgactgctctgaagatggagagatacctgaagaagatccacttcctctatctcaatgtggctcccagccggtactttaggtgatagcctatgtccaggccccttctcctccccctgcctggtttccttctatgctatcttccccctcctctttctccacgtgcgcacccttctccctgtcctttctccacatactcctcctctgactctagtgtccctctctcttcccttctcctcagcctcctcctcctttccactctctacctccccttcactccctgttgcttacacagccttttgtcttacacatccttttctcacattttgctctttcttttttattctatcctagaatgatagaaacatttgttcacagccttagaagtaaattttatggtgatctattccaactccaatggaagaaacatgtgtttgtttaaatctttacagtgtcaggaaaatttttttccaggtatcttgttccttagactgaatcaaaatctgcattcttttaacttctacctcctggctctagtttatctatggggctataaaaacaggtctcctccttccccatgactcaagagacatttattcacttcctctcattagatccaaatcacacctacttttaaaaatttcttcttattattttgaagcaagggctcactctgtcacccaggctggagtgcagtggcacaatcatggctcactgcagtctcaatctctctggctcaagcaatcctctcacttcagcctcctgagtagctgggattacaggcatgaatcaccacactcggccagttttctaaaatttattttttgtagaatgaggtctcactgtgttgccaggctggtctcaaactcctgggttcaagcctcagcctgccaaattgccagaattacaggcatgagccaccatgcctggctcaaatcctcgcctattttaaaaagccctattcaagtccatctcctcccagaaataattgtaataattgcctttaaccaaactcttcaatatattaggcattgtgctaataaactcatgacatgtgttacttaatcctcatctaccaggtaggtgctattattatttctatatatgagatgagtggactgatacataagagaggttaagtaatttatccaaagctacataataaatggtgtaactaggatttaaacctaggactatcttaatccaaaagttcatgctcttaagcagtatctaatacagcctcccaaataaccttatttcctgtgcacactgatctcttgaacttaggtagcactaatgatcaatatcattcattcatttactgatcaattcatttaataaatgttcactgagagc

SEQ ID NO: 11689 - DNA, 1385 bp, Homo sapiens
aacagctgggtgcgggtggagctgcgggtgagtcctcggctccggatccatttctctttgttccctaggaccccctcccacagagtccgcctcctcttccccgctctcccagccccctcctttgcctgttaacgtcttcccctacctgcatcctgaccatcatttgctgtgcctgctcctcggctttctgtcttcacgacctccttaggctgtgggcgaagacgtcatgggactggggctctgctgccttcgagtgacgacctgttaacccgtttttcaggcgatcgccagctcgagtgcagattccttgctgtgaccgaggttcagagtgagctctgtcggtgtgtcagtttgcctcttcaggtgattgcacgtctgtgtgcgagtctctccgtgtatgggtggctatgattagggtgagcctcagactggaactcaagtctaagttcattcactgctccagcaggcactcttcaatgaaacctcatcagcagatcgggctctcttcccttgccttgcctcctaacccccctaggccaggtgagggggacagggtactgggaggtaagaaggaactcttctgcaaggagggctctcacgtctgtcttaggcctgctccttaccagagtctttggggaagcagtagggagggcctgagggtctcaggaaaggctctctgctggtctggctctgctctgtagctccatctatttccctgtcccaggtcctttcttcctcctaaccccattgactctgaccatcccctgcccagagcctgaggtcccttctctggcccctctgctgggctggcccatgcaggtgaggccccgcatctggcatcctggaactggcagttggagcctgagctatgggcaaggtcacttcgacagcagttgaatgcccagctcctcatggtcccggaggagaggagggtaggtttgtcttctgatgagacatcatctgattcccttaagtcttggcactccatatgtgtcttggacagcaaagaacagcccttggcctgccagcagaaacagaggcagttcgtgaagccagtgactgagtcagagcagcccacagtgctggaactcctgctagctgagctccgaactctgttctcagctgtgttgcaggacagtagccctgcagcttggcgctatcttcatgcagtactgggtctactgcctccatatcgtgagttgctagttggccaccttgatttgctgcccttcctggagcagctgtactgctgggcaccctgggtccaaacccacctccatctggacctgctaggtgccattgtccaggcctttcctccagacagctctttgttagacagtgcttcccatgctgactgctgtccccagaagcggaggctccatcac

SEQ ID NO: 11690 - DNA, 566 bp, Homo sapiens
aacagctgggtgcgggtggagctgcgggcgatcgccagctcgagtgcagattccttgctgtgaccgaggttcagagtgagctctgtcggtgtgtcagtttgcctcttcaggcactcttcaatgaaacctcatcagcagatcgggctctcttcccttgccttgcctcctaacccccctaggccagcaaagaacagcccttggcctgccagcagaaacagaggcagttcgtgaagccagtgactgagtcagagcagcccacagtgctggaactcctgctagctgagctccgaactctgttctcagctgtgttgcaggacagtagccctgcagcttggcgctatcttcatgcagtactgggtctactgcctccatatcgtgagttgctagttggccaccttgatttgctgcccttcctggagcagctgtactgctgggcaccctgggtccaaacccacctccatctggacctgctaggtgccattgtccaggcctttcctccagacagctctttgttagacagtgcttcccatgctgactgctgtccccagaagcggaggctccatcac

SEQ ID NO: 11691 - DNA, 5965 bp, Homo sapiens
aggaggccattctccaatgtctacgagatgccagctggcatgctggcatgttaagccagccagtggctctgttggtacccagtggtgtggatctcactacacttcatcgcctcctggccctggcaacctcaggcagtttccctggccagtacacagaagcagatttggaccgcattggagaacacctccccagggagaaccttggtgtcaaacagaacatcaagaaggaaatggtgttgcagaggtgaggccaagaaccccatatgcgaatctgctctgctcttacgctgtcttggccaaaaggccaaaaggaattctgtgggctgccatgagggctgagaagattggggctaagtggtctggctgggactggggccaggaggggcaagcaaaggtaaaggggaggacattagctgagccctggcccacaggttccaccagcaagtgtgcagccaccttcacctgttcttcctgattggagataaacaggcccacaagcagctgccctccacccttttcctgaggctccttcaactggccactgccagcattgaccgctatgaaccctgggaccaagctgccctggccaaggtggcccagcatcacctggagggtgctcagagtgtgccccttgatgacggtaagccctttttacttgtccttaccactcatctctaccaggctctaatgagggttattacctaggtcagtctctctctctccctctctagagcctacagagcccccttcacatttcctacccttcttcctgagctaggagaggatccctttcctttcctgttttcctacaagctcacagagtgaggctaaagccatgcccattgcaggctcctggaagtacccagacctccaggcctcaattcccagtgtggccaaagccatggctcttatccacctttcggccacccactaccatgagcacctgtgccctgcattgccactcgtcacccccaagaccttcctagacttcctggacactttcctgatgctgcagcaacagacaatcctgaagattaagaacaaggcccagcggtgagtgtcccgtcccctgcagtgtacctccttctgctcctttgggtttcctcaccagcacattgtatctccagggtccagaatgccttggagaatctgagaatgctgattaaggagcacggtacccatgccaatctgatctttgacttggaacagcagctgaaagactccggcaaggtaaggagatgattttgaggcttccatggtggtgtcaaagcaggagcccaaaggggacttgaaaggaagcaaccagaatgaaccttaattcttgtccccctaagcttcccctttccctaggaaatctctctgatctccgctgcctcctcctttacagcttaggttcaaaagtttcccatgatacagctaagaccagattgattcttcataacaggtgaaacccaagcatctgcttctggctgcccctagtaccatgatcatgtgaagttcagtatgctgccaagatctctgtagattcccatgggggttggggcaggcattacatctcagtcaccactcactcacctcttagagttatcctctttttccataacactttgtccccataccctttcttccacaaaagcaacaaacaaaactgttgtatacagtgaggacatgtagatgggtgatggcagcagggagaaatttgtattatggcatagaaccagaagtaaatttataatggtatactagacaagagtgtcctgaattgtcttactcaccctcctctaccaggcattttccagtgaccaacttttcctttcctctctcgtctctctaacacctgctctacaatgtttttgagccgtcccatttttcctttagcgctcccttctagttgaaacctcaaaaccttttgctgtcatacagaacaatcttattctttgaataaacaaacttcttatatctggctaaaattggtgatgatagggcttatcacaccttctaaagccaaatactcctagttaaaggtgtcttcccaaactaaagagcagttttgtttttaataagaagaattctaaaatagcacctttttttcctactacacaagatgttgataaatattctggtataacttcagagcagtgaactagtgcccatctcacactcagataatctttctactagggtttcaggtcttaagctcctaatacctagccagctcttctgataagtgcctttaggactatcatccagtgccacacaactccagagacatggcatatgtcgtgtctactaatatggttttcactgtgttttacataaatggtatcccctggagttttaaaggtactggtgccctcctactattcaccacctaggatgaacagcttagattagacctcaagactcagttaagttgcaaagaaagaaaagaaagtcagagagcaacagaaatcccctttcccagttttttgccctacattttcccaagatgattaataccaggattgttgatctggtttaggggtcctagtattccttgatctgtgagtcagttacaccagagcagaacacagtaagccaaaggtctggataagagatgttcgtagtctcagggtcattcagagtcagatcccttggtcgttcattcaatagccataatagtgtgtacttcttccagtgttccccaccccaagaaaaggcattaccacccactgagccaaatcccaggactcattctgggcccctccatctctttactctcttatatttaactggttaattttttcattattgcactcaacaaaaatttattttttgttcaggcatttcttaatatttatgtctatgtcaatatatgcctacatttacatctagatggatggatagatagatagatgatagaatccttgcccacacctttctgaggtagctattcttttctcactttacagatgagaaaacaaagatccagaaaggttagggagacttccctaaccttataaggttgtgatgaggattaaacaagatcttacatgtcaagtatttaaatgtgctggcacatagagctcaataaatgttagttactattaatattaggttaggccaggcacagtggctcatgcctgtaatcccagcactttggaaggccactgccaatggatcacttgagcccaggagttcaagaccagcctgggcaacacagcaaaacactgtctctacaaaaaattactcaggcatggtagcacctatctgtagttccagctactcaggagtctgaggtgggaggatcacctgagcctgggaggttgaagctgcagtgagaaatgattgcaccactgcactccagcttgggtgacatagtgagaccttgtctccaaaaaagaaaaaaaagaaaaaaataggttagattgcttcctaataagaggagatagggcactatccttaccttcatggtgcttatagtttagcagaagataagaagatatagactcatccaggcaatgacaaaaccgtgttataacagagtaagttcagagcactccaaatatcaagaaaaactttctagagaaagcagagtgccccgctgtgcagcacagagcgtgtatataacatggtaggagctcaaaaacattcactaactgtataaacaaatgaatgaagtacatgacagttgatgcctgaaagttaggtcagatctgatcagtgtttgaaaggggccaagtgacagaatgtcccaggttgatataacagcatgtgaaaggcctagaggcaaaagagtgtgtgccacattggaggaactgaaagtcaggaatggctggaaagtagcgtgctaggagagagaaaagagatgagattgaaatgatgagtaggggcctggtcatgggggtattgtcaatcaaatgtagaagtgacaagtgttaatgacaatgattcagtttttagaaaaccagccaggctgcagtgggggaataaaaggagggaagtaagagtggaaactgagagaccagttaggaggccagtgtagaaggtcgggagtgagagggcctgagcatgagtgactgacattgggaagggcagtggacacgagaggcatttaggaggtagaattgaaaggtctcaaagatgggctggatttggggggattcaggagatggagccaagggtaacaactcagtttgttccttgggaatcttgccaccattctctgagaaaaagaatacacaggagaggagtcagattgcaggagagctgaggacgcataaccaatacattcatttggggacatgtggagtctgaggggcctgtgagacccccaagggaagatttccactaggcaaatgaatacacggtatggggcagggagggaacctagctagagagagagatttggcagttggaacgtaagtaggaatcaaagccatgagattagggagggcatttagaagtgtagagtgagaagagaaaggaggctctgaaaaaattgatgaggaatagttaagggctgacagaggaagagaatgagaaagagcagccagagaagttagagaaagcccaaggagaacacagtatcatgaaggccaagagaggaggatgcctcaagagggagggaactgtcttctgtgacaactgctgctaatgggtcaactaaaatatagagtagtgtaacataactgttacacgcatagtcttcgggtgaagcggctgcagaaaaagcaaccacacacttggggctgcgttactagatatataactcacagactaataagtgacagacccagagctcagcctctctctgtggcctacttggagttcaacgtggtcagtctttcaagtgaggagtgtgctacagttccaggatcatagggtcttctggggtttcccgcgtggcccaagatctggagctgcagggcctggatctgtctctgcagagtctcagcatgtttcagcagcagctagagcaaagcaagctcctatacaagcagcagctggaagagtgtcggcatcaagagaacctcattgagaacctggccaggcaacgggatgccctgcaagctcagcgagaggctttcctggagcaggtgggctcttcctgccgcctgccctgcactgctcctctctcaaaagagggcaacccctctaaggataccaagaggagaggatggagtgactcatcatggaatctcctggggggaggggacaaaggtaataggatggcttggggagtggcctctcatggggactccaaggagatgattcccctaaaaacaccttgaaggaagaacagaacatctcaggagctcacttcagagggtatctctcctcatttagatgagcaaggcatttctggagcctctgagccagctgcaggtggctgactttgaggagatacggagctatcgagcaccaccagaatctgtggtccgggtaactgatgcaatgtgtgacttgttccaccatgaaacaggctgggccagtgccaaacagctgttatgcactgaggatttttatcaggtaggaagggtggagcacaatgaaggaggataggggaggcataaagggacacttggcaaggctaaactgttgggtcaaggtccagagcatccgtggcttccccatcccgttaacatacatccttccaggagctggtgttcttccccaaggagaagataacagactcagagctgataaagttacatctaattctgaaggctccaggtatggacgatgcagccctgcgggcagtgagccgacctgcagccagcctggcagcctggctctgggctgttctgcactatgggctggcgcattgccggggactgcccacggacctgctgctgcagcaagtggaggcaacactcactcgggagcaggcccgcctgggctactaccagtttcaggcccaggagaccctggagcataatttggccctggctaagatggtggaggatgcccaagcttcccacaa

SEQ ID NO: 11692 - DNA, 1475 bp, Homo sapiens
aggaggccattctccaatgtctacgagatgccagctggcatgctggcatgttaagccagccagtggctctgttggtacccagtggtgtggatctcactacacttcatcgcctcctggccctggcaacctcaggcagtttccctggccagtacacagaagcagatttggaccgcattggagaacacctccccagggagaaccttggtgtcaaacagaacatcaagaaggaaatggtgttgcagaggttccaccagcaagtgtgcagccaccttcacctgttcttcctgattggagataaacaggcccacaagcagctgccctccacccttttcctgaggctccttcaactggccactgccagcattgaccgctatgaaccctgggaccaagctgccctggccaaggtggcccagcatcacctggagggtgctcagagtgtgccccttgatgacggctcctggaagtacccagacctccaggcctcaattcccagtgtggccaaagccatggctcttatccacctttcggccacccactaccatgagcacctgtgccctgcattgccactcgtcacccccaagaccttcctagacttcctggacactttcctgatgctgcagcaacagacaatcctgaagattaagaacaaggcccagcgggtccagaatgccttggagaatctgagaatgctgattaaggagcacggtacccatgccaatctgatctttgacttggaacagcagctgaaagactccggcaagagtctcagcatgtttcagcagcagctagagcaaagcaagctcctatacaagcagcagctggaagagtgtcggcatcaagagaacctcattgagaacctggccaggcaacgggatgccctgcaagctcagcgagaggctttcctggagcaggtgggctcttcctgccgcctgccctgcactgctcctctctcaaaagagggcaacccctctaaggataccaagaggagaggatggagtgactcatcatggaatctcctggggggaggggacaaagatgagcaaggcatttctggagcctctgagccagctgcaggtggctgactttgaggagatacggagctatcgagcaccaccagaatctgtggtccgggtaactgatgcaatgtgtgacttgttccaccatgaaacaggctgggccagtgccaaacagctgttatgcactgaggatttttatcaggctccaggtatggacgatgcagccctgcgggcagtgagccgacctgcagccagcctggcagcctggctctgggctgttctgcactatgggctggcgcattgccggggactgcccacggacctgctgctgcagcaagtggaggcaacactcactcgggagcaggcccgcctgggctactaccagtttcaggcccaggagaccctggagcataatttggccctggctaagatggtggaggatgcccaagcttcccacaa

SEQ ID NO: 11693 - DNA, 746 bp, Homo sapiens
aaggggctgaatgtgttggatctgggcctgaacatggaaatactggaagaacagatgctgcatgaaatcttgtgcagagagtatcctgaactcgagacccgctggcaggacctaaagatcagagccctagatacctgcaaggctgtggaggctgctgaggtgcttgggggctcagtctgtgggttgagatgagcattggatggacctgggtaagggggtggagatgaatgtagatgtttggggtctgtgggaaagggccagatccatccaacaaatgagtgtatgcaggagcggctgctgacgatgctgctgttccagaatccgaagcgtcagaagccagccaagtttctgcggaacatagtgagggcccaaggaaagctatgccagctgcgtgctcattgtgaagagttagaagggcagaaactacaggagatggtattgtgggcaccctatcgacctgtggtttggcatggaatggccatggtaaaggccctaagccaactgcagaacctgctgccacttttctgtatgagcccagagaactggctggcagtcactaagcaggctctggacagcatgaagccacgtgagattaatcacggggaggacctggccagccatctactgcaattgagagcacacctgacccgccagctgctgggcagcaccgtgactgcactgggccttacccaagtacccttggtgggtgcattgggcgctttggctctgctgcaagcaacagggaa

SEQ ID NO: 11694 - DNA, 587 bp, Homo sapiens
aaggggctgaatgtgttggatctgggcctgaacatggaaatactggaagaacagatgctgcatgaaatcttgtgcagagagtatcctgaactcgagacccgctggcaggacctaaagatcagagccctagatacctgcaaggctgtggaggctgctgagaatccgaagcgtcagaagccagccaagtttctgcggaacatagtgagggcccaaggaaagctatgccagctgcgtgctcattgtgaagagttagaagggcagaaactacaggagatggtattgtgggcaccctatcgacctgtggtttggcatggaatggccatggtaaaggccctaagccaactgcagaacctgctgccacttttctgtatgagcccagagaactggctggcagtcactaagcaggctctggacagcatgaagccacgtgagattaatcacggggaggacctggccagccatctactgcaattgagagcacacctgacccgccagctgctgggcagcaccgtgactgcactgggccttacccaagtacccttggtgggtgcattgggcgctttggctctgctgcaagcaacagggaa

SEQ ID NO: 11695 - DNA, 7279 bp, Homo sapiens
cccgctgcctctggaagagaatcgatcttttgcgccagccctcactgagggtagaggtaagcaggcataataaatgcaatgcttccggagtatctgaactgcccaacactcagcctcatgtggtctttcccttcataatgaggacactgtatttttgtgatcaggatgtcccagatttcaccagcctatactataggaacaaatttggtcacatttattttttctctttattacaatgattctgaatctacatgactgattggtccatgatcttccacttccctggtctactcagcactacccaaatttatccaatgttcagaaatcctggggaatatttctgttggctctgtttggatcggggacccatctgggtggagtattggaaggaacattttctaggaaaaggaatagagtgtttattccccagaagaagaggctggggattgagtttgtgagaaaaatgtgaccttatttggaaaggggtcctttcagatgtaattaagttaaggactttgaatgagatcaccctgattcttatccggatgggccctaaatcctgcaagtgcccttacaagaggcagaagaaaaggcatagaaaatacagaagagaggctatgtgaagacagaggatgaataggatccctccctggaattttagagtaataattgtgatagccaacatttattgagtgctcactacgtgcacatctaagtgttttctatgtatcatttcatttaatcttcacagtaaccctatgaggtcgccactaatatcaaccccattttgcagataagaaaattgagtcatagagagcttaagcaactttcctaagatgtcttcctgcagaccttccctcatgaaatggagcccttcagtgaattcctcccctaaggagtctgattcctcccctaagaagagctcctctgaatctttctgccccagggaaaggcctcatgagaaatcaaaagagagagagtaaaacggacatgaaagaggaagatgatgagagtgaagagagtaatgaggctgaggaccagacaaaagagcagaaggcagaggaaagaaaaaatgagcaggagaaagagcaagaggaaaatgaagagaaagaggaggagaagacagagagccaggggtcaaagccagcctatgagactcagcttccatcccttccctaccttagtgttctttcaggtgctgacccagagctgggttctcagctccaggaggcagctgcttgtggtgagagctggtccccacccaccctggcccctttttgacttgccccattctgtgaccccacaggcctcccacacctcagtctaacttcagttcccatccttcatcccaggcactaactatattgaagcgtcttgtgggaaccctcctatcagccacagggaagctggtcagagccagacctcgtgcctggggaatggggatcatgggtgctggcattgtgggtagggtgcctttgcctccctctcacaggcctgcctgtgttactgaccaatgtggagctgggtctagggtgcgaagaactgcaatggctgctgcaacgggagcagctgagtccaccccaggtgcagcctggcttctgtctgtatctcagcaccaccctctccctctgtgccatggaaaaaggtgaggcccagagggcaaattgccagcacagttgtgtggacacactaggccctcagcaccagccctaagagggcttcactcaacctggcccagagcaggcacaggtctatagcagggagccatactccctgtctactctaccccctggctctgccaaggggaagaggttaagcatctcccatgttaccccaagtgctaggttgtgaactgctaaaggggctgaatgtgttggatctgggcctgaacatggaaatactggaagaacagatgctgcatgaaatcttgtgcagagagtatcctgaactcgagacccgctggcaggacctaaagatcagagccctagatacctgcaaggctgtggaggctgctgaggtgcttgggggctcagtctgtgggttgagatgagcattggatggacctgggtaagggggtggagatgaatgtagatgtttggggtctgtgggaaagggccagatccatccaacaaatgagtgtatgcaggagcggctgctgacgatgctgctgttccagaatccgaagcgtcagaagccagccaagtttctgcggaacatagtgagggcccaaggaaagctatgccagctgcgtgctcattgtgaagagttagaagggcagaaactacaggagatggtattgtgggcaccctatcgacctgtggtttggcatggaatggccatggtaaaggccctaagccaactgcagaacctgctgccacttttctgtatgagcccagagaactggctggcagtcactaagcaggctctggacagcatgaagccacgtgagattaatcacggggaggacctggccagccatctactgcaattgagagcacacctgacccgccagctgctgggcagcaccgtgactgcactgggccttacccaagtacccttggtgggtgcattgggcgctttggctctgctgcaagcaacagggaaagcatcagagctggaaagactggcactctggcctggactagcagcctctcccagcacagtccacagcaagccagtctcagatgtggctcgaccggcctggcttgggccaaaagcctggcatgaatgtgagatgttagagctgctgcccccatttgttggcctgtgtgcctccctggcaggccactccagtgcttggcaggcttacctgtcactgtcatccacagtgctgggtcctgcacctgggccagggcctgagccactcagcctcctccagaagctgatcctgtggcgcgttctgcgacctgagtgcctggcaggtgccctggcagacttcaccactagcctcctgggtcggcccctggatgaaaacacgtatgctcccaccatgccctttaaacatagtcaggctactcagcccatgctgatcttgttgccaccgcctggccacccctcagccactctgcatcctctgactgtcatccagaaactggctgccaagtatcagcaggtttgaacctagtttcttggccacagagtgaccaggctcctgtgggctggggcatgggggaccccctccaagcattttcatggatctttctgtactacgtagggactttggggatcatggtagcattagtttgggtccctcgggtcaccctaggatcactttgagtcatgctgccatctcttttttggtccccaggggcagaagcaactgcaggtgatagccctgggctctgaagcctgggacccagtctcagttgtggtcagcactctatcccaggctatgtatgaggggcactggctggtgctggacaactgtcatctgatgccccattggccgaaagagctgctacagctcttgctggaactgttaggcagagccaagggtgagtttattgcctagattggcttccaggatcctatcctacacttgggccttagcttgaaatctcaggcctcatggccagtgacctagcaccaaacttgtccacttggccttgtatctgactcctgacacccctagcctcaagtctgattcctagacttctgcctgaccctttatccaaggactgatctcagacccttgtctgactctagtggttgcagacctggaatcagaacagcttttagaccaacctgaaagcaggaatgtaagcactgttcacagagattttcgtctttggcttattgtgcctgcagagtctagtgcttctttgccaggtgaggagcttaaccccctacaggctctcaaattggaagtgggagggcaactgtgctgtgctgactcagcactctccttcctccccagctgtgctgactcagcactccatgcctgttttctggaaccagtccctggagctgggccatgttttgattgacagtgtggagctagcccagcaagtactctacatgcaaccccccacccaggcactacctctgctcctcctccatggcctcctgctacaccggcagctctatggaacaaggctgcaggcacacagggggcgctggtgagggacccccacccattcctgctcagtcaatcactcaacaaacattgagtatcttccatatgctgggatgagtaaaactaattcatctttggaagctccaaagagcaagggcaaggggaagtcaaggaaggcttctccaaagactttgagattttactttgaattgagtcttaaaagcagaggcaaatcaggtagagatgggcctttctgagcagagggacctaaactcagtagaagggaggagacttgagtgtggttgacgtggacatgctgggtgttgaggagggagaagtaaggttcattataaagggcctttaagactagggcaaggtaggccaggtacagtggctcatgcctgtaatctcagcactttgggaggcgaggcggatggatcacgaggtcaggagatcgtgaccatcctggctaacacagtgaaaccccatctgtactaaaaatacaaaaacttagccaggcatggtggcaggtgcctgtagtcccagctacttgggaggctgaggcaggagaatggcgtgaacctgggaggtggagcttgcagtgagccgagattgcaccactgcactccagcctgggtgacagtgcgagactctgtctcaaaaaaaaaagactagggcaaggtgcctgattttatcctgaagacagtgggaagccactgaagggttttaagtagaagaagaaacaatatcctttttgtgtgttggaaggatcactctggatgcaacatggagaatggatcagaggaggcaggactgggggcaagcagagcagctttaggagactctggaagtctccagggaagagattgtggtatgggtagtagggtagtagccatggaagggatagagaataaatatggggtgaagaggaaggaggtgtcgaggatgactctcagatttttgctttagataattgggtggctggcggtacctctcactgaaataggaggtggaacaggttttgtggggggaaatgatgatttcagttgaaagcaagttgtatttgaggtgccaagtggcaatgaacccgaagctcaggagagaggtttgaactgaagacaagacttgacagtcctcagcatatagatgatatgtgaaaccctgctttccgctccccttctctaggagtcaagtgactctaacccaggttcttcagacccaagaccagctgtgggcaagtcttagcaatccccgtgctgccatgcaagagctggctggtgagacccttcctctcccccttggagtcatcagcccccaggagagcctggaagagggtgggggtgggatacaattcacagctttggttttggcggtggtggaaactgaaggtactggaactgagagactctaacctcatcttcagcttcagttttctacgggggtcctctgggggacactgaggacagggaggccctgattagcctcacacaagcctgcctgagccccagtagtgggagctgggtccagccacacacacctcagtctttgctggccacgctcatgcccctcccaggtaagcctcactcaggtatctgttttggggtagggaatagtgcaatgcaatgccaccccccacagaaatgtggacagcagtctcaataaaggtatatgagggggtaatattcatactgttatgggggtgatggcagtaaaggctcagaggaaggcctactctctcgagtctagggtggggagagtccatcttgtccctcacccctcacctctatccccaagagctaagggagctggatgcaatggcagagtgcaaggcccagatgcacctactgccctcaccacctgaaccccggctctgcggactgagtgagggcccccaagcctggctgttgcgacgccagagtcgcgctctcttgagtgcgctgcagcggagttcacccgtgtgggttcctgagtctcgaagaggcgcccagcttgcggaaaggcgactgcggcaacgcctagtgcaagtcaaccggaggctggagtcactgcaggatctgctgacccacgtgattcgccaagacgagtccgacgccccgtggtcagtgctggggccaaatgcacggcggcctctggagggcgtcttagagaccgaggctctagaactgagccagttggtgggcacgctacaacgcgaccttgattgcctgttgcagcagctgaagggcgcacccccgtgcccctcccgccgctgtgctgcggtggcccacgctctctggactggccgcctacccttgccttggcgacctcatgcgccggccggtccgcagccgccctggcactggctgcgacagttgtcgcgccgtgggcaactgttggttcgttacttgggcgtgggcgcggacgcgagcagtgatgtaccagagcgcgtcttccacctgtcagcctttcgccacccgcgccgcctgctgctggcattgcgtggggaagctgccctggaccagaatgtgcccagctcgaatttccctggtagccgaggctcggtctccagtcagctccagtataaacgtctggagatgaacagcaaccctctgcacttcagggtatcttcgcgccgcccctcgttcgcggttccagtcccctcgaagtctctaattacacctcgcagttaccccttcttggtgatcttgcccccggtaaccctgctagcttctccgatctcgcttcaccacgacctcctacccgctaacccccacttcccacctgccacctcccagcttcctagccttgcctgaccagcttctgacgcccccaggtggagaatggtccaaatcccacggttccagagagagggctgctgctgatcgggctacaggtcctacatgcggagtgggacccaatagctggagccttgcaggacagtccttccagccaacccagccctctgcctcccgtcagcatcagcacacaggccccgggcaccagtgacctgccagccccagccgacctgactgtgtactcgtgtcctgtgtacatgggagggccccttggcaccgctaagctgcagagcaggaacatcgtgatgcatctgcctttacccaccaagctcacccccaacacctgtgtccaaaggagggtccatgtgtgcagcccacccctgtcttgagcccgtctaccaaaataaagttgtagtgattccatgaaaga

SEQ ID NO: 11696 - DNA, 4322 bp, Homo sapiens
cccgctgcctctggaagagaatcgatcttttgcgccagccctcactgagggtagagggaaaggcctcatgagaaatcaaaagagagagagtaaaacggacatgaaagaggaagatgatgagagtgaagagagtaatgaggctgaggaccagacaaaagagcagaaggcagaggaaagaaaaaatgagcaggagaaagagcaagaggaaaatgaagagaaagaggaggagaagacagagagccaggggtcaaagccagcctatgagactcagcttccatcccttccctaccttagtgttctttcaggtgctgacccagagctgggttctcagctccaggaggcagctgcttgtggcactaactatattgaagcgtcttgtgggaaccctcctatcagccacagggaagctggtcagagccagacctcgtgcctggggaatggggatcatgggtgctggcattgtgggtagggtgcctttgcctccctctcacaggcctgcctgtgttactgaccaatgtggagctgggtctagggtgcgaagaactgcaatggctgctgcaacgggagcagctgagtccaccccaggtgcagcctggcttctgtctgtatctcagcaccaccctctccctctgtgccatggaaaaagtgctaggttgtgaactgctaaaggggctgaatgtgttggatctgggcctgaacatggaaatactggaagaacagatgctgcatgaaatcttgtgcagagagtatcctgaactcgagacccgctggcaggacctaaagatcagagccctagatacctgcaaggctgtggaggctgctgaggagcggctgctgacgatgctgctgttccagaatccgaagcgtcagaagccagccaagtttctgcggaacatagtgagggcccaaggaaagctatgccagctgcgtgctcattgtgaagagttagaagggcagaaactacaggagatggtattgtgggcaccctatcgacctgtggtttggcatggaatggccatggtaaaggccctaagccaactgcagaacctgctgccacttttctgtatgagcccagagaactggctggcagtcactaagcaggctctggacagcatgaagccacgtgagattaatcacggggaggacctggccagccatctactgcaattgagagcacacctgacccgccagctgctgggcagcaccgtgactgcactgggccttacccaagtacccttggtgggtgcattgggcgctttggctctgctgcaagcaacagggaaagcatcagagctggaaagactggcactctggcctggactagcagcctctcccagcacagtccacagcaagccagtctcagatgtggctcgaccggcctggcttgggccaaaagcctggcatgaatgtgagatgttagagctgctgcccccatttgttggcctgtgtgcctccctggcaggccactccagtgcttggcaggcttacctgtcactgtcatccacagtgctgggtcctgcacctgggccagggcctgagccactcagcctcctccagaagctgatcctgtggcgcgttctgcgacctgagtgcctggcaggtgccctggcagacttcaccactagcctcctgggtcggcccctggatgaaaacacgtatgctcccaccatgccctttaaacatagtcaggctactcagcccatgctgatcttgttgccaccgcctggccacccctcagccactctgcatcctctgactgtcatccagaaactggctgccaagtatcagcaggggcagaagcaactgcaggtgatagccctgggctctgaagcctgggacccagtctcagttgtggtcagcactctatcccaggctatgtatgaggggcactggctggtgctggacaactgtcatctgatgccccattggccgaaagagctgctacagctcttgctggaactgttaggcagagccaaggtggttgcagacctggaatcagaacagcttttagaccaacctgaaagcaggaatgtaagcactgttcacagagattttcgtctttggcttattgtgcctgcagagtctagtgcttctttgccagctgtgctgactcagcactccatgcctgttttctggaaccagtccctggagctgggccatgttttgattgacagtgtggagctagcccagcaagtactctacatgcaaccccccacccaggcactacctctgctcctcctccatggcctcctgctacaccggcagctctatggaacaaggctgcaggcacacagggggcgctggagtcaagtgactctaacccaggttcttcagacccaagaccagctgtgggcaagtcttagcaatccccgtgctgccatgcaagagctggctggtgagacccttcctctcccccttggagtcatcagcccccaggagagcctggaagagggtgggggtgggatacaattcacagctttggttttggcggtggtggaaactgaaggtactggaactgagagactctaacctcatcttcagcttcagttttctacgggggtcctctgggggacactgaggacagggaggccctgattagcctcacacaagcctgcctgagccccagtagtgggagctgggtccagccacacacacctcagtctttgctggccacgctcatgcccctcccaggtaagcctcactcaggtatctgttttggggtagggaatagtgcaatgcaatgccaccccccacagaaatgtggacagcagtctcaataaaggtatatgagggggtaatattcatactgttatgggggtgatggcagtaaaggctcagaggaaggcctactctctcgagtctagggtggggagagtccatcttgtccctcacccctcacctctatccccaagagctaagggagctggatgcaatggcagagtgcaaggcccagatgcacctactgccctcaccacctgaaccccggctctgcggactgagtgagggcccccaagcctggctgttgcgacgccagagtcgcgctctcttgagtgcgctgcagcggagttcacccgtgtgggttcctgagtctcgaagaggcgcccagcttgcggaaaggcgactgcggcaacgcctagtgcaagtcaaccggaggctggagtcactgcaggatctgctgacccacgtgattcgccaagacgagtccgacgccccgtggtcagtgctggggccaaatgcacggcggcctctggagggcgtcttagagaccgaggctctagaactgagccagttggtgggcacgctacaacgcgaccttgattgcctgttgcagcagctgaagggcgcacccccgtgcccctcccgccgctgtgctgcggtggcccacgctctctggactggccgcctacccttgccttggcgacctcatgcgccggccggtccgcagccgccctggcactggctgcgacagttgtcgcgccgtgggcaactgttggttcgttacttgggcgtgggcgcggacgcgagcagtgatgtaccagagcgcgtcttccacctgtcagcctttcgccacccgcgccgcctgctgctggcattgcgtggggaagctgccctggaccagaatgtgcccagctcgaatttccctggtagccgaggctcggtctccagtcagctccagtataaacgtctggagatgaacagcaaccctctgcacttcagggtatcttcgcgccgcccctcgttcgcggttccagtcccctcgaagtctctaattacacctcgcagttaccccttcttggtgatcttgcccccggtaaccctgctagcttctccgatctcgcttcaccacgacctcctacccgctaacccccacttcccacctgccacctcccagcttcctagccttgcctgaccagcttctgacgcccccaggtggagaatggtccaaatcccacggttccagagagagggctgctgctgatcgggctacaggtcctacatgcggagtgggacccaatagctggagccttgcaggacagtccttccagccaacccagccctctgcctcccgtcagcatcagcacacaggccccgggcaccagtgacctgccagccccagccgacctgactgtgtactcgtgtcctgtgtacatgggagggccccttggcaccgctaagctgcagagcaggaacatcgtgatgcatctgcctttacccaccaagctcacccccaacacctgtgtccaaaggagggtccatgtgtgcagcccacccctgtcttgagcccgtctaccaaaataaagttgtagtgattccatgaaaga

SEQ ID NO: 11697 - DNA, 5086 bp, Homo sapiens
attcccagtgtggccaaagccatggctcttatccacctttcggccacccactaccatgagcacctgtgccctgcattgccactcgtcacccccaagaccttcctagacttcctggacactttcctgatgctgcagcaacagacaatcctgaagattaagaacaaggcccagcggtgagtgtcccgtcccctgcagtgtacctccttctgctcctttgggtttcctcaccagcacattgtatctccagggtccagaatgccttggagaatctgagaatgctgattaaggagcacggtacccatgccaatctgatctttgacttggaacagcagctgaaagactccggcaaggtaaggagatgattttgaggcttccatggtggtgtcaaagcaggagcccaaaggggacttgaaaggaagcaaccagaatgaaccttaattcttgtccccctaagcttcccctttccctaggaaatctctctgatctccgctgcctcctcctttacagcttaggttcaaaagtttcccatgatacagctaagaccagattgattcttcataacaggtgaaacccaagcatctgcttctggctgcccctagtaccatgatcatgtgaagttcagtatgctgccaagatctctgtagattcccatgggggttggggcaggcattacatctcagtcaccactcactcacctcttagagttatcctctttttccataacactttgtccccataccctttcttccacaaaagcaacaaacaaaactgttgtatacagtgaggacatgtagatgggtgatggcagcagggagaaatttgtattatggcatagaaccagaagtaaatttataatggtatactagacaagagtgtcctgaattgtcttactcaccctcctctaccaggcattttccagtgaccaacttttcctttcctctctcgtctctctaacacctgctctacaatgtttttgagccgtcccatttttcctttagcgctcccttctagttgaaacctcaaaaccttttgctgtcatacagaacaatcttattctttgaataaacaaacttcttatatctggctaaaattggtgatgatagggcttatcacaccttctaaagccaaatactcctagttaaaggtgtcttcccaaactaaagagcagttttgtttttaataagaagaattctaaaatagcacctttttttcctactacacaagatgttgataaatattctggtataacttcagagcagtgaactagtgcccatctcacactcagataatctttctactagggtttcaggtcttaagctcctaatacctagccagctcttctgataagtgcctttaggactatcatccagtgccacacaactccagagacatggcatatgtcgtgtctactaatatggttttcactgtgttttacataaatggtatcccctggagttttaaaggtactggtgccctcctactattcaccacctaggatgaacagcttagattagacctcaagactcagttaagttgcaaagaaagaaaagaaagtcagagagcaacagaaatcccctttcccagttttttgccctacattttcccaagatgattaataccaggattgttgatctggtttaggggtcctagtattccttgatctgtgagtcagttacaccagagcagaacacagtaagccaaaggtctggataagagatgttcgtagtctcagggtcattcagagtcagatcccttggtcgttcattcaatagccataatagtgtgtacttcttccagtgttccccaccccaagaaaaggcattaccacccactgagccaaatcccaggactcattctgggcccctccatctctttactctcttatatttaactggttaattttttcattattgcactcaacaaaaatttattttttgttcaggcatttcttaatatttatgtctatgtcaatatatgcctacatttacatctagatggatggatagatagatagatgatagaatccttgcccacacctttctgaggtagctattcttttctcactttacagatgagaaaacaaagatccagaaaggttagggagacttccctaaccttataaggttgtgatgaggattaaacaagatcttacatgtcaagtatttaaatgtgctggcacatagagctcaataaatgttagttactattaatattaggttaggccaggcacagtggctcatgcctgtaatcccagcactttggaaggccactgccaatggatcacttgagcccaggagttcaagaccagcctgggcaacacagcaaaacactgtctctacaaaaaattactcaggcatggtagcacctatctgtagttccagctactcaggagtctgaggtgggaggatcacctgagcctgggaggttgaagctgcagtgagaaatgattgcaccactgcactccagcttgggtgacatagtgagaccttgtctccaaaaaagaaaaaaaagaaaaaaataggttagattgcttcctaataagaggagatagggcactatccttaccttcatggtgcttatagtttagcagaagataagaagatatagactcatccaggcaatgacaaaaccgtgttataacagagtaagttcagagcactccaaatatcaagaaaaactttctagagaaagcagagtgccccgctgtgcagcacagagcgtgtatataacatggtaggagctcaaaaacattcactaactgtataaacaaatgaatgaagtacatgacagttgatgcctgaaagttaggtcagatctgatcagtgtttgaaaggggccaagtgacagaatgtcccaggttgatataacagcatgtgaaaggcctagaggcaaaagagtgtgtgccacattggaggaactgaaagtcaggaatggctggaaagtagcgtgctaggagagagaaaagagatgagattgaaatgatgagtaggggcctggtcatgggggtattgtcaatcaaatgtagaagtgacaagtgttaatgacaatgattcagtttttagaaaaccagccaggctgcagtgggggaataaaaggagggaagtaagagtggaaactgagagaccagttaggaggccagtgtagaaggtcgggagtgagagggcctgagcatgagtgactgacattgggaagggcagtggacacgagaggcatttaggaggtagaattgaaaggtctcaaagatgggctggatttggggggattcaggagatggagccaagggtaacaactcagtttgttccttgggaatcttgccaccattctctgagaaaaagaatacacaggagaggagtcagattgcaggagagctgaggacgcataaccaatacattcatttggggacatgtggagtctgaggggcctgtgagacccccaagggaagatttccactaggcaaatgaatacacggtatggggcagggagggaacctagctagagagagagatttggcagttggaacgtaagtaggaatcaaagccatgagattagggagggcatttagaagtgtagagtgagaagagaaaggaggctctgaaaaaattgatgaggaatagttaagggctgacagaggaagagaatgagaaagagcagccagagaagttagagaaagcccaaggagaacacagtatcatgaaggccaagagaggaggatgcctcaagagggagggaactgtcttctgtgacaactgctgctaatgggtcaactaaaatatagagtagtgtaacataactgttacacgcatagtcttcgggtgaagcggctgcagaaaaagcaaccacacacttggggctgcgttactagatatataactcacagactaataagtgacagacccagagctcagcctctctctgtggcctacttggagttcaacgtggtcagtctttcaagtgaggagtgtgctacagttccaggatcatagggtcttctggggtttcccgcgtggcccaagatctggagctgcagggcctggatctgtctctgcagagtctcagcatgtttcagcagcagctagagcaaagcaagctcctatacaagcagcagctggaagagtgtcggcatcaagagaacctcattgagaacctggccaggcaacgggatgccctgcaagctcagcgagaggctttcctggagcaggtgggctcttcctgccgcctgccctgcactgctcctctctcaaaagagggcaacccctctaaggataccaagaggagaggatggagtgactcatcatggaatctcctggggggaggggacaaaggtaataggatggcttggggagtggcctctcatggggactccaaggagatgattcccctaaaaacaccttgaaggaagaacagaacatctcaggagctcacttcagagggtatctctcctcatttagatgagcaaggcatttctggagcctctgagccagctgcaggtggctgactttgaggagatacggagctatcgagcaccaccagaatctgtggtccgggtaactgatgcaatgtgtgacttgttccaccatgaaacaggctgggccagtgccaaacagctgttatgcactgaggatttttatcaggtaggaagggtggagcacaatgaaggaggataggggaggcataaagggacacttggcaaggctaaactgttgggtcaaggtccagagcatccgtggcttccccatcccgttaacatacatccttccaggagctggtgttcttccccaaggagaagataacagactcagagctgataaagttacatctaattctgaaggctccaggtatggacgatgcagccctgcgggcagtgagccgacctgcagccagcctggcagcctggctctgggctgttctgcactatgggctggcgcattgccggggactgcccacggacctgctgctgcagcaagtggaggcaacactcactcgggagcaggcccgcctgggctactaccagtttcaggcccaggagaccctggagcataatttggccctggctaagatggtggaggatgcccaagcttcccacaac

SEQ ID NO: 11698 - DNA, 1064 bp, Homo sapiens
attcccagtgtggccaaagccatggctcttatccacctttcggccacccactaccatgagcacctgtgccctgcattgccactcgtcacccccaagaccttcctagacttcctggacactttcctgatgctgcagcaacagacaatcctgaagattaagaacaaggcccagcgggtccagaatgccttggagaatctgagaatgctgattaaggagcacggtacccatgccaatctgatctttgacttggaacagcagctgaaagactccggcaagagtctcagcatgtttcagcagcagctagagcaaagcaagctcctatacaagcagcagctggaagagtgtcggcatcaagagaacctcattgagaacctggccaggcaacgggatgccctgcaagctcagcgagaggctttcctggagcagatgagcaaggcatttctggagcctctgagccagctgcaggtggctgactttgaggagatacggagctatcgagcaccaccagaatctgtggtccgggtaactgatgcaatgtgtgacttgttccaccatgaaacaggctgggccagtgccaaacagctgttatgcactgaggatttttatcaggtaggaagggtggagcacaatgaaggaggataggggaggcataaagggacacttggcaaggctaaactgttgggtcaaggtccagagcatccgtggcttccccatcccgttaacatacatccttccaggagctggtgttcttccccaaggagaagataacagactcagagctgataaagttacatctaattctgaaggctccaggtatggacgatgcagccctgcgggcagtgagccgacctgcagccagcctggcagcctggctctgggctgttctgcactatgggctggcgcattgccggggactgcccacggacctgctgctgcagcaagtggaggcaacactcactcgggagcaggcccgcctgggctactaccagtttcaggcccaggagaccctggagcataatttggccctggctaagatggtggaggatgcccaagcttcccacaac

SEQ ID NO: 11699 - DNA, 3110 bp, Homo sapiens
gtccctggagctgggccatgttttgattgacagtgtggagctagcccagcaagtactctacatgcaaccccccacccaggcactacctctgctcctcctccatggcctcctgctacaccggcagctctatggaacaaggctgcaggcacacagggggcgctggtgagggacccccacccattcctgctcagtcaatcactcaacaaacattgagtatcttccatatgctgggatgagtaaaactaattcatctttggaagctccaaagagcaagggcaaggggaagtcaaggaaggcttctccaaagactttgagattttactttgaattgagtcttaaaagcagaggcaaatcaggtagagatgggcctttctgagcagagggacctaaactcagtagaagggaggagacttgagtgtggttgacgtggacatgctgggtgttgaggagggagaagtaaggttcattataaagggcctttaagactagggcaaggtaggccaggtacagtggctcatgcctgtaatctcagcactttgggaggcgaggcggatggatcacgaggtcaggagatcgtgaccatcctggctaacacagtgaaaccccatctgtactaaaaatacaaaaacttagccaggcatggtggcaggtgcctgtagtcccagctacttgggaggctgaggcaggagaatggcgtgaacctgggaggtggagcttgcagtgagccgagattgcaccactgcactccagcctgggtgacagtgcgagactctgtctcaaaaaaaaaagactagggcaaggtgcctgattttatcctgaagacagtgggaagccactgaagggttttaagtagaagaagaaacaatatcctttttgtgtgttggaaggatcactctggatgcaacatggagaatggatcagaggaggcaggactgggggcaagcagagcagctttaggagactctggaagtctccagggaagagattgtggtatgggtagtagggtagtagccatggaagggatagagaataaatatggggtgaagaggaaggaggtgtcgaggatgactctcagatttttgctttagataattgggtggctggcggtacctctcactgaaataggaggtggaacaggttttgtggggggaaatgatgatttcagttgaaagcaagttgtatttgaggtgccaagtggcaatgaacccgaagctcaggagagaggtttgaactgaagacaagacttgacagtcctcagcatatagatgatatgtgaaaccctgctttccgctccccttctctaggagtcaagtgactctaacccaggttcttcagacccaagaccagctgtgggcaagtcttagcaatccccgtgctgccatgcaagagctggctggtgagacccttcctctcccccttggagtcatcagcccccaggagagcctggaagagggtgggggtgggatacaattcacagctttggttttggcggtggtggaaactgaaggtactggaactgagagactctaacctcatcttcagcttcagttttctacgggggtcctctgggggacactgaggacagggaggccctgattagcctcacacaagcctgcctgagccccagtagtgggagctgggtccagccacacacacctcagtctttgctggccacgctcatgcccctcccaggtaagcctcactcaggtatctgttttggggtagggaatagtgcaatgcaatgccaccccccacagaaatgtggacagcagtctcaataaaggtatatgagggggtaatattcatactgttatgggggtgatggcagtaaaggctcagaggaaggcctactctctcgagtctagggtggggagagtccatcttgtccctcacccctcacctctatccccaagagctaagggagctggatgcaatggcagagtgcaaggcccagatgcacctactgccctcaccacctgaaccccggctctgcggactgagtgagggcccccaagcctggctgttgcgacgccagagtcgcgctctcttgagtgcgctgcagcggagttcacccgtgtgggttcctgagtctcgaagaggcgcccagcttgcggaaaggcgactgcggcaacgcctagtgcaagtcaaccggaggctggagtcactgcaggatctgctgacccacgtgattcgccaagacgagtccgacgccccgtggtcagtgctggggccaaatgcacggcggcctctggagggcgtcttagagaccgaggctctagaactgagccagttggtgggcacgctacaacgcgaccttgattgcctgttgcagcagctgaagggcgcacccccgtgcccctcccgccgctgtgctgcggtggcccacgctctctggactggccgcctacccttgccttggcgacctcatgcgccggccggtccgcagccgccctggcactggctgcgacagttgtcgcgccgtgggcaactgttggttcgttacttgggcgtgggcgcggacgcgagcagtgatgtaccagagcgcgtcttccacctgtcagcctttcgccacccgcgccgcctgctgctggcattgcgtggggaagctgccctggaccagaatgtgcccagctcgaatttccctggtagccgaggctcggtctccagtcagctccagtataaacgtctggagatgaacagcaaccctctgcacttcagggtatcttcgcgccgcccctcgttcgcggttccagtcccctcgaagtctctaattacacctcgcagttaccccttcttggtgatcttgcccccggtaaccctgctagcttctccgatctcgcttcaccacgacctcctacccgctaacccccacttcccacctgccacctcccagcttcctagccttgcctgaccagcttctgacgcccccaggtggagaatggtccaaatcccacggttccagagagagggctgctgctgatcgggctacaggtcctacatgcggagtgggacccaatagctggagccttgcaggacagtccttccagccaacccagccctctgcctcccgtcagcatcagcacacaggccccgggcaccagtgacctgcc

SEQ ID NO: 11700 - DNA, 433 bp, Homo sapiens
gtccctggagctgggccatgttttgattgacagtgtggagctagcccagcaagtactctacatgcaaccccccacccaggcactacctctgctcctcctccatggcctcctgctacaccggcagctctatggaacaaggctgcaggcacacagggggcgctggagtcaagtgactctaacccaggttcttcagacccaagaccagctgtgggcaagtcttagcaatccccgtgctgccatgcaagagctggctggtggagaatggtccaaatcccacggttccagagagagggctgctgctgatcgggctacaggtcctacatgcggagtgggacccaatagctggagccttgcaggacagtccttccagccaacccagccctctgcctcccgtcagcatcagcacacaggccccgggcaccagtgacctgcc

SEQ ID NO: 11701 - DNA, 7946 bp, Homo sapiens
aaggctgcactgctcacgcctatgcgtgcctggactacacagctccaggtaaccatccccctcccagatgtctcccccaaagttccttttatgccgttcgcctgctcctccctgtgccctcactgcctccctctgtccctctctgcactccttgccgtactttcctccacaccccaccttgccctccctctgccatatctctgcctgcaccctcctcactggcctacacagcctctggtcttcccttccactccagaagctgaagggacgctgcatgactgtgtttggagataccctcctatgttcagctgccatcatctacctgggtcccttcccaccattgcggcgccaagagctactggacgagtggttagctctgtgtaggggctttcaggaggctctgggcccagatgatgtggcacaggcactgaagcggaagcaaaaatctgtcagcataccaccaaagaaccccctgctggctacacactctcccttcagtattctgtccttgctgagctctgaatcggagcagtaccagtgggatggaaacctgaagccacaggcaaagtcggcccacctggcaggcttgcttctgcgaagccccacacactacagtagttgccgttggcctctgctgcttgaccccagcaacgaggccctcatctggttggacccgctgcctctggaagagaatcgatcttttgcgccagccctcactgagggtagaggtaagcaggcataataaatgcaatgcttccggagtatctgaactgcccaacactcagcctcatgtggtctttcccttcataatgaggacactgtatttttgtgatcaggatgtcccagatttcaccagcctatactataggaacaaatttggtcacatttattttttctctttattacaatgattctgaatctacatgactgattggtccatgatcttccacttccctggtctactcagcactacccaaatttatccaatgttcagaaatcctggggaatatttctgttggctctgtttggatcggggacccatctgggtggagtattggaaggaacattttctaggaaaaggaatagagtgtttattccccagaagaagaggctggggattgagtttgtgagaaaaatgtgaccttatttggaaaggggtcctttcagatgtaattaagttaaggactttgaatgagatcaccctgattcttatccggatgggccctaaatcctgcaagtgcccttacaagaggcagaagaaaaggcatagaaaatacagaagagaggctatgtgaagacagaggatgaataggatccctccctggaattttagagtaataattgtgatagccaacatttattgagtgctcactacgtgcacatctaagtgttttctatgtatcatttcatttaatcttcacagtaaccctatgaggtcgccactaatatcaaccccattttgcagataagaaaattgagtcatagagagcttaagcaactttcctaagatgtcttcctgcagaccttccctcatgaaatggagcccttcagtgaattcctcccctaaggagtctgattcctcccctaagaagagctcctctgaatctttctgccccagggaaaggcctcatgagaaatcaaaagagagagagtaaaacggacatgaaagaggaagatgatgagagtgaagagagtaatgaggctgaggaccagacaaaagagcagaaggcagaggaaagaaaaaatgagcaggagaaagagcaagaggaaaatgaagagaaagaggaggagaagacagagagccaggggtcaaagccagcctatgagactcagcttccatcccttccctaccttagtgttctttcaggtgctgacccagagctgggttctcagctccaggaggcagctgcttgtggtgagagctggtccccacccaccctggcccctttttgacttgccccattctgtgaccccacaggcctcccacacctcagtctaacttcagttcccatccttcatcccaggcactaactatattgaagcgtcttgtgggaaccctcctatcagccacagggaagctggtcagagccagacctcgtgcctggggaatggggatcatgggtgctggcattgtgggtagggtgcctttgcctccctctcacaggcctgcctgtgttactgaccaatgtggagctgggtctagggtgcgaagaactgcaatggctgctgcaacgggagcagctgagtccaccccaggtgcagcctggcttctgtctgtatctcagcaccaccctctccctctgtgccatggaaaaaggtgaggcccagagggcaaattgccagcacagttgtgtggacacactaggccctcagcaccagccctaagagggcttcactcaacctggcccagagcaggcacaggtctatagcagggagccatactccctgtctactctaccccctggctctgccaaggggaagaggttaagcatctcccatgttaccccaagtgctaggttgtgaactgctaaaggggctgaatgtgttggatctgggcctgaacatggaaatactggaagaacagatgctgcatgaaatcttgtgcagagagtatcctgaactcgagacccgctggcaggacctaaagatcagagccctagatacctgcaaggctgtggaggctgctgaggtgcttgggggctcagtctgtgggttgagatgagcattggatggacctgggtaagggggtggagatgaatgtagatgtttggggtctgtgggaaagggccagatccatccaacaaatgagtgtatgcaggagcggctgctgacgatgctgctgttccagaatccgaagcgtcagaagccagccaagtttctgcggaacatagtgagggcccaaggaaagctatgccagctgcgtgctcattgtgaagagttagaagggcagaaactacaggagatggtattgtgggcaccctatcgacctgtggtttggcatggaatggccatggtaaaggccctaagccaactgcagaacctgctgccacttttctgtatgagcccagagaactggctggcagtcactaagcaggctctggacagcatgaagccacgtgagattaatcacggggaggacctggccagccatctactgcaattgagagcacacctgacccgccagctgctgggcagcaccgtgactgcactgggccttacccaagtacccttggtgggtgcattgggcgctttggctctgctgcaagcaacagggaaagcatcagagctggaaagactggcactctggcctggactagcagcctctcccagcacagtccacagcaagccagtctcagatgtggctcgaccggcctggcttgggccaaaagcctggcatgaatgtgagatgttagagctgctgcccccatttgttggcctgtgtgcctccctggcaggccactccagtgcttggcaggcttacctgtcactgtcatccacagtgctgggtcctgcacctgggccagggcctgagccactcagcctcctccagaagctgatcctgtggcgcgttctgcgacctgagtgcctggcaggtgccctggcagacttcaccactagcctcctgggtcggcccctggatgaaaacacgtatgctcccaccatgccctttaaacatagtcaggctactcagcccatgctgatcttgttgccaccgcctggccacccctcagccactctgcatcctctgactgtcatccagaaactggctgccaagtatcagcaggtttgaacctagtttcttggccacagagtgaccaggctcctgtgggctggggcatgggggaccccctccaagcattttcatggatctttctgtactacgtagggactttggggatcatggtagcattagtttgggtccctcgggtcaccctaggatcactttgagtcatgctgccatctcttttttggtccccaggggcagaagcaactgcaggtgatagccctgggctctgaagcctgggacccagtctcagttgtggtcagcactctatcccaggctatgtatgaggggcactggctggtgctggacaactgtcatctgatgccccattggccgaaagagctgctacagctcttgctggaactgttaggcagagccaagggtgagtttattgcctagattggcttccaggatcctatcctacacttgggccttagcttgaaatctcaggcctcatggccagtgacctagcaccaaacttgtccacttggccttgtatctgactcctgacacccctagcctcaagtctgattcctagacttctgcctgaccctttatccaaggactgatctcagacccttgtctgactctagtggttgcagacctggaatcagaacagcttttagaccaacctgaaagcaggaatgtaagcactgttcacagagattttcgtctttggcttattgtgcctgcagagtctagtgcttctttgccaggtgaggagcttaaccccctacaggctctcaaattggaagtgggagggcaactgtgctgtgctgactcagcactctccttcctccccagctgtgctgactcagcactccatgcctgttttctggaaccagtccctggagctgggccatgttttgattgacagtgtggagctagcccagcaagtactctacatgcaaccccccacccaggcactacctctgctcctcctccatggcctcctgctacaccggcagctctatggaacaaggctgcaggcacacagggggcgctggtgagggacccccacccattcctgctcagtcaatcactcaacaaacattgagtatcttccatatgctgggatgagtaaaactaattcatctttggaagctccaaagagcaagggcaaggggaagtcaaggaaggcttctccaaagactttgagattttactttgaattgagtcttaaaagcagaggcaaatcaggtagagatgggcctttctgagcagagggacctaaactcagtagaagggaggagacttgagtgtggttgacgtggacatgctgggtgttgaggagggagaagtaaggttcattataaagggcctttaagactagggcaaggtaggccaggtacagtggctcatgcctgtaatctcagcactttgggaggcgaggcggatggatcacgaggtcaggagatcgtgaccatcctggctaacacagtgaaaccccatctgtactaaaaatacaaaaacttagccaggcatggtggcaggtgcctgtagtcccagctacttgggaggctgaggcaggagaatggcgtgaacctgggaggtggagcttgcagtgagccgagattgcaccactgcactccagcctgggtgacagtgcgagactctgtctcaaaaaaaaaagactagggcaaggtgcctgattttatcctgaagacagtgggaagccactgaagggttttaagtagaagaagaaacaatatcctttttgtgtgttggaaggatcactctggatgcaacatggagaatggatcagaggaggcaggactgggggcaagcagagcagctttaggagactctggaagtctccagggaagagattgtggtatgggtagtagggtagtagccatggaagggatagagaataaatatggggtgaagaggaaggaggtgtcgaggatgactctcagatttttgctttagataattgggtggctggcggtacctctcactgaaataggaggtggaacaggttttgtggggggaaatgatgatttcagttgaaagcaagttgtatttgaggtgccaagtggcaatgaacccgaagctcaggagagaggtttgaactgaagacaagacttgacagtcctcagcatatagatgatatgtgaaaccctgctttccgctccccttctctaggagtcaagtgactctaacccaggttcttcagacccaagaccagctgtgggcaagtcttagcaatccccgtgctgccatgcaagagctggctggtgagacccttcctctcccccttggagtcatcagcccccaggagagcctggaagagggtgggggtgggatacaattcacagctttggttttggcggtggtggaaactgaaggtactggaactgagagactctaacctcatcttcagcttcagttttctacgggggtcctctgggggacactgaggacagggaggccctgattagcctcacacaagcctgcctgagccccagtagtgggagctgggtccagccacacacacctcagtctttgctggccacgctcatgcccctcccaggtaagcctcactcaggtatctgttttggggtagggaatagtgcaatgcaatgccaccccccacagaaatgtggacagcagtctcaataaaggtatatgagggggtaatattcatactgttatgggggtgatggcagtaaaggctcagaggaaggcctactctctcgagtctagggtggggagagtccatcttgtccctcacccctcacctctatccccaagagctaagggagctggatgcaatggcagagtgcaaggcccagatgcacctactgccctcaccacctgaaccccggctctgcggactgagtgagggcccccaagcctggctgttgcgacgccagagtcgcgctctcttgagtgcgctgcagcggagttcacccgtgtgggttcctgagtctcgaagaggcgcccagcttgcggaaaggcgactgcggcaacgcctagtgcaagtcaaccggaggctggagtcactgcaggatctgctgacccacgtgattcgccaagacgagtccgacgccccgtggtcagtgctggggccaaatgcacggcggcctctggagggcgtcttagagaccgaggctctagaactgagccagttggtgggcacgctacaacgcgaccttgattgcctgttgcagcagctgaagggcgcacccccgtgcccctcccgccgctgtgctgcggtggcccacgctctctggactggccgcctacccttgccttggcgacctcatgcgccggccggtccgcagccgccctggcactggctgcgacagttgtcgcgccgtgggcaactgttggttcgttacttgggcgtgggcgcggacgcgagcagtgatgtaccagagcgcgtcttccacctgtcagcctttcgccacccgcgccgcctgctgctggcattgcgtggggaagctgccctggaccagaatgtgcccagctcgaatttccctggtagccgaggctcggtctccagtcagctccagtataaacgtctggagatgaacagcaaccctctgcacttcagggtatcttcgcgccgcccctcgttcgcggttccagtcccctcgaagtctctaattacacctcgcagttaccccttcttggtgatcttgcccccggtaaccctgctagcttctccgatctcgcttcaccacgacctcctacccgctaacccccacttcccacctgccacctcccagcttcctagccttgcctgaccagcttctgacgcccccaggtggagaatggtccaaatcccacggttccagagagagggctgctgctgatcgggctacaggtcctacatgcggagtgggacccaatagctggagccttgcaggacagtccttccagccaacccagccctctgcctcccgtcagcatcagcacacaggccccgggcaccagtgacctgccagccccagccgacctgactgtgtactcgtgtcctgtgtacatgggagggccccttggcaccgctaagctgcagagcaggaacatcgtgatgcatctgcctttacccaccaagctcacccccaacacctgtgtccaaaggagggtccatgtgtgcagcccacccctgtcttgagcccgtctaccaaaataaagttgtagtgattccatg

SEQ ID NO: 11702 - DNA, 4504 bp, Homo sapiens
aaggctgcactgctcacgcctatgcgtgcctggactacacagctccagaagctgaagggacgctgcatgactgtgtttggagataccctcctatgttcagctgccatcatctacctgggtcccttcccaccattgcggcgccaagagctactggacgagtggttagctctgtgtaggggctttcaggaggctctgggcccagatgatgtggcacaggcactgaagcggaagcaaaaatctgtcagcataccaccaaagaaccccctgctggctacacactctcccttcagtattctgtccttgctgagctctgaatcggagcagtaccagtgggatggaaacctgaagccacaggcaaagtcggcccacctggcaggcttgcttctgcgaagccccacacactacagtagttgccgttggcctctgctgcttgaccccagcaacgaggccctcatctggttggacccgctgcctctggaagagaatcgatcttttgcgccagccctcactgagggtagagggaaaggcctcatgagaaatcaaaagagagagagtaaaacggacatgaaagaggaagatgatgagagtgaagagagtaatgaggctgaggaccagacaaaagagcagaaggcagaggaaagaaaaaatgagcaggagaaagagcaagaggaaaatgaagagaaagaggaggagaagacagagagccaggggtcaaagccagcctatgagactcagcttccatcccttccctaccttagtgttctttcaggtgctgacccagagctgggttctcagctccaggaggcagctgcttgtggtgagagctggtccccacccaccctggcccctttttgacttgccccattctgtgaccccacaggcctcccacacctcagtctaacttcagttcccatccttcatcccaggcactaactatattgaagcgtcttgtgggaaccctcctatcagccacagggaagctggtcagagccagacctcgtgcctggggaatggggatcatgggtgctggcattgtgggtagggtgcctttgcctccctctcacaggcctgcctgtgttactgaccaatgtggagctgggtctagggtgcgaagaactgcaatggctgctgcaacgggagcagctgagtccaccccaggtgcagcctggcttctgtctgtatctcagcaccaccctctccctctgtgccatggaaaaaggtgaggcccagagggcaaattgccagcacagttgtgtggacacactaggccctcagcaccagccctaagagggcttcactcaacctggcccagagcaggcacaggtctatagcagggagccatactccctgtctactctaccccctggctctgccaaggggaagaggttaagcatctcccatgttaccccaagtgctaggttgtgaactgctaaaggggctgaatgtgttggatctgggcctgaacatggaaatactggaagaacagatgctgcatgaaatcttgtgcagagagtatcctgaactcgagacccgctggcaggacctaaagatcagagccctagatacctgcaaggctgtggaggctgctgaggagcggctgctgacgatgctgctgttccagaatccgaagcgtcagaagccagccaagtttctgcggaacatagtgagggcccaaggaaagctatgccagctgcgtgctcattgtgaagagttagaagggcagaaactacaggagatggtattgtgggcaccctatcgacctgtggtttggcatggaatggccatggtaaaggccctaagccaactgcagaacctgctgccacttttctgtatgagcccagagaactggctggcagtcactaagcaggctctggacagcatgaagccacgtgagattaatcacggggaggacctggccagccatctactgcaattgagagcacacctgacccgccagctgctgggcagcaccgtgactgcactgggccttacccaagtacccttggtgggtgcattgggcgctttggctctgctgcaagcaacagggaaagcatcagagctggaaagactggcactctggcctggactagcagcctctcccagcacagtccacagcaagccagtctcagatgtggctcgaccggcctggcttgggccaaaagcctggcatgaatgtgagatgttagagctgctgcccccatttgttggcctgtgtgcctccctggcaggccactccagtgcttggcaggcttacctgtcactgtcatccacagtgctgggtcctgcacctgggccagggcctgagccactcagcctcctccagaagctgatcctgtggcgcgttctgcgacctgagtgcctggcaggtgccctggcagacttcaccactagcctcctgggtcggcccctggatgaaaacacgtatgctcccaccatgccctttaaacatagtcaggctactcagcccatgctgatcttgttgccaccgcctggccacccctcagccactctgcatcctctgactgtcatccagaaactggctgccaagtatcagcaggggcagaagcaactgcaggtgatagccctgggctctgaagcctgggacccagtctcagttgtggtcagcactctatcccaggctatgtatgaggggcactggctggtgctggacaactgtcatctgatgccccattggccgaaagagctgctacagctcttgctggaactgttaggcagagccaaggtggttgcagacctggaatcagaacagcttttagaccaacctgaaagcaggaatgtaagcactgttcacagagattttcgtctttggcttattgtgcctgcagagtctagtgcttctttgccagctgtgctgactcagcactccatgcctgttttctggaaccagtccctggagctgggccatgttttgattgacagtgtggagctagcccagcaagtactctacatgcaaccccccacccaggcactacctctgctcctcctccatggcctcctgctacaccggcagctctatggaacaaggctgcaggcacacagggggcgctggagtcaagtgactctaacccaggttcttcagacccaagaccagctgtgggcaagtcttagcaatccccgtgctgccatgcaagagctggctgcttcagttttctacgggggtcctctgggggacactgaggacagggaggccctgattagcctcacacaagcctgcctgagccccagtagtgggagctgggtccagccacacacacctcagtctttgctggccacgctcatgcccctcccagagctaagggagctggatgcaatggcagagtgcaaggcccagatgcacctactgccctcaccacctgaaccccggctctgcggactgagtgagggcccccaagcctggctgttgcgacgccagagtcgcgctctcttgagtgcgctgcagcggagttcacccgtgtgggttcctgagtctcgaagaggcgcccagcttgcggaaaggcgactgcggcaacgcctagtgcaagtcaaccggaggctggagtcactgcaggatctgctgacccacgtgattcgccaagacgagtccgacgccccgtggtcagtgctggggccaaatgcacggcggcctctggagggcgtcttagagaccgaggctctagaactgagccagttggtgggcacgctacaacgcgaccttgattgcctgttgcagcagctgaagggcgcacccccgtgcccctcccgccgctgtgctgcggtggcccacgctctctggactggccgcctacccttgccttggcgacctcatgcgccggccggtccgcagccgccctggcactggctgcgacagttgtcgcgccgtgggcaactgttggttcgttacttgggcgtgggcgcggacgcgagcagtgatgtaccagagcgcgtcttccacctgtcagcctttcgccacccgcgccgcctgctgctggcattgcgtggggaagctgccctggaccagaatgtgcccagctcgaatttccctggtagccgaggctcggtctccagtcagctccagtataaacgtctggagatgaacagcaaccctctgcacttcagggtggagaatggtccaaatcccacggttccagagagagggctgctgctgatcgggctacaggtcctacatgcggagtgggacccaatagctggagccttgcaggacagtccttccagccaacccagccctctgcctcccgtcagcatcagcacacaggccccgggcaccagtgacctgccagccccagccgacctgactgtgtactcgtgtcctgtgtacatgggagggccccttggcaccgctaagctgcagagcaggaacatcgtgatgcatctgcctttacccaccaagctcacccccaacacctgtgtccaaaggagggtccatgtgtgcagcccacccctgtcttgagcccgtctaccaaaataaagttgtagtgattccatg

SEQ ID NO: 11703 - DNA, 5915 bp, Homo sapiens
taactatattgaagcgtcttgtgggaaccctcctatcagccacagggaagctggtcagagccagacctcgtgcctggggaatggggatcatgggtgctggcattgtgggtagggtgcctttgcctccctctcacaggcctgcctgtgttactgaccaatgtggagctgggtctagggtgcgaagaactgcaatggctgctgcaacgggagcagctgagtccaccccaggtgcagcctggcttctgtctgtatctcagcaccaccctctccctctgtgccatggaaaaaggtgaggcccagagggcaaattgccagcacagttgtgtggacacactaggccctcagcaccagccctaagagggcttcactcaacctggcccagagcaggcacaggtctatagcagggagccatactccctgtctactctaccccctggctctgccaaggggaagaggttaagcatctcccatgttaccccaagtgctaggttgtgaactgctaaaggggctgaatgtgttggatctgggcctgaacatggaaatactggaagaacagatgctgcatgaaatcttgtgcagagagtatcctgaactcgagacccgctggcaggacctaaagatcagagccctagatacctgcaaggctgtggaggctgctgaggtgcttgggggctcagtctgtgggttgagatgagcattggatggacctgggtaagggggtggagatgaatgtagatgtttggggtctgtgggaaagggccagatccatccaacaaatgagtgtatgcaggagcggctgctgacgatgctgctgttccagaatccgaagcgtcagaagccagccaagtttctgcggaacatagtgagggcccaaggaaagctatgccagctgcgtgctcattgtgaagagttagaagggcagaaactacaggagatggtattgtgggcaccctatcgacctgtggtttggcatggaatggccatggtaaaggccctaagccaactgcagaacctgctgccacttttctgtatgagcccagagaactggctggcagtcactaagcaggctctggacagcatgaagccacgtgagattaatcacggggaggacctggccagccatctactgcaattgagagcacacctgacccgccagctgctgggcagcaccgtgactgcactgggccttacccaagtacccttggtgggtgcattgggcgctttggctctgctgcaagcaacagggaaagcatcagagctggaaagactggcactctggcctggactagcagcctctcccagcacagtccacagcaagccagtctcagatgtggctcgaccggcctggcttgggccaaaagcctggcatgaatgtgagatgttagagctgctgcccccatttgttggcctgtgtgcctccctggcaggccactccagtgcttggcaggcttacctgtcactgtcatccacagtgctgggtcctgcacctgggccagggcctgagccactcagcctcctccagaagctgatcctgtggcgcgttctgcgacctgagtgcctggcaggtgccctggcagacttcaccactagcctcctgggtcggcccctggatgaaaacacgtatgctcccaccatgccctttaaacatagtcaggctactcagcccatgctgatcttgttgccaccgcctggccacccctcagccactctgcatcctctgactgtcatccagaaactggctgccaagtatcagcaggtttgaacctagtttcttggccacagagtgaccaggctcctgtgggctggggcatgggggaccccctccaagcattttcatggatctttctgtactacgtagggactttggggatcatggtagcattagtttgggtccctcgggtcaccctaggatcactttgagtcatgctgccatctcttttttggtccccaggggcagaagcaactgcaggtgatagccctgggctctgaagcctgggacccagtctcagttgtggtcagcactctatcccaggctatgtatgaggggcactggctggtgctggacaactgtcatctgatgccccattggccgaaagagctgctacagctcttgctggaactgttaggcagagccaagggtgagtttattgcctagattggcttccaggatcctatcctacacttgggccttagcttgaaatctcaggcctcatggccagtgacctagcaccaaacttgtccacttggccttgtatctgactcctgacacccctagcctcaagtctgattcctagacttctgcctgaccctttatccaaggactgatctcagacccttgtctgactctagtggttgcagacctggaatcagaacagcttttagaccaacctgaaagcaggaatgtaagcactgttcacagagattttcgtctttggcttattgtgcctgcagagtctagtgcttctttgccaggtgaggagcttaaccccctacaggctctcaaattggaagtgggagggcaactgtgctgtgctgactcagcactctccttcctccccagctgtgctgactcagcactccatgcctgttttctggaaccagtccctggagctgggccatgttttgattgacagtgtggagctagcccagcaagtactctacatgcaaccccccacccaggcactacctctgctcctcctccatggcctcctgctacaccggcagctctatggaacaaggctgcaggcacacagggggcgctggtgagggacccccacccattcctgctcagtcaatcactcaacaaacattgagtatcttccatatgctgggatgagtaaaactaattcatctttggaagctccaaagagcaagggcaaggggaagtcaaggaaggcttctccaaagactttgagattttactttgaattgagtcttaaaagcagaggcaaatcaggtagagatgggcctttctgagcagagggacctaaactcagtagaagggaggagacttgagtgtggttgacgtggacatgctgggtgttgaggagggagaagtaaggttcattataaagggcctttaagactagggcaaggtaggccaggtacagtggctcatgcctgtaatctcagcactttgggaggcgaggcggatggatcacgaggtcaggagatcgtgaccatcctggctaacacagtgaaaccccatctgtactaaaaatacaaaaacttagccaggcatggtggcaggtgcctgtagtcccagctacttgggaggctgaggcaggagaatggcgtgaacctgggaggtggagcttgcagtgagccgagattgcaccactgcactccagcctgggtgacagtgcgagactctgtctcaaaaaaaaaagactagggcaaggtgcctgattttatcctgaagacagtgggaagccactgaagggttttaagtagaagaagaaacaatatcctttttgtgtgttggaaggatcactctggatgcaacatggagaatggatcagaggaggcaggactgggggcaagcagagcagctttaggagactctggaagtctccagggaagagattgtggtatgggtagtagggtagtagccatggaagggatagagaataaatatggggtgaagaggaaggaggtgtcgaggatgactctcagatttttgctttagataattgggtggctggcggtacctctcactgaaataggaggtggaacaggttttgtggggggaaatgatgatttcagttgaaagcaagttgtatttgaggtgccaagtggcaatgaacccgaagctcaggagagaggtttgaactgaagacaagacttgacagtcctcagcatatagatgatatgtgaaaccctgctttccgctccccttctctaggagtcaagtgactctaacccaggttcttcagacccaagaccagctgtgggcaagtcttagcaatccccgtgctgccatgcaagagctggctggtgagacccttcctctcccccttggagtcatcagcccccaggagagcctggaagagggtgggggtgggatacaattcacagctttggttttggcggtggtggaaactgaaggtactggaactgagagactctaacctcatcttcagcttcagttttctacgggggtcctctgggggacactgaggacagggaggccctgattagcctcacacaagcctgcctgagccccagtagtgggagctgggtccagccacacacacctcagtctttgctggccacgctcatgcccctcccaggtaagcctcactcaggtatctgttttggggtagggaatagtgcaatgcaatgccaccccccacagaaatgtggacagcagtctcaataaaggtatatgagggggtaatattcatactgttatgggggtgatggcagtaaaggctcagaggaaggcctactctctcgagtctagggtggggagagtccatcttgtccctcacccctcacctctatccccaagagctaagggagctggatgcaatggcagagtgcaaggcccagatgcacctactgccctcaccacctgaaccccggctctgcggactgagtgagggcccccaagcctggctgttgcgacgccagagtcgcgctctcttgagtgcgctgcagcggagttcacccgtgtgggttcctgagtctcgaagaggcgcccagcttgcggaaaggcgactgcggcaacgcctagtgcaagtcaaccggaggctggagtcactgcaggatctgctgacccacgtgattcgccaagacgagtccgacgccccgtggtcagtgctggggccaaatgcacggcggcctctggagggcgtcttagagaccgaggctctagaactgagccagttggtgggcacgctacaacgcgaccttgattgcctgttgcagcagctgaagggcgcacccccgtgcccctcccgccgctgtgctgcggtggcccacgctctctggactggccgcctacccttgccttggcgacctcatgcgccggccggtccgcagccgccctggcactggctgcgacagttgtcgcgccgtgggcaactgttggttcgttacttgggcgtgggcgcggacgcgagcagtgatgtaccagagcgcgtcttccacctgtcagcctttcgccacccgcgccgcctgctgctggcattgcgtggggaagctgccctggaccagaatgtgcccagctcgaatttccctggtagccgaggctcggtctccagtcagctccagtataaacgtctggagatgaacagcaaccctctgcacttcagggtatcttcgcgccgcccctcgttcgcggttccagtcccctcgaagtctctaattacacctcgcagttaccccttcttggtgatcttgcccccggtaaccctgctagcttctccgatctcgcttcaccacgacctcctacccgctaacccccacttcccacctgccacctcccagcttcctagccttgcctgaccagcttctgacgcccccaggtggagaatggtccaaatcccacggttccagagagagggctgctgctgatcgggctacaggtcctacatgcggagtgggacccaatagctggagccttgcaggacagtccttccagccaacccagccctctgcctcccgtcagcatcagcacacaggccccgggcaccagtgacctgccagccccagccgacctgactgtgtactcgtgtcctgtgtacatgggagggccccttggcaccgctaagctgcagagcaggaacatcgtgatgcatctgcctttacccaccaagctcacccccaacacctgtgtccaaaggagggtccatgtgtgcagcccacccctgtcttgagcccgtctaccaaaataaagttgtagtgattcc

SEQ ID NO: 11704 - DNA, 3378 bp, Homo sapiens
taactatattgaagcgtcttgtgggaaccctcctatcagccacagggaagctggtcagagccagacctcgtgcctggggaatggggatcatgggtgctggcattgtgggtagggtgcctttgcctccctctcacaggcctgcctgtgttactgaccaatgtggagctgggtctagggtgcgaagaactgcaatggctgctgcaacgggagcagctgagtccaccccaggtgcagcctggcttctgtctgtatctcagcaccaccctctccctctgtgccatggaaaaagtgctaggttgtgaactgctaaaggggctgaatgtgttggatctgggcctgaacatggaaatactggaagaacagatgctgcatgaaatcttgtgcagagagtatcctgaactcgagacccgctggcaggacctaaagatcagagccctagatacctgcaaggctgtggaggctgctgaggagcggctgctgacgatgctgctgttccagaatccgaagcgtcagaagccagccaagtttctgcggaacatagtgagggcccaaggaaagctatgccagctgcgtgctcattgtgaagagttagaagggcagaaactacaggagatggtattgtgggcaccctatcgacctgtggtttggcatggaatggccatggtaaaggccctaagccaactgcagaacctgctgccacttttctgtatgagcccagagaactggctggcagtcactaagcaggctctggacagcatgaagccacgtgagattaatcacggggaggacctggccagccatctactgcaattgagagcacacctgacccgccagctgctgggcagcaccgtgactgcactgggccttacccaagtacccttggtgggtgcattgggcgctttggctctgctgcaagcaacagggaaagcatcagagctggaaagactggcactctggcctggactagcagcctctcccagcacagtccacagcaagccagtctcagatgtggctcgaccggcctggcttgggccaaaagcctggcatgaatgtgagatgttagagctgctgcccccatttgttggcctgtgtgcctccctggcaggccactccagtgcttggcaggcttacctgtcactgtcatccacagtgctgggtcctgcacctgggccagggcctgagccactcagcctcctccagaagctgatcctgtggcgcgttctgcgacctgagtgcctggcaggtgccctggcagacttcaccactagcctcctgggtcggcccctggatgaaaacacgtatgctcccaccatgccctttaaacatagtcaggctactcagcccatgctgatcttgttgccaccgcctggccacccctcagccactctgcatcctctgactgtcatccagaaactggctgccaagtatcagcaggggcagaagcaactgcaggtgatagccctgggctctgaagcctgggacccagtctcagttgtggtcagcactctatcccaggctatgtatgaggggcactggctggtgctggacaactgtcatctgatgccccattggccgaaagagctgctacagctcttgctggaactgttaggcagagccaaggtggttgcagacctggaatcagaacagcttttagaccaacctgaaagcaggaatgtaagcactgttcacagagattttcgtctttggcttattgtgcctgcagagtctagtgcttctttgccagctgtgctgactcagcactccatgcctgttttctggaaccagtccctggagctgggccatgttttgattgacagtgtggagctagcccagcaagtactctacatgcaaccccccacccaggcactacctctgctcctcctccatggcctcctgctacaccggcagctctatggaacaaggctgcaggcacacagggggcgctggagtcaagtgactctaacccaggttcttcagacccaagaccagctgtgggcaagtcttagcaatccccgtgctgccatgcaagagctggctgcttcagttttctacgggggtcctctgggggacactgaggacagggaggccctgattagcctcacacaagcctgcctgagccccagtagtgggagctgggtccagccacacacacctcagtctttgctggccacgctcatgcccctcccagagctaagggagctggatgcaatggcagagtgcaaggcccagatgcacctactgccctcaccacctgaaccccggctctgcggactgagtgagggcccccaagcctggctgttgcgacgccagagtcgcgctctcttgagtgcgctgcagcggagttcacccgtgtgggttcctgagtctcgaagaggcgcccagcttgcggaaaggcgactgcggcaacgcctagtgcaagtcaaccggaggctggagtcactgcaggatctgctgacccacgtgattcgccaagacgagtccgacgccccgtggtcagtgctggggccaaatgcacggcggcctctggagggcgtcttagagaccgaggctctagaactgagccagttggtgggcacgctacaacgcgaccttgattgcctgttgcagcagctgaagggcgcacccccgtgcccctcccgccgctgtgctgcggtggcccacgctctctggactggccgcctacccttgccttggcgacctcatgcgccggccggtccgcagccgccctggcactggctgcgacagttgtcgcgccgtgggcaactgttggttcgttacttgggcgtgggcgcggacgcgagcagtgatgtaccagagcgcgtcttccacctgtcagcctttcgccacccgcgccgcctgctgctggcattgcgtggggaagctgccctggaccagaatgtgcccagctcgaatttccctggtagccgaggctcggtctccagtcagctccagtataaacgtctggagatgaacagcaaccctctgcacttcagggtggagaatggtccaaatcccacggttccagagagagggctgctgctgatcgggctacaggtcctacatgcggagtgggacccaatagctggagccttgcaggacagtccttccagccaacccagccctctgcctcccgtcagcatcagcacacaggccccgggcaccagtgacctgccagccccagccgacctgactgtgtactcgtgtcctgtgtacatgggagggccccttggcaccgctaagctgcagagcaggaacatcgtgatgcatctgcctttacccaccaagctcacccccaacacctgtgtccaaaggagggtccatgtgtgcagcccacccctgtcttgagcccgtctaccaaaataaagttgtagtgattcc

SEQ ID NO: 11705 - DNA, 5264 bp, Homo sapiens
aggaggccattctccaatgtctacgagatgccagctggcatgctggcatgttaagccagccagtggctctgttggtacccagtggtgtggatctcactacacttcatcgcctcctggccctggcaacctcaggcagtttccctggccagtacacagaagcagatttggaccgcattggagaacacctccccagggagaaccttggtgtcaaacagaacatcaagaaggaaatggtgttgcagaggtgaggccaagaaccccatatgcgaatctgctctgctcttacgctgtcttggccaaaaggccaaaaggaattctgtgggctgccatgagggctgagaagattggggctaagtggtctggctgggactggggccaggaggggcaagcaaaggtaaaggggaggacattagctgagccctggcccacaggttccaccagcaagtgtgcagccaccttcacctgttcttcctgattggagataaacaggcccacaagcagctgccctccacccttttcctgaggctccttcaactggccactgccagcattgaccgctatgaaccctgggaccaagctgccctggccaaggtggcccagcatcacctggagggtgctcagagtgtgccccttgatgacggtaagccctttttacttgtccttaccactcatctctaccaggctctaatgagggttattacctaggtcagtctctctctctccctctctagagcctacagagcccccttcacatttcctacccttcttcctgagctaggagaggatccctttcctttcctgttttcctacaagctcacagagtgaggctaaagccatgcccattgcaggctcctggaagtacccagacctccaggcctcaattcccagtgtggccaaagccatggctcttatccacctttcggccacccactaccatgagcacctgtgccctgcattgccactcgtcacccccaagaccttcctagacttcctggacactttcctgatgctgcagcaacagacaatcctgaagattaagaacaaggcccagcggtgagtgtcccgtcccctgcagtgtacctccttctgctcctttgggtttcctcaccagcacattgtatctccagggtccagaatgccttggagaatctgagaatgctgattaaggagcacggtacccatgccaatctgatctttgacttggaacagcagctgaaagactccggcaaggtaaggagatgattttgaggcttccatggtggtgtcaaagcaggagcccaaaggggacttgaaaggaagcaaccagaatgaaccttaattcttgtccccctaagcttcccctttccctaggaaatctctctgatctccgctgcctcctcctttacagcttaggttcaaaagtttcccatgatacagctaagaccagattgattcttcataacaggtgaaacccaagcatctgcttctggctgcccctagtaccatgatcatgtgaagttcagtatgctgccaagatctctgtagattcccatgggggttggggcaggcattacatctcagtcaccactcactcacctcttagagttatcctctttttccataacactttgtccccataccctttcttccacaaaagcaacaaacaaaactgttgtatacagtgaggacatgtagatgggtgatggcagcagggagaaatttgtattatggcatagaaccagaagtaaatttataatggtatactagacaagagtgtcctgaattgtcttactcaccctcctctaccaggcattttccagtgaccaacttttcctttcctctctcgtctctctaacacctgctctacaatgtttttgagccgtcccatttttcctttagcgctcccttctagttgaaacctcaaaaccttttgctgtcatacagaacaatcttattctttgaataaacaaacttcttatatctggctaaaattggtgatgatagggcttatcacaccttctaaagccaaatactcctagttaaaggtgtcttcccaaactaaagagcagttttgtttttaataagaagaattctaaaatagcacctttttttcctactacacaagatgttgataaatattctggtataacttcagagcagtgaactagtgcccatctcacactcagataatctttctactagggtttcaggtcttaagctcctaatacctagccagctcttctgataagtgcctttaggactatcatccagtgccacacaactccagagacatggcatatgtcgtgtctactaatatggttttcactgtgttttacataaatggtatcccctggagttttaaaggtactggtgccctcctactattcaccacctaggatgaacagcttagattagacctcaagactcagttaagttgcaaagaaagaaaagaaagtcagagagcaacagaaatcccctttcccagttttttgccctacattttcccaagatgattaataccaggattgttgatctggtttaggggtcctagtattccttgatctgtgagtcagttacaccagagcagaacacagtaagccaaaggtctggataagagatgttcgtagtctcagggtcattcagagtcagatcccttggtcgttcattcaatagccataatagtgtgtacttcttccagtgttccccaccccaagaaaaggcattaccacccactgagccaaatcccaggactcattctgggcccctccatctctttactctcttatatttaactggttaattttttcattattgcactcaacaaaaatttattttttgttcaggcatttcttaatatttatgtctatgtcaatatatgcctacatttacatctagatggatggatagatagatagatgatagaatccttgcccacacctttctgaggtagctattcttttctcactttacagatgagaaaacaaagatccagaaaggttagggagacttccctaaccttataaggttgtgatgaggattaaacaagatcttacatgtcaagtatttaaatgtgctggcacatagagctcaataaatgttagttactattaatattaggttaggccaggcacagtggctcatgcctgtaatcccagcactttggaaggccactgccaatggatcacttgagcccaggagttcaagaccagcctgggcaacacagcaaaacactgtctctacaaaaaattactcaggcatggtagcacctatctgtagttccagctactcaggagtctgaggtgggaggatcacctgagcctgggaggttgaagctgcagtgagaaatgattgcaccactgcactccagcttgggtgacatagtgagaccttgtctccaaaaaagaaaaaaaagaaaaaaataggttagattgcttcctaataagaggagatagggcactatccttaccttcatggtgcttatagtttagcagaagataagaagatatagactcatccaggcaatgacaaaaccgtgttataacagagtaagttcagagcactccaaatatcaagaaaaactttctagagaaagcagagtgccccgctgtgcagcacagagcgtgtatataacatggtaggagctcaaaaacattcactaactgtataaacaaatgaatgaagtacatgacagttgatgcctgaaagttaggtcagatctgatcagtgtttgaaaggggccaagtgacagaatgtcccaggttgatataacagcatgtgaaaggcctagaggcaaaagagtgtgtgccacattggaggaactgaaagtcaggaatggctggaaagtagcgtgctaggagagagaaaagagatgagattgaaatgatgagtaggggcctggtcatgggggtattgtcaatcaaatgtagaagtgacaagtgttaatgacaatgattcagtttttagaaaaccagccaggctgcagtgggggaataaaaggagggaagtaagagtggaaactgagagaccagttaggaggccagtgtagaaggtcgggagtgagagggcctgagcatgagtgactgacattgggaagggcagtggacacgagaggcatttaggaggtagaattgaaaggtctcaaagatgggctggatttggggggattcaggagatggagccaagggtaacaactcagtttgttccttgggaatcttgccaccattctctgagaaaaagaatacacaggagaggagtcagattgcaggagagctgaggacgcataaccaatacattcatttggggacatgtggagtctgaggggcctgtgagacccccaagggaagatttccactaggcaaatgaatacacggtatggggcagggagggaacctagctagagagagagatttggcagttggaacgtaagtaggaatcaaagccatgagattagggagggcatttagaagtgtagagtgagaagagaaaggaggctctgaaaaaattgatgaggaatagttaagggctgacagaggaagagaatgagaaagagcagccagagaagttagagaaagcccaaggagaacacagtatcatgaaggccaagagaggaggatgcctcaagagggagggaactgtcttctgtgacaactgctgctaatgggtcaactaaaatatagagtagtgtaacataactgttacacgcatagtcttcgggtgaagcggctgcagaaaaagcaaccacacacttggggctgcgttactagatatataactcacagactaataagtgacagacccagagctcagcctctctctgtggcctacttggagttcaacgtggtcagtctttcaagtgaggagtgtgctacagttccaggatcatagggtcttctggggtttcccgcgtggcccaagatctggagctgcagggcctggatctgtctctgcagagtctcagcatgtttcagcagcagctagagcaaagcaagctcctatacaagcagcagctggaagagtgtcggcatcaagagaacctcattgagaacctggccaggcaacgggatgccctgcaagctcagcgagaggctttcctggagcaggtgggctcttcctgccgcctgccctgcactgctcctctctcaaaagagggcaacccctctaaggataccaagaggagaggatggagtgactcatcatggaatctcctggggggaggggacaaaggtaataggatggcttggggagtggcctctcatggggactccaaggagatgattcccctaaaa

SEQ ID NO: 11706 - DNA, 1079 bp, Homo sapiens
aggaggccattctccaatgtctacgagatgccagctggcatgctggcatgttaagccagccagtggctctgttggtacccagtggtgtggatctcactacacttcatcgcctcctggccctggcaacctcaggcagtttccctggccagtacacagaagcagatttggaccgcattggagaacacctccccagggagaaccttggtgtcaaacagaacatcaagaaggaaatggtgttgcagaggtgaggccaagaaccccatatgcgaatctgctctgctcttacgctgtcttggccaaaaggccaaaaggaattctgtgggctgccatgagggctgagaagattggggctaagtggtctggctgggactggggccaggaggggcaagcaaaggtaaaggggaggacattagctgagccctggcccacaggttccaccagcaagtgtgcagccaccttcacctgttcttcctgattggagataaacaggcccacaagcagctgccctccacccttttcctgaggctccttcaactggccactgccagcattgaccgctatgaaccctgggaccaagctgccctggccaaggtggcccagcatcacctggagggtgctcagagtgtgccccttgatgacgggtccagaatgccttggagaatctgagaatgctgattaaggagcacggtacccatgccaatctgatctttgacttggaacagcagctgaaagactccggcaagagtctcagcatgtttcagcagcagctagagcaaagcaagctcctatacaagcagcagctggaagagtgtcggcatcaagagaacctcattgagaacctggccaggcaacgggatgccctgcaagctcagcgagaggctttcctggagcaggtgggctcttcctgccgcctgccctgcactgctcctctctcaaaagagggcaacccctctaaggataccaagaggagaggatggagtgactcatcatggaatctcctggggggaggggacaaaggtaataggatggcttggggagtggcctctcatggggactccaaggagatgattcccctaaaa

SEQ ID NO: 11707 - DNA, 15112 bp, Homo sapiens
tttgagaaaagccaggcttcagagttcctgctcagcaagcgacatgccattatgcccaagctgcagcagctgatggcagcagcattggcagagctggaaggcctgcttgcgaaggccctctccggtccctttatggaccccacacaagatcagaggagtactgagcaccagctcgtctccctagagcgtcagttccagaacacagtcagcgacctcagtgaactgcaccacgcctatgccatcttcactggtactgaggatccctgcaccctccattatcactctgtgatagacccttcaactgaagtaagagttggaactcagggttctgtgtcctgtatgaccccaagcaagccttgggaatcacacaccttcactggtgtcttttataaatgaaaatttcaggacaaaaacatcatatattgaccatggcaggtgttgtgcttagggtgggggtatgggggctcacagtctggtaaggaaggcaaacaagtgaatgttccatcagaatgtgatggggtcaggggctaaaagcatgtgtgggagaaatgtaagttctccttatagaacgtagcctttttgtagccctgttcaacacagtcctacaccaggcagcaggccccgaacaagagtaggtcttgatgctctagcagatcacttcctccagccagtgtggtatagagaggaggctactgagggcctcactaatacacaggaggaggccaggacagaactattggtctcaattctttcatacagtggtgcaggtaagctggttcccttctgttcttaaagaactctgtgggctctggaaggagaccagagcaaatataagagccattaccaaacaatggagacaggatctcaggctagagtgcagtgtcatgatcacagctcactgcagcctcagcctcccaggctcaagcaatcctcccatctcagcctcctgagtagctgggactacaggtgtgtgccaccatgcctggctaatttttgtattttttgtagagatgaggactcactttgttgctcaggctggtcttgaactcctggactcaggcagtccttctgccacagcctcccaaagcactgggattacaggtgtaagccactgcgcctggccttccttccagaattcttatatgtatgttggatttactgaatctctctcactcattgcttttatcttctttatcatcagtcattcctttattctttttctctgagttctggaaaaatgttgtgagcttgttttataagcttccatttcctatggtatcactttgtatttctattgcattttaaaacacacattttgcatgtgtatgcatgcttatgtacacatgtatacgcatgtaactgtgtgtttatgtgtatatacatgtgcacacatttgctatctctatctgctgaagaggacatgaagcaaagaaaccccagtagcaagaagccacattgtgctcaggtcttagtttctaacaaacaccattccccattaaaaggaaccagagctccttagagaaatggatgattccagggctgtggcagggtaggtacaagatgaacctaaagtgtcattttataccagaaagtaagaaagtattaaagtgtttaaaaaagtgatgggagcatatcacaaggattcagaagggataccaactggctaaatctggaacaatttgatcaccaaagtaagtacaataataaattctaagctattgaagtaaaggcatttattatgcgtagtaataataaatagataatgagagagaaatgaggactcatgcttacagtaaaatgccaggagctgactggcataaatgtggaaggaaggctggagtgggaaaattattattttgcaaccatcatggtaattaccagatcagataaggatcaacagatgccaaatctagggcaaatttgatgaggagcagaatatttgcactgtctttgagagtttctcccagagatcacttatttgttgtaaaaaaaaagaaagaaagaaaaagaaacaacaattagtggagaaatcagacaataatttgaccaggtgattaaaaattaacatcaccaatgaaggacatagggacatgatctgccttcagatgtgatactggagaaggaaggatacaatatcacttatgtagtagtccagctgagaatgagtatcatttttaaaaaccataaaaacacaacatgaggaactttctatgaacaaaaaaaatggcaaaaggggactgtatacttcaaagatgtctgttacaaaagaaagaaaggctatggaaatgttccagattaaaagaaactaagagacatgacaaatgcagtgcttgaccctggaccagatgctataattgaggcaaaaaatgcaatctaggacattattaggtcaactgacaaaactgaaatatggacagtagattaaaatattgtatcaatataatatatgaaatttggaattgcactgtggttatataaaagaatatccctactcttaggaaatgcatacttgagtatttatgtaacttgcccttaaatagttcagaaaaaaaaattgtgtgtgtgtatatgtgcatacacatgcccatgcacagagcatgtgaatgcaaatgataaagcaaatgggtaaaatgtcaacaaaaggcaaagataaacagtatagatatatatctatacctatggaagatagaaggtacacaatttttttttactactttttcctacaactttgaagattggaactcattttcagataaaaagttttaaaatgcatggaaattatcaagtagatatcacaaaatgtctgtcaaaggacatttgctcttaatccccagtttgtctttatcttttcatgtgtttggagatgatatctctgctctttcttacagatgaagttgtttatttgtctaatatttgatgttgaaacaactgctgtcaaagattgtatgggactctagccatatctttgagtttagacaaagactggaagagtttagatttactgtcattttactttttgtcagatcagagctttgatagcctagtgattccagctttttaatactctgagatctccaaaatggatgatgtgcacatgtgtaagatgcatgaggcccagcatttgggtgtgactctatcactttttgtcccactcaagaaagtaaactggagttcaagttaatgagatatctgttgtcttttaagtaaattgcaaacctcgatattataattattgttaattataaattcctattgacacttatctcacaactgactataagtaactgattaagaactaatgtagtaccctgtgagatgaaggggtggaggataatggccggaggtaaacatgacaggtcctctatgtgggccagatcttttttatattcatcttgctgaactttcttttgggctgacagttcattcgctcattcattcattcattcattcaacacatatttgttgagagactgctgtgtacactaggcttgaggtacatcagtgaacaaatgataaaatgcttttcttaatggacccaaacttctagttgggagagaaagacaataaacaatgatgataaccaaattctgtagtatataagaaagtgataagtgatagagaaaaaaaaaaaatagaacagagtaagaggggttgaaaatgccgggaagggtagctaggaatttttaaccagatagcctgcataggcctcattaagaaggtgctgtctggctaggcgcaatggctcatgcctataatcccagcactttgggaggccgaggcgggcggatcacgaggtcaggagttcgagacaagcctggccaacatagtgaaaccctgtctctactaaaaatacaaaaattagcctgacatggtggtgtgcgcctgtattcccagctacttgggaggctgaggcaggagaatcacttgaacccgggaggcagaggttgcagtgagccgagatcacgccactgcacaccagcccaggtaacagtgcaagactctgtctcaaaaaaaaaagaagatgctgtttgtttgaacaaggacttgaagctggtgagggcatgagccatgtgattctctgaaggaagagtgttccagaaagaatagactgctagtcaaaggcccttagcaggagggtgcatatctggtgcatctcagccatagtaaagcgtccagtgtcactagaatggagtgaatgagatggagactaattaaagaggaactcttccctttcactgccatcacattttcccagatggtctttccctggagtaactgttccttggattaaccccacctccattgttgagccaaacaatttggaactccacctcccccacccccaaccatcactttctggaccctaccttctgtcattatgggctcttgactgatcattccaccacccccctcccaacactgcaagtagcccaggtctcaagtcagccctcccccacagaggatgagactcctgtgcccttgccaatctgtgggacacgtcctattgtgcagcagcagcgcatatggcacctgtaccgagtcatctccgaaaacatcagcgagtggaagtgcatggcttttgccaaggtgctgacacccttccttggagctcttgactgggagtggaggactacagtggtgggggaggggaagagtctcaagctgacagtgagcccttctccctgcagttcagcccagctatggcccaggagaagacagagggctggctgacagaggcagcacggatgagcacaaccctggagctgcacagccccgtgctgcagcactgcatgcgcatcctgggggagtttcgcagctacctgcccctgctcactaagctgggcagcctccacccacagagcctcaactgccagtgtctcctgcgtggtatgtttggttaatgtcagaggagggggaaagggaaatatgtgaggttagagcgatgcagcaactcagtttcctgctgctcctgctggaaacacctttcatccccaagtttctccctacctttcccacatatttcaatttcttttccttaactgggacaaaaatttttaacttcccttactacctcctctctgctgatggtggctgggcttgggctggggccttagctctgggctctgagttgtgctctagaccttgagttctaagctgttggctctgtgttgtgctctgagatctgctatctggggtctgagctgggctgggctgggctgggctctgggatatgggatatgggttggactctgccacatactgggtgttgctctgacttgttttctctacctccagcccttgggctgggcagtctccaaactatagaactcctaacgctgggccagctgcttacttatccactgctggagtttgcagatcgaatcaaccaggtggggccctcagtacaggggcgagggaggtggtccaaagccaggacctgtaataaagccagtcaagggtggtgggtgtttggcatgtgatttaatgtggggttgagcctgctaacctgcctgaagggcaggaacagtttctttaagtctccagatggggatctcttgtgtgattccagactcccagtgactgagagtatgtccctgatgggggaaggaagtgggtggcagccccgaagttgtgggcacacagaatggcaggtgccccccaacacctgtcttgtccccagagggtgcgagctgactgaggtatttgctcagttggagccttgcaaaagtgggtgggggttccaaagcagtggccctggggcaaggtagttagatgctgccgatggcctatctttgaagcctgatggtcccactctcgcttcatctctgagacctccactttcctgagccctggcccttgagttctgcctcagatccaatccccaagtctcggctccaagcctgtccccgaagcagttacccagtcctggttcctgagacccagctgttccaggtctggcagaatgaaaatgaacgaattcatgcccaagagactatacggcggttgcagcggtactgggaagcgcgccagctgcgcctgctcaacttcatcctgcatgtaccctacgagcccccagcctcagagcgctccaagaggcaggtgctccgcagcccccaatgggaggtagtggacaaagatagtggcaccttcatcctctcaggtgagacccagaccttgtgacctagtgaaagccccctgctgggggccattttcatccaccatatccatcaaggcctgccagatctgattctctagccagggccccatccttactagacagcctaagacattagtctgttctgagacagtgtcttccatgtagcccccctactgtcttaatctccttgggatccccttcccctcacccatctctactcaatgcctgggtccttcagcaaaggtcctcccctttctgggtaccctcagaaattcctcatagtcagttatctacacctttcaatgctctgtcctctagattgcaccctgctgtctgattttataccttattcattaattcatttctttattctctccctcatcaaacctgcctcctctgtgctaaacacaggagaccttgagacttacagacagtatccctgtcccccagaaatttctgagtccagtgaggagagacagacaatactatagggataaacacaatggagcaccttactgagggcagtagaatctcagagagaggaccagctcaaagaaccagagagagaattagagaagtcttctttaggcagaggccttatactgactttttgaaggagtaagagtttgccaaacttgccaggtgagaagggcagaccagacaaagggaacagcatttacataagcatccaagatgatatagctagggcattgccaatagaggagaattttcttattcaacgcaactagaacccagttggtgaatccaaaaaactaatgatgcatacatagtttaagatttttattttagcttaaaatacatacatgtacatttatttactaacgttttaacctaatgacaagagcttttgtttgatttgatagttcctcactgcctttcttgcattaatgtattgtctactatttctgctttcactttctgcaaagttgggcagcaacatgaagacacttttaaagtccttatgaagggaagggccttagctgcagaagctgggcactgtgtggagagagggaggtggggagaggacttccaaggagattaagacagtatgggagttacatagaagacactgtctctatgtgacttttccaggtttttattataagttcccaatttataaaaattgacttgcctatacctaatagcatatgtttaatcagtttgcctttactgaagctttctgtggtttccatagaaacagcaactttccccccaccaatgtgtcagtggttgttacaatattagattcaactctttacttaaaatcacaacataactcacataaatagatttgcaaacacactcttattcttagtgcgcacacactttaactagtggaagcaaaaatgtttgggtcttgtaaagaatagcttgaaatctgcgagtttcagttcagttagggctttagtccgtacatttgatggtaagaatggggagcatgaataaaagagcttctatcgctctgtggctggatcccaaagaatagtggaggaggggatggagcagatggaactggagaggatcagatcatgcaaagtcttgtgggccacattaataatttactcaataacatgaaaacaatagagggtcactgcatgttttttgtgggtagtaacataattagattttagtttaacaatatcattctggtttcaatgtggagaatggattgaagggaggcaaggaatggaaattgaaagatcagttaagggatgactggtataacccaagtgaaaaataatagtggtctagatgaggacagtggcaatggggaaaggaaagtgggtgcactcaagctaggcagaagtcagctaggcaagatgtgtaactggttcaacttctgcatagaggagaatgtaggtcctttccattctaatatagatgttccttattacccaaattctttatccttatcacctctttatatccagtatttggtgaggggtgccttttccagccatttgcagcacattgataaatggcacccagcccccttgttcacatcgcccttattaaggactcttaagttttggtgtggactgacacaaaggctggatgtctgcagttaacatttgcaccaagattgaaaggagattgtcttcccacttttgtcctgagcacattttatgctaatccatttgcccatctctgaccctggttccacactttgccagtctgctcctacttgatctctaccacttttctgcctcatccttagatttctctgctactaaaagtaataaataaaaattcgtaatacaaagtaaaggctctggataatgtgggccttgggatgcctgtgggcataatttcagataccagcctgggtcctaccagtctttcctgagctcacagcccttcctccacctttgctccttttcagttttcccttctctctctaagctagcatttgcaccaagcacttgtgtggttgaggtttctccctatgggttctctcctttctctgtaccaggctttcttttcctgttaactccgggcatgttaaccaaggaccacatctttgtagtggccacacaccatgaagctggtgacttcgttcacccaaataaaccccaaatgatggacttgttatatatttaattcttacctcaagaagacaggttgttacaggattgggcacacctacaaattattaatctcccctttagattcttaaccaaatgaggacaaggatatatatgaaaatgaaagtatactatcagaaccatcacccccaaggaagtttgtgctttttatgtatcatgttggcagacacagcttggatctaggtcaagtgagacttcgtgctacctcgtcataatcttcccccaattaattgagaacttgaggtctgtgtggatatgcagagaaaagctgaagtacagttacacaggtagctgtgtagaggactgtggcctgcctcatatcccatagagcataaaagatgggcctctttgcctcctcacatggggaagagtaagggaagaagatagacagaggggctgaaagcattagtccagtgctgttttctctagagagtggagtagaagttgtgtgactctgagagcaggataatgagttttcttcccaccagggatgtttggagagtcctacatgtgtctgaataaacctcctttcttgattcttctcatttttaccccaattagtgtccctacctcatttccagccctagtcttaccaagcacttgtggcatgaagggataactctttaagcagcaccagggagccaagcactaagactatgagagaaaagtttgttctcagcttctctaccaagacccgttttaagacagaatgggcattcttgctatagaaatattacgtagggtcctggagccattcagccctcttcccgggctagaggctctagttcttacaaagcacttccatggagttacgtggatactcatagcagctagtcagggaaattagctggcctggagtctgcccacagtgccttgggaaaggaggagcttcttctctcaccattttgagaccccagtgctttactggctctacatattggctgatggaatccttaaaggcagaaagggcagctgggcatggtggcttacacctgtaatcctagcactttgggaggctgaggtgggtggatcacctgaggttgggagttcgagaccagcctgatgaacatggtgaaaccccgtctctactaaacatacaaaaaattagccggacatggtggcacacacctgtaatcccagctactcaggaggctgaggcaggtgaattgcttgaacccaggaagcatagtacagtgagctgagatcgtgccattgcactctagcctgggcaacaaagcgagactctgtctcaaaaaaaaaaaaaaaaaaaaaaaaaaagggaaagaaaaagacagaaagggcatcagggtctctgtaactgcctctcctggaaggttcccctggtctcctcttctctcccccagccccggcccttgcctcatctgactgccagttcagctttttctgtcttagattacagcaacctgcaggattccatccaggaaagtcttcaggtgttgtccaagatcttggccatcgaaaagtcaggagatttaaacaaaatagctttggagtgggtggccatcatgcatggcctgggtaagtgcaggcctctagccaggctgatgggtgagacctgaggcaggatgtcccagagggatgggggtgagaggtggaggttgggtgggagaagatatgaagaacacagtgaggacctccttcagggctgtttcttgggatgaagagatcaggtttttattcacagtgaaagttttttctccctcaagcaagttccctgagtcctgctgggcagagtattttgcttgggctggtggggtacctgagaggtcaggagcagggtggactcccctgcagaaggtagaaccctagtgtttcccaccagcattcctctggctgcttacacaggtgccctgctggaggtgtggctgactttccagcagaagtggatttttctgaataaagttctgcatgagatgaagatccagtttcctaatgctgacctggtagggaagggggttgaggcagagagggcaagaagggttcctgaatagcagggctcagcgtgggaaaggggagctgccacttcatattggccctcacttttatcctctccctcaccacagaactctcgtttcaaggtcatggatgaccagtatcgaaccctgatgcgcatctctgtagctgaccccatggttctgtcacttgtagtgcccagtgccgagaggagcccttacttccaaggccagcagctgcaacaactgctgcaagcaggatcggtggagctggagggcatcatcatgagtctggagagcgtgctctatggggtgtgtgctcacttcccccgcctcttcttccttagtgacagtgagctggtagccctgctggctgctcgactggaatcatgcgaagcccagctatgggtacgacgctgctttcctcatgtgcatgctgtgagcttcaggtcttgcccaactggtgagaaaaacacagatgactgggagtcaagcccaaacacacagactcaggtggaggcacttgcagtgctaggggcaggtggggaggaggtgaagctgcagggtccccttcctctgcatccagatctccctaagtggctggcctctctggagaagtgtctgcgcttggcactggtgcacatgctgcagggctgtgtggctgctcgccttgctcgaggcccatctctaggtgaggccctcaagcaactgcccaagcaaaacaagttgtacctgcaactgtatgtccagcactggatcgacttagtccaggccttcccatggcagtgtgtgctggtggcagaggaggtggtatggcgggccgagatggaggaggctctgcttgagtggggtaccctggccatggtctccatgcatatgcgcaagcttgaggtactggtgaattttatgcgggcccagagggcttcccaaggtgggcagtccctgccttctgtccgccagaccagccttctcagtgccctgctggtcatggcagtgactcaccgggatatagcacagctgctggaacagcaccaggtcagtgatctcacagactttcactgggtccgccaactcaagtatcacttgggttcacctcacataatccccaaaagccccctacagagtcttaagactattgcatcttctgaaccctctctgtcaccagcggcatgctggatagatgtgctaggcaggtccttcctgtacaattacgagtatctgggacctagactagggcctctacccagcctactgcctgaacggccagccctggtactattattggccctagaggaggtggcctgtgggaccgtactgggtcctaatggtgtgggcaagagagctatagtgaacagcctggcacaggccctgggccgccagctggtgatgctaccctgctcacctcagatagaggctcaatgcctgagcaactatctgaatggtgccctgcagggtggtgcctggctgctgttggagaaagttcatcagctgccccctggcttgctctctgccctgggccagcgcctgggtgaactgcaccacttgtatgccccactgtaccaggaggcttcccgaaacacaagcaccatagaccccacccagccccagctccttggcagtagcttctttgaaaaacatcacgtgtctgtgcgccttggctatggctgtctcctggtactgcgtgccctgagctctgctgtgcctgccaacctgcacctgctgctgcggcctgtggcattggcattgcctgatctgcggcaagtggcagagctgactctgctgggtgcagggatgagggatgccttccagatggctacccgcctatccaaattcttctctctagagcgtgagctggtgtctgggcccctgccctgccgcctgccactgctcaagcagatactggaagacacaatacggacactaaatgtgaccaaggaggaaccgaagtgccagaagcctcgcagcctagctgccattgaggaggctgccctactgcgctcaccactgtttagcattctcaatgggctccacctgcacaacctccgagggctgttgtgtgcgcttttccctagcgccagccaagtgctggcagaacctatgacttacaagctgatgaagccattggtggtggaggaactgcaacaggtaggtctggatcccagccctgacattttggggtccttggaacagttgagccaggccctgagccgggcctcaggcattctgctcctgggccctgcgggcagcggcaagaccacttgttggcacagcttatttaagatccagaatcggctggcagccatggaggacacctcaacccaaggctgccagcctgtggaaattacccacctgtaccccagtggcctcagcccccaggagttcctgggatggctagagggctcctgctggcatcatggcatctttcccaaggtacttcgtgcagccggtcagtgtaacaacatgggccaaaagaggcagacagaggaatcaatcgggatccagcactggataatatgtgatggagcctccaatggtgcttggctggactccatcacttgcctcctgagtgagcttccccagcttagtctccccagtggacagcagatagcacgacccccaggcacctttctcttgatggaggtggctgacacaacaggcatatcccccacagtggtaggctgttgtgccctagtctggtgtggtggagagcagacttggcagtgtatacttagtgccctgatggcatcccttccttatgagtaccgcctgcagcaccggacagtcgctgagctcaaccacatggctgaggttctggtgcctgcaacattgcgattcctcacctgccaaggtgtcagctctctgctgcaggtacacgggcagcaggctgtttgtgcaggtgtggcagaagttaccagcatggcacgcatcttgcatagtctgcttgacctccaccttcgcctaaaggaggagaaggcccctggcccaggtgggaagatggacgggctggtttgagagagatggggccttaagggtagctggggtatatagctggagcctggggcgtgtgttctttggtggatctgggccaggagtgaaaagtaatactgtcaaccttttttctttctttcaccttccacctttttctactggggctcctctcgtggccatggcaactttcacagaggacctcagctatagtgatcctgtggcccaaagcttcaggtcttcaaaaagcagctttctaaaccggtcccaggttgacagtgacgatgtgccagataagtgcagggaacacttgctggctgtcagcagttttctttttgccttgatctggggctttggagcccaccttccctccaggtacctaccaggatgggggatgggagatgcagagggctgagatggactggcccatggaagtaaaaacccacatgacatcactgttagggtatggtggagtgtgtgagtgtgtcataaatggaagtgttgtaactgtctgacgcttttgcctgtgtgtccatctgagcaggttctggcccatctttgataccttcataagggattctattagtcgcctctccaactaccctgagccaccaccctcagccttggtgtttgatctacatgtaagccctgaagatggaacactggtccccttcactggccaatacctgagcagccacatcaaaggaactttgggcacctttcacccttctatccaggtgtgaggacagtaaggcaagagctggggttagaacttcaggacttattttaggggtaatccatgttcaaagatcagctgaggcccacttgctccctttctttgatatattttcacaatcacaagaatacatgaaatattttccaagtacagctctaggacaagtcccttagacttttattttcagctagattactgtcttatactggaggtgctgcagtaagtcccacttctgtcttgcagactgaacggctcttgtatgtggtggacctgcttctgtcagggggacagccagtgttgctggctggagaggcagcaacagggaagtcagcctttgtggaggtgctggtagagccacatcacccttacatatacagccccatccaccctgccttcagttcctcccacctccgtctcctgctgagcagaggaatccagggccaaacacaagccagcccacagcctgggcatcaccaggattctaaaccctccctcctcttcttgctggaggacctgcacctagccacttctggtgaggagctgcgaagagggaaggaaggagctactgtcatctcttgagactataaaatccctagcaatattcattgactctcaaatatatgtctgtagatct

SEQ ID NO: 11708 - DNA, 4881 bp, Homo sapiens
tttgagaaaagccaggcttcagagttcctgctcagcaagcgacatgccattatgcccaagctgcagcagctgatggcagcagcattggcagagctggaaggcctgcttgcgaaggccctctccggtccctttatggaccccacacaagatcagaggagtactgagcaccagctcgtctccctagagcgtcagttccagaacacagtcagcgacctcagtgaactgcaccacgcctatgccatcttcactggtactgaggatccctgcaccctccattatcactctgtgatagacccttcaactgaaaggatgagactcctgtgcccttgccaatctgtgggacacgtcctattgtgcagcagcagcgcatatggcacctgtaccgagtcatctccgaaaacatcagcgagtggaagtgcatggcttttgccaagttcagcccagctatggcccaggagaagacagagggctggctgacagaggcagcacggatgagcacaaccctggagctgcacagccccgtgctgcagcactgcatgcgcatcctgggggagtttcgcagctacctgcccctgctcactaagctgggcagcctccacccacagagcctcaactgccagtgtctcctgcgtgcccttgggctgggcagtctccaaactatagaactcctaacgctgggccagctgcttacttatccactgctggagtttgcagatcgaatcaaccaggtctggcagaatgaaaatgaacgaattcatgcccaagagactatacggcggttgcagcggtactgggaagcgcgccagctgcgcctgctcaacttcatcctgcatgtaccctacgagcccccagcctcagagcgctccaagaggcaggtgctccgcagcccccaatgggaggtagtggacaaagatagtggcaccttcatcctctcagattacagcaacctgcaggattccatccaggaaagtcttcaggtgttgtccaagatcttggccatcgaaaagtcaggagatttaaacaaaatagctttggagtgggtggccatcatgcatggcctgggtgccctgctggaggtgtggctgactttccagcagaagtggatttttctgaataaagttctgcatgagatgaagatccagtttcctaatgctgacctgtgcccagtgccgagaggagcccttacttccaaggccagcagctgcaacaactgctgcaagcaggatcggtggagctggagggcatcatcatgagtctggagagcgtgctctatggggtgtgtgctcacttcccccgcctcttcttccttagtgacagtgagctggtagccctgctggctgctcgactggaatcatgcgaagcccagctatgggtacgacgctgctttcctcatgtgcatgctgtgagcttcaggtcttgcccaactggtgagaaaaacacagatgactgggagtcaagcccaaacacacagactcaggtggaggcacttgcagtgctaggggcaggtggggaggaggtgaagctgcagggtccccttcctctgcatccagatctccctaagtggctggcctctctggagaagtgtctgcgcttggcactggtgcacatgctgcagggctgtgtggctgctcgccttgctcgaggcccatctctaggtgaggccctcaagcaactgcccaagcaaaacaagttgtacctgcaactgtatgtccagcactggatcgacttagtccaggccttcccatggcagtgtgtgctggtggcagaggaggtggtatggcgggccgagatggaggaggctctgcttgagtggggtaccctggccatggtctccatgcatatgcgcaagcttgaggtactggtgaattttatgcgggcccagagggcttcccaaggtgggcagtccctgccttctgtccgccagaccagccttctcagtgccctgctggtcatggcagtgactcaccgggatatagcacagctgctggaacagcaccaggtcagtgatctcacagactttcactgggtccgccaactcaagtatcacttgggttcacctcacataatccccaaaagccccctacagagtcttaagactattgcatcttctgaaccctctctgtcaccagcggcatgctggatagatgtgctaggcaggtccttcctgtacaattacgagtatctgggacctagactagggcctctacccagcctactgcctgaacggccagccctggtactattattggccctagaggaggtggcctgtgggaccgtactgggtcctaatggtgtgggcaagagagctatagtgaacagcctggcacaggccctgggccgccagctggtgatgctaccctgctcacctcagatagaggctcaatgcctgagcaactatctgaatggtgccctgcagggtggtgcctggctgctgttggagaaagttcatcagctgccccctggcttgctctctgccctgggccagcgcctgggtgaactgcaccacttgtatgccccactgtaccaggaggcttcccgaaacacaagcaccatagaccccacccagccccagctccttggcagtagcttctttgaaaaacatcacgtgtctgtgcgccttggctatggctgtctcctggtactgcgtgccctgagctctgctgtgcctgccaacctgcacctgctgctgcggcctgtggcattggcattgcctgatctgcggcaagtggcagagctgactctgctgggtgcagggatgagggatgccttccagatggctacccgcctatccaaattcttctctctagagcgtgagctggtgtctgggcccctgccctgccgcctgccactgctcaagcagatactggaagacacaatacggacactaaatgtgaccaaggaggaaccgaagtgccagaagcctcgcagcctagctgccattgaggaggctgccctactgcgctcaccactgtttagcattctcaatgggctccacctgcacaacctccgagggctgttgtgtgcgcttttccctagcgccagccaagtgctggcagaacctatgacttacaagctgatgaagccattggtggtggaggaactgcaacaggtaggtctggatcccagccctgacattttggggtccttggaacagttgagccaggccctgagccgggcctcaggcattctgctcctgggccctgcgggcagcggcaagaccacttgttggcacagcttatttaagatccagaatcggctggcagccatggaggacacctcaacccaaggctgccagcctgtggaaattacccacctgtaccccagtggcctcagcccccaggagttcctgggatggctagagggctcctgctggcatcatggcatctttcccaaggtacttcgtgcagccggtcagtgtaacaacatgggccaaaagaggcagacagaggaatcaatcgggatccagcactggataatatgtgatggagcctccaatggtgcttggctggactccatcacttgcctcctgagtgagcttccccagcttagtctccccagtggacagcagatagcacgacccccaggcacctttctcttgatggaggtggctgacacaacaggcatatcccccacagtggtaggctgttgtgccctagtctggtgtggtggagagcagacttggcagtgtatacttagtgccctgatggcatcccttccttatgagtaccgcctgcagcaccggacagtcgctgagctcaaccacatggctgaggttctggtgcctgcaacattgcgattcctcacctgccaaggtgtcagctctctgctgcaggtacacgggcagcaggctgtttgtgcaggtgtggcagaagttaccagcatggcacgcatcttgcatagtctgcttgacctccaccttcgcctaaaggaggagaaggcccctggcccagaggacctcagctatagtgatcctgtggcccaaagcttcaggtcttcaaaaagcagctttctaaaccggtcccaggttgacagtgacgatgtgccagataagtgcagggaacacttgctggctgtcagcagttttctttttgccttgatctggggctttggagcccaccttccctccaggtacctaccaggatgggggatgggagatgcagagggctgagatggactggcccatggaagtaaaaacccacatgacatcactgttagggtatggtggagtgtgtgagtgtgtcataaatggaagtgttgtaactgtctgacgcttttgcctgtgtgtccatctgagcaggttctggcccatctttgataccttcataagggattctattagtcgcctctccaactaccctgagccaccaccctcagccttggtgtttgatctacatgtaagccctgaagatggaacactggtccccttcactggccaatacctgagcagccacatcaaaggaactttgggcacctttcacccttctatccagactgaacggctcttgtatgtggtggacctgcttctgtcagggggacagccagtgttgctggctggagaggcagcaacagggaagtcagcctttgtggaggtgctggtagagccacatcacccttacatatacagccccatccaccctgccttcagttcctcccacctccgtctcctgctgagcagaggaatccagggccaaacacaagccagcccacagcctgggcatcaccaggattctaaaccctccctcctcttcttgctggaggacctgcacctagccacttctggtgaggagctgcgaagagggaaggaaggagctactgtcatctcttgagactataaaatccctagcaatattcattgactctcaaatatatgtctgtagatct

SEQ ID NO: 11709 - DNA, 4679 bp, Homo sapiens
ggaaagcatcagagctggaaagactggcactctggcctggactagcagcctctcccagcacagtccacagcaagccagtctcagatgtggctcgaccggcctggcttgggccaaaagcctggcatgaatgtgagatgttagagctgctgcccccatttgttggcctgtgtgcctccctggcaggccactccagtgcttggcaggcttacctgtcactgtcatccacagtgctgggtcctgcacctgggccagggcctgagccactcagcctcctccagaagctgatcctgtggcgcgttctgcgacctgagtgcctggcaggtgccctggcagacttcaccactagcctcctgggtcggcccctggatgaaaacacgtatgctcccaccatgccctttaaacatagtcaggctactcagcccatgctgatcttgttgccaccgcctggccacccctcagccactctgcatcctctgactgtcatccagaaactggctgccaagtatcagcaggtttgaacctagtttcttggccacagagtgaccaggctcctgtgggctggggcatgggggaccccctccaagcattttcatggatctttctgtactacgtagggactttggggatcatggtagcattagtttgggtccctcgggtcaccctaggatcactttgagtcatgctgccatctcttttttggtccccaggggcagaagcaactgcaggtgatagccctgggctctgaagcctgggacccagtctcagttgtggtcagcactctatcccaggctatgtatgaggggcactggctggtgctggacaactgtcatctgatgccccattggccgaaagagctgctacagctcttgctggaactgttaggcagagccaagggtgagtttattgcctagattggcttccaggatcctatcctacacttgggccttagcttgaaatctcaggcctcatggccagtgacctagcaccaaacttgtccacttggccttgtatctgactcctgacacccctagcctcaagtctgattcctagacttctgcctgaccctttatccaaggactgatctcagacccttgtctgactctagtggttgcagacctggaatcagaacagcttttagaccaacctgaaagcaggaatgtaagcactgttcacagagattttcgtctttggcttattgtgcctgcagagtctagtgcttctttgccaggtgaggagcttaaccccctacaggctctcaaattggaagtgggagggcaactgtgctgtgctgactcagcactctccttcctccccagctgtgctgactcagcactccatgcctgttttctggaaccagtccctggagctgggccatgttttgattgacagtgtggagctagcccagcaagtactctacatgcaaccccccacccaggcactacctctgctcctcctccatggcctcctgctacaccggcagctctatggaacaaggctgcaggcacacagggggcgctggtgagggacccccacccattcctgctcagtcaatcactcaacaaacattgagtatcttccatatgctgggatgagtaaaactaattcatctttggaagctccaaagagcaagggcaaggggaagtcaaggaaggcttctccaaagactttgagattttactttgaattgagtcttaaaagcagaggcaaatcaggtagagatgggcctttctgagcagagggacctaaactcagtagaagggaggagacttgagtgtggttgacgtggacatgctgggtgttgaggagggagaagtaaggttcattataaagggcctttaagactagggcaaggtaggccaggtacagtggctcatgcctgtaatctcagcactttgggaggcgaggcggatggatcacgaggtcaggagatcgtgaccatcctggctaacacagtgaaaccccatctgtactaaaaatacaaaaacttagccaggcatggtggcaggtgcctgtagtcccagctacttgggaggctgaggcaggagaatggcgtgaacctgggaggtggagcttgcagtgagccgagattgcaccactgcactccagcctgggtgacagtgcgagactctgtctcaaaaaaaaaagactagggcaaggtgcctgattttatcctgaagacagtgggaagccactgaagggttttaagtagaagaagaaacaatatcctttttgtgtgttggaaggatcactctggatgcaacatggagaatggatcagaggaggcaggactgggggcaagcagagcagctttaggagactctggaagtctccagggaagagattgtggtatgggtagtagggtagtagccatggaagggatagagaataaatatggggtgaagaggaaggaggtgtcgaggatgactctcagatttttgctttagataattgggtggctggcggtacctctcactgaaataggaggtggaacaggttttgtggggggaaatgatgatttcagttgaaagcaagttgtatttgaggtgccaagtggcaatgaacccgaagctcaggagagaggtttgaactgaagacaagacttgacagtcctcagcatatagatgatatgtgaaaccctgctttccgctccccttctctaggagtcaagtgactctaacccaggttcttcagacccaagaccagctgtgggcaagtcttagcaatccccgtgctgccatgcaagagctggctggtgagacccttcctctcccccttggagtcatcagcccccaggagagcctggaagagggtgggggtgggatacaattcacagctttggttttggcggtggtggaaactgaaggtactggaactgagagactctaacctcatcttcagcttcagttttctacgggggtcctctgggggacactgaggacagggaggccctgattagcctcacacaagcctgcctgagccccagtagtgggagctgggtccagccacacacacctcagtctttgctggccacgctcatgcccctcccaggtaagcctcactcaggtatctgttttggggtagggaatagtgcaatgcaatgccaccccccacagaaatgtggacagcagtctcaataaaggtatatgagggggtaatattcatactgttatgggggtgatggcagtaaaggctcagaggaaggcctactctctcgagtctagggtggggagagtccatcttgtccctcacccctcacctctatccccaagagctaagggagctggatgcaatggcagagtgcaaggcccagatgcacctactgccctcaccacctgaaccccggctctgcggactgagtgagggcccccaagcctggctgttgcgacgccagagtcgcgctctcttgagtgcgctgcagcggagttcacccgtgtgggttcctgagtctcgaagaggcgcccagcttgcggaaaggcgactgcggcaacgcctagtgcaagtcaaccggaggctggagtcactgcaggatctgctgacccacgtgattcgccaagacgagtccgacgccccgtggtcagtgctggggccaaatgcacggcggcctctggagggcgtcttagagaccgaggctctagaactgagccagttggtgggcacgctacaacgcgaccttgattgcctgttgcagcagctgaagggcgcacccccgtgcccctcccgccgctgtgctgcggtggcccacgctctctggactggccgcctacccttgccttggcgacctcatgcgccggccggtccgcagccgccctggcactggctgcgacagttgtcgcgccgtgggcaactgttggttcgttacttgggcgtgggcgcggacgcgagcagtgatgtaccagagcgcgtcttccacctgtcagcctttcgccacccgcgccgcctgctgctggcattgcgtggggaagctgccctggaccagaatgtgcccagctcgaatttccctggtagccgaggctcggtctccagtcagctccagtataaacgtctggagatgaacagcaaccctctgcacttcagggtatcttcgcgccgcccctcgttcgcggttccagtcccctcgaagtctctaattacacctcgcagttaccccttcttggtgatcttgcccccggtaaccctgctagcttctccgatctcgcttcaccacgacctcctacccgctaacccccacttcccacctgccacctcccagcttcctagccttgcctgaccagcttctgacgcccccaggtggagaatggtccaaatcccacggttccagagagagggctgctgctgatcgggctacaggtcctacatgcggagtgggacccaatagctggagccttgcaggacagtccttccagccaacccagccctctgcctcccgtcagcatcagcacacaggccccgggcaccagtgacctgccagccccagccgacctgactgtgtactcgtgtcctgtgtacatgggagggccccttggcaccgctaagctgcagagcaggaacatcgtgatgcatctgcctttacccaccaagctcacccccaacacctgtgtccaaaggagggtccatgtgtgcagcccacccctgtcttgagcccgtctaccaaaataaagttgtagtgattccatgaaaga

SEQ ID NO: 11710 - DNA, 2831 bp, Homo sapiens
ggaaagcatcagagctggaaagactggcactctggcctggactagcagcctctcccagcacagtccacagcaagccagtctcagatgtggctcgaccggcctggcttgggccaaaagcctggcatgaatgtgagatgttagagctgctgcccccatttgttggcctgtgtgcctccctggcaggccactccagtgcttggcaggcttacctgtcactgtcatccacagtgctgggtcctgcacctgggccagggcctgagccactcagcctcctccagaagctgatcctgtggcgcgttctgcgacctgagtgcctggcaggtgccctggcagacttcaccactagcctcctgggtcggcccctggatgaaaacacgtatgctcccaccatgccctttaaacatagtcaggctactcagcccatgctgatcttgttgccaccgcctggccacccctcagccactctgcatcctctgactgtcatccagaaactggctgccaagtatcagcaggggcagaagcaactgcaggtgatagccctgggctctgaagcctgggacccagtctcagttgtggtcagcactctatcccaggctatgtatgaggggcactggctggtgctggacaactgtcatctgatgccccattggccgaaagagctgctacagctcttgctggaactgttaggcagagccaaggtggttgcagacctggaatcagaacagcttttagaccaacctgaaagcaggaatgtaagcactgttcacagagattttcgtctttggcttattgtgcctgcagagtctagtgcttctttgccagctgtgctgactcagcactccatgcctgttttctggaaccagtccctggagctgggccatgttttgattgacagtgtggagctagcccagcaagtactctacatgcaaccccccacccaggcactacctctgctcctcctccatggcctcctgctacaccggcagctctatggaacaaggctgcaggcacacagggggcgctggagtcaagtgactctaacccaggttcttcagacccaagaccagctgtgggcaagtcttagcaatccccgtgctgccatgcaagagctggctggtgagacccttcctctcccccttggagtcatcagcccccaggagagcctggaagagggtgggggtgggatacaattcacagctttggttttggcggtggtggaaactgaaggtactggaactgagagactctaacctcatcttcagcttcagttttctacgggggtcctctgggggacactgaggacagggaggccctgattagcctcacacaagcctgcctgagccccagtagtgggagctgggtccagccacacacacctcagtctttgctggccacgctcatgcccctcccaggtaagcctcactcaggtatctgttttggggtagggaatagtgcaatgcaatgccaccccccacagaaatgtggacagcagtctcaataaaggtatatgagggggtaatattcatactgttatgggggtgatggcagtaaaggctcagaggaaggcctactctctcgagtctagggtggggagagtccatcttgtccctcacccctcacctctatccccaagagctaagggagctggatgcaatggcagagtgcaaggcccagatgcacctactgccctcaccacctgaaccccggctctgcggactgagtgagggcccccaagcctggctgttgcgacgccagagtcgcgctctcttgagtgcgctgcagcggagttcacccgtgtgggttcctgagtctcgaagaggcgcccagcttgcggaaaggcgactgcggcaacgcctagtgcaagtcaaccggaggctggagtcactgcaggatctgctgacccacgtgattcgccaagacgagtccgacgccccgtggtcagtgctggggccaaatgcacggcggcctctggagggcgtcttagagaccgaggctctagaactgagccagttggtgggcacgctacaacgcgaccttgattgcctgttgcagcagctgaagggcgcacccccgtgcccctcccgccgctgtgctgcggtggcccacgctctctggactggccgcctacccttgccttggcgacctcatgcgccggccggtccgcagccgccctggcactggctgcgacagttgtcgcgccgtgggcaactgttggttcgttacttgggcgtgggcgcggacgcgagcagtgatgtaccagagcgcgtcttccacctgtcagcctttcgccacccgcgccgcctgctgctggcattgcgtggggaagctgccctggaccagaatgtgcccagctcgaatttccctggtagccgaggctcggtctccagtcagctccagtataaacgtctggagatgaacagcaaccctctgcacttcagggtggagaatggtccaaatcccacggttccagagagagggctgctgctgatcgggctacaggtcctacatgcggagtgggacccaatagctggagccttgcaggacagtccttccagccaacccagccctctgcctcccgtcagcatcagcacacaggccccgggcaccagtgacctgccagccccagccgacctgactgtgtactcgtgtcctgtgtacatgggagggccccttggcaccgctaagctgcagagcaggaacatcgtgatgcatctgcctttacccaccaagctcacccccaacacctgtgtccaaaggagggtccatgtgtgcagcccacccctgtcttgagcccgtctaccaaaataaagttgtagtgattccatgaaaga

SEQ ID NO: 11711 - DNA, 7591 bp, Homo sapiens
ggacgagtggttagctctgtgtaggggctttcaggaggctctgggcccagatgatgtggcacaggcactgaagcggaagcaaaaatctgtcagcataccaccaaagaaccccctgctggctacacactctcccttcagtattctgtccttgctgagctctgaatcggagcagtaccagtgggatggaaacctgaagccacaggcaaagtcggcccacctggcaggcttgcttctgcgaagccccacacactacagtagttgccgttggcctctgctgcttgaccccagcaacgaggccctcatctggttggacccgctgcctctggaagagaatcgatcttttgcgccagccctcactgagggtagaggtaagcaggcataataaatgcaatgcttccggagtatctgaactgcccaacactcagcctcatgtggtctttcccttcataatgaggacactgtatttttgtgatcaggatgtcccagatttcaccagcctatactataggaacaaatttggtcacatttattttttctctttattacaatgattctgaatctacatgactgattggtccatgatcttccacttccctggtctactcagcactacccaaatttatccaatgttcagaaatcctggggaatatttctgttggctctgtttggatcggggacccatctgggtggagtattggaaggaacattttctaggaaaaggaatagagtgtttattccccagaagaagaggctggggattgagtttgtgagaaaaatgtgaccttatttggaaaggggtcctttcagatgtaattaagttaaggactttgaatgagatcaccctgattcttatccggatgggccctaaatcctgcaagtgcccttacaagaggcagaagaaaaggcatagaaaatacagaagagaggctatgtgaagacagaggatgaataggatccctccctggaattttagagtaataattgtgatagccaacatttattgagtgctcactacgtgcacatctaagtgttttctatgtatcatttcatttaatcttcacagtaaccctatgaggtcgccactaatatcaaccccattttgcagataagaaaattgagtcatagagagcttaagcaactttcctaagatgtcttcctgcagaccttccctcatgaaatggagcccttcagtgaattcctcccctaaggagtctgattcctcccctaagaagagctcctctgaatctttctgccccagggaaaggcctcatgagaaatcaaaagagagagagtaaaacggacatgaaagaggaagatgatgagagtgaagagagtaatgaggctgaggaccagacaaaagagcagaaggcagaggaaagaaaaaatgagcaggagaaagagcaagaggaaaatgaagagaaagaggaggagaagacagagagccaggggtcaaagccagcctatgagactcagcttccatcccttccctaccttagtgttctttcaggtgctgacccagagctgggttctcagctccaggaggcagctgcttgtggtgagagctggtccccacccaccctggcccctttttgacttgccccattctgtgaccccacaggcctcccacacctcagtctaacttcagttcccatccttcatcccaggcactaactatattgaagcgtcttgtgggaaccctcctatcagccacagggaagctggtcagagccagacctcgtgcctggggaatggggatcatgggtgctggcattgtgggtagggtgcctttgcctccctctcacaggcctgcctgtgttactgaccaatgtggagctgggtctagggtgcgaagaactgcaatggctgctgcaacgggagcagctgagtccaccccaggtgcagcctggcttctgtctgtatctcagcaccaccctctccctctgtgccatggaaaaaggtgaggcccagagggcaaattgccagcacagttgtgtggacacactaggccctcagcaccagccctaagagggcttcactcaacctggcccagagcaggcacaggtctatagcagggagccatactccctgtctactctaccccctggctctgccaaggggaagaggttaagcatctcccatgttaccccaagtgctaggttgtgaactgctaaaggggctgaatgtgttggatctgggcctgaacatggaaatactggaagaacagatgctgcatgaaatcttgtgcagagagtatcctgaactcgagacccgctggcaggacctaaagatcagagccctagatacctgcaaggctgtggaggctgctgaggtgcttgggggctcagtctgtgggttgagatgagcattggatggacctgggtaagggggtggagatgaatgtagatgtttggggtctgtgggaaagggccagatccatccaacaaatgagtgtatgcaggagcggctgctgacgatgctgctgttccagaatccgaagcgtcagaagccagccaagtttctgcggaacatagtgagggcccaaggaaagctatgccagctgcgtgctcattgtgaagagttagaagggcagaaactacaggagatggtattgtgggcaccctatcgacctgtggtttggcatggaatggccatggtaaaggccctaagccaactgcagaacctgctgccacttttctgtatgagcccagagaactggctggcagtcactaagcaggctctggacagcatgaagccacgtgagattaatcacggggaggacctggccagccatctactgcaattgagagcacacctgacccgccagctgctgggcagcaccgtgactgcactgggccttacccaagtacccttggtgggtgcattgggcgctttggctctgctgcaagcaacagggaaagcatcagagctggaaagactggcactctggcctggactagcagcctctcccagcacagtccacagcaagccagtctcagatgtggctcgaccggcctggcttgggccaaaagcctggcatgaatgtgagatgttagagctgctgcccccatttgttggcctgtgtgcctccctggcaggccactccagtgcttggcaggcttacctgtcactgtcatccacagtgctgggtcctgcacctgggccagggcctgagccactcagcctcctccagaagctgatcctgtggcgcgttctgcgacctgagtgcctggcaggtgccctggcagacttcaccactagcctcctgggtcggcccctggatgaaaacacgtatgctcccaccatgccctttaaacatagtcaggctactcagcccatgctgatcttgttgccaccgcctggccacccctcagccactctgcatcctctgactgtcatccagaaactggctgccaagtatcagcaggtttgaacctagtttcttggccacagagtgaccaggctcctgtgggctggggcatgggggaccccctccaagcattttcatggatctttctgtactacgtagggactttggggatcatggtagcattagtttgggtccctcgggtcaccctaggatcactttgagtcatgctgccatctcttttttggtccccaggggcagaagcaactgcaggtgatagccctgggctctgaagcctgggacccagtctcagttgtggtcagcactctatcccaggctatgtatgaggggcactggctggtgctggacaactgtcatctgatgccccattggccgaaagagctgctacagctcttgctggaactgttaggcagagccaagggtgagtttattgcctagattggcttccaggatcctatcctacacttgggccttagcttgaaatctcaggcctcatggccagtgacctagcaccaaacttgtccacttggccttgtatctgactcctgacacccctagcctcaagtctgattcctagacttctgcctgaccctttatccaaggactgatctcagacccttgtctgactctagtggttgcagacctggaatcagaacagcttttagaccaacctgaaagcaggaatgtaagcactgttcacagagattttcgtctttggcttattgtgcctgcagagtctagtgcttctttgccaggtgaggagcttaaccccctacaggctctcaaattggaagtgggagggcaactgtgctgtgctgactcagcactctccttcctccccagctgtgctgactcagcactccatgcctgttttctggaaccagtccctggagctgggccatgttttgattgacagtgtggagctagcccagcaagtactctacatgcaaccccccacccaggcactacctctgctcctcctccatggcctcctgctacaccggcagctctatggaacaaggctgcaggcacacagggggcgctggtgagggacccccacccattcctgctcagtcaatcactcaacaaacattgagtatcttccatatgctgggatgagtaaaactaattcatctttggaagctccaaagagcaagggcaaggggaagtcaaggaaggcttctccaaagactttgagattttactttgaattgagtcttaaaagcagaggcaaatcaggtagagatgggcctttctgagcagagggacctaaactcagtagaagggaggagacttgagtgtggttgacgtggacatgctgggtgttgaggagggagaagtaaggttcattataaagggcctttaagactagggcaaggtaggccaggtacagtggctcatgcctgtaatctcagcactttgggaggcgaggcggatggatcacgaggtcaggagatcgtgaccatcctggctaacacagtgaaaccccatctgtactaaaaatacaaaaacttagccaggcatggtggcaggtgcctgtagtcccagctacttgggaggctgaggcaggagaatggcgtgaacctgggaggtggagcttgcagtgagccgagattgcaccactgcactccagcctgggtgacagtgcgagactctgtctcaaaaaaaaaagactagggcaaggtgcctgattttatcctgaagacagtgggaagccactgaagggttttaagtagaagaagaaacaatatcctttttgtgtgttggaaggatcactctggatgcaacatggagaatggatcagaggaggcaggactgggggcaagcagagcagctttaggagactctggaagtctccagggaagagattgtggtatgggtagtagggtagtagccatggaagggatagagaataaatatggggtgaagaggaaggaggtgtcgaggatgactctcagatttttgctttagataattgggtggctggcggtacctctcactgaaataggaggtggaacaggttttgtggggggaaatgatgatttcagttgaaagcaagttgtatttgaggtgccaagtggcaatgaacccgaagctcaggagagaggtttgaactgaagacaagacttgacagtcctcagcatatagatgatatgtgaaaccctgctttccgctccccttctctaggagtcaagtgactctaacccaggttcttcagacccaagaccagctgtgggcaagtcttagcaatccccgtgctgccatgcaagagctggctggtgagacccttcctctcccccttggagtcatcagcccccaggagagcctggaagagggtgggggtgggatacaattcacagctttggttttggcggtggtggaaactgaaggtactggaactgagagactctaacctcatcttcagcttcagttttctacgggggtcctctgggggacactgaggacagggaggccctgattagcctcacacaagcctgcctgagccccagtagtgggagctgggtccagccacacacacctcagtctttgctggccacgctcatgcccctcccaggtaagcctcactcaggtatctgttttggggtagggaatagtgcaatgcaatgccaccccccacagaaatgtggacagcagtctcaataaaggtatatgagggggtaatattcatactgttatgggggtgatggcagtaaaggctcagaggaaggcctactctctcgagtctagggtggggagagtccatcttgtccctcacccctcacctctatccccaagagctaagggagctggatgcaatggcagagtgcaaggcccagatgcacctactgccctcaccacctgaaccccggctctgcggactgagtgagggcccccaagcctggctgttgcgacgccagagtcgcgctctcttgagtgcgctgcagcggagttcacccgtgtgggttcctgagtctcgaagaggcgcccagcttgcggaaaggcgactgcggcaacgcctagtgcaagtcaaccggaggctggagtcactgcaggatctgctgacccacgtgattcgccaagacgagtccgacgccccgtggtcagtgctggggccaaatgcacggcggcctctggagggcgtcttagagaccgaggctctagaactgagccagttggtgggcacgctacaacgcgaccttgattgcctgttgcagcagctgaagggcgcacccccgtgcccctcccgccgctgtgctgcggtggcccacgctctctggactggccgcctacccttgccttggcgacctcatgcgccggccggtccgcagccgccctggcactggctgcgacagttgtcgcgccgtgggcaactgttggttcgttacttgggcgtgggcgcggacgcgagcagtgatgtaccagagcgcgtcttccacctgtcagcctttcgccacccgcgccgcctgctgctggcattgcgtggggaagctgccctggaccagaatgtgcccagctcgaatttccctggtagccgaggctcggtctccagtcagctccagtataaacgtctggagatgaacagcaaccctctgcacttcagggtatcttcgcgccgcccctcgttcgcggttccagtcccctcgaagtctctaattacacctcgcagttaccccttcttggtgatcttgcccccggtaaccctgctagcttctccgatctcgcttcaccacgacctcctacccgctaacccccacttcccacctgccacctcccagcttcctagccttgcctgaccagcttctgacgcccccaggtggagaatggtccaaatcccacggttccagagagagggctgctgctgatcgggctacaggtcctacatgcggagtgggacccaatagctggagccttgcaggacagtccttccagccaacccagccctctgcctcccgtcagcatcagcacacaggccccgggcaccagtgacctgccagccccagccgacctgactgtgtactcgtgtcctgtgtacatgggagggccccttggcaccgctaagctgcagagcaggaacatcgtgatgcatctgcctttacccaccaagctcacccccaacacctgtgtccaaaggagggtccatgtgtgcagcccacccctgtcttgagcccgtctaccaaaataaagttgtagtgattccatgaaaga

SEQ ID NO: 11712 - DNA, 4473 bp, Homo sapiens
ggacgagtggttagctctgtgtaggggctttcaggaggctctgggcccagatgatgtggcacaggcactgaagcggaagcaaaaatctgtcagcataccaccaaagaaccccctgctggctacacactctcccttcagtattctgtccttgctgagctctgaatcggagcagtaccagtgggatggaaacctgaagccacaggcaaagtcggcccacctggcaggcttgcttctgcgaagccccacacactacagtagttgccgttggcctctgctgcttgaccccagcaacgaggccctcatctggttggacccgctgcctctggaagagaatcgatcttttgcgccagccctcactgagggtagagggaaaggcctcatgagaaatcaaaagagagagagtaaaacggacatgaaagaggaagatgatgagagtgaagagagtaatgaggctgaggaccagacaaaagagcagaaggcagaggaaagaaaaaatgagcaggagaaagagcaagaggaaaatgaagagaaagaggaggagaagacagagagccaggggtcaaagccagcctatgagactcagcttccatcccttccctaccttagtgttctttcaggtgctgacccagagctgggttctcagctccaggaggcagctgcttgtggtgagagctggtccccacccaccctggcccctttttgacttgccccattctgtgaccccacaggcctcccacacctcagtctaacttcagttcccatccttcatcccaggcactaactatattgaagcgtcttgtgggaaccctcctatcagccacagggaagctggtcagagccagacctcgtgcctggggaatggggatcatgggtgctggcattgtgggtagggtgcctttgcctccctctcacaggcctgcctgtgttactgaccaatgtggagctgggtctagggtgcgaagaactgcaatggctgctgcaacgggagcagctgagtccaccccaggtgcagcctggcttctgtctgtatctcagcaccaccctctccctctgtgccatggaaaaaggtgaggcccagagggcaaattgccagcacagttgtgtggacacactaggccctcagcaccagccctaagagggcttcactcaacctggcccagagcaggcacaggtctatagcagggagccatactccctgtctactctaccccctggctctgccaaggggaagaggttaagcatctcccatgttaccccaagtgctaggttgtgaactgctaaaggggctgaatgtgttggatctgggcctgaacatggaaatactggaagaacagatgctgcatgaaatcttgtgcagagagtatcctgaactcgagacccgctggcaggacctaaagatcagagccctagatacctgcaaggctgtggaggctgctgagaatccgaagcgtcagaagccagccaagtttctgcggaacatagtgagggcccaaggaaagctatgccagctgcgtgctcattgtgaagagttagaagggcagaaactacaggagatggtattgtgggcaccctatcgacctgtggtttggcatggaatggccatggtaaaggccctaagccaactgcagaacctgctgccacttttctgtatgagcccagagaactggctggcagtcactaagcaggctctggacagcatgaagccacgtgagattaatcacggggaggacctggccagccatctactgcaattgagagcacacctgacccgccagctgctgggcagcaccgtgactgcactgggccttacccaagtacccttggtgggtgcattgggcgctttggctctgctgcaagcaacagggaaagcatcagagctggaaagactggcactctggcctggactagcagcctctcccagcacagtccacagcaagccagtctcagatgtggctcgaccggcctggcttgggccaaaagcctggcatgaatgtgagatgttagagctgctgcccccatttgttggcctgtgtgcctccctggcaggccactccagtgcttggcaggcttacctgtcactgtcatccacagtgctgggtcctgcacctgggccagggcctgagccactcagcctcctccagaagctgatcctgtggcgcgttctgcgacctgagtgcctggcaggtgccctggcagacttcaccactagcctcctgggtcggcccctggatgaaaacacgtatgctcccaccatgccctttaaacatagtcaggctactcagcccatgctgatcttgttgccaccgcctggccacccctcagccactctgcatcctctgactgtcatccagaaactggctgccaagtatcagcaggggcagaagcaactgcaggtgatagccctgggctctgaagcctgggacccagtctcagttgtggtcagcactctatcccaggctatgtatgaggggcactggctggtgctggacaactgtcatctgatgccccattggccgaaagagctgctacagctcttgctggaactgttaggcagagccaaggtggttgcagacctggaatcagaacagcttttagaccaacctgaaagcaggaatgtaagcactgttcacagagattttcgtctttggcttattgtgcctgcagagtctagtgcttctttgccagctgtgctgactcagcactccatgcctgttttctggaaccagtccctggagctgggccatgttttgattgacagtgtggagctagcccagcaagtactctacatgcaaccccccacccaggcactacctctgctcctcctccatggcctcctgctacaccggcagctctatggaacaaggctgcaggcacacagggggcgctggagtcaagtgactctaacccaggttcttcagacccaagaccagctgtgggcaagtcttagcaatccccgtgctgccatgcaagagctggctggtgagacccttcctctcccccttggagtcatcagcccccaggagagcctggaagagggtgggggtgggatacaattcacagctttggttttggcggtggtggaaactgaaggtactggaactgagagactctaacctcatcttcagcttcagttttctacgggggtcctctgggggacactgaggacagggaggccctgattagcctcacacaagcctgcctgagccccagtagtgggagctgggtccagccacacacacctcagtctttgctggccacgctcatgcccctcccagagctaagggagctggatgcaatggcagagtgcaaggcccagatgcacctactgccctcaccacctgaaccccggctctgcggactgagtgagggcccccaagcctggctgttgcgacgccagagtcgcgctctcttgagtgcgctgcagcggagttcacccgtgtgggttcctgagtctcgaagaggcgcccagcttgcggaaaggcgactgcggcaacgcctagtgcaagtcaaccggaggctggagtcactgcaggatctgctgacccacgtgattcgccaagacgagtccgacgccccgtggtcagtgctggggccaaatgcacggcggcctctggagggcgtcttagagaccgaggctctagaactgagccagttggtgggcacgctacaacgcgaccttgattgcctgttgcagcagctgaagggcgcacccccgtgcccctcccgccgctgtgctgcggtggcccacgctctctggactggccgcctacccttgccttggcgacctcatgcgccggccggtccgcagccgccctggcactggctgcgacagttgtcgcgccgtgggcaactgttggttcgttacttgggcgtgggcgcggacgcgagcagtgatgtaccagagcgcgtcttccacctgtcagcctttcgccacccgcgccgcctgctgctggcattgcgtggggaagctgccctggaccagaatgtgcccagctcgaatttccctggtagccgaggctcggtctccagtcagctccagtataaacgtctggagatgaacagcaaccctctgcacttcagggtggagaatggtccaaatcccacggttccagagagagggctgctgctgatcgggctacaggtcctacatgcggagtgggacccaatagctggagccttgcaggacagtccttccagccaacccagccctctgcctcccgtcagcatcagcacacaggccccgggcaccagtgacctgccagccccagccgacctgactgtgtactcgtgtcctgtgtacatgggagggccccttggcaccgctaagctgcagagcaggaacatcgtgatgcatctgcctttacccaccaagctcacccccaacacctgtgtccaaaggagggtccatgtgtgcagcccacccctgtcttgagcccgtctaccaaaataaagttgtagtgattccatgaaaga

SEQ ID NO: 11713 - DNA, 2995 bp, Homo sapiens
caggccctgggccgccagctggtgatgctaccctgctcacctcagatagaggctcaatgcctgagcaactatctgaatggtgccctgcagggtggtgcctggctgctgttggagaaagttcatcagctgccccctggcttgctctctgccctgggccagcgcctgggtgaactgcaccacttgtatgccccactgtaccaggaggcttcccgaaacacaagcaccatagaccccacccagccccagctccttggcagtagcttctttgaaaaacatcacgtgtctgtgcgccttggctatggctgtctcctggtactgcgtgccctgagctctgctgtgcctgccaacctgcacctgctgctgcggcctgtggcattggcattgcctgatctgcggcaagtggcagagctgactctgctgggtgcagggatgagggatgccttccagatggctacccgcctatccaaattcttctctctagagcgtgagctggtgtctgggcccctgccctgccgcctgccactgctcaagcagatactggaagacacaatacggacactaaatgtgaccaaggaggaaccgaagtgccagaagcctcgcagcctagctgccattgaggaggctgccctactgcgctcaccactgtttagcattctcaatgggctccacctgcacaacctccgagggctgttgtgtgcgcttttccctagcgccagccaagtgctggcagaacctatgacttacaagctgatgaagccattggtggtggaggaactgcaacaggtaggtctggatcccagccctgacattttggggtccttggaacagttgagccaggccctgagccgggcctcaggcattctgctcctgggccctgcgggcagcggcaagaccacttgttggcacagcttatttaagatccagaatcggctggcagccatggaggacacctcaacccaaggctgccagcctgtggaaattacccacctgtaccccagtggcctcagcccccaggagttcctgggatggctagagggctcctgctggcatcatggcatctttcccaaggtacttcgtgcagccggtcagtgtaacaacatgggccaaaagaggcagacagaggaatcaatcgggatccagcactggataatatgtgatggagcctccaatggtgcttggctggactccatcacttgcctcctgagtgagcttccccagcttagtctccccagtggacagcagatagcacgacccccaggcacctttctcttgatggaggtggctgacacaacaggcatatcccccacagtggtaggctgttgtgccctagtctggtgtggtggagagcagacttggcagtgtatacttagtgccctgatggcatcccttccttatgagtaccgcctgcagcaccggacagtcgctgagctcaaccacatggctgaggttctggtgcctgcaacattgcgattcctcacctgccaaggtgtcagctctctgctgcaggtacacgggcagcaggctgtttgtgcaggtgtggcagaagttaccagcatggcacgcatcttgcatagtctgcttgacctccaccttcgcctaaaggaggagaaggcccctggcccaggtgggaagatggacgggctggtttgagagagatggggccttaagggtagctggggtatatagctggagcctggggcgtgtgttctttggtggatctgggccaggagtgaaaagtaatactgtcaaccttttttctttctttcaccttccacctttttctactggggctcctctcgtggccatggcaactttcacagaggacctcagctatagtgatcctgtggcccaaagcttcaggtcttcaaaaagcagctttctaaaccggtcccaggttgacagtgacgatgtgccagataagtgcagggaacacttgctggctgtcagcagttttctttttgccttgatctggggctttggagcccaccttccctccaggtacctaccaggatgggggatgggagatgcagagggctgagatggactggcccatggaagtaaaaacccacatgacatcactgttagggtatggtggagtgtgtgagtgtgtcataaatggaagtgttgtaactgtctgacgcttttgcctgtgtgtccatctgagcaggttctggcccatctttgataccttcataagggattctattagtcgcctctccaactaccctgagccaccaccctcagccttggtgtttgatctacatgtaagccctgaagatggaacactggtccccttcactggccaatacctgagcagccacatcaaaggaactttgggcacctttcacccttctatccaggtgtgaggacagtaaggcaagagctggggttagaacttcaggacttattttaggggtaatccatgttcaaagatcagctgaggcccacttgctccctttctttgatatattttcacaatcacaagaatacatgaaatattttccaagtacagctctaggacaagtcccttagacttttattttcagctagattactgtcttatactggaggtgctgcagtaagtcccacttctgtcttgcagactgaacggctcttgtatgtggtggacctgcttctgtcagggggacagccagtgttgctggctggagaggcagcaacagggaagtcagcctttgtggaggtgctggtagagccacatcacccttacatatacagccccatccaccctgccttcagttcctcccacctccgtctcctgctgagcagaggaatccagggccaaacacaagccagcccacagcctgggcatcaccaggattctaaaccctccctcctcttcttgctggaggacctgcacctagccacttctggtgaggagctgcgaagagggaaggaaggagctactgtcatctcttgagactataaaatccctagcaatattcattgactctcaaatatatgtctgtagatctaa

SEQ ID NO: 11714 - DNA, 2557 bp, Homo sapiens
caggccctgggccgccagctggtgatgctaccctgctcacctcagatagaggctcaatgcctgagcaactatctgaatggtgccctgcagggtggtgcctggctgctgttggagaaagttcatcagctgccccctggcttgctctctgccctgggccagcgcctgggtgaactgcaccacttgtatgccccactgtaccaggaggcttcccgaaacacaagcaccatagaccccacccagccccagctccttggcagtagcttctttgaaaaacatcacgtgtctgtgcgccttggctatggctgtctcctggtactgcgtgccctgagctctgctgtgcctgccaacctgcacctgctgctgcggcctgtggcattggcattgcctgatctgcggcaagtggcagagctgactctgctgggtgcagggatgagggatgccttccagatggctacccgcctatccaaattcttctctctagagcgtgagctggtgtctgggcccctgccctgccgcctgccactgctcaagcagatactggaagacacaatacggacactaaatgtgaccaaggaggaaccgaagtgccagaagcctcgcagcctagctgccattgaggaggctgccctactgcgctcaccactgtttagcattctcaatgggctccacctgcacaacctccgagggctgttgtgtgcgcttttccctagcgccagccaagtgctggcagaacctatgacttacaagctgatgaagccattggtggtggaggaactgcaacaggtaggtctggatcccagccctgacattttggggtccttggaacagttgagccaggccctgagccgggcctcaggcattctgctcctgggccctgcgggcagcggcaagaccacttgttggcacagcttatttaagatccagaatcggctggcagccatggaggacacctcaacccaaggctgccagcctgtggaaattacccacctgtaccccagtggcctcagcccccaggagttcctgggatggctagagggctcctgctggcatcatggcatctttcccaaggtacttcgtgcagccggtcagtgtaacaacatgggccaaaagaggcagacagaggaatcaatcgggatccagcactggataatatgtgatggagcctccaatggtgcttggctggactccatcacttgcctcctgagtgagcttccccagcttagtctccccagtggacagcagatagcacgacccccaggcacctttctcttgatggaggtggctgacacaacaggcatatcccccacagtggtaggctgttgtgccctagtctggtgtggtggagagcagacttggcagtgtatacttagtgccctgatggcatcccttccttatgagtaccgcctgcagcaccggacagtcgctgagctcaaccacatggctgaggttctggtgcctgcaacattgcgattcctcacctgccaaggtgtcagctctctgctgcaggtacacgggcagcaggctgtttgtgcaggtgtggcagaagttaccagcatggcacgcatcttgcatagtctgcttgacctccaccttcgcctaaaggaggagaaggcccctggcccagaggacctcagctatagtgatcctgtggcccaaagcttcaggtcttcaaaaagcagctttctaaaccggtcccaggttgacagtgacgatgtgccagataagtgcagggaacacttgctggctgtcagcagttttctttttgccttgatctggggctttggagcccaccttccctccaggtacctaccaggatgggggatgggagatgcagagggctgagatggactggcccatggaagtaaaaacccacatgacatcactgttagggtatggtggagtgtgtgagtgtgtcataaatggaagtgttgtaactgtctgacgcttttgcctgtgtgtccatctgagcaggttctggcccatctttgataccttcataagggattctattagtcgcctctccaactaccctgagccaccaccctcagccttggtgtttgatctacatgtaagccctgaagatggaacactggtccccttcactggccaatacctgagcagccacatcaaaggaactttgggcacctttcacccttctatccagactgaacggctcttgtatgtggtggacctgcttctgtcagggggacagccagtgttgctggctggagaggcagcaacagggaagtcagcctttgtggaggtgctggtagagccacatcacccttacatatacagccccatccaccctgccttcagttcctcccacctccgtctcctgctgagcagaggaatccagggccaaacacaagccagcccacagcctgggcatcaccaggattctaaaccctccctcctcttcttgctggaggacctgcacctagccacttctggtgaggagctgcgaagagggaaggaaggagctactgtcatctcttgagactataaaatccctagcaatattcattgactctcaaatatatgtctgtagatctaa

SEQ ID NO: 11715 - DNA, 2867 bp, Homo sapiens
atgagaggtggtcccatcaagaactacgtgacgctggtgagccgcctgaatgtttggcaggcccgtgtctccagtatgcctatcgagttgctcacaaaaggcgggttgctgctacttagctgccatgatgtacaggcagagatggaatccaagctgaacagcataaggaaggacattcttgcacacgtgcaaaatgagtgctggaacctcagtcaacaactcatgacagagctcacagatttcatgcatatcttccgaaccatcaactcagatattcatgccattgcacagtgcacccagaagttgaatgaagccaatgaacagtacgtcgagctggaggagcgaatggaatacgtacgggcactccacgaactcatccgcaaccactttagcctctttagtgctgagaatgaagcactggacatctcgttcagcccagctatggcccaggagaagacagagggctggctgacagaggcagcacggatgagcacaaccctggagctgcacagccccgtgctgcagcactgcatgcgcatcctgggggagtttcgcagctacctgcccctgctcactaagctgggcagcctccacccacagagcctcaactgccagtgtctcctgcgtgacccagagaagagctgccagccagtgttggagactctgcgccaggccatggatggcactgtgtatgcccacagcaccttggaactgcagacgctgcagcctacagtcaacttccttgccactgtcacagtgccaggatactgtgagcgcccactgtgtccacgcctctttcgactcttcacagtcctggccctggaaagcatgacccaggccaccctgctggaaagacatgtgcctatcattcaggcttggcttgagcgtttcccttctgtggaacgggagcgtgctctggcacgaggtctggttagggcctcagtagaggcctgggaggctgtgtgcaattgcttcatgccttcacccctccacccacactaccacttctccctacactctgtgagccacctactgagcagcctgcagctgctgcccaacagaacaggctcccgaggttttgtggactatcccaaccaccaggagcacttgcgccgggtgtcaggcctgcgaggcacttgtctgaccgttatgatggccacacgcaatgtggtgcgtctttggttgcatgaggcacagagaaccttttgcgaccggctggacagccccagggaacgctcctactgtgccaagctgctcctagtagtagctcaaagtgtcttctgctgtgggccagggccccagcacctgggcaaggaccatcaggagagtgaggaggaggaggaggaggagagggtgcccgaagtagaatctgaaggggagttggcccagtgggaggacttcagcaacagcaatagtgaaacagaggaggaagaggaaccttatggccttcaggtcgccagagtctcaaactccagagatccaagtctaacaccatccataggaccagtaagcagggggatgaaggaaagcataagtcacaagataaggcaagagaaaggcacaagggcatccaactataggctccaggtaaggagatcattcaagacttggtggcagaagaaaccccagatggacctgatctcacccttgttgttaccagtgttactactacatccccaggaaaagccctcagacctggtcttcagtcaggagctgatactggggcctaactctgagacccccaacttgtacctggaacgacagtgggagaagctagaggagcagttggccacctcagctgctcaactgaagttgagcccccacctggcccggtgtcattccatggcccagcacgtggcccgcctggtccgggtgctggccaggccccggcagcatggcctgctgctctcgggggctctgggtactgggcgccacactgccatcactctggcttctagcatttgtcaggcccatttctttcatctaccatctgggtcagaggaggccattctccaatgtctacgagatgccagctggcatgctggcatgttaagccagccagtggctctgttggtacccagtggtgtggatctcactacacttcatcgcctcctggccctggcaacctcaggcagtttccctggccagtacacagaagcagatttggaccgcattggagaacacctccccagggagaaccttggtgtcaaacagaacatcaagaaggaaatggtgttgcagaggtgaggccaagaaccccatatgcgaatctgctctgctcttacgctgtcttggccaaaaggccaaaaggaattctgtgggctgccatgagggctgagaagattggggctaagtggtctggctgggactggggccaggaggggcaagcaaaggtaaaggggaggacattagctgagccctggcccacaggttccaccagcaagtgtgcagccaccttcacctgttcttcctgattggagataaacaggcccacaagcagctgccctccacccttttcctgaggctccttcaactggccactgccagcattgaccgctatgaaccctgggaccaagctgccctggccaaggtggcccagcatcacctggagggtgctcagagtgtgccccttgatgacgggtccagaatgccttggagaatctgagaatgctgattaaggagcacggtacccatgccaatctgatctttgacttggaacagcagctgaaagactccggcaaggccttggaatattctgatttctgcagttactaattttttagttacaacagcaacttctttctactctttcagtcttctaatacttgtaattaagtctctgtattaaaagtcctcttcttgaaata

SEQ ID NO: 11716 - DNA, 6124 bp, Homo sapiens
agaaagtcacagggtacagcaactcatacttgctcccagcaccaggccagccccattctgcctccagggagtcacccaaaatagagagatgagggtaaaataagacctaggaatactatttatttgcctccatggcctttgaacttgcacatccaacgtaacggctcctgtgtgttcttgattgttccaattatcatttttcctctcgaatacctgagagcattcattattttgcaagagatttgagaatccctgtgccctaacttttctttccttgatgtgggatgttcttctgtgactagaaaccttctctatgtctacccacagaggctgaactttgtaaacaaactagcatcagcccggaacattacaataaagatccagtttatgtgtggagaagatgctagcaatgcgatgccggtaaggagggaaacgaacatttgcctcaaatcagggtgggctgctcacccctgtcacttcacacaagtccgggactcatcagtgtacaaagtccgtctattccaggccaatactgctcagcatgtgcaagggcttctgtgcccaggatatcagtggggaaacagggtcatctttggaaaatccagcgggcctgaatttctgcaggaagtgtacacagctgttacataccataataagtctcctgacttttatgaagaagtgaaaattaagctccccgctaagctcacagtaaatcaccacctcctgttcaccttctaccatatcagctgtcagcagaagcaaggagcctccgtggaaactctcctgggatattcatggctgccaattctcttaaatgaacgtcttcaaactggatcctactgtctcccagttgccttggaaaaattgccacccaactactccatgcattctgctgagaaagtcccattacagaatcctcccattaagtgggctgaaggacataagggagtatttaatattgaagtgcaagctgtttcttctgtacacacccaggacaaccacctggagaagttcttcaccctctgccactccctggagagccaggtgaccttccccatccgcgtgctggatcagaaaatcagcgagatggcgctggagcatgagctgaagctcagcatcatctgcctgaactcctcccgcctggagccgctcgtgctcttcctgcacctggtgctggacaagctcttccagctgtccgtgcagcccatggtcatcgctggccagacagccaacttctcccagtttgccttcgagtccgtggtggccatcgccaacagtctgcacaacagcaaggacctgagcaaggaccagcatgggaggaactgcctgctggcttcctacgtgcactacgtcttccgcctgccagaggtgcaaagggatgtgcccaagtcaggcgctcccactgccctcctagaccctcggagctaccacacgtatggccgcacatcagctgctgctgtgagttcaaagctgctgcaggcccgggtgatgagcagcagtaacccagacctcgcggggacacactccgcagcagacgaggaagtgaagaacatcatgtcttcaaagatcgccgatcgcaactgcagccgaatgtcttactattgctctggcagtagtgatgctccaagttcacctgcagccccaaggccagccagcaaaaagcatttccatgaggagcttgcccttcagatggtggtcagcaccggaatggtgagagaaacagtcttcaagtatgcctggttcttctttgagcttctggtgaaaagcatggcccagcacgtacataacatggacaaacgggacagttttcggaggactcgtttttctgaccgtttcatggatgacataactactattgttaatgtggtcacctcggaaattgcagcccttttagtaaaaccacagaaggaaaatgaacaggcggaaaagatgaacatcagcctggctttcttcttgtatgaccttctctccctcatggatcggggctttgtgtttaacctcatcagacattattgcagccagctgtcagccaagctcagtaaccttccaacgctcatttccatgaggctagagttcctgagaatcctctgtagccatgagcattacctcaatctgaaccttttttttatgaatgctgatactgctccaacatctccttgtccttccatatcttcccagaactcaagctcctgctccagcttccaggaccagaagatcgccagcatgttcgatctgacttccgagtaccgccagcagcacttcctcaccgggctcctcttcacagaactggctgctgccctggatgccgaaggggaaggaatcagcaaagtacaaaggaaagctgtcagtgcaattcacagcctgctaagttctcacgacctggacccacgctgtgtcaaaccagaggtgaaggtcaaaatcgccgccctttacctacctttagttggcatcattttggatgctttgccacagctctgtgactttacagttgcagatactcgcagataccgcaccagtggctcggatgaagaacaagaaggagccggtgccattaaccagaatgtggctctggccatagcagggaataatttcaatttgaaaacaagtggaatagtgctgtcttccttgccctataagcagtacaacatgctgaacgcggacactactcgcaacctcatgatctgcttcctctggatcatgaaaaatgctgatcagagcctcattaggaagtggattgctgacctgccatcaacgcagctcaacaggattttagatctacttttcatctgtgtgttatgttttgagtataagggaaaacagagttctgacaaagtcagtacccaagtcctgcagaagtcaagggatgtcaaggcccggctggaagaggctttgctccgtggggaaggggccagaggggagatgatgcgccgccgggctccagggaacgaccgatttccaggcctaaatgaaaatttgagatggaagaaagagcagacacattggcggcaagctaatgagaagctagataaaacaaaggccgagttagatcaagaagccttgatcagtggcaatctggctacagaagcacatttaatcatcctggatatgcaggaaaacattatccaggcgagctcggctctggactgtaaagacagcctgctgggaggtgttctgagggtgctggtgaattctctgaactgtgatcagagtaccacctacctgactcactgctttgcaacactccgtgctctcatcgccaagtttggagacttactctttgaagaggaggtggaacagtgtttcgacctatgtcaccaagtcctgcaccactgcagcagcagcatggatgtcacccggagccaagcctgtgccaccctttacctcctcatgaggttcagttttggagccaccagtaattttgcaagagtaaagatgcaagtaaccatgtccctggcatctttggtgggaagagcaccagactttaatgaagagcacctgagaagatccttgaggacaattttggcctattcagaagaggacacagccatgcagatgactccttttcccacccaggtggaggaacttctctgtaatctgaatagcatcttatatgacacagtgaaaatgagggaatttcaggaagatcctgagatgcttatggatctcatgtacagaattgccaagagttaccaggcatctcctgatctgcggctgacctggctccagaacatggcagagaaacacaccaagaagaagtgctacacggaggctgccatgtgcctggtgcacgccgctgcgttagtggctgagtatctgagcatgctggaggaccacagctacctgcccgtgggcagtgtcagcttccagaatatttcttccaatgtgctggaggagtctgtggtctctgaggacaccctgtcacctgacgaggatggggtgtgcgcaggccagtacttcaccgagagtggcctggtaggcctcctggagcaggccgcggagctcttcagcacgggaggcttatatgagacagttaatgaggtctacaagctggtcatccccatcctagaagcgcatcgagaattccggaagctgacactcactcacagcaagctgcagagagccttcgacagcatcgttaacaaggatcataagagaatgtttggaacctacttccgagttggtttctttggatccaaatttggggatttggatgaacaggagtttgtctacaaagagcctgcaattaccaagcttcctgagatctcacatagactagaggcattttatggtcaatgttttggtgcagaatttgtggaagtgattaaagactccactcctgtggacaaaaccaagttggatcctaacaaggcctacatacagatcacttttgtggagccctactttgatgagtatgagatgaaagacagggtcacatactttgagaagaatttcaacctccggaggttcatgtacaccaccccgttcaccctggaggggcggcctcggggagagctgcatgagcagtacagaaggaacacagtcctgaccactatgcacgccttcccctacatcaagaccaggatcagcgtcatccagaaggaggagtttgttttgacaccgattgaagttgccattgaagacatgaagaagaagaccctgcagttagcagttgccattaaccaggagccgcctgatgcaaagatgcttcagatggtgctgcaaggctctgtgggagctactgtaaatcagggaccactggaagtagcccaagtgtttttggctgaaattcctgctgatccaaaactctatcgacatcacaacaagttgaggttatgctttaaggaattcatcatgagatgtggtgaagctgtagagaaaaacaagcgtctcatcacggcagaccagagggaatatcagcaggaactcaaaaagaactataacaagctaaaagagaacctcaggccaatgatcgagcggaaaattccagaactgtacaagccaatattcagagttgagagtcaaaagagggactccttccacagatctagtttcaggaaatgtgaaacccagttgtcacagggcagctaagaaaagccatcttcattcgtggagactgtggccctgcaaccctggagaaggacttgctggtacttaaaaaatgggacatttgccacccaggactgactgtacactccctgatcagccagcactctggaagctttgggatcccaggaaccatggaattattcccaaatggactctgaccagatttttgccatactggggggtggcgggatggaggatgggtactcaggcatgactgcgtatttattaaagtgtgtttttccacaatgtaccaaacaaggcataagcagcttctcctgctgactggccaatcactgcccatctgagagatgatttcctctggcccatatttgaatttattggagtaactcaaattgcctgaggaaaaatggaaaaattatccaccagtcgattcaaactgaatttcactctttataggaaggcagggcaaacttgtaggagtacgaaacattttcaataaatctacaaagggaagccttactacaattccaaaaatcatcatggttggaaatttgggaggagattatttgtgaacttgttacccttttggtaatggtggactaattgctgtatagttatttttgttttattattactgttacattaatttaacatgcatttatagaagaatacattcaaagcactgatgtaggagatacacggtacttggagcagtcagccagaaatcacagatactgctttcacttaaatggaaacaattctccgataatgctttgctttttttcttatgtcactcttgtgtactatctatttttctcctctctgggaccaagtttctttttataaagcaataatatctctgttttcatttcagaacattgtgctgtctgtcagcatatgtatatcagctacaaaatatattcaactttgacttcttttgacaaaggactttaggaaaaagaggaacaaagacattatttgagaattaaattatatatttttaatatgactgtgaccttgactgataataaagatgtaataagaattgcaagctaaa

SEQ ID NO: 11717 - DNA, 1922 bp, Homo sapiens
gagtattgtcacatatcagcccagaaagtcacagggtacagcaactcatacttgctcccagcaccaggccagccccattctgcctccagggagtcacccaaaatagagagatgagggtaaaataagacctaggaatactatttatttgcctccatggcctttgaacttgcacatccaacgtaacggctcctgtgtgttcttgattgttccaattatcatttttcctctcgaatacctgagagcattcattattttgcaagagatttgagaatccctgtgccctaacttttctttccttgatgtgggatgttcttctgtgactagaaaccttctctatgtctacccacagaggctgaactttgtaaacaaactagcatcagcccggaacattacaataaagatccagtttatgtgtggagaagatgctagcaatgcgatgccggtcatctttggaaaatccagcgggcctgaatttctgcaggaagtgtacacagctgttacataccataataatggctgccaattctcttaaatgaacgtcttcaaactggatcctactgtctcccagttgccttggaaaaattgccacccaactactccatgcattctgctgagaaagtcccattacagaatcctcccattaagtgggctgaaggacataagggagtatttaatattgaagtgcaagctgtttcttctgtacacacccaggacaaccacctggagaagttcttcaccctctgccactccctggagagccaggtgaccttccccatccgcgtgctggatcagaaaatcagcgagatggcgctggagcatgagctgaagctcagcatcatctgcctgaactcctcccgcctggagccgctcgtgctcttcctgcacctggtgctggacaagctcttccagctgtccgtgcagcccatggtcatcgctggccagacagccaacttctcccagtttgccttcgagtccgtggtggccatcgccaacagtctgcacaacagcaaggacctgagcaaggaccagcatgggaggaactgcctgctggcttcctacgtgcactacgtcttccgcctgccagaggtgcaaagggatgtgcccaagtcaggcgctcccactgccctcctagaccctcggagctaccacacgtatggccgcacatcagctgctgctgtgagttcaaagctgctgcaggcccgggtgatgagcagcagtaacccagacctcgcggggacacactccgcagcagacgaggaagtgaagaacatcatgtcttcaaagatcgccgatcgcaactgcagccgaatgtcttactattgctctggcagtagtgatgctccaagttcacctgcagccccaaggccagccagcaaaaagcatttccatgaggagcttgcccttcagatggtggtcagcaccggaatggtgagagaaacagtcttcaagtatgcctggttcttctttgagcttctggtgaaaagcatggcccagcacgtacataacatggacaaacgggacagttttcggaggactcgtttttctgaccgtttcatggatgacataactactattgttaatgtggtcacctcggaaattgcagcccttttagtaaaaccacagaaggaaaatgaacaggcggaaaagatgaacatcagcctggctttcttcttgtatgaccttctctccctcatggatcggggctttgtgtttaacctcatcagacattattgcagccagctgtcagccaagctcagtaaccttccaacgctcatttccatgaggctagagttcctgagaatcctctgtagccatgagcattacctcaatctgaaccttttttttatgaatgctgatactgctccaacatctccttgtccttccatatcttcccaggtaataaaagaattatttaactaaaa

SEQ ID NO: 11718 - DNA, 1873 bp, Homo sapiens
ttttgtctcctgtaacaatttacgcgccgtgtaactgtgaatctttcaaagcctcagttttatgaccctgtggagccagtggactttgaaggacttctgatgacacacctgaacagcctggatgtgcagcttgcccaggagctcggggacttcactgatgacgacttggacgtggtgttcacgccaaaggaatgtaggactttgcagccctctttgccggaggaaggggttgaactggaccctcatgtcagggactgtgttcagacctacatccgtgagtggctaatcgtgaaccggaaaaaccaaggaagtccagaaatctgtggctttaaaaagactggatctcgaaaagattttcacaagacgcttccgaaacagacgtttgagtcggaaaccttggagtgcagtgaacccgctgctcaggcaggcccccgccacttaaacgtgctgtgcgacgtgtctgggaaaggccccgtcactgcctgtgactttgacctccgcagcctgcagcctgacaagcggctagaaaacctcctgcagcaagtgagtgccgaggactttgagaagcagaacgaggaggcccggaggaccaataggcaggccgagctctttgccctttacccatcagtggacgaggaggatgctgtggaaatacgtccagtaccagaatgtcccaaggaacacctgggcaacagaatattggtcaagttgctgaccttgaagttcgagattgaaattgagcccctgtttgccagcattgccctctacgatgttaaagaaaggaaaaagatctcagaaaattttcactgtgacctgaactctgaccagttcaaaggatttctgcgagctcacacgccttcagtggccgcatcaagtcaggcgagatctgcagtcttctcagtcacctacccgtcctcagacatctacctggtagtcaagattgaaaaagtcctgcagcagggagagattggagactgtgcagagccctacacggttatcaaagaaagtgatggtggaaagagtaaagaaaagattgaaaaactaaaactccaagctgaatccttctgccagcgtttggggaaataccggatgccctttgcctgggcacccataagcttatcaagcttcttcaatgtctccacccttgagagggaggtaactgatgtggactctgtggttgggagaagctcagtgggtgaacggaggacattggcccaatctagaaggctttctgaaagagccctctccttggaggaaaatggggttggatccaacttcaaaacctccactctgagcgttagcagctttttcaagcaggaaggagatcgccttagcgatgaagacttattcaagtttttagctgactacaaaagatcatcatccttacagagacgagtcaagtcaattccaggcttgctaagactggagatttctacagctccagagatcatcaattgctgtctgactcctgaaatgctgcccgtgaaaccctttcctgaaaaccggacacgcccgcacaaagagattttggaatttccaacacgagaagtatatgtccctcacactgtgtacaggtaagaaacacaggctcgggctgggcgtggtggcttacaccataatcccataactttgggaggccgaggcaggaggattgcttgagctcaggagtttgagaccagccttggcaacatggcaaaaccgtgtctctacaacatatacaaaatttagctgggcatggtggtgcatgcttgtaatcccagcaacttggcaggctgaggcaggagaatcgcttgaacccaggaggcagaggttgcagtgagccaagattgcactactgcactccagcctgggagacagaaccagactctgtctc

SEQ ID NO: 11719 - DNA, 7452 bp, Homo sapiens
gacagacgaggtttgcgcttggctgggcatgttccgcggctactctgcggcgcgccaggcccccgctttccgcaccccgcgaccctagaagccaccgaaccgccggcgggccatggccactctgccgagcgcagagcgccgcgcgttcgcgctcaagatcaacaggtattcttcagcggaaataaggaaacagtttactctcccaccaaaccttggccagtaccatcgacagagcataagtacctctggcttcccctctcttcaactacctcagttttatgaccctgtggagccagtggactttgaaggacttctgatgacacacctgaacagcctggatgtgcagcttgcccaggagctcggggacttcactgatgacgacttggacgtggtgttcacgccaaaggaatgtaggactttgcagccctctttgccggaggaaggggttgaactggaccctcatgtcagggactgtgttcagacctacatccgtgagtggctaatcgtgaaccggaaaaaccaaggaagtccagaaatctgtggctttaaaaagactggatctcgaaaagattttcacaagacgcttccgaaacagacgtttgagtcggaaaccttggagtgcagtgaacccgctgctcaggcaggcccccgccacttaaacgtgctgtgcgacgtgtctgggaaaggccccgtcactgcctgtgactttgacctccgcagcctgcagcctgacaagcggctagaaaacctcctgcagcaagtgagtgccgaggactttgagaagcagaacgaggaggcccggaggaccaataggcaggccgagctctttgccctttacccatcagtggacgaggaggatgctgtggaaatacgtccagtaccagaatgtcccaaggaacacctgggcaacagaatattggtcaagttgctgaccttgaagttcgagattgaaattgagcccctgtttgccagcattgccctctacgatgttaaagaaaggaaaaagatctcagaaaattttcactgtgacctgaactctgaccagttcaaaggatttctgcgagctcacacgccttcagtggccgcatcaagtcaggcgagatctgcagtcttctcagtcacctacccgtcctcagacatctacctggtagtcaagattgaaaaagtcctgcagcagggagagattggagactgtgcagagccctacacggttatcaaagaaagtgatggtggaaagagtaaagaaaagattgaaaaactaaaactccaagctgaatccttctgccagcgtttggggaaataccggatgccctttgcctgggcacccataagcttatcaagcttcttcaatgtctccacccttgagagggaggtaactgatgtggactctgtggttgggagaagctcagtgggtgaacggaggacattggcccaatctagaaggctttctgaaagagccctctccttggaggaaaatggggttggatccaacttcaaaacctccactctgagcgttagcagctttttcaagcaggaaggagatcgccttagcgatgaagacttattcaagtttttagctgactacaaaagatcatcatccttacagagacgagtcaagtcaattccaggcttgctaagactggagatttctacagctccagagatcatcaattgctgtctgactcctgaaatgctgcccgtgaaaccctttcctgaaaaccggacacgcccgcacaaagagattttggaatttccaacacgagaagtatatgtccctcacactgtgtacagaaaccttctctatgtctacccacagaggctgaactttgtaaacaaactagcatcagcccggaacattacaataaagatccagtttatgtgtggagaagatgctagcaatgcgatgccggtcatctttggaaaatccagcgggcctgaatttctgcaggaagtgtacacagctgttacataccataataagtctcctgacttttatgaagaagtgaaaattaagctccccgctaagctcacagtaaatcaccacctcctgttcaccttctaccatatcagctgtcagcagaagcaaggagcctccgtggaaactctcctgggatattcatggctgccaattctcttaaatgaacgtcttcaaactggatcctactgtctcccagttgccttggaaaaattgccacccaactactccatgcattctgctgagaaagtcccattacagaatcctcccattaagtgggctgaaggacataagggagtatttaatattgaagtgcaagctgtttcttctgtacacacccaggacaaccacctggagaagttcttcaccctctgccactccctggagagccaggtgaccttccccatccgcgtgctggatcagaaaatcagcgagatggcgctggagcatgagctgaagctcagcatcatctgcctgaactcctcccgcctggagccgctcgtgctcttcctgcacctggtgctggacaagctcttccagctgtccgtgcagcccatggtcatcgctggccagacagccaacttctcccagtttgccttcgagtccgtggtggccatcgccaacagtctgcacaacagcaaggacctgagcaaggaccagcatgggaggaactgcctgctggcttcctacgtgcactacgtcttccgcctgccagaggtgcaaagggatgtgcccaagtcaggcgctcccactgccctcctagaccctcggagctaccacacgtatggccgcacatcagctgctgctgtgagttcaaagctgctgcaggcccgggtgatgagcagcagtaacccagacctcgcggggacacactccgcagcagacgaggaagtgaagaacatcatgtcttcaaagatcgccgatcgcaactgcagccgaatgtcttactattgctctggcagtagtgatgctccaagttcacctgcagccccaaggccagccagcaaaaagcatttccatgaggagcttgcccttcagatggtggtcagcaccggaatggtgagagaaacagtcttcaagtatgcctggttcttctttgagcttctggtgaaaagcatggcccagcacgtacataacatggacaaacgggacagttttcggaggactcgtttttctgaccgtttcatggatgacataactactattgttaatgtggtcacctcggaaattgcagcccttttagtaaaaccacagaaggaaaatgaacaggcggaaaagatgaacatcagcctggctttcttcttgtatgaccttctctccctcatggatcggggctttgtgtttaacctcatcagacattattgcagccagctgtcagccaagctcagtaaccttccaacgctcatttccatgaggctagagttcctgagaatcctctgtagccatgagcattacctcaatctgaaccttttttttatgaatgctgatactgctccaacatctccttgtccttccatatcttcccagaactcaagctcctgctccagcttccaggaccagaagatcgccagcatgttcgatctgacttccgagtaccgccagcagcacttcctcaccgggctcctcttcacagaactggctgctgccctggatgccgaaggggaaggaatcagcaaagtacaaaggaaagctgtcagtgcaattcacagcctgctaagttctcacgacctggacccacgctgtgtcaaaccagaggtgaaggtcaaaatcgccgccctttacctacctttagttggcatcattttggatgctttgccacagctctgtgactttacagttgcagatactcgcagataccgcaccagtggctcggatgaagaacaagaaggagccggtgccattaaccagaatgtggctctggccatagcagggaataatttcaatttgaaaacaagtggaatagtgctgtcttccttgccctataagcagtacaacatgctgaacgcggacactactcgcaacctcatgatctgcttcctctggatcatgaaaaatgctgatcagagcctcattaggaagtggattgctgacctgccatcaacgcagctcaacaggattttagatctacttttcatctgtgtgttatgttttgagtataagggaaaacagagttctgacaaagtcagtacccaagtcctgcagaagtcaagggatgtcaaggcccggctggaagaggctttgctccgtggggaaggggccagaggggagatgatgcgccgccgggctccagggaacgaccgatttccaggcctaaatgaaaatttgagatggaagaaagagcagacacattggcggcaagctaatgagaagctagataaaacaaaggccgagttagatcaagaagccttgatcagtggcaatctggctacagaagcacatttaatcatcctggatatgcaggaaaacattatccaggcgagctcggctctggactgtaaagacagcctgctgggaggtgttctgagggtgctggtgaattctctgaactgtgatcagagtaccacctacctgactcactgctttgcaacactccgtgctctcatcgccaagtttggagacttactctttgaagaggaggtggaacagtgtttcgacctatgtcaccaagtcctgcaccactgcagcagcagcatggatgtcacccggagccaagcctgtgccaccctttacctcctcatgaggttcagttttggagccaccagtaattttgcaagagtaaagatgcaagtaaccatgtccctggcatctttggtgggaagagcaccagactttaatgaagagcacctgagaagatccttgaggacaattttggcctattcagaagaggacacagccatgcagatgactccttttcccacccaggtggaggaacttctctgtaatctgaatagcatcttatatgacacagtgaaaatgagggaatttcaggaagatcctgagatgcttatggatctcatgtacagaattgccaagagttaccaggcatctcctgatctgcggctgacctggctccagaacatggcagagaaacacaccaagaagaagtgctacacggaggctgccatgtgcctggtgcacgccgctgcgttagtggctgagtatctgagcatgctggaggaccacagctacctgcccgtgggcagtgtcagcttccagaatatttcttccaatgtgctggaggagtctgtggtctctgaggacaccctgtcacctgacgaggatggggtgtgcgcaggccagtacttcaccgagagtggcctggtaggcctcctggagcaggccgcggagctcttcagcacgggaggcttatatgagacagttaatgaggtctacaagctggtcatccccatcctagaagcgcatcgagaattccggaagctgacactcactcacagcaagctgcagagagccttcgacagcatcgttaacaaggatcataagagaatgtttggaacctacttccgagttggtttctttggatccaaatttggggatttggatgaacaggagtttgtctacaaagagcctgcaattaccaagcttcctgagatctcacatagactagaggcattttatggtcaatgttttggtgcagaatttgtggaagtgattaaagactccactcctgtggacaaaaccaagttggatcctaacaaggcctacatacagatcacttttgtggagccctactttgatgagtatgagatgaaagacagggtcacatactttgagaagaatttcaacctccggaggttcatgtacaccaccccgttcaccctggaggggcggcctcggggagagctgcatgagcagtacagaaggaacacagtcctgaccactatgcacgccttcccctacatcaagaccaggatcagcgtcatccagaaggaggagtttgttttgacaccgattgaagttgccattgaagacatgaagaagaagaccctgcagttagcagttgccattaaccaggagccgcctgatgcaaagatgcttcagatggtgctgcaaggctctgtgggagctactgtaaatcagggaccactggaagtagcccaagtgtttttggctgaaattcctgctgatccaaaactctatcgacatcacaacaagttgaggttatgctttaaggaattcatcatgagatgtggtgaagctgtagagaaaaacaagcgtctcatcacggcagaccagagggaatatcagcaggaactcaaaaagaactataacaagctaaaagagaacctcaggccaatgatcgagcggaaaattccagaactgtacaagccaatattcagagttgagagtcaaaagagggactccttccacagatctagtttcaggaaatgtgaaacccagttgtcacagggcagctaagaaaagccatcttcattcgtggagactgtggccctgcaaccctggagaaggacttgctggtacttaaaaaatgggacatttgccacccaggactgactgtacactccctgatcagccagcactctggaagctttgggatcccaggaaccatggaattattcccaaatggactctgaccagatttttgccatactggggggtggcgggatggaggatgggtactcaggcatgactgcgtatttattaaagtgtgtttttccacaatgtaccaaacaaggcataagcagcttctcctgctgactggccaatcactgcccatctgagagatgatttcctctggcccatatttgaatttattggagtaactcaaattgcctgaggaaaaatggaaaaattatccaccagtcgattcaaactgaatttcactctttataggaaggcagggcaaacttgtaggagtacgaaacattttcaataaatctacaaagggaagccttactacaattccaaaaatcatcatggttggaaatttgggaggagattatttgtgaacttgttacccttttggtaatggtggactaattgctgtatagttatttttgttttattattactgttacattaatttaacatgcatttatagaagaatacattcaaagcactgatgtaggagatacacggtacttggagcagtcagccagaaatcacagatactgctttcacttaaatggaaacaattctccgataatgctttgctttttttcttatgtcactcttgtgtactatctatttttctcctctctgggaccaagtttctttttataaagcaataatatctctgttttcatttcagaacattgtgctgtctgtcagcatatgtatatcagctacaaaatatattcaactttgacttcttttgacaaaggactttaggaaaaagaggaacaaagacattatttgagaattaaattatatatttttaatatgactgtgaccttgactgataataaagatgtaataagaattgcaagctaaatgtt

SEQ ID NO: 11720 - DNA, 7237 bp, Homo sapiens
cattttgtctcctgtaacaatttacgcgccgtgtaactgtgaatctttcaaagcctcagttttatgaccctgtggagccagtggactttgaaggacttctgatgacacacctgaacagcctggatgtgcagcttgcccaggagctcggggacttcactgatgacgacttggacgtggtgttcacgccaaaggaatgtaggactttgcagccctctttgccggaggaaggggttgaactggaccctcatgtcagggactgtgttcagacctacatccgtgagtggctaatcgtgaaccggaaaaaccaaggaagtccagaaatctgtggctttaaaaagactggatctcgaaaagattttcacaagacgcttccgaaacagacgtttgagtcggaaaccttggagtgcagtgaacccgctgctcaggcaggcccccgccacttaaacgtgctgtgcgacgtgtctgggaaaggccccgtcactgcctgtgactttgacctccgcagcctgcagcctgacaagcggctagaaaacctcctgcagcaagtgagtgccgaggactttgagaagcagaacgaggaggcccggaggaccaataggcaggccgagctctttgccctttacccatcagtggacgaggaggatgctgtggaaatacgtccagtaccagaatgtcccaaggaacacctgggcaacagaatattggtcaagttgctgaccttgaagttcgagattgaaattgagcccctgtttgccagcattgccctctacgatgttaaagaaaggaaaaagatctcagaaaattttcactgtgacctgaactctgaccagttcaaaggatttctgcgagctcacacgccttcagtggccgcatcaagtcaggcgagatctgcagtcttctcagtcacctacccgtcctcagacatctacctggtagtcaagattgaaaaagtcctgcagcagggagagattggagactgtgcagagccctacacggttatcaaagaaagtgatggtggaaagagtaaagaaaagattgaaaaactaaaactccaagctgaatccttctgccagcgtttggggaaataccggatgccctttgcctgggcacccataagcttatcaagcttcttcaatgtctccacccttgagagggaggtaactgatgtggactctgtggttgggagaagctcagtgggtgaacggaggacattggcccaatctagaaggctttctgaaagagccctctccttggaggaaaatggggttggatccaacttcaaaacctccactctgagcgttagcagctttttcaagcaggaaggagatcgccttagcgatgaagacttattcaagtttttagctgactacaaaagatcatcatccttacagagacgagtcaagtcaattccaggcttgctaagactggagatttctacagctccagagatcatcaattgctgtctgactcctgaaatgctgcccgtgaaaccctttcctgaaaaccggacacgcccgcacaaagagattttggaatttccaacacgagaagtatatgtccctcacactgtgtacagaaaccttctctatgtctacccacagaggctgaactttgtaaacaaactagcatcagcccggaacattacaataaagatccagtttatgtgtggagaagatgctagcaatgcgatgccggtcatctttggaaaatccagcgggcctgaatttctgcaggaagtgtacacagctgttacataccataataagtctcctgacttttatgaagaagtgaaaattaagctccccgctaagctcacagtaaatcaccacctcctgttcaccttctaccatatcagctgtcagcagaagcaaggagcctccgtggaaactctcctgggatattcatggctgccaattctcttaaatgaacgtcttcaaactggatcctactgtctcccagttgccttggaaaaattgccacccaactactccatgcattctgctgagaaagtcccattacagaatcctcccattaagtgggctgaaggacataagggagtatttaatattgaagtgcaagctgtttcttctgtacacacccaggacaaccacctggagaagttcttcaccctctgccactccctggagagccaggtgaccttccccatccgcgtgctggatcagaaaatcagcgagatggcgctggagcatgagctgaagctcagcatcatctgcctgaactcctcccgcctggagccgctcgtgctcttcctgcacctggtgctggacaagctcttccagctgtccgtgcagcccatggtcatcgctggccagacagccaacttctcccagtttgccttcgagtccgtggtggccatcgccaacagtctgcacaacagcaaggacctgagcaaggaccagcatgggaggaactgcctgctggcttcctacgtgcactacgtcttccgcctgccagaggtgcaaagggatgtgcccaagtcaggcgctcccactgccctcctagaccctcggagctaccacacgtatggccgcacatcagctgctgctgtgagttcaaagctgctgcaggcccgggtgatgagcagcagtaacccagacctcgcggggacacactccgcagcagacgaggaagtgaagaacatcatgtcttcaaagatcgccgatcgcaactgcagccgaatgtcttactattgctctggcagtagtgatgctccaagttcacctgcagccccaaggccagccagcaaaaagcatttccatgaggagcttgcccttcagatggtggtcagcaccggaatggtgagagaaacagtcttcaagtatgcctggttcttctttgagcttctggtgaaaagcatggcccagcacgtacataacatggacaaacgggacagttttcggaggactcgtttttctgaccgtttcatggatgacataactactattgttaatgtggtcacctcggaaattgcagcccttttagtaaaaccacagaaggaaaatgaacaggcggaaaagatgaacatcagcctggctttcttcttgtatgaccttctctccctcatggatcggggctttgtgtttaacctcatcagacattattgcagccagctgtcagccaagctcagtaaccttccaacgctcatttccatgaggctagagttcctgagaatcctctgtagccatgagcattacctcaatctgaaccttttttttatgaatgctgatactgctccaacatctccttgtccttccatatcttcccagaactcaagctcctgctccagcttccaggaccagaagatcgccagcatgttcgatctgacttccgagtaccgccagcagcacttcctcaccgggctcctcttcacagaactggctgctgccctggatgccgaaggggaaggaatcagcaaagtacaaaggaaagctgtcagtgcaattcacagcctgctaagttctcacgacctggacccacgctgtgtcaaaccagaggtgaaggtcaaaatcgccgccctttacctacctttagttggcatcattttggatgctttgccacagctctgtgactttacagttgcagatactcgcagataccgcaccagtggctcggatgaagaacaagaaggagccggtgccattaaccagaatgtggctctggccatagcagggaataatttcaatttgaaaacaagtggaatagtgctgtcttccttgccctataagcagtacaacatgctgaacgcggacactactcgcaacctcatgatctgcttcctctggatcatgaaaaatgctgatcagagcctcattaggaagtggattgctgacctgccatcaacgcagctcaacaggattttagatctacttttcatctgtgtgttatgttttgagtataagggaaaacagagttctgacaaagtcagtacccaagtcctgcagaagtcaagggatgtcaaggcccggctggaagaggctttgctccgtggggaaggggccagaggggagatgatgcgccgccgggctccagggaacgaccgatttccaggcctaaatgaaaatttgagatggaagaaagagcagacacattggcggcaagctaatgagaagctagataaaacaaaggccgagttagatcaagaagccttgatcagtggcaatctggctacagaagcacatttaatcatcctggatatgcaggaaaacattatccaggcgagctcggctctggactgtaaagacagcctgctgggaggtgttctgagggtgctggtgaattctctgaactgtgatcagagtaccacctacctgactcactgctttgcaacactccgtgctctcatcgccaagtttggagacttactctttgaagaggaggtggaacagtgtttcgacctatgtcaccaagtcctgcaccactgcagcagcagcatggatgtcacccggagccaagcctgtgccaccctttacctcctcatgaggttcagttttggagccaccagtaattttgcaagagtaaagatgcaagtaaccatgtccctggcatctttggtgggaagagcaccagactttaatgaagagcacctgagaagatccttgaggacaattttggcctattcagaagaggacacagccatgcagatgactccttttcccacccaggtggaggaacttctctgtaatctgaatagcatcttatatgacacagtgaaaatgagggaatttcaggaagatcctgagatgcttatggatctcatgtacagaattgccaagagttaccaggcatctcctgatctgcggctgacctggctccagaacatggcagagaaacacaccaagaagaagtgctacacggaggctgccatgtgcctggtgcacgccgctgcgttagtggctgagtatctgagcatgctggaggaccacagctacctgcccgtgggcagtgtcagcttccagaatatttcttccaatgtgctggaggagtctgtggtctctgaggacaccctgtcacctgacgaggatggggtgtgcgcaggccagtacttcaccgagagtggcctggtaggcctcctggagcaggccgcggagctcttcagcacgggaggcttatatgagacagttaatgaggtctacaagctggtcatccccatcctagaagcgcatcgagaattccggaagctgacactcactcacagcaagctgcagagagccttcgacagcatcgttaacaaggatcataagagaatgtttggaacctacttccgagttggtttctttggatccaaatttggggatttggatgaacaggagtttgtctacaaagagcctgcaattaccaagcttcctgagatctcacatagactagaggcattttatggtcaatgttttggtgcagaatttgtggaagtgattaaagactccactcctgtggacaaaaccaagttggatcctaacaaggcctacatacagatcacttttgtggagccctactttgatgagtatgagatgaaagacagggtcacatactttgagaagaatttcaacctccggaggttcatgtacaccaccccgttcaccctggaggggcggcctcggggagagctgcatgagcagtacagaaggaacacagtcctgaccactatgcacgccttcccctacatcaagaccaggatcagcgtcatccagaaggaggagtttgttttgacaccgattgaagttgccattgaagacatgaagaagaagaccctgcagttagcagttgccattaaccaggagccgcctgatgcaaagatgcttcagatggtgctgcaaggctctgtgggagctactgtaaatcagggaccactggaagtagcccaagtgtttttggctgaaattcctgctgatccaaaactctatcgacatcacaacaagttgaggttatgctttaaggaattcatcatgagatgtggtgaagctgtagagaaaaacaagcgtctcatcacggcagaccagagggaatatcagcaggaactcaaaaagaactataacaagctaaaagagaacctcaggccaatgatcgagcggaaaattccagaactgtacaagccaatattcagagttgagagtcaaaagagggactccttccacagatctagtttcaggaaatgtgaaacccagttgtcacagggcagctaagaaaagccatcttcattcgtggagactgtggccctgcaaccctggagaaggacttgctggtacttaaaaaatgggacatttgccacccaggactgactgtacactccctgatcagccagcactctggaagctttgggatcccaggaaccatggaattattcccaaatggactctgaccagatttttgccatactggggggtggcgggatggaggatgggtactcaggcatgactgcgtatttattaaagtgtgtttttccacaatgtaccaaacaaggcataagcagcttctcctgctgactggccaatcactgcccatctgagagatgatttcctctggcccatatttgaatttattggagtaactcaaattgcctgaggaaaaatggaaaaattatccaccagtcgattcaaactgaatttcactctttataggaaggcagggcaaacttgtaggagtacgaaacattttcaataaatctacaaagggaagccttactacaattccaaaaatcatcatggttggaaatttgggaggagattatttgtgaacttgttacccttttggtaatggtggactaattgctgtatagttatttttgttttattattactgttacattaatttaacatgcatttatagaagaatacattcaaagcactgatgtaggagatacacggtacttggagcagtcagccagaaatcacagatactgctttcacttaaatggaaacaattctccgataatgctttgctttttttcttatgtcactcttgtgtactatctatttttctcctctctgggaccaagtttctttttataaagcaataatatctctgttttcatttcagaacattgtgctgtctgtcagcatatgtatatcagctacaaaatatattcaactttgacttcttttgacaaaggactttaggaaaaagaggaacaaagacattatttgagaattaaattatatatttttaatatgactgtgaccttgactgataataaagatgtaataagaattgcaagctaaatgtt

SEQ ID NO: 11721 - DNA, 2087 bp, Homo sapiens
agacgaggtttgcgcttggctgggcatgttccgcggctactctgcggcgcgccaggcccccgctttccgcaccccgcgaccctagaagccaccgaaccgccggcgggccatggccactctgccgagcgcagagcgccgcgcgttcgcgctcaagatcaacaggtattcttcagcggaaataaggaaacagtttactctcccaccaaaccttggccagtaccatcgacagagcataagtacctctggcttcccctctcttcaactacctcagttttatgaccctgtggagccagtggactttgaaggacttctgatgacacacctgaacagcctggatgtgcagcttgcccaggagctcggggacttcactgatgacgacttggacgtggtgttcacgccaaaggaatgtaggactttgcagccctctttgccggaggaaggggttgaactggaccctcatgtcagggactgtgttcagacctacatccgtgagtggctaatcgtgaaccggaaaaaccaaggaagtccagaaatctgtggctttaaaaagactggatctcgaaaagattttcacaagacgcttccgaaacagacgtttgagtcggaaaccttggagtgcagtgaacccgctgctcaggcaggcccccgccacttaaacgtgctgtgcgacgtgtctgggaaaggccccgtcactgcctgtgactttgacctccgcagcctgcagcctgacaagcggctagaaaacctcctgcagcaagtgagtgccgaggactttgagaagcagaacgaggaggcccggaggaccaataggcaggccgagctctttgccctttacccatcagtggacgaggaggatgctgtggaaatacgtccagtaccagaatgtcccaaggaacacctgggcaacagaatattggtcaagttgctgaccttgaagttcgagattgaaattgagcccctgtttgccagcattgccctctacgatgttaaagaaaggaaaaagatctcagaaaattttcactgtgacctgaactctgaccagttcaaaggatttctgcgagctcacacgccttcagtggccgcatcaagtcaggcgagatctgcagtcttctcagtcacctacccgtcctcagacatctacctggtagtcaagattgaaaaagtcctgcagcagggagagattggagactgtgcagagccctacacggttatcaaagaaagtgatggtggaaagagtaaagaaaagattgaaaaactaaaactccaagctgaatccttctgccagcgtttggggaaataccggatgccctttgcctgggcacccataagcttatcaagcttcttcaatgtctccacccttgagagggaggtaactgatgtggactctgtggttgggagaagctcagtgggtgaacggaggacattggcccaatctagaaggctttctgaaagagccctctccttggaggaaaatggggttggatccaacttcaaaacctccactctgagcgttagcagctttttcaagcaggaaggagatcgccttagcgatgaagacttattcaagtttttagctgactacaaaagatcatcatccttacagagacgagtcaagtcaattccaggcttgctaagactggagatttctacagctccagagatcatcaattgctgtctgactcctgaaatgctgcccgtgaaaccctttcctgaaaaccggacacgcccgcacaaagagattttggaatttccaacacgagaagtatatgtccctcacactgtgtacaggtaagaaacacaggctcgggctgggcgtggtggcttacaccataatcccataactttgggaggccgaggcaggaggattgcttgagctcaggagtttgagaccagccttggcaacatggcaaaaccgtgtctctacaacatatacaaaatttagctgggcatggtggtgcatgcttgtaatcccagcaacttggcaggctgaggcaggagaatcgcttgaacccaggaggcagaggttgcagtgagccaagattgcactactgcactccagcctgggagacagaaccagactctgtctc

SEQ ID NO: 11722 - DNA, 1693 bp, Homo sapiens
cggcagaccagagggaatatcagcaggaactcaaaaagaactataacaagctaaaagagaacctcaggccaatgatcgagcggaaaattccagaactgtacaagccaatattcagagttgagagtcaaaagaggtaagaacagggcagaggaggcctcttcctgtgggataaagagcagcgcatggggcctagcaccttggggcatgctctgctgcacttggggagctgcagaacctcgaaagggtggaagagggtcccacagtcagagaggctaccagagtgtgattcattctgcctctgtcctccccatccctgctccttgacctctcccagacaccttggtgttggtcttgtgccagggtattcccagggctgaatgatggcctgtgttggtttttttgtttgtttggttggtttgtatgtttgttttggcacagtgtgaaggggtcgcagacctttcacttattatttgctgagttgtccatgactgatgtccatttctactgggtgatccacccccaaccctttctaaaaggctaactgatcttttcttgcttctgtacgctctctttccctctcctccctctcttttcttaatttcagggactccttccacagatctagtttcaggaaatgtgaaacccagttgtcacagggcagctaagaaaagccatcttcattcgtggagactgtggccctgcaaccctggagaaggacttgctggtacttaaaaaatgggacatttgccacccaggactgactgtacactccctgatcagccagcactctggaagctttgggatcccaggaaccatggaattattcccaaatggactctgaccagatttttgccatactggggggtggcgggatggaggatgggtactcaggcatgactgcgtatttattaaagtgtgtttttccacaatgtaccaaacaaggcataagcagcttctcctgctgactggccaatcactgcccatctgagagatgatttcctctggcccatatttgaatttattggagtaactcaaattgcctgaggaaaaatggaaaaattatccaccagtcgattcaaactgaatttcactctttataggaaggcagggcaaacttgtaggagtacgaaacattttcaataaatctacaaagggaagccttactacaattccaaaaatcatcatggttggaaatttgggaggagattatttgtgaacttgttacccttttggtaatggtggactaattgctgtatagttatttttgttttattattactgttacattaatttaacatgcatttatagaagaatacattcaaagcactgatgtaggagatacacggtacttggagcagtcagccagaaatcacagatactgctttcacttaaatggaaacaattctccgataatgctttgctttttttcttatgtcactcttgtgtactatctatttttctcctctctgggaccaagtttctttttataaagcaataatatctctgttttcatttcagaacattgtgctgtctgtcagcatatgtatatcagctacaaaatatattcaactttgacttcttttgacaaaggactttaggaaaaagaggaacaaagacattatttgagaattaaattatatatttttaatatgactgtgaccttgactgataataaagatgtaataagaattgc

SEQ ID NO: 11723 - DNA, 428 bp, Homo sapiens
cggcagaccagagggaatatcagcaggaactcaaaaagaactataacaagctaaaagagaacctcaggccaatgatcgagcggaaaattccagaactgtacaagccaatattcagagttgagagtcaaaagagggactccttccacagatctagtttcaggaaatgtgaaacccagttgtcacagggcagctaagaaaagccatcttcattcgtggagactgtggccctgcaaccctggagaaggacttgctgaacattgtgctgtctgtcagcatatgtatatcagctacaaaatatattcaactttgacttcttttgacaaaggactttaggaaaaagaggaacaaagacattatttgagaattaaattatatatttttaatatgactgtgaccttgactgataataaagatgtaataagaattgc

SEQ ID NO: 11724 - DNA, 741 bp, Homo sapiens
cagcgccgaccgacagacgaggtttgcgcttggctgggcatgttccgcggctactctgcggcgcgccaggcccccgctttccgcaccccgcgaccctagaagccaccgaaccgccggcgggccatggccactctgccgagcgcagagcgccgcgcgttcgcgctcaagatcaacaggtattcttcagcggaaataaggaaacagtttactctcccaccaaaccttggccagtaccatcgacagagcataagtacctctggcttcccctctcttcaactaagacggagtttctccatgttgtccaggctggtcttgaactcctgagcttcagtgatctgcctgccttggcctcccaaagtgctgggattacagagggacccttgtaaggactatagtcctctcttcagctgaccttcaggtccccagtcagaaccaagggaaccgactctgtcccttctcatagcacctgaaaaccccgggaaacgaggggaatgctttgctctcagctactgaggttgtcctgtcaccttctcttctgccctcctttgccatggcataggataatcctcagttttatgaccctgtggagccagtggactttgaaggacttctgatgacacacctgaacagcctggatgtgcagcttgcccaggagctcggggacttcactgatgacgacttggacgtggtgttcacgccaaaggaatgtaggactttgcagccctctttgccggaggaagg

SEQ ID NO: 11725 - DNA, 6386 bp, Homo sapiens
tacgcgccgtgtaactgtgaatctttcaaagcctcagttttatgaccctgtggagccagtggactttgaaggacttctgatgacacacctgaacagcctggatgtgcagcttgcccaggagctcggggacttcactgatgacgacttggacgtggtgttcacgccaaaggaatgtaggactttgcagccctctttgccggaggaaggggttgaactggaccctcatgtcagggactgtgttcagacctacatccgtgagtggctaatcgtgaaccggaaaaaccaaggaagtccagaaatctgtggctttaaaaagactggatctcgaaaagattttcacaagacgcttccgaaacagacgtttgagtcggaaaccttggagtgcagtgaacccgctgctcaggcaggcccccgccacttaaacgtgctgtgcgacgtgtctgggaaaggccccgtcactgcctgtgactttgacctccgcagcctgcagcctgacaagcggctagaaaacctcctgcagcaagtgagtgccgaggactttgagaagcagaacgaggaggcccggaggaccaataggcaggccgagctctttgccctttacccatcagtggacgaggaggatgctgtggaaatacgtccagtaccagaatgtcccaaggaacacctgggcaacagaatattggtcaagttgctgaccttgaagttcgagattgaaattgagcccctgtttgccagcattgccctctacgatgttaaagaaaggaaaaagatctcagaaaattttcactgtgacctgaactctgaccagttcaaaggatttctgcgagctcacacgccttcagtggccgcatcaagtcaggcgagatctgcagtcttctcagtcacctacccgtcctcagacatctacctggtagtcaagattgaaaaagtcctgcagcagggagagattggagactgtgcagagccctacacggttatcaaagaaagtgatggtggaaagagtaaagaaaagattgaaaaactaaaactccaagctgaatccttctgccagcgtttggggaaataccggatgccctttgcctgggcacccataagcttatcaagcttcttcaatgtctccacccttgagagggaggtaactgatgtggactctgtggttgggagaagctcagtgggtgaacggaggacattggcccaatctagaaggctttctgaaagagccctctccttggaggaaaatggggttggatccaacttcaaaacctccactctgagcgttagcagctttttcaagcaggaaggagatcgccttagcgatgaagacttattcaagtttttagctgactacaaaagatcatcatccttacagagacgagtcaagtcaattccaggcttgctaagactggagatttctacagctccagagatcatcaattgctgtctgactcctgaaatgctgcccgtgaaaccctttcctgaaaaccggacacgcccgcacaaagagattttggaatttccaacacgagaagtatatgtccctcacactgtgtacagaaaccttctctatgtctacccacagaggctgaactttgtaaacaaactagcatcagcccggaacattacaataaagatccagtttatgtgtggagaagatgctagcaatgcgatgccggtcatctttggaaaatccagcgggcctgaatttctgcaggaagtgtacacagctgttacataccataataagtctcctgacttttatgaagaagtgaaaattaagctccccgctaagctcacagtaaatcaccacctcctgttcaccttctaccatatcagctgtcagcagaagcaaggagcctccgtggaaactctcctgggatattcatggctgccaattctcttaaatgaacgtcttcaaactggatcctactgtctcccagttgccttggaaaaattgccacccaactactccatgcattctgctgagaaagtcccattacagaatcctcccattaagtgggctgaaggacataagggagtatttaatattgaagtgcaagctgtttcttctgtacacacccaggacaaccacctggagaagttcttcaccctctgccactccctggagagccaggtgaccttccccatccgcgtgctggatcagaaaatcagcgagatggcgctggagcatgagctgaagctcagcatcatctgcctgaactcctcccgcctggagccgctcgtgctcttcctgcacctggtgctggacaagctcttccagctgtccgtgcagcccatggtcatcgctggccagacagccaacttctcccagtttgccttcgagtccgtggtggccatcgccaacagtctgcacaacagcaaggacctgagcaaggaccagcatgggaggaactgcctgctggcttcctacgtgcactacgtcttccgcctgccagaggtgcaaagggatgtgcccaagtcaggcgctcccactgccctcctagaccctcggagctaccacacgtatggccgcacatcagctgctgctgtgagttcaaagctgctgcaggcccgggtgatgagcagcagtaacccagacctcgcggggacacactccgcagcagacgaggaagtgaagaacatcatgtcttcaaagcatttccatgaggagcttgcccttcagatggtggtcagcaccggaatggtgagagaaacagtcttcaagtatgcctggttcttctttgagcttctggtgaaaagcatggcccagcacgtacataacatggacaaacgggacagttttcggaggactcgtttttctgaccgtttcatggatgacataactactattgttaatgtggtcacctcggaaattgcagcccttttagtaaaaccacagaaggaaaatgaacaggcggaaaagatgaacatcagcctggctttcttcttgtatgaccttctctccctcatggatcggggctttgtgtttaacctcatcagacattattgcagccagctgtcagccaagctcagtaaccttccaacgctcatttccatgaggctagagttcctgagaatcctctgtagccatgagcattacctcaatctgaaccttttttttatgaatgctgatactgctccaacatctccttgtccttccatatcttcccagaactcaagctcctgctccagcttccaggaccagaagatcgccagcatgttcgatctgacttccgagtaccgccagcagcacttcctcaccgggctcctcttcacagaactggctgctgccctggatgccgaaggggaaggaatcagcaaagtacaaaggaaagctgtcagtgcaattcacagcctgctaagttctcacgacctggacccacgctgtgtcaaaccagaggtgaaggtcaaaatcgccgccctttacctacctttagttggcatcattttggatgctttgccacagctctgtgactttacagttgcagatactcgcagataccgcaccagtggctcggatgaagaacaagaaggagccggtgccattaaccagaatgtggctctggccatagcagggaataatttcaatttgaaaacaagtggaatagtgctgtcttccttgccctataagcagtacaacatgctgaacgcggacactactcgcaacctcatgatctgcttcctctggatcatgaaaaatgctgatcagagcctcattaggaagtggattgctgacctgccatcaacgcagctcaacaggattttagatctacttttcatctgtgtgttatgttttgagtataagggaaaacagagttctgacaaagtcagtacccaagtcctgcagaagtcaagggatgtcaaggcccggctggaagaggctttgctccgtggggaaggggccagaggggagatgatgcgccgccgggctccagggaacgaccgatttccaggcctaaatgaaaatttgagatggaagaaagagcagacacattggcggcaagctaatgagaagctagataaaacaaaggccgagttagatcaagaagccttgatcagtggcaatctggctacagaagcacatttaatcatcctggatatgcaggaaaacattatccaggcgagctcggctctggactgtaaagacagcctgctgggaggtgttctgagggtgctggtgaattctctgaactgtgatcagagtaccacctacctgactcactgctttgcaacactccgtgctctcatcgccaagtttggagacttactctttgaagaggaggtggaacagtgtttcgacctatgtcaccaagtcctgcaccactgcagcagcagcatggatgtcacccggagccaagcctgtgccaccctttacctcctcatgaggttcagttttggagccaccagtaattttgcaagagtaaagatgcaagtaaccatgtccctggcatctttggtgggaagagcaccagactttaatgaagagcacctgagaagatccttgaggacaattttggcctattcagaagaggacacagccatgcagatgactccttttcccacccaggtggaggaacttctctgtaatctgaatagcatcttatatgacacagtgaaaatgagggaatttcaggaagatcctgagatgcttatggatctcatgtacagaattgccaagagttaccaggcatctcctgatctgcggctgacctggctccagaacatggcagagaaacacaccaagaagaagtgctacacggaggctgccatgtgcctggtgcacgccgctgcgttagtggctgagtatctgagcatgctggaggaccacagctacctgcccgtgggcagtgtcagcttccagaatatttcttccaatgtgctggaggagtctgtggtctctgaggacaccctgtcacctgacgaggatggggtgtgcgcaggccagtacttcaccgagagtggcctggtaggcctcctggagcaggccgcggagctcttcagcacgggaggcttatatgagacagttaatgaggtctacaagctggtcatccccatcctagaagcgcatcgagaattccggaagctgacactcactcacagcaagctgcagagagccttcgacagcatcgttaacaaggatcataagagaatgtttggaacctacttccgagttggtttctttggatccaaatttggggatttggatgaacaggagtttgtctacaaagagcctgcaattaccaagcttcctgagatctcacatagactagaggcattttatggtcaatgttttggtgcagaatttgtggaagtgattaaagactccactcctgtggacaaaaccaagttggatcctaacaaggcctacatacagatcacttttgtggagccctactttgatgagtatgagatgaaagacagggtcacatactttgagaagaatttcaacctccggaggttcatgtacaccaccccgttcaccctggaggggcggcctcggggagagctgcatgagcagtacagaaggaacacagtcctgaccactatgcacgccttcccctacatcaagaccaggatcagcgtcatccagaaggaggagtttgttttgacaccgattgaagttgccattgaagacatgaagaagaagaccctgcagttagcagttgccattaaccaggagccgcctgatgcaaagatgcttcagatggtgctgcaaggctctgtgggagctactgtaaatcagggaccactggaagtagcccaagtgtttttggctgaaattcctgctgatccaaaactctatcgacatcacaacaagttgaggttatgctttaaggaattcatcatgagatgtggtgaagctgtagagaaaaacaagcgtctcatcacggcagaccagagggaatatcagcaggaactcaaaaagaactataacaagctaaaagagaacctcaggccaatgatcgagcggaaaattccagaactgtacaagccaatattcagagttgagagtcaaaagagggactccttccacagatctagtttcaggaaatgtgaaacccagttgtcacagggcagctaagaaaagccatcttcattcgtggagactgtggccctgcaaccctggagaaggacttgctggtacttaaaaaatgggacatttgccacccaggactgactgtacactccctgatcagccagcactctggaagctttgggatcccaggaaccatggaattattcccaaatggactctgaccagatttttgccatactggggggtggcgggatggaggatgggtactcaggcatgactgcgtatttattaaagtgtgtttttccacaatgtaccaaacaaggcataagcagcttctcctgctgactggcca

SEQ ID NO: 11726 - DNA, 2509 bp, Homo sapiens
gcccccgccacttaaacgtgctgtgcgacgtgtctgggaaaggccccgtcactgcctgtgactttgacctccgcagcctgcagcctgacaagcggctagaaaacctcctgcagcaagtgagtgccgaggactttgagaagcagaacgaggaggcccggaggaccaataggcaggccgagctctttgccctttacccatcagtggacgaggtgggtgccactgtttccatactggagaatctcagtgaagactctgagagtcatgtggacaattgtgttgttcattattactatatagcagcccatggtgtcagggctcacttgtatgatttctggggcctcgtttttcactcaggcaagcctgtgtgtcatagcagagccattattgattatcacacagatgggattctgataataataacaactggaattttcatagcactttacaaaatatgttcactaagagcatctcatttaatccccaaatgtttcaagggtctacatgtagtaatcacacccagcaagtcaaaccatcctattatttgaggggatgtgtggtcactaatccattgagacatacattacttaaactttgatgttctttagtgctttgttactttctttttaatggtctctatgagcaaccagagagacctgctttgaaaacatttcaggctaggataatcacagcccatgctcccaatgtatagaactttgggatcttgattgtttacttcttcatttattggagctgactgacaacaataggataatgtagactttgcctgtggtcactgcctgaggcactttggatgaaatgagaggtgacgattattcaagccttttgtctgtttgaactccttatactgtataggaggctctcagttttcccctctgcgtgaggttatctacacttctgggtcttgccagaacagattactgctatatctctgctgtccaaatggtattgaaagttcagttggaagaaacaggatttgaggaaactgcataaaagatattctatccatccatgcctctaaatatttgaaattcgatccttggattaagtgagacaatcagagagcctgatacccccacccttctggattgtgtttgctaacctgcccttcagtgagctcacgactggtcagcaaggaggacaataaaggaaacagcagtcatgagataggatatcacgtccacatggaaatactattgttgacattgacctactcaccatctagcaccttcctctttgatgatctaaagggcaattagccttcacatcttccgagaaagaagaagcacgcttctgctgagataatacaaacacttagagattgtgctcattttgtaactaactctcttaagttctttacttagagcaaacttctgtccaccttcaccaaatgtggcaacttaatgattggggtcctgaatttactccagctttcttttcttttcttatcctgattttctaagcaccttggtttcctcatctatttttattttatttgcagtttttgtcagcagcctcaaatggtcttctgaatgaggcagaatataaaaataaattatctcacttatatatagaatctaaaaaagtggatctcatagaaacagagtagaaaggtggttatagcaggggctgtggggagagggagaaggtgttggtcaaaggccacaaagtctcaggcgggaggaatacgttttagtgacctatcgcactgcacagtgaccagagttaataataatgtgttacatatttcaaaactgctttaaaaaaggatttttaatgttctcatcacacacacacaaaaggtaagttggtgaggtgatagatatgttaattagcttgatttaatctttctacaatgtatgcatagatcaaaacattacttgatttaatctttatacgatgtatacatagatcaaaacatgacactgtaccccatagatgttcacaattactacttgtcaattaaaaaataaattaataaagtatgaataatgtgagcaatatcatcatctcctttcctcagattaaaaagcaacaattaggctaaagagctttttcaagattcaacagataaattaaattacaaaatggggccctaacccgctaactacaaagttcgtgttcccttgtttatgtatctacatacatatgactacctggtatgttgggacacataactgaaatccaaatatgatatttttaaatatcatgtaactttttagtttccatccacgacattaagactttttaccagatttgtcaaaacatattaaatcagactgatttggcctttactttccttcctcttcctctcagttctgtgatggagatgccaacatgtaatagagggacccaaagtggatgccagaagagagagaacaattaaaggatgcagagaatatgtccagtgagacgtttgcttgtcagtgtctccctggtggtattagaggggagaatgttccatctgaacagattaaaataatgaaacgta

SEQ ID NO: 11727 - DNA, 384 bp, Homo sapiens
gcccccgccacttaaacgtgctgtgcgacgtgtctgggaaaggccccgtcactgcctgtgactttgacctccgcagcctgcagcctgacaagcggctagaaaacctcctgcagcaagtgagtgccgaggactttgagaagcagaacgaggaggcccggaggaccaataggcaggccgagctctttgccctttacccatcagtggacgagttctgtgatggagatgccaacatgtaatagagggacccaaagtggatgccagaagagagagaacaattaaaggatgcagagaatatgtccagtgagacgtttgcttgtcagtgtctccctggtggtattagaggggagaatgttccatctgaacagattaaaataatgaaacgta

SEQ ID NO: 11728 - DNA, 1395 bp, Homo sapiens
aatttacgcgccgtgtaactgtgaatctttcaaagcctcagttttatgaccctgtggagccagtggactttgaaggacttctgatgacacacctgaacagcctggatgtgcagcttgcccaggagctcggggacttcactgatgacgacttggacgtggtgttcacgccaaaggaatgtaggactttgcagccctctttgccggaggaaggggttgaactggaccctcatgtcagggactgtgttcagacctacatccgtgagtggctaatcgtgaaccggaaaaaccaaggaagtccagaaatctgtggctttaaaaagactggatctcgaaaagattttcacaagacgcttccgaaacagacgtttgagtcggaaaccttggagtgcagtgaacccgctgctcaggcaggcccccgccacttaaacgtgctgtgcgacgtgtctgggaaaggccccgtcactgcctgtgactttgacctccgcagcctgcagcctgacaagcggctagaaaacctcctgcagcaagtgagtgccgaggactttgagaagcagaacgaggaggcccggaggaccaataggcaggccgagctctttgccctttacccatcagtggacgaggtgggtgccactgtttccatactggagaatctcagtgaagactctgagagtcatgtggacaattgtgttgttcattattactatatagcagcccatggtgtcagggctcacttgtatgatttctggggcctcgtttttcactcaggcaagcctgtgtgtcatagcagagccattattgattatcacacagatgggattctgataataataacaactggaattttcatagcactttacaaaatatgttcactaagagcatctcatttaatccccaaatgtttcaagggtctacatgtagtaatcacacccagcaagtcaaaccatcctattatttgaggggatgtgtggtcactaatccattgagacatacattacttaaactttgatgttctttagtgctttgttactttctttttaatggtctctatgagcaaccagagagacctgctttgaaaacatttcaggctaggataatcacagcccatgctcccaatgtatagaactttgggatcttgattgtttacttcttcatttattggagctgactgacaacaataggataatgtagactttgcctgtggtcactgcctgaggcactttggatgaaatgagaggtgacgattattcaagccttttgtctgtttgaactccttatactgtataggaggctctcagttttcccctctgcgtgaggttatctacacttctgggtcttgccagaacagattactgctatatctctgctgtccaaatggtattgaaagttcagttggaa

SEQ ID NO: 11729 - DNA, 595 bp, Homo sapiens
cccgaggctgcggcggtggagccgctggacgcgcggcggctcctgcgctgggcccggcgaggtcctccccaagaatctcggtgctcctggatgtcctcagccgccggggatcccttccccgaacaacctcgcccgctccgccctccaggttcttacaggtggccgggtcccagaagggtgataggcgcctgggtaaccgtgttgggcgcgccacggagtgtctcataaacggctccttcctttgaggtattcttcagcggaaataaggaaacagtttactctcccaccaaaccttggccagtaccatcgacagagcataagtacctctggcttcccctctcttcaactacctcagttttatgaccctgtggagccagtggactttgaaggacttctgatgacacacctgaacagcctggatgtgcagcttgcccaggagctcggggacttcactgatgacgacttggacgtggtgttcacgccaaaggaatgtaggactttgcagccctctttgccggaggaaggggttgaactggaccctcatgtcagggactgtgttcagacctacatccgtgagtggctaatcgtgaaccgg

SEQ ID NO: 11730 - DNA, 4788 bp, Homo sapiens
ctgtaacaatttacgcgccgtgtaactgtgaatctttcaaagcctcagttttatgaccctgtggagccagtggactttgaaggacttctgatgacacacctgaacagcctggatgtgcagcttgcccaggagctcggggacttcactgatgacgacttggacgtggtgttcacgccaaaggaatgtaggactttgcagccctctttgccggaggaaggggttgaactggaccctcatgtcagggactgtgttcagacctacatccgtgagtggctaatcgtgaaccggaaaaaccaaggaagtccagaaatctgtggctttaaaaagactggatctcgaaaagattttcacaagacgcttccgaaacagacgtttgagtcggaaaccttggagtgcagtgaacccgctgctcaggcaggcccccgccacttaaacgtgctgtgcgacgtgtctgggaaaggccccgtcactgcctgtgactttgacctccgcagcctgcagcctgacaagcggctagaaaacctcctgcagcaagtgagtgccgaggactttgagaagcagaacgaggaggcccggaggaccaataggcaggccgagctctttgccctttacccatcagtggacgaggaggatgctgtggaaatacgtccagtaccagaatgtcccaaggaacacctgggcaacagaatattggtcaagttgctgaccttgaagttcgagattgaaattgagcccctgtttgccagcattgccctctacgatgttaaagaaaggaaaaagatctcagaaaattttcactgtgacctgaactctgaccagttcaaaggatttctgcgagctcacacgccttcagtggccgcatcaagtcaggcgagatctgcagtcttctcagtcacctacccgtcctcagacatctacctggtagtcaagattgaaaaagtcctgcagcagggagagattggagactgtgcagagccctacacggttatcaaagaaagtgatggtggaaagagtaaagaaaagattgaaaaactaaaactccaagctgaatccttctgccagcgtttggggaaataccggatgccctttgcctgggcacccataagcttatcaagcttcttcaatgtctccacccttgagagggaggtaactgatgtggactctgtggttgggagaagctcagtgggtgaacggaggacattggcccaatctagaaggctttctgaaagagccctctccttggaggaaaatggggttggatccaacttcaaaacctccactctgagcgttagcagctttttcaagcaggaaggagatcgccttagcgatgaagacttattcaagtttttagctgactacaaaagatcatcatccttacagagacgagtcaagtcaattccaggcttgctaagactggagatttctacagctccagagatcatcaattgctgtctgactcctgaaatgctgcccgtgaaaccctttcctgaaaaccggacacgcccgcacaaagagattttggaatttccaacacgagaagtatatgtccctcacactgtgtacagagaagtcttccaggtttcagctgttgctcattaatgctcaccacagccctttgaggtcgatgcaattatgctttggaaaagctaagtaacttgccaaaggccatgcagctaaaagaagcaaaagctggattcaaatctcagctctctgcctccagagagaacaccctcaatcccgcttaacagacattagctctgcttatttgattggtggcagtggagatgaacagaagtgaacagtgagcagagaggggtctgtaccccacacacatccctgcaccccaactgtcaactgtcttccatcatcatttactatatccacgtccactcctgacagcatcagtggctcagtcttaccgacctgcatcagggttttgggctctgcctctgtttagacagagcacgatttgggaagtgctgctaagtcagccagtggctgagtagaaacagccctgcagtgggcctctgcctgctctgtggctcgtttatcatgtgtctcatctttaaaagttggggctcagtctaggtgcctcctggcctgagcaccccagaattctatgctgatcccttcattgtgacatggcctgtcatctactcttctgggaagaccatctgcacctcactgatacttgaagctcattgagtattgtcacatatcagcccagaaagtcacagggtacagcaactcatacttgctcccagcaccaggccagccccattctgcctccagggagtcacccaaaatagagagatgagggtaaaataagacctaggaatactatttatttgcctccatggcctttgaacttgcacatccaacgtaacggctcctgtgtgttcttgattgttccaattatcatttttcctctcgaatacctgagagcattcattattttgcaagagatttgagaatccctgtgccctaacttttctttccttgatgtgggatgttcttctgtgactagaaaccttctctatgtctacccacagaggctgaactttgtaaacaaactagcatcagcccggaacattacaataaagatccagtttatgtgtggagaagatgctagcaatgcgatgccggtgtcttaagacagcggtggggtcctcttagtcctctctgctcaggcccctggcatgccactgccaggagtgccagatatgcttgtgcagatcctgtggcaaccaagatgcccagccaagagtgactgtgggctaaagtccagtctgttcttcattcactgagccatgggttctggtgttgggattactgcatctagaggaaagagctttttttctctgcacaaaggtcatctttggaaaatccagcgggcctgaatttctgcaggaagtgtacacagctgttacataccataataagtctcctgacttttatgaagaagtgaaaattaagctccccgctaagctcacagtaaatcaccacctcctgttcaccttctaccatatcagctgtcagcagaagcaaggagcctccgtggaaactctcctgggatattcatggctgccaattctcttaaatgaacgtcttcaaactggatcctactgtctcccagttgccttggaaaaattgccacccaactactccatgcattctgctgagaaagtcccattacagaatcctcccattaagtgggctgaaggacataagggagtatttaatattgaagtgcaagctgtttcttctgtacacacccaggacaaccacctggagaagttcttcaccctctgccactccctggagagccaggtgaccttccccatccgcgtgctggatcagaaaatcagcgagatggcgctggagcatgagctgaagctcagcatcatctgcctgaactcctcccgcctggagccgctcgtgctcttcctgcacctggtgctggacaagctcttccagctgtccgtgcagcccatggtcatcgctggccagacagccaacttctcccagtttgccttcgagtccgtggtggccatcgccaacagtctgcacaacagcaaggacctgagcaaggaccagcatgggaggaactgcctgctggcttcctacgtgcactacgtcttccgcctgccagaggtgcaaagggatgtgcccaagtcagtggctcacatctgcaaccccagcactctaggaggctgagatggcaggatcgcttggagcagtggctcacatctgcaaccccagcactctaggaggctgagatggcaggatcgcttggagcagtggctcacatctgcaaccccagcactctaggaggctgagatggcaggatcgcttggagcagtggctcacatctgcaaccccagcactctaggaggctgagatggcaggatcacttggagcagtggctcacatctgcaaccccagcactctaggaggctgagatggcaggatcgcttggagcagtggctcacatctgcaaccccagcactctaggaggctgagatggcaggatcgcttggagcagtggctcacatctgcaaccccagcactctaggaggctgagatggcaggatcgcttggagcagtggctcacatctgcaaccccagcactctaggaggctgagatggcaggatcgcttggagcagtggctcacatctgcaaccccagcactctaggaggctgagatggcaggatcgcttggagcagtggctcacatctgcaaccccagcactctaggaggctgagatggcaggatcgcttggagccagaagttggagaccagcccagggaacataatgagactctgtctctacaaaaaatataaaaattagcagagcatggtggcacatacctttagtcccagctactcaggaagaagctgaggcaggaggatcatttaagcccaggagttggaggctgcagtgagctatgattgcaccactgcactccagcctgggaaacagagcgagatcccatctcttaaaacaaacaaacaaacaaacaaacaccctaaaattccattttcgttttcaggacaatacaaaacttacatgaatgctgaaattatgtgtttctttatagatctttcttcctccctccttgcctctttttatgctctaaacacttattttgtctgcccatttgataatccctcactggtctttacccacttgctaatttatgattcagctgagaatctcttttttaagatggagaagtggtgactgatgcctacgattctagtataataaaggaaataatatata

SEQ ID NO: 11731 - DNA, 537 bp, Homo sapiens
ttttgtctcctgtaacaatttacgcgccgtgtaactgtgaatctttcaaagctcttgcaggagaactctcttgtagctcaccctgtctgaaaacatactggaaaggaattcaaggaaatgtagttcagcctagccacgttgacacatcatgaagccgtcacaaaagcctcagttttatgaccctgtggagccagtggactttgaaggacttctgatgacacacctgaacagcctggatgtgcagcttgcccaggagctcggggacttcactgatgacgacttggacgtggtgttcacgccaaaggaatgtaggactttgcagccctctttgccggaggaaggggttgaactggaccctcatgtcagggactgtgttcagacctacatccgtgagtggctaatcgtgaaccggaaaaaccaaggaagtccagaaatctgtggctttaaaaagactggatctcgaaaagattttcacaagacgcttccgaaacagacgtttgagtcggaaaccttggagtgcagtgaacccgctgctca

SEQ ID NO: 11732 - DNA, 6838 bp, Homo sapiens
acactgctcctaagacagaggtactcagatacgtggctgaaagcctagctcaaatactgccccaggtgagcctctttgctgagtagcgctactcaaagaacacagcttcccctgcctagggaaggcagggctactggcaatagatctccagcctagcagtgatgtacagtcatggtattttaagagaacactttgaatttttctgttgcttgactgttaagcctcaaatttttctgttgcttgacttcttccctggcctccatcccccaatctgcctcccttcagccctataagcagtacaacatgctgaacgcggacactactcgcaacctcatgatctgcttcctctggatcatgaaaaatgctgatcagagcctcattaggaagtggattgctgacctgccatcaacgcagctcaacaggattttagatctacttttcatctgtgtgttatgttttgagtataaggtaagtctggagtggcacaactttataccagctcttatctctcaattgcaattctgtcttcttactcatcccctttgtttgggccatggaggcatcattaatttttctcatttctgtattcaaatccataacccatttgtaggtatagatatgatcatttcacagggaaaggatctctgccttctgcagagagaaccccatttctgttgacagagttttggcccataggatgctccagagcagcatctcagtgaagcacatgtcaaacttagctggcatcactgtggagtgtactgttttggtaactctccccatcaacggagatctcaccaaaggacatgtcctcctacctctgtcttgtccagggaaaacagagttctgacaaagtcagtacccaagtcctgcagaagtcaagggatgtcaaggcccggctggaagaggctttgctccgtggggaaggggccagaggggagatgatgcgccgccgggctccaggtgtgttggactggcccttccctgctctctgtcaagcagtttttcactgtttgtggggaggaatgtcctcccaacatgattagacaccattactttcttgagatatttacggtagtgtcagagacagcggattctgggagtctgtgtgtgacatttgtgttagccctgtgcctgtgagggaaagcgctgttctacaattgtaggaaccctgaaaacagcaccaaatgacatcttttaattaaaactcgttgatggtaaaaggtcacctctaagaatgtcagtcatggatgaggtggaaggtgtttccctcaaggctgaggcctttctatgtgacctttggctagtctatccggagcatggtcaagaaactgaacagttctggccccaagatcatcttctcgatcattcagggcactattagaatggaaccagttccctgaaatggcttcagagtgtcccagtcattcaaggattccaccacaggaggaatgatctcaaaaaggctgagcttgaatagaatgaaatccccaggtaccctcagtcttattcaccatgctcaaagtaaaacagagtgacagcttattgtattcgaagggacacagtggcagggaacttggagggagctcatagttttcagtggtggtcaggcaccctcatttgacacccatactttcatacccaataattcagtaagcccccagagtttcacaggaatcctctgctcatgagaaatgtctctctgacactcagaaaggcagaggttcttcttatattctagtctatcaatcaaagagcgggccaacttggacataggtgtggcgactttgtctcctaccagcaacctgcatggactctaattagcccgagaaatggtgctgaggcttctcagttgagcttgttatgaacttctggttatcttggagggtttcatgctaatcaaattcctatcatgcatttcttaactcctagggaacgaccgatttccaggcctaaatgaaaatttgagatggaagaaagagcagacacattggcggcaagctaatgagaagctagataagtgagtcactcggcaactttctgctacttttacctaaagtccaaaactatttttcccaggctgcttgtattactgaaacaactgcatccttccaagggttagaaaatgaaacatcattatctgtgtaaatacaattcatccagggacccaggataatcaaaggtatagggagttgtggtttccagctcttaaaaatttgtcacattgataagcatgtaaagaaaactaatatttctttagcaacctcagatggcttaataaaagcagctgattttgcagggagggtagcagggaaatagagaaagcaggacacggtgcctaggaccgtatactttcaaatcgatatttcctttctggaaatatgtacaagatatacattcagatatatttatgtcagtgctacttaaagttgttttttaaaattgaaaacattctaaatgctccagaatagaaaaatatatttaaaagttggattgccatcaaaatgttttaaaatcatcttaatgacatggggaaatgcttatgacataatgttaaatgaacaaaggcagggtagacacttggttttctagtagtgtgtggctcacgcctgtaatcccagcactttgggaggctgaggccggtggaacacctgaggtcagtagttcgagactagcctggccaacatggtgaaaccccgtctctacaaaaaatagaaaaattagctgggcatgatggcagatgcctgtaatcccagctactcaggaggctgaggaggaagagtcgcttgaacccgggaggcagaggttgcagtgagccaagatcgtgccattgcactccagcctgggtgacagagcaagactccatctcaaaaaaaaaaaaaaaaaaagaacctcaaatctctgatgacatatagtcaatgtattttttaaaggctagaaggaaatttaccaaaatattaattgcggttttctttgggtgctgggaatatcggtaattgatgttttctcttttatactttgctatgtttcctacagtagatgtgtattataatatatattgttaccagaaaaaaaattataaagaaatgaaagaataaaaaaacctgtttggatcaaaatctatgctatagatgaatagatatattgacgtgtattgctatatatgcaacaatttagacatatgaaagctaaaagtatatatgtttgactagatagcacatgtttccgataccgtttagccacaggtagcctaatgagtcccagggtttgctgagcaaaatgtcgtagagctaaaatcacccctcacacacagttgacaaggtaggataccccatgggtgatgaagcacccatcaaagggggtatggggcagacttgattagcagtgctgttttgtaaataaatgtgagttaatatctttattgttaccacaagaatgaatcattctggttaacttatgggactttggggagtcacatttattttaaaacattaaagaaataagtatatttttattatagatgtgacttggaaacccagttgttggtatcatgcctatttgctttgggtatgttattcttgcactaaattccctggactgatttataaaatacttggatcggagagtccatacattctacttcgggcaatgaacaacaactacaaaatatgcatgccgtgggtgctacagaattgcttaggtggtttagctcatctactctactagattaaaagaagacccctaagtaggcctgttttgcctgggctgtgtaaactggtgttttggaaaacctttcccttttgcttgcaggagcaacacaatattggtccttaccacgcatggcctaccggtttgctctaggttagttctcagccctgcgctacctggtgggctgctggttgtcagagctaatgattcacatctacaaattctcaggggctttgtgctttttttttttttttaaaagggaaaccatagtaaaattataactgttcaacctacctacctggaaaatttataattataataatggtgtctttcaccctctttctgatcatttttcgattattttggctctgtttcttttagagcaatgatcttcaacttaggctgcacattagaatcacctggggagctttaaaacctgtcagtgcccagctgcaccctagactacttcaattggaaactccagcaggacccagaaatcagtatttggtaaaacttcccaggtgattctattgccaccaaatccattgttttaaaggaatagatggtaagcttttcttttcttttttttttcttttctttttttgagacaaggtctcactctgtcacccaggctggaatacagtggcacaatcacagctcactgcagccttaccctcctggcctcaaacaatcctcccacctcagcctcccaagtagatgggactacaggtgtgtaccaccacaactgcttactttttgtattttttgtagagacagggtttcaccatgttgcccaggctggtctaaaactcctgggctcaagtgatccacctgttttaacctcccaaagtggtgggattacaggcatgagccactgcgcctggtcagatggtaaagcttttaaaaaaccagattagtgttagtgatggttgcacaatatgaatgtacttaacactactgaactgtatacttacaaatggttaagatggtaaatttttatgttaggtgtactttatcacaatacaaaaatttgggaaaaaacagattaggacactctagatttgtgctgtccaatacagtagccattagccacatgtgactatcaaatgcttgaaatatggctagttcaaattgagataataaatcaagataagtgaaaaatacgcaccagattttgaaggcttattgtgaataaaagaataaaatatttcactagtaatttttatattgcttacatggagacagtattttttatcttttaggataaacaaaatatattaaaaataatttcactttttctttacttttttaatgtggttaccacaatatataaaatgacatatgtggcccccattgtttctactagacagcattgctctaaatttaaaactaaactagcagtcaattaattaaaaaggatgataaggggccgggcacagtggctcacacctgtaatcccagcactttgggaggccgaggtaagtggatcacgaggtcaggagatcgagaccatcctggctaacgcggcgaaaccccgtctctactaaaaatacaaaaaagtagccgggcgcggtggcgggcgcctgtagtcccagctactcgggaggctgaagcaggagaatggcgtgaacccgggaagtggagcttgcggtgagccaagattgcgccactgcactctgcactccagcctgggcgacagagggagactccgtctcaaaaaaaaaaaaaaaaaaaaggatgatgaggttaaaatggtaaatttgatgttatgtgtactttatcacgatataaaaatttgatggctcatgcctgtggtcccagatactcaggaggctaaggcagagcatcacttgagcccaggagttcgaggcttcagtgagctatgatagtgccactgcactctagcctgggtgatagagcaagaccctgtctctaaggaaaaaaaaaaaaaaaaacttttagatttcatttattttacacatatattatcacttggaaaatgagaaaaagtgtcaagtggcttgggaccagagagcctatcctaaacatgaaaacaagtaaaacacacagaagtacttattttttgagtcctcagtggtatgtaagcagctgcagtgcccccattattaggttaatgggacgcaagaacaggtaagtggtaaccctggcccaggacatatgagctgatataatgataccccaaccccatggtaacatcttggctactgaggcatcttggtaaagtcaattcttcatacctccctttccttgcaactagatttggatgatgatacaaaatatccctttacagcttcacttagatttcataagaatggatgggctagcaaaaaaaaccattctgattccttaaagtgaaacctaatagaggagcgagcaccaggcaatttcccattccctagtgggcaatgaccagtaatgtccggcaggatattagatcacctgccctacaggaatacagtcttgtttcccaatggaaaaggacgaaagaccccacgcacttggctgagcaacctcaaggtgatctttgggaagttaagaggctgactctcccctgacttggctctgaagctccaccctttcctaacccagccgcatcactgccaagttcacatcacatccagtctcactctctctcgcatgttgcaggggcttccccttactcagatctagcaatggttttcatgcgtgaaatacagccatggccctgaggctttaggcaacaatctgagaggggagcttaattgctagtagcaactaataactgcttctctacccatagtgttatttttataattgtcctcatcattattaataatagtggggatgaggatgaccaggaaaccttacctagacagttgtttcgacaagacatgaatcacagaaggcacctgcactgtagttactcagggccagttgctctgttttcatttcaaggttgactattttggagatttctttacaccttggtgtatagattgccatcatgggaacctggccaggtttgacatgcgctttaatttgacctcttgttgtttcctagaacaaaggccgagttagatcaagaagccttgatcagtggcaatctggctacagaagcacatttaatcat

SEQ ID NO: 11733 - DNA, 535 bp, Homo sapiens
acactgctcctaagacagaggtactcagatacgtggctgaaagcctagctcaaatactgccccagccctataagcagtacaacatgctgaacgcggacactactcgcaacctcatgatctgcttcctctggatcatgaaaaatgctgatcagagcctcattaggaagtggattgctgacctgccatcaacgcagctcaacaggattttagatctacttttcatctgtgtgttatgttttgagtataagggaaaacagagttctgacaaagtcagtacccaagtcctgcagaagtcaagggatgtcaaggcccggctggaagaggctttgctccgtggggaaggggccagaggggagatgatgcgccgccgggctccagggaacgaccgatttccaggcctaaatgaaaatttgagatggaagaaagagcagacacattggcggcaagctaatgagaagctagataaaacaaaggccgagttagatcaagaagccttgatcagtggcaatctggctacagaagcacatttaatcat

SEQ ID NO: 11734 - DNA, 9277 bp, Homo sapiens
ctgtgaatctttcaaagcctcagttttatgaccctgtggagccagtggactttgaaggacttctgatgacacacctgaacagcctggatgtgcagcttgcccaggagctcggggacttcactgatgacgacttggacgtggtgttcacgccaaaggaatgtaggactttgcagccctctttgccggaggaaggggttgaactggaccctcatgtcagggactgtgttcagacctacatccgtgagtggctaatcgtgaaccggaaaaaccaaggaagtccagaaatctgtggctttaaaaagactggatctcgaaaagattttcacaagacgcttccgaaacagacgtttgagtcggaaaccttggagtgcagtgaacccgctgctcaggcaggcccccgccacttaaacgtgctgtgcgacgtgtctgggaaaggccccgtcactgcctgtgactttgacctccgcagcctgcagcctgacaagcggctagaaaacctcctgcagcaagtgagtgccgaggactttgagaagcagaacgaggaggcccggaggaccaataggcaggccgagctctttgccctttacccatcagtggacgaggaggatgctgtggaaatacgtccagtaccagaatgtcccaaggaacacctgggcaacagaatattggtcaagttgctgaccttgaagttcgagattgaaattgagcccctgtttgccagcattgccctctacgatgttaaagaaaggaaaaagatctcagaaaattttcactgtgacctgaactctgaccagttcaaaggatttctgcgagctcacacgccttcagtggccgcatcaagtcaggcgagatctgcagtcttctcagtcacctacccgtcctcagacatctacctggtagtcaagattgaaaaagtcctgcagcagggagagattggagactgtgcagagccctacacggttatcaaagaaagtgatggtggaaagagtaaagaaaagattgaaaaactaaaactccaagctgaatccttctgccagcgtttggggaaataccggatgccctttgcctgggcacccataagcttatcaagcttcttcaatgtctccacccttgagagggaggtaactgatgtggactctgtggttgggagaagctcagtgggtgaacggaggacattggcccaatctagaaggctttctgaaagagccctctccttggaggaaaatggggttggatccaacttcaaaacctccactctgagcgttagcagctttttcaagcaggaaggagatcgccttagcgatgaagacttattcaagtttttagctgactacaaaagatcatcatccttacagagacgagtcaagtcaattccaggcttgctaagactggagatttctacagctccagagatcatcaattgctgtctgactcctgaaatgctgcccgtgaaaccctttcctgaaaaccggacacgcccgcacaaagagattttggaatttccaacacgagaagtatatgtccctcacactgtgtacagaaaccttctctatgtctacccacagaggctgaactttgtaaacaaactagcatcagcccggaacattacaataaagatccagtttatgtgtggagaagatgctagcaatgcgatgccggtaaggagggaaacgaacatttgcctcaaatcagggtgggctgctcacccctgtcacttcacacaagtccgggactcatcagtgtacaaagtccgtctattccaggccaatactgctcagcatgtgcaagggcttctgtgcccaggatatcagtggggaaacagggtcagtcttacttgacgatctctttctcggcttattctgtagtgagcttggaacatacagatcattttagaggattaaaaaaagtcataaagtctttccatactgcccataggaccaccccactctaaaggcatacaaagtaaagagatggctcaacacgtgcgccatgtttgctgagtgtcttccatgcacaaactgtacacactgtgttatacacacacagtgttacacacttactcaagcctcggaccacagtgctgatgaatacaaagtaccgcctagtaattataaacacacaccacctccacaccttctaggagtggatctttgttctgaggcaaaatataaatcaaattattcatatatatatatatatataaaatgcagtgtgctccaaggaactcaaaatgccagaatttatactttttaaaccatctcctactaaatgagatggtggttagctattactatttcccataagtcatagaattcagttaatataactttctttctttttttcttttttttttttttttttgagacagagtttcactctttttgcccaggctggagtacaatggccgcaacctccacctcccaagttcaagtgattctcctgcctcagccttccaagtagctgggattacaggcgcgtgccaccacgcccagctaattttgtatttttagtagagatggggtttcaccatgttggccagggtggtctcaaactcctgacctcagctgatccacccgccttggcctcctaaagtgctgggactaaaggcgtgagccactgcacgcagttaatatacctttctaaaaagaaaaagaaaaaaatcctttctcttaatgtcccacccaaagaaaaaaagaaaaaaaaaaacctttctcctaacgtcccacctgtcttcccaatgcaaggtgtcttaagacagcggtggggtcctcttagtcctctctgctcaggcccctggcatgccactgccaggagtgccagatatgcttgtgcagatcctgtggcaaccaagatgcccagccaagagtgactgtgggctaaagtccagtctgttcttcattcactgagccatgggttctggtgttgggattactgcatctagaggaaagagctttttttctctgcacaaaggtgagtgcacttgttcataatgcatcctaaatgctgcttcaggcccaaggaggtatctttttctaaatggcacaaatgtggataaggcagtggagattcaaatcacctaagtgagtaggtctgtatgtttgagagagaagaacctggaactggggatttctcactcaagacaaaagtatgtaactttggcctgttggatagacctctaggcagtgaggcagagtggagagagtactggttttctaatctcacaaacatgtggcctttggtcactaatatagccccttggaacctcatttcacccttcatagccagttcctttgcactggtgtgcttgggccagttgtagtcccagcacttttttttttctttttgagacaggatctcactcttgcccaggctggggtgcaatggtgcaatctcgactcactgcaacctctgcttcctaggctcaagcgatcctcttgcctccgccccctgagtagcagggactatacgcatgtgccaccacgcctggctaatttttgtatttttttgtagagatgaggtttcgccatgttgcccaggctggtctccaactcctgggctcaagccattctcccacgccgacctcccagagtgctgagattacaggtgtgagccactgctcctggccaacccagcactcttaattgtacaaaatgcagctctatgagaccagaacatcctgttggcctgatgatagtcaatttgatgtacccaaatgttactgataatttgatcctttctctactggtgaacaggtcatctttggaaaatccagcgggcctgaatttctgcaggaagtgtacacagctgttacataccataataagtctcctgacttttatgaagaagtgaaaattaagctccccgctaagctcacagtaaatcaccacctcctgttcaccttctaccatatcagctgtcagcagaagcaaggagcctccgtggaaactctcctgggatattcatggctgccaattctcttaaatgaacgtcttcaaactggatcctactgtctcccagttgccttggaaaaattgccacccaactactccatgcattctgctgagaaagtcccattacagaatcctcccattaagtgggctgaaggacataagggagtatttaatattgaagtgcaagctgtttcttctgtacacacccaggacaaccacctggagaagttcttcaccctctgccactccctggagagccaggtgaccttccccatccgcgtgctggatcagaaaatcagcgagatggcgctggagcatgagctgaagctcagcatcatctgcctgaactcctcccgcctggagccgctcgtgctcttcctgcacctggtgctggacaagctcttccagctgtccgtgcagcccatggtcatcgctggccagacagccaacttctcccagtttgccttcgagtccgtggtggccatcgccaacagtctgcacaacagcaaggacctgagcaaggaccagcatgggaggaactgcctgctggcttcctacgtgcactacgtcttccgcctgccagaggtgcaaagggatgtgcccaagtcaggcgctcccactgccctcctagaccctcggagctaccacacgtatggccgcacatcagctgctgctgtgagttcaaagctgctgcaggcccgggtgatgagcagcagtaacccagacctcgcggggacacactccgcagcagacgaggaagtgaagaacatcatgtcttcaaagatcgccgatcgcaactgcagccgaatgtcttactattgctctggcagtagtgatgctccaagttcacctgcagccccaaggccagccagcaaaaagcatttccatgaggagcttgcccttcagatggtggtcagcaccggaatggtgagagaaacagtcttcaagtatgcctggttcttctttgagcttctggtgaaaagcatggcccagcacgtacataacatggacaaacgggacagttttcggaggactcgtttttctgaccgtttcatggatgacataactactattgttaatgtggtcacctcggaaattgcagcccttttagtaaaaccacagaaggaaaatgaacaggcggaaaagatgaacatcagcctggctttcttcttgtatgaccttctctccctcatggatcggggctttgtgtttaacctcatcagacattattgcagccagctgtcagccaagctcagtaaccttccaacgctcatttccatgaggctagagttcctgagaatcctctgtagccatgagcattacctcaatctgaaccttttttttatgaatgctgatactgctccaacatctccttgtccttccatatcttcccagaactcaagctcctgctccagcttccaggaccagaagatcgccagcatgttcgatctgacttccgagtaccgccagcagcacttcctcaccgggctcctcttcacagaactggctgctgccctggatgccgaaggggaaggaatcagcaaagtacaaaggaaagctgtcagtgcaattcacagcctgctaagttctcacgacctggacccacgctgtgtcaaaccagaggtgaaggtcaaaatcgccgccctttacctacctttagttggcatcattttggatgctttgccacagctctgtgactttacagttgcagatactcgcagataccgcaccagtggctcggatgaagaacaagaaggagccggtgccattaaccagaatgtggctctggccatagcagggaataatttcaatttgaaaacaagtggaatagtgctgtcttccttgccctataagcagtacaacatgctgaacgcggacactactcgcaacctcatgatctgcttcctctggatcatgaaaaatgctgatcagagcctcattaggaagtggattgctgacctgccatcaacgcagctcaacaggattttagatctacttttcatctgtgtgttatgttttgagtataagggaaaacagagttctgacaaagtcagtacccaagtcctgcagaagtcaagggatgtcaaggcccggctggaagaggctttgctccgtggggaaggggccagaggggagatgatgcgccgccgggctccagggaacgaccgatttccaggcctaaatgaaaatttgagatggaagaaagagcagacacattggcggcaagctaatgagaagctagataaaacaaaggccgagttagatcaagaagccttgatcagtggcaatctggctacagaagcacatttaatcatcctggatatgcaggaaaacattatccaggcgagctcggctctggactgtaaagacagcctgctgggaggtgttctgagggtgctggtgaattctctgaactgtgatcagagtaccacctacctgactcactgctttgcaacactccgtgctctcatcgccaagtttggagacttactctttgaagaggaggtggaacagtgtttcgacctatgtcaccaagtcctgcaccactgcagcagcagcatggatgtcacccggagccaagcctgtgccaccctttacctcctcatgaggttcagttttggagccaccagtaattttgcaagagtaaagatgcaagtaaccatgtccctggcatctttggtgggaagagcaccagactttaatgaagagcacctgagaagatccttgaggacaattttggcctattcagaagaggacacagccatgcagatgactccttttcccacccaggtggaggaacttctctgtaatctgaatagcatcttatatgacacagtgaaaatgagggaatttcaggaagatcctgagatgcttatggatctcatgtacagaattgccaagagttaccaggcatctcctgatctgcggctgacctggctccagaacatggcagagaaacacaccaagaagaagtgctacacggaggctgccatgtgcctggtgcacgccgctgcgttagtggctgagtatctgagcatgctggaggaccacagctacctgcccgtgggcagtgtcagcttccagaatatttcttccaatgtgctggaggagtctgtggtctctgaggacaccctgtcacctgacgaggatggggtgtgcgcaggccagtacttcaccgagagtggcctggtaggcctcctggagcaggccgcggagctcttcagcacgggaggcttatatgagacagttaatgaggtctacaagctggtcatccccatcctagaagcgcatcgagaattccggaagctgacactcactcacagcaagctgcagagagccttcgacagcatcgttaacaaggatcataagagaatgtttggaacctacttccgagttggtttctttggatccaaatttggggatttggatgaacaggagtttgtctacaaagagcctgcaattaccaagcttcctgagatctcacatagactagaggcattttatggtcaatgttttggtgcagaatttgtggaagtgattaaagactccactcctgtggacaaaaccaagttggatcctaacaaggcctacatacagatcacttttgtggagccctactttgatgagtatgagatgaaagacagggtcacatactttgagaagaatttcaacctccggaggttcatgtacaccaccccgttcaccctggaggggcggcctcggggagagctgcatgagcagtacagaaggaacacagtcctgaccactatgcacgccttcccctacatcaagaccaggatcagcgtcatccagaaggaggagtttgttttgacaccgattgaagttgccattgaagacatgaagaagaagaccctgcagttagcagttgccattaaccaggagccgcctgatgcaaagatgcttcagatggtgctgcaaggctctgtgggagctactgtaaatcagggaccactggaagtagcccaagtgtttttggctgaaattcctgctgatccaaaactctatcgacatcacaacaagttgaggttatgctttaaggaattcatcatgagatgtggtgaagctgtagagaaaaacaagcgtctcatcacggcagaccagagggaatatcagcaggaactcaaaaagaactataacaagctaaaagagaacctcaggccaatgatcgagcggaaaattccagaactgtacaagccaatattcagagttgagagtcaaaagagggactccttccacagatctagtttcaggaaatgtgaaacccagttgtcacagggcagctaagaaaagccatcttcattcgtggagactgtggccctgcaaccctggagaaggacttgctggtacttaaaaaatgggacatttgccacccaggactgactgtacactccctgatcagccagcactctggaagctttgggatcccaggaaccatggaattattcccaaatggactctgaccagatttttgccatactggggggtggcgggatggaggatgggtactcaggcatgactgcgtatttattaaagtgtgtttttccacaatgtaccaaacaaggcataagcagcttctcctgctgactggccaatcactgcccatctgagagatgatttcctctggcccatatttgaatttattggagtaactcaaattgcctgaggaaaaatggaaaaattatccaccagtcgattcaaactgaatttcactctttataggaaggcagggcaaacttgtaggagtacgaaacattttcaataaatctacaaagggaagccttactacaattccaaaaatcatcatggttggaaatttgggaggagattatttgtgaacttgttacccttttggtaatggtggactaattgctgtatagttatttttgttttattattactgttacattaatttaacatgcatttatagaagaatacattcaaagcactgatgtaggagatacacggtacttggagcagtcagccagaaatcacagatactgctttcacttaaatggaaacaattctccgataatgctttgctttttttcttatgtcactcttgtgtactatctatttttctcctctctgggaccaagtttctttttataaagcaataatatctctgttttcatttcagaacattgtgctgtctgtcagcatatgtatatcagctacaaaatatattcaactttgacttcttttgacaaaggactttaggaaaaagaggaacaaagacattatttgagaattaaattatatatttttaatatgactgtgaccttgactgataataaagatgtaataag

SEQ ID NO: 11735 - DNA, 2206 bp, Homo sapiens
gacagacgaggtttgcgcttggctgggcatgttccgcggctactctgcggcgcgccaggcccccgctttccgcaccccgcgaccctagaagccaccgaaccgccggcgggccatggccactctgccgagcgcagagcgccgcgcgttcgcgctcaagatcaacagtcatgctctgtcgcccaggctggagtacagtggggccatctcggctcactgcaacctctgcctcccggattcaagcgattctcctgcctcagcctcctgagtagctgagattacaggtattcttcagcggaaataaggaaacagtttactctcccaccaaaccttggccagtaccatcgacagagcataagtacctctggcttcccctctcttcaactacctcagttttatgaccctgtggagccagtggactttgaaggacttctgatgacacacctgaacagcctggatgtgcagcttgcccaggagctcggggacttcactgatgacgacttggacgtggtgttcacgccaaaggaatgtaggactttgcagccctctttgccggaggaaggggttgaactggaccctcatgtcagggactgtgttcagacctacatccgtgagtggctaatcgtgaaccggaaaaaccaaggaagtccagaaatctgtggctttaaaaagactggatctcgaaaagattttcacaagacgcttccgaaacagacgtttgagtcggaaaccttggagtgcagtgaacccgctgctcaggcaggcccccgccacttaaacgtgctgtgcgacgtgtctgggaaaggccccgtcactgcctgtgactttgacctccgcagcctgcagcctgacaagcggctagaaaacctcctgcagcaagtgagtgccgaggactttgagaagcagaacgaggaggcccggaggaccaataggcaggccgagctctttgccctttacccatcagtggacgaggaggatgctgtggaaatacgtccagtaccagaatgtcccaaggaacacctgggcaacagaatattggtcaagttgctgaccttgaagttcgagattgaaattgagcccctgtttgccagcattgccctctacgatgttaaagaaaggaaaaagatctcagaaaattttcactgtgacctgaactctgaccagttcaaaggatttctgcgagctcacacgccttcagtggccgcatcaagtcaggcgagatctgcagtcttctcagtcacctacccgtcctcagacatctacctggtagtcaagattgaaaaagtcctgcagcagggagagattggagactgtgcagagccctacacggttatcaaagaaagtgatggtggaaagagtaaagaaaagattgaaaaactaaaactccaagctgaatccttctgccagcgtttggggaaataccggatgccctttgcctgggcacccataagcttatcaagcttcttcaatgtctccacccttgagagggaggtaactgatgtggactctgtggttgggagaagctcagtgggtgaacggaggacattggcccaatctagaaggctttctgaaagagccctctccttggaggaaaatggggttggatccaacttcaaaacctccactctgagcgttagcagctttttcaagcaggaaggagatcgccttagcgatgaagacttattcaagtttttagctgactacaaaagatcatcatccttacagagacgagtcaagtcaattccaggcttgctaagactggagatttctacagctccagagatcatcaattgctgtctgactcctgaaatgctgcccgtgaaaccctttcctgaaaaccggacacgcccgcacaaagagattttggaatttccaacacgagaagtatatgtccctcacactgtgtacaggtaagaaacacaggctcgggctgggcgtggtggcttacaccataatcccataactttgggaggccgaggcaggaggattgcttgagctcaggagtttgagaccagccttggcaacatggcaaaaccgtgtctctacaacatatacaaaatttagctgggcatggtggtgcatgcttgtaatcccagcaacttggcaggctgaggcaggagaatcgcttgaacccaggaggcagaggttgcagtgagccaagattgcactactgcactccagcctgggagacagaaccagactctgtctc

SEQ ID NO: 11736 - DNA, 1965 bp, Homo sapiens
cttcttctcctccttctcggccgggaggaggcagggctggatccctcagccgccgccgctcctcctcctggcaggccggccgcggagtcagctgacgccggcgctccagcctcgcctccccgcgccgcgctctgcgctccccgaaagtggctgcaagccggccgcccactgtcagggttggggggacagagaaagtgatgtgcgccttctaaagcctcgcccagcgccgccgaagcagcttcacctctccaactttctcccaccgactgcttgtcttgaccctgccctccaccctccccagagccacttcgggtgcgcgctcttgggtaaagggggggtcaccggctgtctgggatggcttccaattttaatgacatagtgaagcaagggtacgtgaggatccggagcagacgcctcgggatttatcagcgatgctggttagtattcaagaaagcttcaagcaaaggtccaaaaagactggagaaattttctgatgaacgtgctgcatatttcaggtgttatcataaggttacagaactcaataatgtgaagaacgtagctcgattgccaaaaagcaccaagaaacatgccatagggatttatttcaatgacgatacctccaagacttttgcttgcgaatcagatcttgaggctgatgagtggtgcaaagtactccagatggagtgtgtaggaacacggatcaatgacatcagccttggagagcctgacttactggccactggggttgagagagaacagagtgagagattcaatgtgtatttgatgccatctcctaacttagatgtacatggcgaatgtgccttgcagattacatatgagtatatctgtctttgggacgtccagaatcccagagtcaaactcatctcttggccgctaagcgccctgcggcggtatggacgtgatactacgtggttcacttttgaggcagggaggatgtgtgagactggtgaagggctgtttatctttcagacccgagacggggaggccatctatcagaaagtccactctgctgccttggccatagccgagcagcacgagcgcttgctacagagtgtgaaaaactcgatgctccagatgaagatgagtgagcgggccgcctcgctgagcaccatggtgcccctgcctcgcagcgcctactggcagcacatcacacggcagcacagcacgggacagctctaccgcttgcaagatgtttccagccctctgaagcttcatcgaacagagacttttccagcctacagatctgagcactgacagtaactgccaagaattgttaacacacttgtgatgtgtcagccacagattcacccaggaggtcacagaatgacagcaagggaaatgacgaccaagagaagaagcttaaagtcctggctaattgtgtggtcattggaaaactctgcaatacaataattttctttattttctttttcttttttaaattcttagtgtaattgaaacgtgctctatagatattgactctgtgttccctcttttacagctggacagaaagaagtcaatgtcacgaaatgattttctattgtagatactttgtcccttgcacttctctgaatctgtccttttgtggattcttgtgattttccttccaagtgtttcagttgtatgacagtcagtattgacaataaaatggcttttaattatttgttatttgtttacaccctattcctcagttattattactgtggttctgattaactactggaaattatatttgattatatcaccaattagttaaatcagtgcttcgactcactcttatctgttctgttcaaaactatttgttcaaagaacccgttagtgttgtttacagggttacagtttctctcacatgctttcctcacccctttacccccctttttgaaagcctttattttgttcggagtctcttcataaaacatttgaaaataaaagatcattcttcaccca

SEQ ID NO: 11737 - DNA, 1453 bp, Homo sapiens
cgcgctctgcgctccccgaaagtggctgcaagccggccgcccactgtcagggttggggggacagagaaagtgatgtgcgccttctaaagcctcgcccagcgccgccgaagcagcttcacctctccaactttctcccaccgactgcttgtcttgaccctgccctccaccctccccagagccacttcggatttatcagcgatgctggttagtattcaagaaagcttcaagcaaaggtccaaaaagactggagaaattttctgatgaacgtgctgcatatttcaggtgttatcataaggttacagaactcaataatgtgaagaacgtagctcgattgccaaaaagcaccaagaaacatgccatagggatttatttcaatgacgatacctccaagacttttgcttgcgaatcagatcttgaggctgatgagtggtgcaaagtactccagatggagtgtgtaggaacacggatcaatgacatcagccttggagagcctgacttactggccactggggttgagagagaacagagtgagagattcaatgtgtatttgatgccatctcctaacttagatgtacatggcgaatgtgccttgcagattacatatgagtatatctgtctttgggacgtccagaatcccagagtcaaactcatctcttggccgctaagcgccctgcggcggtatggacgtgatactacgtggttcacttttgaggcagggaggatgtgtgagactggtgaagggctgtttatctttcagacccgagacggggaggccatctatcagaaagtccactctgctgccttggccatagccgagcagcacgagcgcttgctacagagtgtgaaaaactcgatgctccagatgaagatgagtgagcgggccgcctcgctgagcaccatggtgcccctgcctcgcagcgcctactggcagcacatcacacggcagcacagcacgggacagctctaccgcttgcaagatgtttccagccctctgaagcttcatcgaacagagacttttccagcctacagatctgagcactgacagtaactgccaagaattgttaacacacttgtgatgtgtcagccacagattcacccaggaggtcacagaatgacagcaagggaaatgacgaccaagagaagaagcttaaagtcctggctaattgtgtggtcattggaaaactctgcaatacaataattttctttattttctttttcttttttaaattcttagtgtaattgaaacgtgctctatagatattgactctgtgttccctcttttacagctggacagaaagaagtcaatgtcacgaaatgattttctattgtagatactttgtcccttgcacttctctgaatctgtccttttgtggattcttgtgattttccttccaagtgtttcagttgtatgacagtcagtattgacaataaaatggcttttaattatttgtta

SEQ ID NO: 11738 - DNA, 625 bp, Homo sapiens
atttatcagcgatgctggttagtattcaagaaagcttcaagcaaaggtccaaaaagactggagaaattttctgatgaacgtgctgcatatttcaggtgttatcataaggtaagactcaattgctgtagctttccagtaatctatttacagggaggcaactggaattactgactgaaaacttgcctgaattatttaacaaaggtacaagcaatatcttttccaaggacaaaacacccctaaaataacatctgcttgctaattgtttcaagtaattgactaatgtaaagtcacttttctggtttcctgctatttgctgtagctgttcttgctgttttccagtctctgctatgggacttatcatgttgttgtactccctacactgaagccccgagaggatgaggactggatctcattgtgtctcagacactgcctgatgcagaaagacactcattcaatgcttggggaatgtggggagagaagggaggggaagaagcagaaaacaggtaacagtggacgaagaggaagttctaccgatttattgttttctttaagtttgatgactaaattttcttagtagtagtgagattttctcaataaaaatagtcattgtgtgttacaactcatt

SEQ ID NO: 11739 - DNA, 394 bp, Homo sapiens
atttatcagcgatgctggttagtattcaagaaagcttcaagcaaaggtccaaaaagactggagaaattttctgatgaacgtgctgcatatttcaggtgttatcataagtctctgctatgggacttatcatgttgttgtactccctacactgaagccccgagaggatgaggactggatctcattgtgtctcagacactgcctgatgcagaaagacactcattcaatgcttggggaatgtggggagagaagggaggggaagaagcagaaaacaggtaacagtggacgaagaggaagttctaccgatttattgttttctttaagtttgatgactaaattttcttagtagtagtgagattttctcaataaaaatagtcattgtgtgttacaactcatt

SEQ ID NO: 11740 - DNA, 19529 bp, Homo sapiens
gggctggatccctcagccgccgccgctcctcctcctggcaggccggccgcggagtcagctgacgccggcgctccagcctcgcctccccgcgccgcgctctgcgctccccgaaagtggctgcaagccggccgcccactgtcagggttggggggacagagaaagtgatgtgcgccttctaaagcctcgcccagcgccgccgaagcagcttcacctctccaactttctcccaccgactgcttgtcttgaccctgccctccaccctccccagagccacttcgggtgcgcgctcttgggtaaagggggggtcaccggctgtctgggatggcttccaattttaatgacatagtgaagcaagggtacgtgaggatccggagcagacgcctcggggtgagtatcgatcctctccgtgttgctgttcgccggttcgattgtctctctcttgagccagcatccctggagggtggacggagagtccccggccgcgcgccggagaattgcgcggtggctttctcagccgaaacccgcgtctccggggctgtcactgtaaggccagcgtctaggtatgtaatggatctatctttatctcttggatgacttggctttctgatggtggccgcgtgttgggcttcagtagcccctggagcccatctactcgaaataaatatttctcggtagccatggaagttggagctgagaagcccgggcgggggtgcctgccggatgcccccggttcccctcttttcccactcgccgccaacttaacttttccgggggatggatcggctggttgagaaagaggacacgcatactcggtgtgaacgaggtcacgaaccctctgaccccagggagagatttctgccaagcgtaaggtgtctttggatccccccacctctgtcccaggtgtcgtgtcaaaggcggtgcgggctggcctctggtcggggccaacttgggtagatacttgaatctggattttccgtggttcgaagccggggtggtggatttctgttgctggaatacaccctggaggtccacggaagggttatttacgtggaacctgatacctggcatagcgcaagtgctccctacatatgtcctgaaaggaagaatgaatgaatcttagggcacttgggacagatgttgacacaggctagctccttccttaaaactccctctctttcgcccctttctctcttggctcttcgctggaggaggcttcaaaagagaacctacccttcctctccttgggactgaatgatggtggaagaattcttgagggagagggaagatactggaacgatttttttatttcctaaaaatttcaaactaggtccctcatttctctttgcctcctatcaagtgttgtcgctgttttagttgatcctgtgcgtttggacataaggggtgaaaagtgggggtggagaggtggcgggggcggggggagaaaatatcctttggtgtaatgcctgaaataagtataatgtcagtaatcgtgtggaatgccgccattgataatgagtggtaaattgaatagctttctttagaaatatgtgtcatttggcatctttctcttacttggtctttggactgttttaatgtgccagatacttttactgaaaactgaaaagaaatttcacagtagtaaactcagctagggagggaagccctgtggggaggaacatccgcaattattataaaactcttgcctaattcgttttggtctttttcttttctttttctcccctgctggtgaccatgttttagcgattatgtcctgtgttattgtgaatatatacatatgtaattagggagaaatgtaacagaattcaccatttccatcagctctgccaaagtttccttggttttcttttctgctatgcaaatattctcatcttcaagagcacccattgttgggggtactttactgagtgactcccatgtaaggggcaaacaataatgggaactttctatttttggtatgcttataggctggccaagtgttacaattttaaggggagttaagttaaaaaaaaaaaaaacccagcattctaatttagctttactccatcatgtcaatggaaggaattggtatgagacatccattctgtgttagggagcattccaatgggaagaggacatgcattattaatgcacaaaatatgaattattcataaggatcagagtttatgccaaattgtgacacatggtaatttatttgaaaaactggttaccatcactttcttgtttgtggtaactgagattattttttctagattattacaattgacacaacatagccctatgtgtgtgccaacatttatggacagatatttgaagcagaaggaacagaaatatttagtttgtatttgttttatgttttacagcattttggatgctaatgagcagtatactttctcaagatttattctttttgtctgtgttcacgttcagacttcagaatatctattgaattatggttattgctcatggagagaaaaggtcaaaaatatgatcaagtaaatctggtcttatttgttagcattggttttctcaccagttaatttttaaaatattcttatggtatgatttacaaaagaggctgattacatagttgccagaacacagtgcaaaccaaagttttaatggaggctgcaaatattggtgaaggatgctgtacggaattggcatggggaccctatgtccacagtaaggaatgttagcggtattaatctaggctacatatagtctagaacagcatgcgacatgtatcttctaggaatatgtgccagtctcaaagagaggtagggcatttattttgtctagcacagagtagacacttggtaagttcatgttgaaatatgtgctgaactatatagtgcatggatggtcttgccatttataacctttaggaactaatacaacagcatttattaatggaatccagaccatgtttgggacggtttataattaaatacaaaaacatttcatggtaagcagctgttcctggtgccaaggaataaatgcttcttcagatttggagaaagaggagaagggaacgcattctgcttctattgcttgttgacctttgacctttcttggcctcagtttcctagtctgtacaatgaacactatttaatgttcttgggagcattaaagaagatatttgtgaaaatgcaatgaaagtctagaacattgattctgcttgtatcattttctttaatcaaagatgagttaggattggtagacggatataggaattatctatttccttctctttctatgtagaagtgtacaaaggcataaatgtttatgcagctccagattttttcaatggatgaaacttttacaaattatatacatatatgtgtatgtgtgtgtatttttatacataggaataaatatatacatacaacctatgtacatattgtataatatataatatacgtatatttatatatgtgattttttaacaggacaggaaacattctaaaaacattcccattcaaatgggtcacagataagtggtcaccttcatttgaaatcctaaagagtttaaatgattaagcaatcaaatatgtatagatttattctcttctttagacatcaaaaagcttaatgaaatataattcatttaactcaaaagtttcagtatcttcacatctgtattccccagcttaatccccattgtttcctggaggtctccagctgtgccctgggtactgaatttgttcaggaatgtcgacgttactatttgaggggctgggggaaggaggggagcagctgtccataattatttgagtaatcgattaaatgcactaaaaatttctttttaggggagaggcaaatcaggcaatttgtacaacattaacctgctgaatgtgtgacttagatagcatcatataacaattctcacttcgtttctttccttgcaatggagatgattttccaatcaatcattgtcatggcttgcccacagtgcaagtttcagaacggaaactcgggtttatttatctacgcacaatccctcagttacttgcctttaagtgacatttctgtgctcttgtctaccaaggacttagcagcttggacctcttttctgacctccactcatgtaaattctcctgtctatcccacatctccacttggatgactcacagacctgctgctcctagagtcctctccatcttagccactagaggtcccagcattttggttgcgaaggtaaaaatcacaagcgaaccttggtgtcatttcactcttctcccctcatctcccacccctacaggcaatccatcaggagatcttgtgggctgtatctttgaaatatatctagaatccggctgtcacctcacgctatccactgctacgaccctggtccgaaccctcctcatctcctccctgtaacattgcaacagtcttctcatttgacttcctgcctacactcttgctcccgctagtgccttctcaatacagtaaagtgttcctttggaaatgtaagaaaggtcatgtcacctggctgctgaagctgtcagaggcgtgtgaaccagagcaactccatcttgaataggagctgggtaaaacaagactgaaacctactgggctacattcccagacagttaaggcattctaagtcacaggatgagataggaggtcggcacaagatacaggtcataaagaccttgctgataaaacagtttacagtaaagaagccagccaaaacccaccaaaaccaagatggccatgagagtgacctctggttttcctcactgctacgtggcgctacccccaccagtgctatgacagtttacagatgccatggcaacgtcaggaagttacccttggtctgaaaaggggaggcatgaataatccatcccttgtttagcatatcatcaagaaataaccataaaaatgggcaaccagcagccctcggggctgctccgtctatggagtagccattctttatgcctttactttcctaataaacttgctttcactttacagacttgccctgaattctttgctgtgagagatccaagaaccctctcttggggtctggatgagaacccctgtctggtaacaaaaccattggtgactttccatatactgcagagaagtcttacaatgggccatgaggccctatgctgccccagaaccctctcgttcactgttttctctgcttggaatatgctgtttccccagttacctcctcctggcttgctctctcacctccttcagccttttctcagctcctaccctctcaatgaggcctttaaggcctccatctatctatctatctatctatcaatcatctatcatctatctatctatcatctatctatcatctatcatctatctatctatcatctatcatctatctatcatctatcatctatctatctatcatctatctatcatctatctatcatctgtctatcatctatctatcatctatctatctatcatctaccatctatctatctatcatctatctatctatcatgtatctatcatctatctatctatctatctatctatctatctatctatctatctatctatatttttttggcggagtcttgctcttttttccaggctggagtgtagtggcgtgatctcagctcactgcagcctctgcctcctgggttcaagcaattctcctgtctcagcctcctaagtagctgggattacaggcatgcaccaccatacccagctaatttttatatttttaatagagacagggtttcaccatgttggccaggctggtgtcgaactcctgaccttgagatccacaagcctcggcctcctaaaagtgctgggattacaggcgtgagccaccgtgcccggcctcagaccactctattttatttcttctccctctcctttccttctttccctgcccctttttctccctagacttattaccctctccttcatttatctttgtattgcctatgtactgccaaggacatgtgaagctacatgagggctgggacttgtttctctcttctttaatcatagctgtcccccagtgcctagtgcagggcccagcacagagtgggcatttgatgaagatttgtggaataaattaatgaccccatcactgtgttgtggcttaagagcataggctctgacatgtgactgcgttaaaatcccaactcactggctggttatgtgacttctggtgagttatttaatatttataagcctccatcttctgtaaaaatatggagactcttactactcacctaatagatgatgatcataaagagcttaacacagtgcttgacacagtaaaaacccaattaatgtttattagggctctcactcctacttccagtgtggttagagacaatgacacttaactggttattatttcactgtttctactgcaattgttcatatcctcaaagaacttgttttttagttaggaaaacaaacttagtacaagtaccaaatgttgcttggcattgatggttgatacagaaggaatttataagatttcgcctttataagattttttatgattctacacaaatggtagagatataaaataaggagaaatgcctcttcatgtaactccaattcgagtgaattcactggactaggaggtatttttgttaacttggggactgttttcttttgtggtagagaagaaattttaaaaattggtcagctcacggccaggttttaaaaataaacattttctaattctttcattttatagtttcacctgacctggtatgccacaaacgctttcatgtttcatttgaggattttagatttagatgttcaggaatccatgcattttttatggtaccatgacaaagtcataatcgtagtatgaaaattatacagatagaataaactcatatactccttttttttccttttgagatggagtctcgctctgctgcctaggctggagtgtcctggtgtgatctcggctcacttgcagcctccatctcctgggttcaatcaattctcctgcctcagcctcttgagtagctgggactacaggcacatgtcaccacagttggctaattttggtatttttagtagagacagggtttcaccatgttggccaggctggccttgtatgcctgacttctggtgatccacccgtttcagcctcccaaagtgctgggattacaggcgtgagccaccgtgcccggcctcatcatatgctattgttatttaagtatatgtatgcacatgcacatatatgcacatatgaactcatgcaactattcagtaagatatgtgaagtttagttactctttaagaacaagaggctttgggataactttaccagtagggaaatttatggccagatagactgcatatatatacatgcatcagctgggacgactcagttattttggcttcatttgaatcagcttcattgacatggtttccatgtcagaagggctttccagctggtatttcagtcgtcttcatctgattgtccatgtggatgagacgattaattgtgcataaagtcagcctttacatcatcatccccaaaactgatttaagcagagtggccaatttagtgactttgtatatagacataaaccaaattagtgatatgattgtccccacatctgccaatgtatttttgaaatcatatttattagaagactagaaatatttatttttaaagcagctttgtaatttttgtggggaatcgtttggtattttaagaacttagttttcattggaatatattttcttccatttgttttatcattcctcaaatatttcttgagtacctattagtgttaaccaccttaaataaggcagatacaatcaccatcctcaaggagttgacaatttaatttttgatttgtattattaacaagagattaatgtattcactatagttaaagaggaattaatctgagtaacaggtcaaatattgaagtgaaaagatgcctgaggatatttttctattctatttttgtgaaatgaggaagggcaaatttgatttttctcttactctaggaatttgatcctagtagggtggaaattaaacctttggagattctaagccttgaagagattatggtgcgacccccccgttcctgtgaaattcaaaataaaattgtgagtttagaaatgccacatgatatatgtgaatgtttaaattaaaatagcttctttctagaatgcagatggctacattttggataagtatttggaagctgatttttgcagagcagttgtgggggctgcctttatttcactagtgttctcaccctctgtttatgccctggatcccagagaacaaaattgttaactggttgtcttgtgttcttaagccgagttgttaactaggctccagtgagaggatgcaggtgacttttctgagacaatgctttgcagcttgtatgagattcttagagaagtctggtcctccctgccccagcctctcccactttccacctgctatgccttcttaaagattaagatcaggttgggtgtggtggctcacgtctgtaatcccagcactttgggaggccgaggcgggtggatcacccgaggtcaggagttctagaccagcctggccaacatggtgaaaccctgtctctactaaaaatacaaaaattagctgggcatggtggcaggtgcctgtaatcccagctactcagggggccgaggcaggagaatcccttgaacccaggaggtggaggttgcattgagccgagattgcgccactgcactccagcctggggaaaaagagcaagacttcatctcaaaaaaaaaaaagttaagatcaatatttcattattttaattgaagttttatttttagataattgttatgttcatatgtagttgtaagaaataatatggagagatattccatgccctttaaccactttccccccaatggtaacatctttcaaatttgtaggacaatataacaaccaatatattgacaatgatacaattaagatatagaacatttcatcccctggaggatccttcacagtcttcttatatagctgcccctcctgcccctgtcctccatatccctaatcccctgacaaccactaatctgttttccttttgtcattttgtcatttcaagaatattatgtaaatggagtccaggcttggtggcttgttcctgtcatcccaggactttgggaggccaaggcagaagggccacttgagcccagaagtttgagactagtctcaggcaacatagtgagactgtctctacaaaaaataaaaatagaaaattagccaggtgtggtggtacacgcctgtagtgctggttatttgagaggttgaagtgggatgatcacttgaccctgggaggttgaggctgcagtgaactctgatcatactactatacttcagcctgaacgacagagcaagatgagactctgtctcagaattttttaaaaagaatattatgtaggctgggcatgatggctcacgcctgtaatcccagcactttgggaggccgaggcgggcagatcacaaggtcgggagttggtgaccagcctgatcaacatggtgaaacactgtctctactaaaaatacaaaaattagtcgggcatggtggagagctactcaggaggctgaggcaggagaatcacttgaacccggatggcggaggttgcagtgagcggcggaggttgcagtgagcggcggaggttgcagtgagctgagatcgtgccattgcactccagcctgggtgacaagagtaagactccgtctcaaaaaaaaaaaaaaaaagaatgtaatgtaaaagaaccatacagtatgtaatgtttggggattggcttttttaaaactcaatataatcccctgagattcgttcaggttgttgtgtgtataagtttgttcttttttcttgctgagtagtgtaccatggtgtgtatgtacaataggtaccgtagtttgtttagacactcacctgtcgaaggacatgggttgtttctggtttttggctatcatgaatgaagctgatatactcatataagcatttgtgtagaggttttcacgtgaacatacgttttcgtgcctctaggcaaatgtccaggagtgcaattgctgggttgtagagtagttgtgtctagtttttaaagaaactgctgaaccgttttctcacagttgtaccattttacattcacattagcaatgtgtgagtgaatcggtttttctgcatctttgccagcatttggtgtcatcactgtgttttatcttagccattcttctagatgtgtcgtggtatcttattgtggttttaatttgcatttttgtaaagggtagcaatgttgagcatcttttcatgttcctgtttgccgtccatgtcagtaaaatgcctggattgcttattttttaacggttgagttttgaaagttcttcatatattctagatatcaatcccttttagataagtggtttgcaagtatcttctttcagtcttgtcttgtcagcctaatatcctgaagatgtttcaattttttttgtaagttttatagttttatcttttatatttaagtccatcacccattttgagtaatttttgtataaggtgtgcatttcaggtcaaggttatgcctatggatgtacagttactccagcacttttttgaaaaggttgtcttttcttcattgagcattttcatgtcttcgcctgggtcctctattctgttccattgttctatatgccttatatatgtacagtgatatgtctatatatgtctatatatgtctgtatttgtatatatagacatatatgtctatatatgtctgtatttgtaactatacaataagtcttgaaatagggcacactgatccctctcagtttattctttttcaaaattgttttagctattctagttcctttaccttttaatataaattttaaaataatgtctataactactagaaatctttctgggatactttctcattttacacacacacacatgcacacacacacacacacgatttaattggtgcattagtttatttttgtggtggaaatagcagaagtttgagactcacactttagtttgggtctcagcttggccgcttattggctctgtagccttagggaaaattgcttactctttctgatctttaccttacttatatatgaaaaatgaggataatatacgaaagatgaatataccaggctcttaatcctgtgcctgactcatagtagaaactcagtgagtcatactattgatttttattttttattggtaagaggttgaaatgatatttttagtttattgtctgtgagaaccatggccttggtggaaattaattcactcatattccagcggaagagtcatgtttttgataataaaaaaaaaggttgcattctatcttcctcttgctgttgtcttctatgatatatttttgtaatattgggtttatttaggagcctccagtgaaatcctatcttagaacataaagacttgaatatattagccaaaatggcagaactttgattataagactggccacagtatttttgcctattaactctaacagctttgtccaaatgtgagatttatatatctggagagataattttagggtagtaaacagcattcaatcataaaatgagaaaaagtattatttattgtccaacataactcaaagagttggtgactactaggtcttttcctagagaggaccatcctgacttaggtgcagagtgttcagctcacagcgtcatgtttcattgcactgattaactttatattatgttaaatttgacattttctctcaagtgatactggtttccaatttcagataagaatgtgtgcttcctctttaaataaagcttatttatttaaaaaagcaaagtaacttaattaatgttaacttacagtgcaggtattatatgaccatgcagtgacaaaaattttggaggtaggtggtggtacacagacgcagtgcaaatccaaagggtgcaggactgaagtgtgggaaactgcagaccagtgtacttattttttaaaataggttttctaaaatttctttacttatagccgccaaatgtcatcattttatataaataacttaaaaattaggtgcttagggaaaaaactcccatgtacccaataccatcctcttacaagactttcctctgatatcaccatgtatatgtcacttctcaccccccaaaaactgtacaaccttattttggttttgcccaagcccttattttttcttcccttcattcggatgtacaatggatactgctgtgattaacagaaagagaaactagcaagtctcgtcaatggactaactcttttatttaatacaagtttccatgtttagaagagcaattcaactcttagaattcattttattatcttaacaccatacattcattcaataaaagaaatttattttccaaacttttaagaaatcatacttctttgaatcccctagcaaaattgactctttatactaatttctcagtttccaggtttctgtctaccaaagtgcagatatgttggctaatctgtgtaagagccactttttgagtctgggttccattccaccaacagtggcctcaaatctggaagttatcacgaacgtagtctagtcttcagcatccattaattcagtgtggtgtaaagtgagattggatagcaacccttcccagagagtttgtcctcttggagaagtcttcactggtttgaatccatcttctccattaactggttgctcttaacgtctgattttctcctggctggctgtctcttggcatccatattccttcctcagaatgacttgccttgactacaacatttaagttgactcctcacatccttctagaacatcacgtaatttaaatccatgtatagaacttaacaatttttctttattttgtgccatttatttctcttctctttctgtttctctgtttctatatacatttttttcttgtttgtttttcttctgtaagagagggaatgaacaagatagccaagtccctggcctcatagaacttactctaagagacataagttttatcttacatatattatttgcttatgtatttttccttccctccttccttctttccttccttccctccctcccttccatatattatttgcttatgtgcttttcctccctccctccctctttccctacccctcccctccctcccctcgtccctccctcccttcctaccttccttccttccttccttttattattaaatatgtgcatgaagtaggtgttattttatgcccattttacaaattatttacatctgacagtaagttctctgaggccagggactttggctatcttgttcactgctgtatccccaggtcgtagtccttagtaaattctcaatatttgttgattgaatggatgaatggttttacttcctgtcagaagaatggaatggtgtattcagatgtaagaagacaaatagaaaactgtgcctatatcccatctcattttgcagtagattctcttctgaacagtagaacattttagaatttctcatagttgtttatatataatctgcaaattcatcatcaggaaatacagcagttaatatcaaaggtttggatttactccattaaaattaaattttatttgaattcttttggagtaggtaatatgtacccttggtacaaaattcgaggatacaaagtttatacaccaaagagtagagtttcctttcatctccatttcctagaatcatctcgttccctttttcagaagcaaccactgtgaatagtctcttccagaatagtctatatataagtagttttgtgtgtgtgtgggcttgtgtgcatgtgtgtgtctgtatgtgcgtttgcatgcaatttatacttatatagtcttctgagccatggatttcttatttagtgatatatcatagttttgaataattcgataggattcccctgtatggatatatcttatatattttatttgattatttatttattcttctttccttccttccttttttttgttaaatatgtgcataaagtaggtgttattttatgcccattttacaaattatgaaactgagatactaagaggttcagtttttggccagctcacacagccttatgtgtaagaacctgggttcgaatccaacgtctatctctttcatggaacattggggtaaatccattttttttcctctgttacaaacagtgctatagaccacccctcatcatacccattggagagcctgaaggtgaataaattcttagaagtgggacttattgttccaagggtattcacatgtagaatttcatgaaagttgctttggaggatgttctccagcagtggacaagaaagcccatttcctctcattttgtcacattaggcctgagagccttttcaacgttttgctagtctacgaggtgagaaatggactcatttgtgtatagatttccctaacttgtggctgagtttcaaggcattttataattagaatcttttcagttgtgcaggcttttttcttttaagagtaatatttactcaactcaaaaagtagttatttagtgagcatttacaaacatataaatcataatttactgtcttaaaacacaccttcctgggaaatggctcaatggaaatcttttacctaaaagataggataaattatatgttaactgttactgtattttttctctaaaaattaaattatgaatttgcacttttgataaatattatgttgaatgaaatgatacatatatacatatacatacgtatatacatacatatattttaaatttaatcagataaatacatattcattaatacagctcagtctatattcttggtcaatcttataaaatgcttcaagtgtgtctagccatgtggcaggagtgggagggtaggggatgatgtgaatctttgtactgagtgctagatataatttctgaatgttgcatttatgttgttcctgggtatctggtatcttgagcctcttttttcctttctctcttatttttattttttgagacggagtcttgctgtgtcaccaggctggagtgcagtggcacgatattggctcatggcaacctccgcctcccgtgttcaagcaattctcctgcctcagcctcccgagtaagtagctgggactacaggcgcatgccaccacgcccagctaatttttgtatttttagtagagatggggtttcaccatgttggccaagatggtctcgatctcttgaccttgtgatccgcccaccacggcctcccaaagtgctgggattacaggcgtgagccaccgcgcccagcctcttttcctttctctctaagctctggctatagcatctacttttcactcttcaaatggtgaactcttttccgtccatgtctttgccatctcacgcttccctttgtcagtaacgttcttccatggcaggctctgacttcattgtcaggtcaaaagtcccctgcccagggaactgtttgaccatccaatcttaggtggtctccttcaggtattctctgtctcactcctttttaattgcatgcagaatcatgcctcacaactgtaatgatttcttaaattattcatttctttgttgcttgtttcttctagtaaccacaagcactgagcgggtctttttctgttttgttcatggctgaattcttagtggctagaatagtatctgagcacacagtaggtgctcaataaatatttaagtgaataattgaaaacctgaaataacatcttgcatgttaaattatgaaagaggcaagtcaccctagcatagaatacatactcatattcatatatgtcaagaaattccaaaaggtttgtggaattctattgtgtgattcttgattcttgtagcctttttgcagtatcgcagctgcagtccccaggacaggccaaactggtagaagagaaacctggccagggtgagaagggcccaattttcacccctgtcctactgccggccatctgctatgagcagaccatgtcactgaactgcttacacctcggcttccgctgcggaagatggagacggaaatgcctgccctccttcccccaccagctgttcacctctgcacaggaagggtgactgtggttgtgaagagcatctcaagtacccgaaacattctattcagtcccaagtgggtctccgcagcatcccaccattggcttcctgagtggaaaatagctgagaaaacttgggatttttctccaaaattaccatgacttgtatcagatcccaaacaactgaatgtattctttactttggattccaagagtgatctcatattagaaaaagcagagtttaatttctggcaaagaatggcaaaaaatgaaagaaagagagaaaaagagagagaaagtgaaagaaagagaaaaagaaagaaagacaaagggagggaaagaaagaaaatggacccactctatctacaacaaaggatatcatatgtatatatgacatatatatcatatatataaattcatatgtcatatatataaattcttttaatttaaccagtattttatattacatatacatggtagagaaagaaaacaatgcaaaaaaggatagaatgaagagaaaaattttctccaaccccagactggtctcacttcctggggttagtcattcttagcagattcttgtatattagtacagagacgtttattagaggcaagcataaaagtgcgtgtacttgtgtgtatatatataatttgttttacacacatgggttcatattatacaatcctattatatactttgtcccttttaacgtatgttgaaacacttttcaaaaatttttatgaatggtcaatattcatttttttctatgtcacaatttctttaatgtagtccactaacaatggacatttttaggtagtttccaggttttgctatataaacaatgaggtagtgacatccttgggtatacactcacgcatacatgatactgtatttctaagataagtcctaaaaaaaagagttactcttacacagttgtgtacatttacacttttgaggaataaaacaaattttcttcaaagaggttgtaccaggtacactctggtaaagagtgcttgtaagagtgtggctttgtgtgtgtgtgtgtgtgtgtgtgtgtgtgtgtgtgttttaggatcagaggtaacagagagaacaactttttaaaggatgttcttggccaggtgcggtggctcacgcctgtaatcccaacactttgggaggccaaggggggtggatcacttgaggtcaggagttcaagatcagcctggctaacatagtgaaaccctgtctctactaaaaataaaaaaagttagccaggagtggtggcgggcgcctgtaatcccagttactcgaaaggctgaggcaggagaattgcttggccccaggaggcggaggttgcagtgagctgagactgagccactgcactccagcctgggcaacagagtgagactctgtccccctccaaaaaaaaaaaaaaaaaaaaaagggatgtgtttgtccctctgctccttggctcaatcccccactccccaaatctgttccctttatggcaaattgattacctaaaaattgaatctaattctatcctacctttcttacaactttcctgtgccttccccttgcacatgaatatctctgaaatgtactcaggacactgtgtgacccagagcctgctgcgttcactcgctgtgtcacaccatactacccaaaatcagtgcatgagcccaacacaccacctttagttcctccagtaggcacgcgctttcctttgtcaccatccttatatgtgctcttcctattgactagcaagttcttccccttactcttagtttctctaattactgctcatcttgaaaatccaggaaatctttttctgacatatcccagtctaaatggtaggggtagccacatgctacatgtggacatgtaaatttaattaaaattaaatataaacttaaaaacccaatccttagtcacactagccacattttaagtgataaatagccacgtacatagtcatcagtggctaccatattggacaacacagatatttttctaggctgaatgcggtggctcagtcctgtaatcccagcactttgggaggctgaggtgggaggattgcttgaggccaggagattgagacaaacctgggcaacataacgagaccctcgtctctacaaaaattaaaaaaactttgttgggtgtggtggctggcacctgtactcctaactactcaggaggctgaggtgggaggatcatttaggcccaggagttggaggctgcagtgagccatgatcatgccactgcactccagcctgggtgacagactgagaccaagtctcaaaataaaaattaaaaattaaatatttctataattgtagagaattctattggacagtgcttccctatattacttcttcataatactcatggctatttaaaaatacttgttttgagagtgttgttttgatgattttagcctcactagcctgtgagcttcacaagggcacagcttgtctcacttcttgctttttcccttatattaaatgttcaataactatctgttgaatgaatgatgagtgaatgaattaaagaattcctctcagctcttcgctttattgttgtactcttaatgttcagtggaccttctgggaaggagctggatgttctacacttttaccgatttccttcaaaactgcagttggataccttagcaagactcattcatctggggatatttagcctttcctattgggtttgacatttcagaatccattgcttaactgtgggaagattgactatgattgagctagacctgtgtggtgagcatggttttaatagtttgcttcccagatctccatccctgtcttaatgactgaagcattccttctaccagctgcttggagtgtgactcagtgacagcttgcagctgagctggtacttagttgggtgtggtggctggcacctttaggcaaggtagcttggcccatggttctcccttgattttacccaatgttctcaaaactaaaatagctcgttagtttaattttcataaaatggaaatttgatagatcatattttatttattatgttgttaaaatgccccactctcctcagtagattcatacactgaaaaaactctttgaagcccttgctgagagtacatcacagctgacctgtgcccgcccttgactccctccaaggtgctgatcctgagagccctccgcagtgaacaccctgcatgcagatctccttcttggaacctgttcctggaaaacccagtctccagcaacctgatatgtaactgcaaatctgcaactctagaccaaccttctaaagagggatttaagacctttttcaagaatctggcttgattttttggcccatggttctccctttattttactcaatgttctcaaaactaaaatggctctttaatttgattttcgtaaaatggaaatttggtagatcatattttatttactatgttgttaaaatgccccaatctcctcagtagattcatacactgaaaaaaaaataaaaaagaaaataccttaa

SEQ ID NO: 11741 - DNA, 742 bp, Homo sapiens
gggctggatccctcagccgccgccgctcctcctcctggcaggccggccgcggagtcagctgacgccggcgctccagcctcgcctccccgcgccgcgctctgcgctccccgaaagtggctgcaagccggccgcccactgtcagggttggggggacagagaaagtgatgtgcgccttctaaagcctcgcccagcgccgccgaagcagcttcacctctccaactttctcccaccgactgcttgtcttgaccctgccctccaccctccccagagccacttcgggtgcgcgctcttgggtaaagggggggtcaccggctgtctgggatggcttccaattttaatgacatagtgaagcaagggtacgtgaggatccggagcagacgcctcggggtgctgatcctgagagccctccgcagtgaacaccctgcatgcagatctccttcttggaacctgttcctggaaaacccagtctccagcaacctgatatgtaactgcaaatctgcaactctagaccaaccttctaaagagggatttaagacctttttcaagaatctggcttgattttttggcccatggttctccctttattttactcaatgttctcaaaactaaaatggctctttaatttgattttcgtaaaatggaaatttggtagatcatattttatttactatgttgttaaaatgccccaatctcctcagtagattcatacactgaaaaaaaaataaaaaagaaaataccttaa

SEQ ID NO: 11742 - DNA, 1616 bp, Homo sapiens
tggtgaccgtgagagaagaagatggcggcccctgtagtggcgccgcctggtgtggtggttagtcgggctaacaagcgcagcggcgcggggccgggaggcagcggtggcgggggagccagaggggcggaggaggaaccgccgccgcccctacaagcagttctggtggccgatagcttcgatcgccgcttcttccccatctccaaggaccagcctcgggtgagcgccgcgcacgcgagcagccagagggcaggaagggtggcagggctggagcaagttctcatttcggctaactacaacagcatgcccttgaaggacctgcgtctatgctgttatcctaaaaccggatgcagagggactgtctaaaccctgatgactgctgaccaagttagtggccggcagatttgggcattcgtaatgctgtccacctcgggtttgaaaggaatgaagagagctaaatgtagaaacagcgcttgagagaagccttcacgcggggattcagtgcccctagaagaggctgcgccgcttttaaccttgccgatgacggttgcttaggtgaaaagaaacgaccttttgcctctgaaagggcggtaatatgccttaaaaagagcgggctagatctcaggcagtgtattttttttttccttccaggttctaatgatagccggtgctatctgtcgaaaggacaaaatgggtttagtggttgattgccatcagcccccgagttgtctagacaatggggtattggactcagctgggtcgttcagcagtcagttcagaaagagggaactgcattggatttaaggaaaatcctctctaattccctcgaaaaagcctaatggctgttcatttttgacaagtgacgggagatggctaacctctgacacttagaaagggatcaaggaaggaaatcttatggggaagaaggccttagcaatgcttaaatttatggaaatatgattgatttccagtattatcctttgccagcagtgaactgccattctgtcacagctctgtgtctgatacaaggcacatagattctgtacttaccatccccaaattgcaatgtctcagactcaggcttagagcatggcatgaacatcaaaggcaggaacctgtttatctttgaattggaaagatacagcaaaattacactgtttggaaatacgaatagaggagtgaaaattgttgcagtggggtacccaaagggattcgagacctcaagttttttttcatcttgtatccttcaggtcctcttgcccctggccaatgtggcattaattgactacactctggaattcctgactgccacaggtgtacaggaaacatttgtcttttgttgctggaaagctgctcaaatcaaagaacatttactgtaaggccctgcaacttttctttccatgtttcgccatctttttccagttttttcaggatgaatgtaactaaggggaaatgtgagaggggaaaaatgtgtctacttagatgtcattgtaagttctaagggtattttctacacttatcaggaggtgagcagctgaaactttgtatctgtctgtcttgggttttctgtgacaaagattaaagaataaacttgggttttttctgaatctcattataaa

SEQ ID NO: 11743 - DNA, 585 bp, Homo sapiens
tggtgaccgtgagagaagaagatggcggcccctgtagtggcgccgcctggtgtggtggttagtcgggctaacaagcgcagcggcgcggggccgggaggcagcggtggcgggggagccagaggggcggaggaggaaccgccgccgcccctacaagcagttctggtggccgatagcttcgatcgccgcttcttccccatctccaaggaccagcctcgggtcctcttgcccctggccaatgtggcattaattgactacactctggaattcctgactgccacaggtgtacaggaaacatttgtcttttgttgctggaaagctgctcaaatcaaagaacatttactgtaaggccctgcaacttttctttccatgtttcgccatctttttccagttttttcaggatgaatgtaactaaggggaaatgtgagaggggaaaaatgtgtctacttagatgtcattgtaagttctaagggtattttctacacttatcaggaggtgagcagctgaaactttgtatctgtctgtcttgggttttctgtgacaaagattaaagaataaacttgggttttttctgaatctcattataaa

SEQ ID NO: 11744 - DNA, 7487 bp, Homo sapiens
agtggcgccgcctggtgtggtggttagtcgggctaacaagcgcagcggcgcggggccgggaggcagcggtggcgggggagccagaggggcggaggaggaaccgccgccgcccctacaagcagttctggtggccgatagcttcgatcgccgcttcttccccatctccaaggaccagcctcgggtgagcgccgcgcacgcgagcagccagagggcaggaagggtggcagggctggagcaagttctcatttcggctaactacaacagcatgcccttgaaggacctgcgtctatgctgttatcctaaaaccggatgcagagggactgtctaaaccctgatgactgctgaccaagttagtggccggcagatttgggcattcgtaatgctgtccacctcgggtttgaaaggaatgaagagagctaaatgtagaaacagcgcttgagagaagccttcacgcggggattcagtgcccctagaagaggctgcgccgcttttaaccttgccgatgacggttgcttaggtgaaaagaaacgaccttttgcctctgaaagggcggtaatatgccttaaaaagagcgggctagatctcaggcagtgtattttttttttccttccaggttctaatgatagccggtgctatctgtcgaaaggacaaaatgggtttagtggttgattgccatcagcccccgagttgtctagacaatggggtattggactcagctgggtcgttcagcagtcagttcagaaagagggaactgcattggatttaaggaaaatcctctctaattccctcgaaaaagcctaatggctgttcatttttgacaagtgacgggagatggctaacctctgacacttagaaagggatcaaggaaggaaatcttatggggaagaaggccttagcaatgcttaaatttatggaaatatgattgatttccagtattatcctttgccagcagtgaactgccattctgtcacagctctgtgtctgatacaaggcacatagattctgtacttaccatccccaaattgcaatgtctcagactcaggcttagagcatggcatgaacatcaaaggcaggaacctgtttatctttgaattggaaagatacagcaaaattacactgtttggaaatacgaatagaggagtgaaaattgttgcagtggggtacccaaagggattcgagacctcaagttttttttcatcttgtatccttcaggtcctcttgcccctggccaatgtggcattaattgactacactctggaattcctgactgccacaggtgtacaggaaacatttgtcttttgttgctggaaagctgctcaaatcaaagaacatttactgtaaggccctgcaacttttctttccatgtttcgccatctttttccagttttttcaggatgaatgtaactaaggggaaatgtgagaggggaaaaatgtgtctacttagatgtcattgtaagttctaagggtattttctacacttatcaggaggtgagcagctgaaactttgtatctgtctgtcttgggttttctgtgacaaagattaaagaataaacttgggttttttctgaatctcattataaagtttggtgccagtggactttgcttttatttaatggcttcagtatggaagttacaatgataacatctttgttttcccactgagtttctaaatcttgtttgttctcaccttcaaggatataaatgagctccttgtcatctttgtattcccactgcctagctcagtcccaagcatatagtgagcacttacatgtttgttgaaatcttgaaaactagggaatcgcattgcttatggaagtccaggatgtaaagactaggacattagcatggtctccatcagacagttcctaaatgttatatggattgcagaaggggaaagctgacgtgaagcgtgttcccaggctactttgtgtaccctaggcttcagcaggattttgagttcaaattgatgtttagggacaaggggtcaaggtatggagaggaaataaccatgtttcctaacccataaaacaagactggtgacacaggatgctgaaagcattcattatagttcataatactctttgaagttgaagacgctggcaagaacccaaaaaagccatcgagaaggactgtgagtgctgaaagggggtgaaaaatggggaaggctcaaatgatctttatgcttgatacactcattcccctcaccctcccttcctttaggaagtcaaagtggtgccgccctacatctctcaatgtggttcgaataattacatcagagctctatcgatcactgggagatgtcctccgtgatgttgatgccaaggctttggtgcgctctgactttcttctggtgtatggggatgtcatctcaaacatcaatatcaccagagcccttgaggaacacaggtcaggatgggaaaatgacaggaacaagggttaaagaccagcagagccctgagactgcttttttgcagttctgtccctcctgtcctttataggttgagacggaagctagaaaaaaatgtttctgtgatgacgatgatcttcaaggagtcatcccccagccacccaactcgttgccacgaagacaatgtggtagtggctgtggatagtaccacaaacagggttctccattttcagaagacccagggtctccggcgttttgcatttcctctggtgtgtggatatctggggtcctttgagatggggaagtgacaggcttcagtgggagaaacaaattaaagtccttgtaacttctccccacagagcctgtttcagggcagtagtgatggagtggaggttcgatatgatttactggattgtcatatcagcatctgttctcctcaggtgagctctttagggctggggctgcacacccaaagagtagaactctgtgggtctgttattgtccccttagaaggccagggtatatttcttctccctgtttattttcattatttttacttttattttttgagacagagtctcgctctgttgcccaggctggagtgcagtggtgtgatcccagctcactgcagactctgcctcctaggttcaagtgattctcctgcctcagcctcctgagtagcagggattacaggcacaccaccatgcctggctaatttttgtatttttagtagagatggggtttcaccatgttggccaggctggtctcgaactcctggtctcaagtgatctacctgtctcagcctcccaaagtgctgggattacaggcatgagccaccacacctggccttattttcatttttatttatatatattttttgagacagggtctcgctctgtggcccaggctggagcacagtggcaccatgactgctcactgcagcctcagcctcccaggttcaagggaacctcctgcctcagcctcctgagtagatggaaccacaggcatgcactaccactaatttttgtatttttttgtagagacggggttttgccatgttgtccggcctggtcacgaactcctgagctcaagcaatctgaccacctcagccttccaaaatgctgggattacaggcatgagccaccagttttttttgttgttgttgttgttattgttgttttgagatggagcctcgctctgtcgcccaggctggagtgcagtggcatgatctcagcttactgcagcctccacctcctgggttccagtgattctcctgcctcagcctctcaagtagctgggactacaggtacgcaccaccacatccggctattttttgtatttttcagtagagatggggtttcaccatattggccaggctggtctctaactcctgacctcaggtgatcctcccgccttggcctcccaaagtgctgcaatcacaggtgtgagcctctgcacccagcattttttttttttttttttttttttttttgagtcggagtttcactcttgttgcccaggctggatgcaatggtgcgatctcagctcactgcaacctccacctcccaggttcaagcaattcccctgcctcagcctcccaaatagctgggattgcaggcatgtgccaccacacccagctaatttttgtatttttagtagagacgaggttttaccatgttggtcaggctggtctcgaactcccaacctcaggtgatctgcctgcctcggcctcccaaagtgctggcattacgggcatgagccactgcacctggccttttttttttttttagaatctattgtaaagcaaagatcttgtctccagtatcccactgggagtctctttggaattctggtccatgttcagctgtcatagggtttgctaggtctctgggggattatctgtgctcctagagaatagtacttaatcctggccaagcgtggtggctcacgcttgtaatcccagcactttgggaggccgaggtgagtggatcatgaggtcaggagttcaagaccagcctgaccaacacagtgaaatcccatctctactaaaaaataaaaatacaaaaattagctgggcgtggtggcggacgcttgtaatcccagctacttgggaggctgaggcacaagaatcactttaacccaggaggtggaggttgcagtgagccgagatcatgcaactgcactccagcctgggcaacagagctagacttgtctcaaaaaaaaaaaaaaaagaatagtacttaattctagcccactccacttcccttccacaggtggcacaactctttacagacaactttgactaccaaactcgagatgactttgtgcgaggtctcttagtgaatgaggaggtgagaaaagtcttccaatgcctctttaggagagaggagaaggctatgattgtatctcatgctggtaacttttgatcttttttgtattttattgaggcttaggagggaggaaaagcaggggacaggaggaacagtacacaaagaagaatctttgtggcagtgagaggcagaggggaacttaaaaggattagaaaagttgtacttgggggcattcttcctgtctttcttgcttaggtgacctccctttccttctcattcagatcctagggaaccagatccacatgcacgtaacagctaaggaatatggtgcccgtgtctccaacctacacatgtactcagctgtctgtgctgacgtcatccgccgatgggtctaccctctcaccccagaggcgaacttcactgacagcaccacccagagctgcactcattcccggcacaacatctaccgagggcctgaggtcagcctgggccatggcagcatcctagaggaaaatgtgctcctgggctctggcactgtcattggcagcaattgctttatcaccaacagtgtcattggccccggctgccacattggtgagcacaggtggggaatcaagccaactatcctaggaacaggaacctgggggggccacgtctccagaaacacaagggatggctacacaagggacagtccctgggaataaggaactatagagcggctacctcaggaaaggaggaaacagggatttgaaaacagcgataccttaatttgtagcctgtgggcctctcattggatgactcttcacattccagggtaccctgtagtcacattcaggagcaagtagataattaacatgcagtaacaacatctatttagcacattacagtttacaaagggcttttatatacattgttacatttaatcttcataatttacaaataaacaggctcaacaagattttcttgcccaaggtcattggtaataatggtgggacctgaatctgggtattctgaatgtaagtccagtgttcttttgagtctaccataactgcctggttggcctcttggtatctcattttggttgcaggagtgtgatgcgtctaatagtactgcccctttccaagaacaacagtaaggctcagattctaggggctgagcgtggtggctcatgcttgtaatcctagcacactgggaagccatggtgggaggatcgcttgagcccaggagttcaagaccagcctgggcaacatagcgacaccccttctccacaaatgatacaaaaattagctgggcatgatggcgcgtgcctgtaatctcagctattcgggaggctgaggcaggaggattacctgagcccagaggtcgagggtgcagtgagtcatgatcatactactgcactccagcctgggtgatggaatgagaccgtgtctcaaaagaaaaaaaagacttggtttctaaaatgtaccagaagaggtggaattatttggttctgcttgtaggcgtggatatgattctaataaggttttttgagttcagagggtccccagaaatcctgaaggttctcgggttcttaagctctgtgtgtagtctataattgttgtaaacttggtgaagtatcttctcaggcctgggcttagggggtgagtgggtgtttctggtgacttgcgggatggggaatgagagctaggtgggagctgtgctggtgtcagtcagccctgtcctctatgaagggctctgctctgcggttggaaccctgagttacccagaggtcttcccatcctgagccaggtgataacgtggtgctggaccagacctacctgtggcagggtgttcgagtggcggctggagcacagatccatcagtctctgctttgtgacaatgctgaggtcaaggaacgagtgacactgaaaccacgctctgtcctcacttcccaggtgagacctgatctatactgtgcacaggccctgaattgcatggcagtcacactgagccagaaggggcattatttccacccataatcctgtctaaaaaagttgctctcattatcaggatgcacttttcctccacaccctaatggttctgtgttttttttccccttaggtggtcgtgggcccaaatatcacgctgcctgagggctcggtgatctctttgcaccctccagatgcagaggaagatgaagatgatggcgagttcagtgatgattctggggctgaccaagaaaaggacaaagtgaagatgaaaggtgtgagactcaacaggtgtggggcatctgtgtgtctcgctgcctcatagaagaaccagtgtttcctcctggagggattggtgcttccgccgggccctctctatagatcattgccttttccaggttacaatccagcagaagtaggagctgctggcaagggctacctctggaaagctgcaggcatgaacatggaggaagaggaggaactgcagcagaatctgtggggtgagctaggcctgatgcctgcccttctcctcctgaatcggaatattttgaaggataatgaatacttcagagtcacattacttattcactcctttattcaggcagacagggcaggtatattgctctctgtcaatgactctttttttctttttcctcacccattatggcttctcaggactcaagatcaacatggaagaagagagtgaaagtgaaagtgagcaaagtatggattctgaggagccggacagccggggaggctcccctcagatggatgacatcaaag

SEQ ID NO: 11745 - DNA, 597 bp, Homo sapiens
agtggcgccgcctggtgtggtggttagtcgggctaacaagcgcagcggcgcggggccgggaggcagcggtggcgggggagccagaggggcggaggaggaaccgccgccgcccctacaagcagttctggtggccgatagcttcgatcgccgcttcttccccatctccaaggaccagcctcgggtcctcttgcccctggccaatgtggcattaattgactacactctggaattcctgactgccacaggtggtcgtgggcccaaatatcacgctgcctgagggctcggtgatctctttgcaccctccagatgcagaggaagatgaagatgatggcgagttcagtgatgattctggggctgaccaagaaaaggacaaagtgaagatgaaaggttacaatccagcagaagtaggagctgctggcaagggctacctctggaaagctgcaggcatgaacatggaggaagaggaggaactgcagcagaatctgtggggactcaagatcaacatggaagaagagagtgaaagtgaaagtgagcaaagtatggattctgaggagccggacagccggggaggctcccctcagatggatgacatcaaag

SEQ ID NO: 11746 - DNA, 9943 bp, Homo sapiens
agtggtgaccgtgagagaagaagatggcggcccctgtagtggcgccgcctggtgtggtggttagtcgggctaacaagcgcagcggcgcggggccgggaggcagcggtggcgggggagccagaggggcggaggaggaaccgccgccgcccctacaagcagttctggtggccgatagcttcgatcgccgcttcttccccatctccaaggaccagcctcgggtgagcgccgcgcacgcgagcagccagagggcaggaagggtggcagggctggagcaagttctcatttcggctaactacaacagcatgcccttgaaggacctgcgtctatgctgttatcctaaaaccggatgcagagggactgtctaaaccctgatgactgctgaccaagttagtggccggcagatttgggcattcgtaatgctgtccacctcgggtttgaaaggaatgaagagagctaaatgtagaaacagcgcttgagagaagccttcacgcggggattcagtgcccctagaagaggctgcgccgcttttaaccttgccgatgacggttgcttaggtgaaaagaaacgaccttttgcctctgaaagggcggtaatatgccttaaaaagagcgggctagatctcaggcagtgtattttttttttccttccaggttctaatgatagccggtgctatctgtcgaaaggacaaaatgggtttagtggttgattgccatcagcccccgagttgtctagacaatggggtattggactcagctgggtcgttcagcagtcagttcagaaagagggaactgcattggatttaaggaaaatcctctctaattccctcgaaaaagcctaatggctgttcatttttgacaagtgacgggagatggctaacctctgacacttagaaagggatcaaggaaggaaatcttatggggaagaaggccttagcaatgcttaaatttatggaaatatgattgatttccagtattatcctttgccagcagtgaactgccattctgtcacagctctgtgtctgatacaaggcacatagattctgtacttaccatccccaaattgcaatgtctcagactcaggcttagagcatggcatgaacatcaaaggcaggaacctgtttatctttgaattggaaagatacagcaaaattacactgtttggaaatacgaatagaggagtgaaaattgttgcagtggggtacccaaagggattcgagacctcaagttttttttcatcttgtatccttcaggtcctcttgcccctggccaatgtggcattaattgactacactctggaattcctgactgccacaggtgtacaggaaacatttgtcttttgttgctggaaagctgctcaaatcaaagaacatttactgtaaggccctgcaacttttctttccatgtttcgccatctttttccagttttttcaggatgaatgtaactaaggggaaatgtgagaggggaaaaatgtgtctacttagatgtcattgtaagttctaagggtattttctacacttatcaggaggtgagcagctgaaactttgtatctgtctgtcttgggttttctgtgacaaagattaaagaataaacttgggttttttctgaatctcattataaagtttggtgccagtggactttgcttttatttaatggcttcagtatggaagttacaatgataacatctttgttttcccactgagtttctaaatcttgtttgttctcaccttcaaggatataaatgagctccttgtcatctttgtattcccactgcctagctcagtcccaagcatatagtgagcacttacatgtttgttgaaatcttgaaaactagggaatcgcattgcttatggaagtccaggatgtaaagactaggacattagcatggtctccatcagacagttcctaaatgttatatggattgcagaaggggaaagctgacgtgaagcgtgttcccaggctactttgtgtaccctaggcttcagcaggattttgagttcaaattgatgtttagggacaaggggtcaaggtatggagaggaaataaccatgtttcctaacccataaaacaagactggtgacacaggatgctgaaagcattcattatagttcataatactctttgaagttgaagacgctggcaagaacccaaaaaagccatcgagaaggactgtgagtgctgaaagggggtgaaaaatggggaaggctcaaatgatctttatgcttgatacactcattcccctcaccctcccttcctttaggaagtcaaagtggtgccgccctacatctctcaatgtggttcgaataattacatcagagctctatcgatcactgggagatgtcctccgtgatgttgatgccaaggctttggtgcgctctgactttcttctggtgtatggggatgtcatctcaaacatcaatatcaccagagcccttgaggaacacaggtcaggatgggaaaatgacaggaacaagggttaaagaccagcagagccctgagactgcttttttgcagttctgtccctcctgtcctttataggttgagacggaagctagaaaaaaatgtttctgtgatgacgatgatcttcaaggagtcatcccccagccacccaactcgttgccacgaagacaatgtggtagtggctgtggatagtaccacaaacagggttctccattttcagaagacccagggtctccggcgttttgcatttcctctggtgtgtggatatctggggtcctttgagatggggaagtgacaggcttcagtgggagaaacaaattaaagtccttgtaacttctccccacagagcctgtttcagggcagtagtgatggagtggaggttcgatatgatttactggattgtcatatcagcatctgttctcctcaggtgagctctttagggctggggctgcacacccaaagagtagaactctgtgggtctgttattgtccccttagaaggccagggtatatttcttctccctgtttattttcattatttttacttttattttttgagacagagtctcgctctgttgcccaggctggagtgcagtggtgtgatcccagctcactgcagactctgcctcctaggttcaagtgattctcctgcctcagcctcctgagtagcagggattacaggcacaccaccatgcctggctaatttttgtatttttagtagagatggggtttcaccatgttggccaggctggtctcgaactcctggtctcaagtgatctacctgtctcagcctcccaaagtgctgggattacaggcatgagccaccacacctggccttattttcatttttatttatatatattttttgagacagggtctcgctctgtggcccaggctggagcacagtggcaccatgactgctcactgcagcctcagcctcccaggttcaagggaacctcctgcctcagcctcctgagtagatggaaccacaggcatgcactaccactaatttttgtatttttttgtagagacggggttttgccatgttgtccggcctggtcacgaactcctgagctcaagcaatctgaccacctcagccttccaaaatgctgggattacaggcatgagccaccagttttttttgttgttgttgttgttattgttgttttgagatggagcctcgctctgtcgcccaggctggagtgcagtggcatgatctcagcttactgcagcctccacctcctgggttccagtgattctcctgcctcagcctctcaagtagctgggactacaggtacgcaccaccacatccggctattttttgtatttttcagtagagatggggtttcaccatattggccaggctggtctctaactcctgacctcaggtgatcctcccgccttggcctcccaaagtgctgcaatcacaggtgtgagcctctgcacccagcattttttttttttttttttttttttttttgagtcggagtttcactcttgttgcccaggctggatgcaatggtgcgatctcagctcactgcaacctccacctcccaggttcaagcaattcccctgcctcagcctcccaaatagctgggattgcaggcatgtgccaccacacccagctaatttttgtatttttagtagagacgaggttttaccatgttggtcaggctggtctcgaactcccaacctcaggtgatctgcctgcctcggcctcccaaagtgctggcattacgggcatgagccactgcacctggccttttttttttttttagaatctattgtaaagcaaagatcttgtctccagtatcccactgggagtctctttggaattctggtccatgttcagctgtcatagggtttgctaggtctctgggggattatctgtgctcctagagaatagtacttaatcctggccaagcgtggtggctcacgcttgtaatcccagcactttgggaggccgaggtgagtggatcatgaggtcaggagttcaagaccagcctgaccaacacagtgaaatcccatctctactaaaaaataaaaatacaaaaattagctgggcgtggtggcggacgcttgtaatcccagctacttgggaggctgaggcacaagaatcactttaacccaggaggtggaggttgcagtgagccgagatcatgcaactgcactccagcctgggcaacagagctagacttgtctcaaaaaaaaaaaaaaaagaatagtacttaattctagcccactccacttcccttccacaggtggcacaactctttacagacaactttgactaccaaactcgagatgactttgtgcgaggtctcttagtgaatgaggaggtgagaaaagtcttccaatgcctctttaggagagaggagaaggctatgattgtatctcatgctggtaacttttgatcttttttgtattttattgaggcttaggagggaggaaaagcaggggacaggaggaacagtacacaaagaagaatctttgtggcagtgagaggcagaggggaacttaaaaggattagaaaagttgtacttgggggcattcttcctgtctttcttgcttaggtgacctccctttccttctcattcagatcctagggaaccagatccacatgcacgtaacagctaaggaatatggtgcccgtgtctccaacctacacatgtactcagctgtctgtgctgacgtcatccgccgatgggtctaccctctcaccccagaggcgaacttcactgacagcaccacccagagctgcactcattcccggcacaacatctaccgagggcctgaggtcagcctgggccatggcagcatcctagaggaaaatgtgctcctgggctctggcactgtcattggcagcaattgctttatcaccaacagtgtcattggccccggctgccacattggtgagcacaggtggggaatcaagccaactatcctaggaacaggaacctgggggggccacgtctccagaaacacaagggatggctacacaagggacagtccctgggaataaggaactatagagcggctacctcaggaaaggaggaaacagggatttgaaaacagcgataccttaatttgtagcctgtgggcctctcattggatgactcttcacattccagggtaccctgtagtcacattcaggagcaagtagataattaacatgcagtaacaacatctatttagcacattacagtttacaaagggcttttatatacattgttacatttaatcttcataatttacaaataaacaggctcaacaagattttcttgcccaaggtcattggtaataatggtgggacctgaatctgggtattctgaatgtaagtccagtgttcttttgagtctaccataactgcctggttggcctcttggtatctcattttggttgcaggagtgtgatgcgtctaatagtactgcccctttccaagaacaacagtaaggctcagattctaggggctgagcgtggtggctcatgcttgtaatcctagcacactgggaagccatggtgggaggatcgcttgagcccaggagttcaagaccagcctgggcaacatagcgacaccccttctccacaaatgatacaaaaattagctgggcatgatggcgcgtgcctgtaatctcagctattcgggaggctgaggcaggaggattacctgagcccagaggtcgagggtgcagtgagtcatgatcatactactgcactccagcctgggtgatggaatgagaccgtgtctcaaaagaaaaaaaagacttggtttctaaaatgtaccagaagaggtggaattatttggttctgcttgtaggcgtggatatgattctaataaggttttttgagttcagagggtccccagaaatcctgaaggttctcgggttcttaagctctgtgtgtagtctataattgttgtaaacttggtgaagtatcttctcaggcctgggcttagggggtgagtgggtgtttctggtgacttgcgggatggggaatgagagctaggtgggagctgtgctggtgtcagtcagccctgtcctctatgaagggctctgctctgcggttggaaccctgagttacccagaggtcttcccatcctgagccaggtgataacgtggtgctggaccagacctacctgtggcagggtgttcgagtggcggctggagcacagatccatcagtctctgctttgtgacaatgctgaggtcaaggaacgagtgacactgaaaccacgctctgtcctcacttcccaggtgagacctgatctatactgtgcacaggccctgaattgcatggcagtcacactgagccagaaggggcattatttccacccataatcctgtctaaaaaagttgctctcattatcaggatgcacttttcctccacaccctaatggttctgtgttttttttccccttaggtggtcgtgggcccaaatatcacgctgcctgagggctcggtgatctctttgcaccctccagatgcagaggaagatgaagatgatggcgagttcagtgatgattctggggctgaccaagaaaaggacaaagtgaagatgaaaggtgtgagactcaacaggtgtggggcatctgtgtgtctcgctgcctcatagaagaaccagtgtttcctcctggagggattggtgcttccgccgggccctctctatagatcattgccttttccaggttacaatccagcagaagtaggagctgctggcaagggctacctctggaaagctgcaggcatgaacatggaggaagaggaggaactgcagcagaatctgtggggtgagctaggcctgatgcctgcccttctcctcctgaatcggaatattttgaaggataatgaatacttcagagtcacattacttattcactcctttattcaggcagacagggcaggtatattgctctctgtcaatgactctttttttctttttcctcacccattatggcttctcaggactcaagatcaacatggaagaagagagtgaaagtgaaagtgagcaaagtatggattctgaggagccggacagccggggaggctcccctcagatggatgacatcaaaggtgagtggcaggggagaaatgcgctggaccagtttattctctgcctggatcaactagccagaggcttacgttcctcagaaagggtttggtatcgagtcaagactagatgacttagagcattctgaatgatgttggcccatgaacttatccttgctttgatttcagtgttccagaatgaagttttaggaacactacagcggggcaaagaggagaacatttcttgtgacaatctcgtcctggaaatcaactctctcaagtaagagcagcccctccctgttctcctcggggtgatcccgggaaggtagaggctttctcgtaagtgttttgtctccaaataggaacctattccttcgacatcccaaatggaaagaccagtagtatttggagcaaggagagcattattaagttctagcctcagcatagactttctccttcctaaaccctccccttccatattgttccatccagattcctctccaatgtctatcaaagtcatagttctaagcctgctgaaaggccagtgaaggccctggtgtcaccccagtctccccacaggtatgcctataacataagtctaaaggaggtgatgcaggtactgagccacgtggtcctggagttccccctgcaacagatggattccccgcttgactcaagccgctactgtgccctgctgcttcctgtgagcaaagattggagctgagtacaagggattgggtacaggcaaaggaaatcaggagtagactgtcttgttatattgggtgtatgtcacttctggttcctttttccttgcctctggaagctggttgggctctagagcagccttggctggttcagaggggtcagattgagttcaatactgactggcctttgagactccaggatttcataccatcctaggcccacaaaggtatattcagaatggacctggacattcagactctatggcagcaatttgacccaacacaagatcagcctctggggtgggaataggtattttgaggcagcctatagcatctgatcccctttcaccttccctaaggaatctctttttcccaaaccctgtcaacaactcccaagtccctctgacataattccacagaacctgtatcatctcccttttgtccacccatgtcatcagtatggatttgcttggatgtccaggtataggtgaatgcttaggaatatactgcagctcccttctttcttccatagctgctaaaggcctggagccctgtttttaggaactacataaagcgcgcagccgaccatttggaagcgttagcagccattgaggacttcttcctagagcatgaagctcttggtatttccatggccaaggtgaatatgacctcaagccccattcttctgcacttgctttcaaacgagggttggtgacccccttgggagacataaaatagaagctaatgtgaatccagtatggaccatccactcccaatatgcttattgctagaatagtacagcttggagccggactaataaggtagccatctggggggtggtctggaaatgtgcaaagctctccccagcaatagttccagaagttagacctgccccaggagcagagcgaacagctcactcttgtccgttttggaggaggctactcagtgcatagagggatctgagggcctggtagagtatcctgctggactttccaaggcccctgaggtcccctttattggccttttgcaggtactgatggctttctaccagctggagatcctggctgaggaaacaattctgagctggttcagccaaagagatacaactgacaagggccagcagttgcgcaagaatcaacaggtgcgtcaggctgtcctcctctcgccaagatggttatctcattcccaggtcctggcccctagactctagggtggttggtttctggggctctggttgttagagctgtttatctgccgaggggagcaggagagttatgtgcacctcccccagccgatctctcctctgcttctttacagctgcagaggttcatccagtggctaaaagaggcagaagaggagtcatctgaagatgactgaagtcacactgcctgctcctttgggtgtgattgagtgccctcctggctcctgggctgggacaagtgaggaactagctgcagagggatgagtgaccaccatccaggctgagactgaaaggagcagaggctggaactacagtattctttcccctgctagcaaccatgtgcctcccatcctgactgtggagttgggatgtggaagtggggctggaacaaagcttctgcctagggaggagctaagcaggcccggcagttggaggaaggccagaggaacagctttgtgctccggctttccctcagggaacagcagagagcagttggctctttctgctgcttgtatatgttaatattaaaagagagagt

SEQ ID NO: 11747 - DNA, 2850 bp, Homo sapiens
agtggtgaccgtgagagaagaagatggcggcccctgtagtggcgccgcctggtgtggtggttagtcgggctaacaagcgcagcggcgcggggccgggaggcagcggtggcgggggagccagaggggcggaggaggaaccgccgccgcccctacaagcagttctggtggccgatagcttcgatcgccgcttcttccccatctccaaggaccagcctcgggtcctcttgcccctggccaatgtggcattaattgactacactctggaattcctgactgccacaggtgtacaggaaacatttgtcttttgttgctggaaagctgctcaaatcaaagaacatttactgaagtcaaagtggtgccgccctacatctctcaatgtggttcgaataattacatcagagctctatcgatcactgggagatgtcctccgtgatgttgatgccaaggctttggtgcgctctgactttcttctggtgtatggggatgtcatctcaaacatcaatatcaccagagcccttgaggaacacaggttgagacggaagctagaaaaaaatgtttctgtgatgacgatgatcttcaaggagtcatcccccagccacccaactcgttgccacgaagacaatgtggtagtggctgtggatagtaccacaaacagggttctccattttcagaagacccagggtctccggcgttttgcatttcctctgagcctgtttcagggcagtagtgatggagtggaggttcgatatgatttactggattgtcatatcagcatctgttctcctcaggtggcacaactctttacagacaactttgactaccaaactcgagatgactttgtgcgaggtctcttagtgaatgaggagatcctagggaaccagatccacatgcacgtaacagctaaggaatatggtgcccgtgtctccaacctacacatgtactcagctgtctgtgctgacgtcatccgccgatgggtctaccctctcaccccagaggcgaacttcactgacagcaccacccagagctgcactcattcccggcacaacatctaccgagggcctgaggtcagcctgggccatggcagcatcctagaggaaaatgtgctcctgggctctggcactgtcattggcagcaattgctttatcaccaacagtgtcattggccccggctgccacattggtgataacgtggtgctggaccagacctacctgtggcagggtgttcgagtggcggctggagcacagatccatcagtctctgctttgtgacaatgctgaggtcaaggaacgagtgacactgaaaccacgctctgtcctcacttcccaggtggtcgtgggcccaaatatcacgctgcctgagggctcggtgatctctttgcaccctccagatgcagaggaagatgaagatgatggcgagttcagtgatgattctggggctgaccaagaaaaggacaaagtgaagatgaaaggttacaatccagcagaagtaggagctgctggcaagggctacctctggaaagctgcaggcatgaacatggaggaagaggaggaactgcagcagaatctgtggggactcaagatcaacatggaagaagagagtgaaagtgaaagtgagcaaagtatggattctgaggagccggacagccggggaggctcccctcagatggatgacatcaaagtgttccagaatgaagttttaggaacactacagcggggcaaagaggagaacatttcttgtgacaatctcgtcctggaaatcaactctctcaagtaagagcagcccctccctgttctcctcggggtgatcccgggaaggtagaggctttctcgtaagtgttttgtctccaaataggaacctattccttcgacatcccaaatggaaagaccagtagtatttggagcaaggagagcattattaagttctagcctcagcatagactttctccttcctaaaccctccccttccatattgttccatccagattcctctccaatgtctatcaaagtcatagttctaagcctgctgaaaggccagtgaaggccctggtgtcaccccagtctccccacaggtatgcctataacataagtctaaaggaggtgatgcaggtactgagccacgtggtcctggagttccccctgcaacagatggattccccgcttgactcaagccgctactgtgccctgctgcttcctctgctaaaggcctggagccctgtttttaggaactacataaagcgcgcagccgaccatttggaagcgttagcagccattgaggacttcttcctagagcatgaagctcttggtatttccatggccaaggtactgatggctttctaccagctggagatcctggctgaggaaacaattctgagctggttcagccaaagagatacaactgacaagggccagcagttgcgcaagaatcaacagctgcagaggttcatccagtggctaaaagaggcagaagaggagtcatctgaagatgactgaagtcacactgcctgctcctttgggtgtgattgagtgccctcctggctcctgggctgggacaagtgaggaactagctgcagagggatgagtgaccaccatccaggctgagactgaaaggagcagaggctggaactacagtattctttcccctgctagcaaccatgtgcctcccatcctgactgtggagttgggatgtggaagtggggctggaacaaagcttctgcctagggaggagctaagcaggcccggcagttggaggaaggccagaggaacagctttgtgctccggctttccctcagggaacagcagagagcagttggctctttctgctgcttgtatatgttaatattaaaagagagagt

SEQ ID NO: 11748 - DNA, 10725 bp, Homo sapiens
ggcgccgcctggtgtggtggttagtcgggctaacaagcgcagcggcgcggggccgggaggcagcggtggcgggggagccagaggggcggaggaggaaccgccgccgcccctacaagcagttctggtggccgatagcttcgatcgccgcttcttccccatctccaaggaccagcctcgggtgagcgccgcgcacgcgagcagccagagggcaggaagggtggcagggctggagcaagttctcatttcggctaactacaacagcatgcccttgaaggacctgcgtctatgctgttatcctaaaaccggatgcagagggactgtctaaaccctgatgactgctgaccaagttagtggccggcagatttgggcattcgtaatgctgtccacctcgggtttgaaaggaatgaagagagctaaatgtagaaacagcgcttgagagaagccttcacgcggggattcagtgcccctagaagaggctgcgccgcttttaaccttgccgatgacggttgcttaggtgaaaagaaacgaccttttgcctctgaaagggcggtaatatgccttaaaaagagcgggctagatctcaggcagtgtattttttttttccttccaggttctaatgatagccggtgctatctgtcgaaaggacaaaatgggtttagtggttgattgccatcagcccccgagttgtctagacaatggggtattggactcagctgggtcgttcagcagtcagttcagaaagagggaactgcattggatttaaggaaaatcctctctaattccctcgaaaaagcctaatggctgttcatttttgacaagtgacgggagatggctaacctctgacacttagaaagggatcaaggaaggaaatcttatggggaagaaggccttagcaatgcttaaatttatggaaatatgattgatttccagtattatcctttgccagcagtgaactgccattctgtcacagctctgtgtctgatacaaggcacatagattctgtacttaccatccccaaattgcaatgtctcagactcaggcttagagcatggcatgaacatcaaaggcaggaacctgtttatctttgaattggaaagatacagcaaaattacactgtttggaaatacgaatagaggagtgaaaattgttgcagtggggtacccaaagggattcgagacctcaagttttttttcatcttgtatccttcaggtcctcttgcccctggccaatgtggcattaattgactacactctggaattcctgactgccacaggtgtacaggaaacatttgtcttttgttgctggaaagctgctcaaatcaaagaacatttactgtaaggccctgcaacttttctttccatgtttcgccatctttttccagttttttcaggatgaatgtaactaaggggaaatgtgagaggggaaaaatgtgtctacttagatgtcattgtaagttctaagggtattttctacacttatcaggaggtgagcagctgaaactttgtatctgtctgtcttgggttttctgtgacaaagattaaagaataaacttgggttttttctgaatctcattataaagtttggtgccagtggactttgcttttatttaatggcttcagtatggaagttacaatgataacatctttgttttcccactgagtttctaaatcttgtttgttctcaccttcaaggatataaatgagctccttgtcatctttgtattcccactgcctagctcagtcccaagcatatagtgagcacttacatgtttgttgaaatcttgaaaactagggaatcgcattgcttatggaagtccaggatgtaaagactaggacattagcatggtctccatcagacagttcctaaatgttatatggattgcagaaggggaaagctgacgtgaagcgtgttcccaggctactttgtgtaccctaggcttcagcaggattttgagttcaaattgatgtttagggacaaggggtcaaggtatggagaggaaataaccatgtttcctaacccataaaacaagactggtgacacaggatgctgaaagcattcattatagttcataatactctttgaagttgaagacgctggcaagaacccaaaaaagccatcgagaaggactgtgagtgctgaaagggggtgaaaaatggggaaggctcaaatgatctttatgcttgatacactcattcccctcaccctcccttcctttaggaagtcaaagtggtgccgccctacatctctcaatgtggttcgaataattacatcagagctctatcgatcactgggagatgtcctccgtgatgttgatgccaaggctttggtgcgctctgactttcttctggtgtatggggatgtcatctcaaacatcaatatcaccagagcccttgaggaacacaggtcaggatgggaaaatgacaggaacaagggttaaagaccagcagagccctgagactgcttttttgcagttctgtccctcctgtcctttataggttgagacggaagctagaaaaaaatgtttctgtgatgacgatgatcttcaaggagtcatcccccagccacccaactcgttgccacgaagacaatgtggtagtggctgtggatagtaccacaaacagggttctccattttcagaagacccagggtctccggcgttttgcatttcctctggtgtgtggatatctggggtcctttgagatggggaagtgacaggcttcagtgggagaaacaaattaaagtccttgtaacttctccccacagagcctgtttcagggcagtagtgatggagtggaggttcgatatgatttactggattgtcatatcagcatctgttctcctcaggtgagctctttagggctggggctgcacacccaaagagtagaactctgtgggtctgttattgtccccttagaaggccagggtatatttcttctccctgtttattttcattatttttacttttattttttgagacagagtctcgctctgttgcccaggctggagtgcagtggtgtgatcccagctcactgcagactctgcctcctaggttcaagtgattctcctgcctcagcctcctgagtagcagggattacaggcacaccaccatgcctggctaatttttgtatttttagtagagatggggtttcaccatgttggccaggctggtctcgaactcctggtctcaagtgatctacctgtctcagcctcccaaagtgctgggattacaggcatgagccaccacacctggccttattttcatttttatttatatatattttttgagacagggtctcgctctgtggcccaggctggagcacagtggcaccatgactgctcactgcagcctcagcctcccaggttcaagggaacctcctgcctcagcctcctgagtagatggaaccacaggcatgcactaccactaatttttgtatttttttgtagagacggggttttgccatgttgtccggcctggtcacgaactcctgagctcaagcaatctgaccacctcagccttccaaaatgctgggattacaggcatgagccaccagttttttttgttgttgttgttgttattgttgttttgagatggagcctcgctctgtcgcccaggctggagtgcagtggcatgatctcagcttactgcagcctccacctcctgggttccagtgattctcctgcctcagcctctcaagtagctgggactacaggtacgcaccaccacatccggctattttttgtatttttcagtagagatggggtttcaccatattggccaggctggtctctaactcctgacctcaggtgatcctcccgccttggcctcccaaagtgctgcaatcacaggtgtgagcctctgcacccagcattttttttttttttttttttttttttttgagtcggagtttcactcttgttgcccaggctggatgcaatggtgcgatctcagctcactgcaacctccacctcccaggttcaagcaattcccctgcctcagcctcccaaatagctgggattgcaggcatgtgccaccacacccagctaatttttgtatttttagtagagacgaggttttaccatgttggtcaggctggtctcgaactcccaacctcaggtgatctgcctgcctcggcctcccaaagtgctggcattacgggcatgagccactgcacctggccttttttttttttttagaatctattgtaaagcaaagatcttgtctccagtatcccactgggagtctctttggaattctggtccatgttcagctgtcatagggtttgctaggtctctgggggattatctgtgctcctagagaatagtacttaatcctggccaagcgtggtggctcacgcttgtaatcccagcactttgggaggccgaggtgagtggatcatgaggtcaggagttcaagaccagcctgaccaacacagtgaaatcccatctctactaaaaaataaaaatacaaaaattagctgggcgtggtggcggacgcttgtaatcccagctacttgggaggctgaggcacaagaatcactttaacccaggaggtggaggttgcagtgagccgagatcatgcaactgcactccagcctgggcaacagagctagacttgtctcaaaaaaaaaaaaaaaagaatagtacttaattctagcccactccacttcccttccacaggtggcacaactctttacagacaactttgactaccaaactcgagatgactttgtgcgaggtctcttagtgaatgaggaggtgagaaaagtcttccaatgcctctttaggagagaggagaaggctatgattgtatctcatgctggtaacttttgatcttttttgtattttattgaggcttaggagggaggaaaagcaggggacaggaggaacagtacacaaagaagaatctttgtggcagtgagaggcagaggggaacttaaaaggattagaaaagttgtacttgggggcattcttcctgtctttcttgcttaggtgacctccctttccttctcattcagatcctagggaaccagatccacatgcacgtaacagctaaggaatatggtgcccgtgtctccaacctacacatgtactcagctgtctgtgctgacgtcatccgccgatgggtctaccctctcaccccagaggcgaacttcactgacagcaccacccagagctgcactcattcccggcacaacatctaccgagggcctgaggtcagcctgggccatggcagcatcctagaggaaaatgtgctcctgggctctggcactgtcattggcagcaattgctttatcaccaacagtgtcattggccccggctgccacattggtgagcacaggtggggaatcaagccaactatcctaggaacaggaacctgggggggccacgtctccagaaacacaagggatggctacacaagggacagtccctgggaataaggaactatagagcggctacctcaggaaaggaggaaacagggatttgaaaacagcgataccttaatttgtagcctgtgggcctctcattggatgactcttcacattccagggtaccctgtagtcacattcaggagcaagtagataattaacatgcagtaacaacatctatttagcacattacagtttacaaagggcttttatatacattgttacatttaatcttcataatttacaaataaacaggctcaacaagattttcttgcccaaggtcattggtaataatggtgggacctgaatctgggtattctgaatgtaagtccagtgttcttttgagtctaccataactgcctggttggcctcttggtatctcattttggttgcaggagtgtgatgcgtctaatagtactgcccctttccaagaacaacagtaaggctcagattctaggggctgagcgtggtggctcatgcttgtaatcctagcacactgggaagccatggtgggaggatcgcttgagcccaggagttcaagaccagcctgggcaacatagcgacaccccttctccacaaatgatacaaaaattagctgggcatgatggcgcgtgcctgtaatctcagctattcgggaggctgaggcaggaggattacctgagcccagaggtcgagggtgcagtgagtcatgatcatactactgcactccagcctgggtgatggaatgagaccgtgtctcaaaagaaaaaaaagacttggtttctaaaatgtaccagaagaggtggaattatttggttctgcttgtaggcgtggatatgattctaataaggttttttgagttcagagggtccccagaaatcctgaaggttctcgggttcttaagctctgtgtgtagtctataattgttgtaaacttggtgaagtatcttctcaggcctgggcttagggggtgagtgggtgtttctggtgacttgcgggatggggaatgagagctaggtgggagctgtgctggtgtcagtcagccctgtcctctatgaagggctctgctctgcggttggaaccctgagttacccagaggtcttcccatcctgagccaggtgataacgtggtgctggaccagacctacctgtggcagggtgttcgagtggcggctggagcacagatccatcagtctctgctttgtgacaatgctgaggtcaaggaacgagtgacactgaaaccacgctctgtcctcacttcccaggtgagacctgatctatactgtgcacaggccctgaattgcatggcagtcacactgagccagaaggggcattatttccacccataatcctgtctaaaaaagttgctctcattatcaggatgcacttttcctccacaccctaatggttctgtgttttttttccccttaggtggtcgtgggcccaaatatcacgctgcctgagggctcggtgatctctttgcaccctccagatgcagaggaagatgaagatgatggcgagttcagtgatgattctggggctgaccaagaaaaggacaaagtgaagatgaaaggtgtgagactcaacaggtgtggggcatctgtgtgtctcgctgcctcatagaagaaccagtgtttcctcctggagggattggtgcttccgccgggccctctctatagatcattgccttttccaggttacaatccagcagaagtaggagctgctggcaagggctacctctggaaagctgcaggcatgaacatggaggaagaggaggaactgcagcagaatctgtggggtgagctaggcctgatgcctgcccttctcctcctgaatcggaatattttgaaggataatgaatacttcagagtcacattacttattcactcctttattcaggcagacagggcaggtatattgctctctgtcaatgactctttttttctttttcctcacccattatggcttctcaggactcaagatcaacatggaagaagagagtgaaagtgaaagtgagcaaagtatggattctgaggagccggacagccggggaggctcccctcagatggatgacatcaaaggtgagtggcaggggagaaatgcgctggaccagtttattctctgcctggatcaactagccagaggcttacgttcctcagaaagggtttggtatcgagtcaagactagatgacttagagcattctgaatgatgttggcccatgaacttatccttgctttgatttcagtgttccagaatgaagttttaggaacactacagcggggcaaagaggagaacatttcttgtgacaatctcgtcctggaaatcaactctctcaagtaagagcagcccctccctgttctcctcggggtgatcccgggaaggtagaggctttctcgtaagtgttttgtctccaaataggaacctattccttcgacatcccaaatggaaagaccagtagtatttggagcaaggagagcattattaagttctagcctcagcatagactttctccttcctaaaccctccccttccatattgttccatccagattcctctccaatgtctatcaaagtcatagttctaagcctgctgaaaggccagtgaaggccctggtgtcaccccagtctccccacaggtatgcctataacataagtctaaaggaggtgatgcaggtactgagccacgtggtcctggagttccccctgcaacagatggattccccgcttgactcaagccgctactgtgccctgctgcttcctgtgagcaaagattggagctgagtacaagggattgggtacaggcaaaggaaatcaggagtagactgtcttgttatattgggtgtatgtcacttctggttcctttttccttgcctctggaagctggttgggctctagagcagccttggctggttcagaggggtcagattgagttcaatactgactggcctttgagactccaggatttcataccatcctaggcccacaaaggtatattcagaatggacctggacattcagactctatggcagcaatttgacccaacacaagatcagcctctggggtgggaataggtattttgaggcagcctatagcatctgatcccctttcaccttccctaaggaatctctttttcccaaaccctgtcaacaactcccaagtccctctgacataattccacagaacctgtatcatctcccttttgtccacccatgtcatcagtatggatttgcttggatgtccaggtataggtgaatgcttaggaatatactgcagctcccttctttcttccatagctgctaaaggcctggagccctgtttttaggaactacataaagcgcgcagccgaccatttggaagcgttagcagccattgaggacttcttcctagagcatgaagctcttggtatttccatggccaaggtgaatatgacctcaagccccattcttctgcacttgctttcaaacgagggttggtgacccccttgggagacataaaatagaagctaatgtgaatccagtatggaccatccactcccaatatgcttattgctagaatagtacagcttggagccggactaataaggtagccatctggggggtggtctggaaatgtgcaaagctctccccagcaatagttccagaagttagacctgccccaggagcagagcgaacagctcactcttgtccgttttggaggaggctactcagtgcatagagggatctgagggcctggtagagtatcctgctggactttccaaggcccctgaggtcccctttattggccttttgcaggtactgatggctttctaccagctggagatcctggctgaggaaacaattctgagctggttcagccaaagagatacaactgacaagggccagcagttgcgcaagaatcaacaggtgcgtcaggctgtcctcctctcgccaagatggttatctcattcccaggtcctggcccctagactctagggtggttggtttctggggctctggttgttagagctgtttatctgccgaggggagcaggagagttatgtgcacctcccccagccgatctctcctctgcttctttacagctgcagaggttcatccagtggctaaaagaggcagaagaggagtcatctgaagatgactgaagtcacactgcctgctcctttgggtgtgattgagtgccctcctggctcctgggctgggacaagtgaggaactagctgcagagggatgagtgaccaccatccaggctgagactgaaaggagcagaggctggaactacagtattctttcccctgctagcaaccatgtgcctcccatcctgactgtggagttgggatgtggaagtggggctggaacaaagcttctgcctagggaggagctaagcaggcccggcagttggaggaaggccagaggaacagctttgtgctccggctttccctcagggaacagcagagagcagttggctctttctgctgcttgtatatgttaatattaaaagagagagtggtgtatttggtttgtctccatccctgactaatcagccagtgaagtatgtgaccagaatcacatgatagcctttccttaacacctgggggagagggaggacgggtgtgccagccactaggtggtactgtggtaccttgctaattaacctttcccatggctcatgggtagtggagggcggaggttcttttccagcctctgtggaccaacttgtgatcctggggtggtgtgcctaagcccgtttccatagagtcccattttgaacacttttctgccagaggattatgttgccaaccatatgtaaagcccattagacatgccagttcctttcacatgccttttccagttgatctggtactcgttctgtcaggaagctgggccacgcttcatcagaaataaggaaatcagctcaaggtcacatgactcttgaggggtaaagctaaggacttgaccctcagaatccagaactctgtccttcagcgtattgtgtttcagtgaagggaaaattggccccacagacaaatataacccagagccagtaatggaggtcccaagaacacaggaaggccatgtgaagggtgctttcccttgagagtgtttactatgtgacaggcaagcagttttcacatattgtttcatttaatcctcacatgagccccatgaagtcttatccccattttcagataaggtgcctgaagctcacagagcttccctagctagtaactgacagagccaggtgtgatattggactcttgacctggagcttgttactttgctgtattgctttaaccttaaccaaaagagacatgcctttctgtcttttc

SEQ ID NO: 11749 - DNA, 4425 bp, Homo sapiens
ggcgccgcctggtgtggtggttagtcgggctaacaagcgcagcggcgcggggccgggaggcagcggtggcgggggagccagaggggcggaggaggaaccgccgccgcccctacaagcagttctggtggccgatagcttcgatcgccgcttcttccccatctccaaggaccagcctcgggtcctcttgcccctggccaatgtggcattaattgactacactctggaattcctgactgccacaggtgtacaggaaacatttgtcttttgttgctggaaagctgctcaaatcaaagaacatttactgaagtcaaagtggtgccgccctacatctctcaatgtggttcgaataattacatcagagctctatcgatcactgggagatgtcctccgtgatgttgatgccaaggctttggtgcgctctgactttcttctggtgtatggggatgtcatctcaaacatcaatatcaccagagcccttgaggaacacaggttgagacggaagctagaaaaaaatgtttctgtgatgacgatgatcttcaaggagtcatcccccagccacccaactcgttgccacgaagacaatgtggtagtggctgtggatagtaccacaaacagggttctccattttcagaagacccagggtctccggcgttttgcatttcctctgagcctgtttcagggcagtagtgatggagtggaggttcgatatgatttactggattgtcatatcagcatctgttctcctcaggtggcacaactctttacagacaactttgactaccaaactcgagatgactttgtgcgaggtctcttagtgaatgaggaggtgagaaaagtcttccaatgcctctttaggagagaggagaaggctatgattgtatctcatgctggtaacttttgatcttttttgtattttattgaggcttaggagggaggaaaagcaggggacaggaggaacagtacacaaagaagaatctttgtggcagtgagaggcagaggggaacttaaaaggattagaaaagttgtacttgggggcattcttcctgtctttcttgcttaggtgacctccctttccttctcattcagatcctagggaaccagatccacatgcacgtaacagctaaggaatatggtgcccgtgtctccaacctacacatgtactcagctgtctgtgctgacgtcatccgccgatgggtctaccctctcaccccagaggcgaacttcactgacagcaccacccagagctgcactcattcccggcacaacatctaccgagggcctgaggtcagcctgggccatggcagcatcctagaggaaaatgtgctcctgggctctggcactgtcattggcagcaattgctttatcaccaacagtgtcattggccccggctgccacattggtgataacgtggtgctggaccagacctacctgtggcagggtgttcgagtggcggctggagcacagatccatcagtctctgctttgtgacaatgctgaggtcaaggaacgagtgacactgaaaccacgctctgtcctcacttcccaggtggtcgtgggcccaaatatcacgctgcctgagggctcggtgatctctttgcaccctccagatgcagaggaagatgaagatgatggcgagttcagtgatgattctggggctgaccaagaaaaggacaaagtgaagatgaaaggttacaatccagcagaagtaggagctgctggcaagggctacctctggaaagctgcaggcatgaacatggaggaagaggaggaactgcagcagaatctgtggggactcaagatcaacatggaagaagagagtgaaagtgaaagtgagcaaagtatggattctgaggagccggacagccggggaggctcccctcagatggatgacatcaaagtgttccagaatgaagttttaggaacactacagcggggcaaagaggagaacatttcttgtgacaatctcgtcctggaaatcaactctctcaagtaagagcagcccctccctgttctcctcggggtgatcccgggaaggtagaggctttctcgtaagtgttttgtctccaaataggaacctattccttcgacatcccaaatggaaagaccagtagtatttggagcaaggagagcattattaagttctagcctcagcatagactttctccttcctaaaccctccccttccatattgttccatccagattcctctccaatgtctatcaaagtcatagttctaagcctgctgaaaggccagtgaaggccctggtgtcaccccagtctccccacaggtatgcctataacataagtctaaaggaggtgatgcaggtactgagccacgtggtcctggagttccccctgcaacagatggattccccgcttgactcaagccgctactgtgccctgctgcttcctgtgagcaaagattggagctgagtacaagggattgggtacaggcaaaggaaatcaggagtagactgtcttgttatattgggtgtatgtcacttctggttcctttttccttgcctctggaagctggttgggctctagagcagccttggctggttcagaggggtcagattgagttcaatactgactggcctttgagactccaggatttcataccatcctaggcccacaaaggtatattcagaatggacctggacattcagactctatggcagcaatttgacccaacacaagatcagcctctggggtgggaataggtattttgaggcagcctatagcatctgatcccctttcaccttccctaaggaatctctttttcccaaaccctgtcaacaactcccaagtccctctgacataattccacagaacctgtatcatctcccttttgtccacccatgtcatcagtatggatttgcttggatgtccaggtataggtgaatgcttaggaatatactgcagctcccttctttcttccatagctgctaaaggcctggagccctgtttttaggaactacataaagcgcgcagccgaccatttggaagcgttagcagccattgaggacttcttcctagagcatgaagctcttggtatttccatggccaaggtactgatggctttctaccagctggagatcctggctgaggaaacaattctgagctggttcagccaaagagatacaactgacaagggccagcagttgcgcaagaatcaacagctgcagaggttcatccagtggctaaaagaggcagaagaggagtcatctgaagatgactgaagtcacactgcctgctcctttgggtgtgattgagtgccctcctggctcctgggctgggacaagtgaggaactagctgcagagggatgagtgaccaccatccaggctgagactgaaaggagcagaggctggaactacagtattctttcccctgctagcaaccatgtgcctcccatcctgactgtggagttgggatgtggaagtggggctggaacaaagcttctgcctagggaggagctaagcaggcccggcagttggaggaaggccagaggaacagctttgtgctccggctttccctcagggaacagcagagagcagttggctctttctgctgcttgtatatgttaatattaaaagagagagtggtgtatttggtttgtctccatccctgactaatcagccagtgaagtatgtgaccagaatcacatgatagcctttccttaacacctgggggagagggaggacgggtgtgccagccactaggtggtactgtggtaccttgctaattaacctttcccatggctcatgggtagtggagggcggaggttcttttccagcctctgtggaccaacttgtgatcctggggtggtgtgcctaagcccgtttccatagagtcccattttgaacacttttctgccagaggattatgttgccaaccatatgtaaagcccattagacatgccagttcctttcacatgccttttccagttgatctggtactcgttctgtcaggaagctgggccacgcttcatcagaaataaggaaatcagctcaaggtcacatgactcttgaggggtaaagctaaggacttgaccctcagaatccagaactctgtccttcagcgtattgtgtttcagtgaagggaaaattggccccacagacaaatataacccagagccagtaatggaggtcccaagaacacaggaaggccatgtgaagggtgctttcccttgagagtgtttactatgtgacaggcaagcagttttcacatattgtttcatttaatcctcacatgagccccatgaagtcttatccccattttcagataaggtgcctgaagctcacagagcttccctagctagtaactgacagagccaggtgtgatattggactcttgacctggagcttgttactttgctgtattgctttaaccttaaccaaaagagacatgcctttctgtcttttc

SEQ ID NO: 11750 - DNA, 1625 bp, Homo sapiens
cttgcggaagtggtgaccgtgagagaagaagatggcggcccctgtagtggcgccgcctggtgtggtggttagtcgggctaacaagcgcagcggcgcggggccgggaggcagcggtggcgggggagccagaggggcggaggaggaaccgccgccgcccctacaagcagttctggtggccgatagcttcgatcgccgcttcttccccatctccaaggaccagcctcgggtgagcgccgcgcacgcgagcagccagagggcaggaagggtggcagggctggagcaagttctcatttcggctaactacaacagcatgcccttgaaggacctgcgtctatgctgttatcctaaaaccggatgcagagggactgtctaaaccctgatgactgctgaccaagttagtggccggcagatttgggcattcgtaatgctgtccacctcgggtttgaaaggaatgaagagagctaaatgtagaaacagcgcttgagagaagccttcacgcggggattcagtgcccctagaagaggctgcgccgcttttaaccttgccgatgacggttgcttaggtgaaaagaaacgaccttttgcctctgaaagggcggtaatatgccttaaaaagagcgggctagatctcaggcagtgtattttttttttccttccaggttctaatgatagccggtgctatctgtcgaaaggacaaaatgggtttagtggttgattgccatcagcccccgagttgtctagacaatggggtattggactcagctgggtcgttcagcagtcagttcagaaagagggaactgcattggatttaaggaaaatcctctctaattccctcgaaaaagcctaatggctgttcatttttgacaagtgacgggagatggctaacctctgacacttagaaagggatcaaggaaggaaatcttatggggaagaaggccttagcaatgcttaaatttatggaaatatgattgatttccagtattatcctttgccagcagtgaactgccattctgtcacagctctgtgtctgatacaaggcacatagattctgtacttaccatccccaaattgcaatgtctcagactcaggcttagagcatggcatgaacatcaaaggcaggaacctgtttatctttgaattggaaagatacagcaaaattacactgtttggaaatacgaatagaggagtgaaaattgttgcagtggggtacccaaagggattcgagacctcaagttttttttcatcttgtatccttcaggtcctcttgcccctggccaatgtggcattaattgactacactctggaattcctgactgccacaggtgtacaggaaacatttgtcttttgttgctggaaagctgctcaaatcaaagaacatttactgtaaggccctgcaacttttctttccatgtttcgccatctttttccagttttttcaggatgaatgtaactaaggggaaatgtgagaggggaaaaatgtgtctacttagatgtcattgtaagttctaagggtattttctacacttatcaggaggtgagcagctgaaactttgtatctgtctgtcttgggttttctgtgacaaagattaaagaataaacttgggttttttctgaatctcattataa

SEQ ID NO: 11751 - DNA, 930 bp, Homo sapiens
cttgcggaagtggtgaccgtgagagaagaagatggcggcccctgtagtggcgccgcctggtgtggtggttagtcgggctaacaagcgcagcggcgcggggccgggaggcagcggtggcgggggagccagaggggcggaggaggaaccgccgccgcccctacaagcagttctggtggccgatagcttcgatcgccgcttcttccccatctccaaggaccagcctcgggtgagcgccgcgcacgcgagcagccagagggcaggaagggtggcagggctggagcaagttctcatttcggctaactacaacagcatgcccttgaaggacctgcgtctatgctgttatcctaaaaccggatgcagagggactgtctaaaccctgatgactgctgaccaagttagtggccggcagatttgggcattcgtaatgctgtccacctcgggtttgaaaggaatgaagagagctaaatgtagaaacagcgcttgagagaagccttcacgcggggattcagtgcccctagaagaggctgcgccgcttttaaccttgccgatgacggttgcttaggtcctcttgcccctggccaatgtggcattaattgactacactctggaattcctgactgccacaggtgtacaggaaacatttgtcttttgttgctggaaagctgctcaaatcaaagaacatttactgtaaggccctgcaacttttctttccatgtttcgccatctttttccagttttttcaggatgaatgtaactaaggggaaatgtgagaggggaaaaatgtgtctacttagatgtcattgtaagttctaagggtattttctacacttatcaggaggtgagcagctgaaactttgtatctgtctgtcttgggttttctgtgacaaagattaaagaataaacttgggttttttctgaatctcattataa

SEQ ID NO: 11752 - DNA, 764 bp, Homo sapiens
gcatggcagtcacactgagccagaaggggcattatttccacccataatcctgtctaaaaaagttgctctcattatcaggatgcacttttcctccacaccctaatggttctgtgttttttttccccttaggtggtcgtgggcccaaatatcacgctgcctgagggctcggtgatctctttgcaccctccagatgcagaggaagatgaagatgatggcgagttcagtgatgattctggggctgaccaagaaaaggacaaagtgaagatgaaaggtgtgagactcaacaggtgtggggcatctgtgtgtctcgctgcctcatagaagaaccagtgtttcctcctggagggattggtgcttccgccgggccctctctatagatcattgccttttccaggttacaatccagcagaagtaggagctgctggcaagggctacctctggaaagctgcaggcatgaacatggaggaagaggaggaactgcagcagaatctgtggggtgagctaggcctgatgcctgcccttctcctcctgaatcggaatattttgaaggataatgaatacttcagagtcacattacttattcactcctttattcaggcagacagggcaggtatattgctctctgtcaatgactctttttttctttttcctcacccattatggcttctcaggactcaagatcaacatggaagaagagagtgaaagtgaaagtgagcaaagtatggattctgaggagccggacagccggggaggctcccctcaga

SEQ ID NO: 11753 - DNA, 466 bp, Homo sapiens
gcatggcagtcacactgagccagaaggggcattatttccacccataatcctgtctaaaaaagttgctctcattatcaggatgcacttttcctccacaccctaatggttctgtgttttttttccccttaggtggtcgtgggcccaaatatcacgctgcctgagggctcggtgatctctttgcaccctccagatgcagaggaagatgaagatgatggcgagttcagtgatgattctggggctgaccaagaaaaggacaaagtgaagatgaaaggttacaatccagcagaagtaggagctgctggcaagggctacctctggaaagctgcaggcatgaacatggaggaagaggaggaactgcagcagaatctgtggggactcaagatcaacatggaagaagagagtgaaagtgaaagtgagcaaagtatggattctgaggagccggacagccggggaggctcccctcaga

SEQ ID NO: 11754 - DNA, 9927 bp, Homo sapiens
gatggcggcccctgtagtggcgccgcctggtgtggtggttagtcgggctaacaagcgcagcggcgcggggccgggaggcagcggtggcgggggagccagaggggcggaggaggaaccgccgccgcccctacaagcagttctggtggccgatagcttcgatcgccgcttcttccccatctccaaggaccagcctcgggtgagcgccgcgcacgcgagcagccagagggcaggaagggtggcagggctggagcaagttctcatttcggctaactacaacagcatgcccttgaaggacctgcgtctatgctgttatcctaaaaccggatgcagagggactgtctaaaccctgatgactgctgaccaagttagtggccggcagatttgggcattcgtaatgctgtccacctcgggtttgaaaggaatgaagagagctaaatgtagaaacagcgcttgagagaagccttcacgcggggattcagtgcccctagaagaggctgcgccgcttttaaccttgccgatgacggttgcttaggtgaaaagaaacgaccttttgcctctgaaagggcggtaatatgccttaaaaagagcgggctagatctcaggcagtgtattttttttttccttccaggttctaatgatagccggtgctatctgtcgaaaggacaaaatgggtttagtggttgattgccatcagcccccgagttgtctagacaatggggtattggactcagctgggtcgttcagcagtcagttcagaaagagggaactgcattggatttaaggaaaatcctctctaattccctcgaaaaagcctaatggctgttcatttttgacaagtgacgggagatggctaacctctgacacttagaaagggatcaaggaaggaaatcttatggggaagaaggccttagcaatgcttaaatttatggaaatatgattgatttccagtattatcctttgccagcagtgaactgccattctgtcacagctctgtgtctgatacaaggcacatagattctgtacttaccatccccaaattgcaatgtctcagactcaggcttagagcatggcatgaacatcaaaggcaggaacctgtttatctttgaattggaaagatacagcaaaattacactgtttggaaatacgaatagaggagtgaaaattgttgcagtggggtacccaaagggattcgagacctcaagttttttttcatcttgtatccttcaggtcctcttgcccctggccaatgtggcattaattgactacactctggaattcctgactgccacaggtgtacaggaaacatttgtcttttgttgctggaaagctgctcaaatcaaagaacatttactgtaaggccctgcaacttttctttccatgtttcgccatctttttccagttttttcaggatgaatgtaactaaggggaaatgtgagaggggaaaaatgtgtctacttagatgtcattgtaagttctaagggtattttctacacttatcaggaggtgagcagctgaaactttgtatctgtctgtcttgggttttctgtgacaaagattaaagaataaacttgggttttttctgaatctcattataaagtttggtgccagtggactttgcttttatttaatggcttcagtatggaagttacaatgataacatctttgttttcccactgagtttctaaatcttgtttgttctcaccttcaaggatataaatgagctccttgtcatctttgtattcccactgcctagctcagtcccaagcatatagtgagcacttacatgtttgttgaaatcttgaaaactagggaatcgcattgcttatggaagtccaggatgtaaagactaggacattagcatggtctccatcagacagttcctaaatgttatatggattgcagaaggggaaagctgacgtgaagcgtgttcccaggctactttgtgtaccctaggcttcagcaggattttgagttcaaattgatgtttagggacaaggggtcaaggtatggagaggaaataaccatgtttcctaacccataaaacaagactggtgacacaggatgctgaaagcattcattatagttcataatactctttgaagttgaagacgctggcaagaacccaaaaaagccatcgagaaggactgtgagtgctgaaagggggtgaaaaatggggaaggctcaaatgatctttatgcttgatacactcattcccctcaccctcccttcctttaggaagtcaaagtggtgccgccctacatctctcaatgtggttcgaataattacatcagagctctatcgatcactgggagatgtcctccgtgatgttgatgccaaggctttggtgcgctctgactttcttctggtgtatggggatgtcatctcaaacatcaatatcaccagagcccttgaggaacacaggtcaggatgggaaaatgacaggaacaagggttaaagaccagcagagccctgagactgcttttttgcagttctgtccctcctgtcctttataggttgagacggaagctagaaaaaaatgtttctgtgatgacgatgatcttcaaggagtcatcccccagccacccaactcgttgccacgaagacaatgtggtagtggctgtggatagtaccacaaacagggttctccattttcagaagacccagggtctccggcgttttgcatttcctctggtgtgtggatatctggggtcctttgagatggggaagtgacaggcttcagtgggagaaacaaattaaagtccttgtaacttctccccacagagcctgtttcagggcagtagtgatggagtggaggttcgatatgatttactggattgtcatatcagcatctgttctcctcaggtgagctctttagggctggggctgcacacccaaagagtagaactctgtgggtctgttattgtccccttagaaggccagggtatatttcttctccctgtttattttcattatttttacttttattttttgagacagagtctcgctctgttgcccaggctggagtgcagtggtgtgatcccagctcactgcagactctgcctcctaggttcaagtgattctcctgcctcagcctcctgagtagcagggattacaggcacaccaccatgcctggctaatttttgtatttttagtagagatggggtttcaccatgttggccaggctggtctcgaactcctggtctcaagtgatctacctgtctcagcctcccaaagtgctgggattacaggcatgagccaccacacctggccttattttcatttttatttatatatattttttgagacagggtctcgctctgtggcccaggctggagcacagtggcaccatgactgctcactgcagcctcagcctcccaggttcaagggaacctcctgcctcagcctcctgagtagatggaaccacaggcatgcactaccactaatttttgtatttttttgtagagacggggttttgccatgttgtccggcctggtcacgaactcctgagctcaagcaatctgaccacctcagccttccaaaatgctgggattacaggcatgagccaccagttttttttgttgttgttgttgttattgttgttttgagatggagcctcgctctgtcgcccaggctggagtgcagtggcatgatctcagcttactgcagcctccacctcctgggttccagtgattctcctgcctcagcctctcaagtagctgggactacaggtacgcaccaccacatccggctattttttgtatttttcagtagagatggggtttcaccatattggccaggctggtctctaactcctgacctcaggtgatcctcccgccttggcctcccaaagtgctgcaatcacaggtgtgagcctctgcacccagcattttttttttttttttttttttttttttgagtcggagtttcactcttgttgcccaggctggatgcaatggtgcgatctcagctcactgcaacctccacctcccaggttcaagcaattcccctgcctcagcctcccaaatagctgggattgcaggcatgtgccaccacacccagctaatttttgtatttttagtagagacgaggttttaccatgttggtcaggctggtctcgaactcccaacctcaggtgatctgcctgcctcggcctcccaaagtgctggcattacgggcatgagccactgcacctggccttttttttttttttagaatctattgtaaagcaaagatcttgtctccagtatcccactgggagtctctttggaattctggtccatgttcagctgtcatagggtttgctaggtctctgggggattatctgtgctcctagagaatagtacttaatcctggccaagcgtggtggctcacgcttgtaatcccagcactttgggaggccgaggtgagtggatcatgaggtcaggagttcaagaccagcctgaccaacacagtgaaatcccatctctactaaaaaataaaaatacaaaaattagctgggcgtggtggcggacgcttgtaatcccagctacttgggaggctgaggcacaagaatcactttaacccaggaggtggaggttgcagtgagccgagatcatgcaactgcactccagcctgggcaacagagctagacttgtctcaaaaaaaaaaaaaaaagaatagtacttaattctagcccactccacttcccttccacaggtggcacaactctttacagacaactttgactaccaaactcgagatgactttgtgcgaggtctcttagtgaatgaggaggtgagaaaagtcttccaatgcctctttaggagagaggagaaggctatgattgtatctcatgctggtaacttttgatcttttttgtattttattgaggcttaggagggaggaaaagcaggggacaggaggaacagtacacaaagaagaatctttgtggcagtgagaggcagaggggaacttaaaaggattagaaaagttgtacttgggggcattcttcctgtctttcttgcttaggtgacctccctttccttctcattcagatcctagggaaccagatccacatgcacgtaacagctaaggaatatggtgcccgtgtctccaacctacacatgtactcagctgtctgtgctgacgtcatccgccgatgggtctaccctctcaccccagaggcgaacttcactgacagcaccacccagagctgcactcattcccggcacaacatctaccgagggcctgaggtcagcctgggccatggcagcatcctagaggaaaatgtgctcctgggctctggcactgtcattggcagcaattgctttatcaccaacagtgtcattggccccggctgccacattggtgagcacaggtggggaatcaagccaactatcctaggaacaggaacctgggggggccacgtctccagaaacacaagggatggctacacaagggacagtccctgggaataaggaactatagagcggctacctcaggaaaggaggaaacagggatttgaaaacagcgataccttaatttgtagcctgtgggcctctcattggatgactcttcacattccagggtaccctgtagtcacattcaggagcaagtagataattaacatgcagtaacaacatctatttagcacattacagtttacaaagggcttttatatacattgttacatttaatcttcataatttacaaataaacaggctcaacaagattttcttgcccaaggtcattggtaataatggtgggacctgaatctgggtattctgaatgtaagtccagtgttcttttgagtctaccataactgcctggttggcctcttggtatctcattttggttgcaggagtgtgatgcgtctaatagtactgcccctttccaagaacaacagtaaggctcagattctaggggctgagcgtggtggctcatgcttgtaatcctagcacactgggaagccatggtgggaggatcgcttgagcccaggagttcaagaccagcctgggcaacatagcgacaccccttctccacaaatgatacaaaaattagctgggcatgatggcgcgtgcctgtaatctcagctattcgggaggctgaggcaggaggattacctgagcccagaggtcgagggtgcagtgagtcatgatcatactactgcactccagcctgggtgatggaatgagaccgtgtctcaaaagaaaaaaaagacttggtttctaaaatgtaccagaagaggtggaattatttggttctgcttgtaggcgtggatatgattctaataaggttttttgagttcagagggtccccagaaatcctgaaggttctcgggttcttaagctctgtgtgtagtctataattgttgtaaacttggtgaagtatcttctcaggcctgggcttagggggtgagtgggtgtttctggtgacttgcgggatggggaatgagagctaggtgggagctgtgctggtgtcagtcagccctgtcctctatgaagggctctgctctgcggttggaaccctgagttacccagaggtcttcccatcctgagccaggtgataacgtggtgctggaccagacctacctgtggcagggtgttcgagtggcggctggagcacagatccatcagtctctgctttgtgacaatgctgaggtcaaggaacgagtgacactgaaaccacgctctgtcctcacttcccaggtgagacctgatctatactgtgcacaggccctgaattgcatggcagtcacactgagccagaaggggcattatttccacccataatcctgtctaaaaaagttgctctcattatcaggatgcacttttcctccacaccctaatggttctgtgttttttttccccttaggtggtcgtgggcccaaatatcacgctgcctgagggctcggtgatctctttgcaccctccagatgcagaggaagatgaagatgatggcgagttcagtgatgattctggggctgaccaagaaaaggacaaagtgaagatgaaaggtgtgagactcaacaggtgtggggcatctgtgtgtctcgctgcctcatagaagaaccagtgtttcctcctggagggattggtgcttccgccgggccctctctatagatcattgccttttccaggttacaatccagcagaagtaggagctgctggcaagggctacctctggaaagctgcaggcatgaacatggaggaagaggaggaactgcagcagaatctgtggggtgagctaggcctgatgcctgcccttctcctcctgaatcggaatattttgaaggataatgaatacttcagagtcacattacttattcactcctttattcaggcagacagggcaggtatattgctctctgtcaatgactctttttttctttttcctcacccattatggcttctcaggactcaagatcaacatggaagaagagagtgaaagtgaaagtgagcaaagtatggattctgaggagccggacagccggggaggctcccctcagatggatgacatcaaaggtgagtggcaggggagaaatgcgctggaccagtttattctctgcctggatcaactagccagaggcttacgttcctcagaaagggtttggtatcgagtcaagactagatgacttagagcattctgaatgatgttggcccatgaacttatccttgctttgatttcagtgttccagaatgaagttttaggaacactacagcggggcaaagaggagaacatttcttgtgacaatctcgtcctggaaatcaactctctcaagtaagagcagcccctccctgttctcctcggggtgatcccgggaaggtagaggctttctcgtaagtgttttgtctccaaataggaacctattccttcgacatcccaaatggaaagaccagtagtatttggagcaaggagagcattattaagttctagcctcagcatagactttctccttcctaaaccctccccttccatattgttccatccagattcctctccaatgtctatcaaagtcatagttctaagcctgctgaaaggccagtgaaggccctggtgtcaccccagtctccccacaggtatgcctataacataagtctaaaggaggtgatgcaggtactgagccacgtggtcctggagttccccctgcaacagatggattccccgcttgactcaagccgctactgtgccctgctgcttcctgtgagcaaagattggagctgagtacaagggattgggtacaggcaaaggaaatcaggagtagactgtcttgttatattgggtgtatgtcacttctggttcctttttccttgcctctggaagctggttgggctctagagcagccttggctggttcagaggggtcagattgagttcaatactgactggcctttgagactccaggatttcataccatcctaggcccacaaaggtatattcagaatggacctggacattcagactctatggcagcaatttgacccaacacaagatcagcctctggggtgggaataggtattttgaggcagcctatagcatctgatcccctttcaccttccctaaggaatctctttttcccaaaccctgtcaacaactcccaagtccctctgacataattccacagaacctgtatcatctcccttttgtccacccatgtcatcagtatggatttgcttggatgtccaggtataggtgaatgcttaggaatatactgcagctcccttctttcttccatagctgctaaaggcctggagccctgtttttaggaactacataaagcgcgcagccgaccatttggaagcgttagcagccattgaggacttcttcctagagcatgaagctcttggtatttccatggccaaggtgaatatgacctcaagccccattcttctgcacttgctttcaaacgagggttggtgacccccttgggagacataaaatagaagctaatgtgaatccagtatggaccatccactcccaatatgcttattgctagaatagtacagcttggagccggactaataaggtagccatctggggggtggtctggaaatgtgcaaagctctccccagcaatagttccagaagttagacctgccccaggagcagagcgaacagctcactcttgtccgttttggaggaggctactcagtgcatagagggatctgagggcctggtagagtatcctgctggactttccaaggcccctgaggtcccctttattggccttttgcaggtactgatggctttctaccagctggagatcctggctgaggaaacaattctgagctggttcagccaaagagatacaactgacaagggccagcagttgcgcaagaatcaacaggtgcgtcaggctgtcctcctctcgccaagatggttatctcattcccaggtcctggcccctagactctagggtggttggtttctggggctctggttgttagagctgtttatctgccgaggggagcaggagagttatgtgcacctcccccagccgatctctcctctgcttctttacagctgcagaggttcatccagtggctaaaagaggcagaagaggagtcatctgaagatgactgaagtcacactgcctgctcctttgggtgtgattgagtgccctcctggctcctgggctgggacaagtgaggaactagctgcagagggatgagtgaccaccatccaggctgagactgaaaggagcagaggctggaactacagtattctttcccctgctagcaaccatgtgcctcccatcctgactgtggagttgggatgtggaagtggggctggaacaaagcttctgcctagggaggagctaagcaggcccggcagttggaggaaggccagaggaacagctttgtgctccggctttccctcagggaacagcagagagcagttggctctttctgctgcttgtatatgttaatattaaaagagagagtggtgta

SEQ ID NO: 11755 - DNA, 3460 bp, Homo sapiens
gatggcggcccctgtagtggcgccgcctggtgtggtggttagtcgggctaacaagcgcagcggcgcggggccgggaggcagcggtggcgggggagccagaggggcggaggaggaaccgccgccgcccctacaagcagttctggtggccgatagcttcgatcgccgcttcttccccatctccaaggaccagcctcgggtcctcttgcccctggccaatgtggcattaattgactacactctggaattcctgactgccacaggtgtacaggaaacatttgtcttttgttgctggaaagctgctcaaatcaaagaacatttactgaagtcaaagtggtgccgccctacatctctcaatgtggttcgaataattacatcagagctctatcgatcactgggagatgtcctccgtgatgttgatgccaaggctttggtgcgctctgactttcttctggtgtatggggatgtcatctcaaacatcaatatcaccagagcccttgaggaacacaggttgagacggaagctagaaaaaaatgtttctgtgatgacgatgatcttcaaggagtcatcccccagccacccaactcgttgccacgaagacaatgtggtagtggctgtggatagtaccacaaacagggttctccattttcagaagacccagggtctccggcgttttgcatttcctctgagcctgtttcagggcagtagtgatggagtggaggttcgatatgatttactggattgtcatatcagcatctgttctcctcagagacggggttttgccatgttgtccggcctggtcacgaactcctgagctcaagcaatctgaccacctcagccttccaaaatgctgggattacaggtggcacaactctttacagacaactttgactaccaaactcgagatgactttgtgcgaggtctcttagtgaatgaggagatcctagggaaccagatccacatgcacgtaacagctaaggaatatggtgcccgtgtctccaacctacacatgtactcagctgtctgtgctgacgtcatccgccgatgggtctaccctctcaccccagaggcgaacttcactgacagcaccacccagagctgcactcattcccggcacaacatctaccgagggcctgaggtcagcctgggccatggcagcatcctagaggaaaatgtgctcctgggctctggcactgtcattggcagcaattgctttatcaccaacagtgtcattggccccggctgccacattggtgataacgtggtgctggaccagacctacctgtggcagggtgttcgagtggcggctggagcacagatccatcagtctctgctttgtgacaatgctgaggtcaaggaacgagtgacactgaaaccacgctctgtcctcacttcccaggtggtcgtgggcccaaatatcacgctgcctgagggctcggtgatctctttgcaccctccagatgcagaggaagatgaagatgatggcgagttcagtgatgattctggggctgaccaagaaaaggacaaagtgaagatgaaaggttacaatccagcagaagtaggagctgctggcaagggctacctctggaaagctgcaggcatgaacatggaggaagaggaggaactgcagcagaatctgtggggactcaagatcaacatggaagaagagagtgaaagtgaaagtgagcaaagtatggattctgaggagccggacagccggggaggctcccctcagatggatgacatcaaagtgttccagaatgaagttttaggaacactacagcggggcaaagaggagaacatttcttgtgacaatctcgtcctggaaatcaactctctcaagtaagagcagcccctccctgttctcctcggggtgatcccgggaaggtagaggctttctcgtaagtgttttgtctccaaataggaacctattccttcgacatcccaaatggaaagaccagtagtatttggagcaaggagagcattattaagttctagcctcagcatagactttctccttcctaaaccctccccttccatattgttccatccagattcctctccaatgtctatcaaagtcatagttctaagcctgctgaaaggccagtgaaggccctggtgtcaccccagtctccccacaggtatgcctataacataagtctaaaggaggtgatgcaggtactgagccacgtggtcctggagttccccctgcaacagatggattccccgcttgactcaagccgctactgtgccctgctgcttcctgtgagcaaagattggagctgagtacaagggattgggtacaggcaaaggaaatcaggagtagactgtcttgttatattgggtgtatgtcacttctggttcctttttccttgcctctggaagctggttgggctctagagcagccttggctggttcagaggggtcagattgagttcaatactgactggcctttgagactccaggatttcataccatcctaggcccacaaaggtatattcagaatggacctggacattcagactctatggcagcaatttgacccaacacaagatcagcctctggggtgggaataggtattttgaggcagcctatagcatctgatcccctttcaccttccctaaggaatctctttttcccaaaccctgtcaacaactcccaagtccctctgacataattccacagaacctgtatcatctcccttttgtccacccatgtcatcagtatggatttgcttggatgtccaggtataggtgaatgcttaggaatatactgcagctcccttctttcttccatagctgctaaaggcctggagccctgtttttaggaactacataaagcgcgcagccgaccatttggaagcgttagcagccattgaggacttcttcctagagcatgaagctcttggtatttccatggccaaggtactgatggctttctaccagctggagatcctggctgaggaaacaattctgagctggttcagccaaagagatacaactgacaagggccagcagttgcgcaagaatcaacagctgcagaggttcatccagtggctaaaagaggcagaagaggagtcatctgaagatgactgaagtcacactgcctgctcctttgggtgtgattgagtgccctcctggctcctgggctgggacaagtgaggaactagctgcagagggatgagtgaccaccatccaggctgagactgaaaggagcagaggctggaactacagtattctttcccctgctagcaaccatgtgcctcccatcctgactgtggagttgggatgtggaagtggggctggaacaaagcttctgcctagggaggagctaagcaggcccggcagttggaggaaggccagaggaacagctttgtgctccggctttccctcagggaacagcagagagcagttggctctttctgctgcttgtatatgttaatattaaaagagagagtggtgta

SEQ ID NO: 11756 - DNA, 8626 bp, Homo sapiens
tacaggaaacatttgtcttttgttgctggaaagctgctcaaatcaaagaacatttactgtaaggccctgcaacttttctttccatgtttcgccatctttttccagttttttcaggatgaatgtaactaaggggaaatgtgagaggggaaaaatgtgtctacttagatgtcattgtaagttctaagggtattttctacacttatcaggaggtgagcagctgaaactttgtatctgtctgtcttgggttttctgtgacaaagattaaagaataaacttgggttttttctgaatctcattataaagtttggtgccagtggactttgcttttatttaatggcttcagtatggaagttacaatgataacatctttgttttcccactgagtttctaaatcttgtttgttctcaccttcaaggatataaatgagctccttgtcatctttgtattcccactgcctagctcagtcccaagcatatagtgagcacttacatgtttgttgaaatcttgaaaactagggaatcgcattgcttatggaagtccaggatgtaaagactaggacattagcatggtctccatcagacagttcctaaatgttatatggattgcagaaggggaaagctgacgtgaagcgtgttcccaggctactttgtgtaccctaggcttcagcaggattttgagttcaaattgatgtttagggacaaggggtcaaggtatggagaggaaataaccatgtttcctaacccataaaacaagactggtgacacaggatgctgaaagcattcattatagttcataatactctttgaagttgaagacgctggcaagaacccaaaaaagccatcgagaaggactgtgagtgctgaaagggggtgaaaaatggggaaggctcaaatgatctttatgcttgatacactcattcccctcaccctcccttcctttaggaagtcaaagtggtgccgccctacatctctcaatgtggttcgaataattacatcagagctctatcgatcactgggagatgtcctccgtgatgttgatgccaaggctttggtgcgctctgactttcttctggtgtatggggatgtcatctcaaacatcaatatcaccagagcccttgaggaacacaggtcaggatgggaaaatgacaggaacaagggttaaagaccagcagagccctgagactgcttttttgcagttctgtccctcctgtcctttataggttgagacggaagctagaaaaaaatgtttctgtgatgacgatgatcttcaaggagtcatcccccagccacccaactcgttgccacgaagacaatgtggtagtggctgtggatagtaccacaaacagggttctccattttcagaagacccagggtctccggcgttttgcatttcctctggtgtgtggatatctggggtcctttgagatggggaagtgacaggcttcagtgggagaaacaaattaaagtccttgtaacttctccccacagagcctgtttcagggcagtagtgatggagtggaggttcgatatgatttactggattgtcatatcagcatctgttctcctcaggtgagctctttagggctggggctgcacacccaaagagtagaactctgtgggtctgttattgtccccttagaaggccagggtatatttcttctccctgtttattttcattatttttacttttattttttgagacagagtctcgctctgttgcccaggctggagtgcagtggtgtgatcccagctcactgcagactctgcctcctaggttcaagtgattctcctgcctcagcctcctgagtagcagggattacaggcacaccaccatgcctggctaatttttgtatttttagtagagatggggtttcaccatgttggccaggctggtctcgaactcctggtctcaagtgatctacctgtctcagcctcccaaagtgctgggattacaggcatgagccaccacacctggccttattttcatttttatttatatatattttttgagacagggtctcgctctgtggcccaggctggagcacagtggcaccatgactgctcactgcagcctcagcctcccaggttcaagggaacctcctgcctcagcctcctgagtagatggaaccacaggcatgcactaccactaatttttgtatttttttgtagagacggggttttgccatgttgtccggcctggtcacgaactcctgagctcaagcaatctgaccacctcagccttccaaaatgctgggattacaggcatgagccaccagttttttttgttgttgttgttgttattgttgttttgagatggagcctcgctctgtcgcccaggctggagtgcagtggcatgatctcagcttactgcagcctccacctcctgggttccagtgattctcctgcctcagcctctcaagtagctgggactacaggtacgcaccaccacatccggctattttttgtatttttcagtagagatggggtttcaccatattggccaggctggtctctaactcctgacctcaggtgatcctcccgccttggcctcccaaagtgctgcaatcacaggtgtgagcctctgcacccagcattttttttttttttttttttttttttttgagtcggagtttcactcttgttgcccaggctggatgcaatggtgcgatctcagctcactgcaacctccacctcccaggttcaagcaattcccctgcctcagcctcccaaatagctgggattgcaggcatgtgccaccacacccagctaatttttgtatttttagtagagacgaggttttaccatgttggtcaggctggtctcgaactcccaacctcaggtgatctgcctgcctcggcctcccaaagtgctggcattacgggcatgagccactgcacctggccttttttttttttttagaatctattgtaaagcaaagatcttgtctccagtatcccactgggagtctctttggaattctggtccatgttcagctgtcatagggtttgctaggtctctgggggattatctgtgctcctagagaatagtacttaatcctggccaagcgtggtggctcacgcttgtaatcccagcactttgggaggccgaggtgagtggatcatgaggtcaggagttcaagaccagcctgaccaacacagtgaaatcccatctctactaaaaaataaaaatacaaaaattagctgggcgtggtggcggacgcttgtaatcccagctacttgggaggctgaggcacaagaatcactttaacccaggaggtggaggttgcagtgagccgagatcatgcaactgcactccagcctgggcaacagagctagacttgtctcaaaaaaaaaaaaaaaagaatagtacttaattctagcccactccacttcccttccacaggtggcacaactctttacagacaactttgactaccaaactcgagatgactttgtgcgaggtctcttagtgaatgaggaggtgagaaaagtcttccaatgcctctttaggagagaggagaaggctatgattgtatctcatgctggtaacttttgatcttttttgtattttattgaggcttaggagggaggaaaagcaggggacaggaggaacagtacacaaagaagaatctttgtggcagtgagaggcagaggggaacttaaaaggattagaaaagttgtacttgggggcattcttcctgtctttcttgcttaggtgacctccctttccttctcattcagatcctagggaaccagatccacatgcacgtaacagctaaggaatatggtgcccgtgtctccaacctacacatgtactcagctgtctgtgctgacgtcatccgccgatgggtctaccctctcaccccagaggcgaacttcactgacagcaccacccagagctgcactcattcccggcacaacatctaccgagggcctgaggtcagcctgggccatggcagcatcctagaggaaaatgtgctcctgggctctggcactgtcattggcagcaattgctttatcaccaacagtgtcattggccccggctgccacattggtgagcacaggtggggaatcaagccaactatcctaggaacaggaacctgggggggccacgtctccagaaacacaagggatggctacacaagggacagtccctgggaataaggaactatagagcggctacctcaggaaaggaggaaacagggatttgaaaacagcgataccttaatttgtagcctgtgggcctctcattggatgactcttcacattccagggtaccctgtagtcacattcaggagcaagtagataattaacatgcagtaacaacatctatttagcacattacagtttacaaagggcttttatatacattgttacatttaatcttcataatttacaaataaacaggctcaacaagattttcttgcccaaggtcattggtaataatggtgggacctgaatctgggtattctgaatgtaagtccagtgttcttttgagtctaccataactgcctggttggcctcttggtatctcattttggttgcaggagtgtgatgcgtctaatagtactgcccctttccaagaacaacagtaaggctcagattctaggggctgagcgtggtggctcatgcttgtaatcctagcacactgggaagccatggtgggaggatcgcttgagcccaggagttcaagaccagcctgggcaacatagcgacaccccttctccacaaatgatacaaaaattagctgggcatgatggcgcgtgcctgtaatctcagctattcgggaggctgaggcaggaggattacctgagcccagaggtcgagggtgcagtgagtcatgatcatactactgcactccagcctgggtgatggaatgagaccgtgtctcaaaagaaaaaaaagacttggtttctaaaatgtaccagaagaggtggaattatttggttctgcttgtaggcgtggatatgattctaataaggttttttgagttcagagggtccccagaaatcctgaaggttctcgggttcttaagctctgtgtgtagtctataattgttgtaaacttggtgaagtatcttctcaggcctgggcttagggggtgagtgggtgtttctggtgacttgcgggatggggaatgagagctaggtgggagctgtgctggtgtcagtcagccctgtcctctatgaagggctctgctctgcggttggaaccctgagttacccagaggtcttcccatcctgagccaggtgataacgtggtgctggaccagacctacctgtggcagggtgttcgagtggcggctggagcacagatccatcagtctctgctttgtgacaatgctgaggtcaaggaacgagtgacactgaaaccacgctctgtcctcacttcccaggtgagacctgatctatactgtgcacaggccctgaattgcatggcagtcacactgagccagaaggggcattatttccacccataatcctgtctaaaaaagttgctctcattatcaggatgcacttttcctccacaccctaatggttctgtgttttttttccccttaggtggtcgtgggcccaaatatcacgctgcctgagggctcggtgatctctttgcaccctccagatgcagaggaagatgaagatgatggcgagttcagtgatgattctggggctgaccaagaaaaggacaaagtgaagatgaaaggtgtgagactcaacaggtgtggggcatctgtgtgtctcgctgcctcatagaagaaccagtgtttcctcctggagggattggtgcttccgccgggccctctctatagatcattgccttttccaggttacaatccagcagaagtaggagctgctggcaagggctacctctggaaagctgcaggcatgaacatggaggaagaggaggaactgcagcagaatctgtggggtgagctaggcctgatgcctgcccttctcctcctgaatcggaatattttgaaggataatgaatacttcagagtcacattacttattcactcctttattcaggcagacagggcaggtatattgctctctgtcaatgactctttttttctttttcctcacccattatggcttctcaggactcaagatcaacatggaagaagagagtgaaagtgaaagtgagcaaagtatggattctgaggagccggacagccggggaggctcccctcagatggatgacatcaaaggtgagtggcaggggagaaatgcgctggaccagtttattctctgcctggatcaactagccagaggcttacgttcctcagaaagggtttggtatcgagtcaagactagatgacttagagcattctgaatgatgttggcccatgaacttatccttgctttgatttcagtgttccagaatgaagttttaggaacactacagcggggcaaagaggagaacatttcttgtgacaatctcgtcctggaaatcaactctctcaagtaagagcagcccctccctgttctcctcggggtgatcccgggaaggtagaggctttctcgtaagtgttttgtctccaaataggaacctattccttcgacatcccaaatggaaagaccagtagtatttggagcaaggagagcattattaagttctagcctcagcatagactttctccttcctaaaccctccccttccatattgttccatccagattcctctccaatgtctatcaaagtcatagttctaagcctgctgaaaggccagtgaaggccctggtgtcaccccagtctccccacaggtatgcctataacataagtctaaaggaggtgatgcaggtactgagccacgtggtcctggagttccccctgcaacagatggattccccgcttgactcaagccgctactgtgccctgctgcttcctgtgagcaaagattggagctgagtacaagggattgggtacaggcaaaggaaatcaggagtagactgtcttgttatattgggtgtatgtcacttctggttcctttttccttgcctctggaagctggttgggctctagagcagccttggctggttcagaggggtcagattgagttcaatactgactggcctttgagactccaggatttcataccatcctaggcccacaaaggtatattcagaatggacctggacattcagactctatggcagcaatttgacccaacacaagatcagcctctggggtgggaataggtattttgaggcagcctatagcatctgatcccctttcaccttccctaaggaatctctttttcccaaaccctgtcaacaactcccaagtccctctgacataattccacagaacctgtatcatctcccttttgtccacccatgtcatcagtatggatttgcttggatgtccaggtataggtgaatgcttaggaatatactgcagctcccttctttcttccatagctgctaaaggcctggagccctgtttttaggaactacataaagcgcgcagccgaccatttggaagcgttagcagccattgaggacttcttcctagagcatgaagctcttggtatttccatggccaaggtgaatatgacctcaagccccattcttctgcacttgctttcaaacgagggttggtgacccccttgggagacataaaatagaagctaatgtgaatccagtatggaccatccactcccaatatgcttattgctagaatagtacagcttggagccggactaataaggtagccatctggggggtggtctggaaatgtgcaaagctctccccagcaatagttccagaagttagacctgccccaggagcagagcgaacagctcactcttgtccgttttggaggaggctactcagtgcatagagggatctgagggcctggtagagtatcctgctggactttccaaggcccctgaggtcccctttattggccttttgcaggtactgatggctttctaccagctggagatcctggctgaggaaacaattctgagctggttcagccaaagagatacaactgacaagggccagcagttgcgcaagaatcaacaggtgcgtcaggctgtcctcctctcgccaagatggttatctcattcccaggtcctggcccctagactctagggtggttggtttctggggctctggttgttagagctgtttatctgccgaggggagcaggagagttatgtgcacctcccccagccgatctctcctctgcttctttacagctgcagaggttcatccagtggctaaaagaggcagaagaggagtcatctgaagatgactgaagtcacactgcctgctcctttgggtgtgattgagtgccctcctggctcctgggctgggacaagtgaggaactagctgcagagggatgagtgaccaccatccaggctgagactgaaaggagcagaggctggaactacagtattctttcccctgctagcaaccatgtgcctcccatcctgactgtggagttgggatgtggaagtggggctggaacaaagcttctgcctagggaggagctaagcaggcccggcagttggaggaaggccagaggaacagctttgtgctccggctttccctcagggaacagcagagagcagttggctctttctgctgcttgtatatgttaatattaaaagagagag

SEQ ID NO: 11757 - DNA, 3961 bp, Homo sapiens
tacaggaaacatttgtcttttgttgctggaaagctgctcaaatcaaagaacatttactgtaaggccctgcaacttttctttccatgtttcgccatctttttccagttttttcaggatgaatgtaactaaggggaaatgtgagaggggaaaaatgtgtctacttagatgtcattgtaagttctaagggtattttctacacttatcaggaggtgagcagctgaaactttgtatctgtctgtcttgggttttctgtgacaaagattaaagaataaacttgggttttttctgaatctcattataaagtttggtgccagtggactttgcttttatttaatggcttcagtatggaagttacaatgataacatctttgttttcccactgagtttctaaatcttgtttgttctcaccttcaaggatataaatgagctccttgtcatctttgtattcccactgcctagctcagtcccaagcatatagtgagcacttacatgtttgttgaaatcttgaaaactagggaatcgcattgcttatggaagtccaggatgtaaagactaggacattagcatggtctccatcagacagttcctaaatgttatatggattgcagaaggggaaagctgacgtgaagcgtgttcccaggctactttgtgtaccctaggcttcagcaggattttgagttcaaattgatgtttagggacaaggggtcaaggtatggagaggaaataaccatgtttcctaacccataaaacaagactggtgacacaggatgctgaaagcattcattatagttcataatactctttgaagttgaagacgctggcaagaacccaaaaaagccatcgagaaggactgtgagtgctgaaagggggtgaaaaatggggaaggctcaaatgatctttatgcttgatacactcattcccctcaccctcccttcctttaggaagtcaaagtggtgccgccctacatctctcaatgtggttcgaataattacatcagagctctatcgatcactgggagatgtcctccgtgatgttgatgccaaggctttggtgcgctctgactttcttctggtgtatggggatgtcatctcaaacatcaatatcaccagagcccttgaggaacacaggttgagacggaagctagaaaaaaatgtttctgtgatgacgatgatcttcaaggagtcatcccccagccacccaactcgttgccacgaagacaatgtggtagtggctgtggatagtaccacaaacagggttctccattttcagaagacccagggtctccggcgttttgcatttcctctgagcctgtttcagggcagtagtgatggagtggaggttcgatatgatttactggattgtcatatcagcatctgttctcctcaggtgataacgtggtgctggaccagacctacctgtggcagggtgttcgagtggcggctggagcacagatccatcagtctctgctttgtgacaatgctgaggtcaaggaacgagtgacactgaaaccacgctctgtcctcacttcccaggtggtcgtgggcccaaatatcacgctgcctgagggctcggtgatctctttgcaccctccagatgcagaggaagatgaagatgatggcgagttcagtgatgattctggggctgaccaagaaaaggacaaagtgaagatgaaaggttacaatccagcagaagtaggagctgctggcaagggctacctctggaaagctgcaggcatgaacatggaggaagaggaggaactgcagcagaatctgtggggactcaagatcaacatggaagaagagagtgaaagtgaaagtgagcaaagtatggattctgaggagccggacagccggggaggctcccctcagatggatgacatcaaagtgttccagaatgaagttttaggaacactacagcggggcaaagaggagaacatttcttgtgacaatctcgtcctggaaatcaactctctcaagtaagagcagcccctccctgttctcctcggggtgatcccgggaaggtagaggctttctcgtaagtgttttgtctccaaataggaacctattccttcgacatcccaaatggaaagaccagtagtatttggagcaaggagagcattattaagttctagcctcagcatagactttctccttcctaaaccctccccttccatattgttccatccagattcctctccaatgtctatcaaagtcatagttctaagcctgctgaaaggccagtgaaggccctggtgtcaccccagtctccccacaggtatgcctataacataagtctaaaggaggtgatgcaggtactgagccacgtggtcctggagttccccctgcaacagatggattccccgcttgactcaagccgctactgtgccctgctgcttcctgtgagcaaagattggagctgagtacaagggattgggtacaggcaaaggaaatcaggagtagactgtcttgttatattgggtgtatgtcacttctggttcctttttccttgcctctggaagctggttgggctctagagcagccttggctggttcagaggggtcagattgagttcaatactgactggcctttgagactccaggatttcataccatcctaggcccacaaaggtatattcagaatggacctggacattcagactctatggcagcaatttgacccaacacaagatcagcctctggggtgggaataggtattttgaggcagcctatagcatctgatcccctttcaccttccctaaggaatctctttttcccaaaccctgtcaacaactcccaagtccctctgacataattccacagaacctgtatcatctcccttttgtccacccatgtcatcagtatggatttgcttggatgtccaggtataggtgaatgcttaggaatatactgcagctcccttctttcttccatagctgctaaaggcctggagccctgtttttaggaactacataaagcgcgcagccgaccatttggaagcgttagcagccattgaggacttcttcctagagcatgaagctcttggtatttccatggccaaggtgaatatgacctcaagccccattcttctgcacttgctttcaaacgagggttggtgacccccttgggagacataaaatagaagctaatgtgaatccagtatggaccatccactcccaatatgcttattgctagaatagtacagcttggagccggactaataaggtagccatctggggggtggtctggaaatgtgcaaagctctccccagcaatagttccagaagttagacctgccccaggagcagagcgaacagctcactcttgtccgttttggaggaggctactcagtgcatagagggatctgagggcctggtagagtatcctgctggactttccaaggcccctgaggtcccctttattggccttttgcaggtactgatggctttctaccagctggagatcctggctgaggaaacaattctgagctggttcagccaaagagatacaactgacaagggccagcagttgcgcaagaatcaacagctgcagaggttcatccagtggctaaaagaggcagaagaggagtcatctgaagatgactgaagtcacactgcctgctcctttgggtgtgattgagtgccctcctggctcctgggctgggacaagtgaggaactagctgcagagggatgagtgaccaccatccaggctgagactgaaaggagcagaggctggaactacagtattctttcccctgctagcaaccatgtgcctcccatcctgactgtggagttgggatgtggaagtggggctggaacaaagcttctgcctagggaggagctaagcaggcccggcagttggaggaaggccagaggaacagctttgtgctccggctttccctcagggaacagcagagagcagttggctctttctgctgcttgtatatgttaatattaaaagagagag

SEQ ID NO: 11758 - DNA, 9791 bp, Homo sapiens
gttctggtggccgatagcttcgatcgccgcttcttccccatctccaaggaccagcctcgggtgagcgccgcgcacgcgagcagccagagggcaggaagggtggcagggctggagcaagttctcatttcggctaactacaacagcatgcccttgaaggacctgcgtctatgctgttatcctaaaaccggatgcagagggactgtctaaaccctgatgactgctgaccaagttagtggccggcagatttgggcattcgtaatgctgtccacctcgggtttgaaaggaatgaagagagctaaatgtagaaacagcgcttgagagaagccttcacgcggggattcagtgcccctagaagaggctgcgccgcttttaaccttgccgatgacggttgcttaggtgaaaagaaacgaccttttgcctctgaaagggcggtaatatgccttaaaaagagcgggctagatctcaggcagtgtattttttttttccttccaggttctaatgatagccggtgctatctgtcgaaaggacaaaatgggtttagtggttgattgccatcagcccccgagttgtctagacaatggggtattggactcagctgggtcgttcagcagtcagttcagaaagagggaactgcattggatttaaggaaaatcctctctaattccctcgaaaaagcctaatggctgttcatttttgacaagtgacgggagatggctaacctctgacacttagaaagggatcaaggaaggaaatcttatggggaagaaggccttagcaatgcttaaatttatggaaatatgattgatttccagtattatcctttgccagcagtgaactgccattctgtcacagctctgtgtctgatacaaggcacatagattctgtacttaccatccccaaattgcaatgtctcagactcaggcttagagcatggcatgaacatcaaaggcaggaacctgtttatctttgaattggaaagatacagcaaaattacactgtttggaaatacgaatagaggagtgaaaattgttgcagtggggtacccaaagggattcgagacctcaagttttttttcatcttgtatccttcaggtcctcttgcccctggccaatgtggcattaattgactacactctggaattcctgactgccacaggtgtacaggaaacatttgtcttttgttgctggaaagctgctcaaatcaaagaacatttactgtaaggccctgcaacttttctttccatgtttcgccatctttttccagttttttcaggatgaatgtaactaaggggaaatgtgagaggggaaaaatgtgtctacttagatgtcattgtaagttctaagggtattttctacacttatcaggaggtgagcagctgaaactttgtatctgtctgtcttgggttttctgtgacaaagattaaagaataaacttgggttttttctgaatctcattataaagtttggtgccagtggactttgcttttatttaatggcttcagtatggaagttacaatgataacatctttgttttcccactgagtttctaaatcttgtttgttctcaccttcaaggatataaatgagctccttgtcatctttgtattcccactgcctagctcagtcccaagcatatagtgagcacttacatgtttgttgaaatcttgaaaactagggaatcgcattgcttatggaagtccaggatgtaaagactaggacattagcatggtctccatcagacagttcctaaatgttatatggattgcagaaggggaaagctgacgtgaagcgtgttcccaggctactttgtgtaccctaggcttcagcaggattttgagttcaaattgatgtttagggacaaggggtcaaggtatggagaggaaataaccatgtttcctaacccataaaacaagactggtgacacaggatgctgaaagcattcattatagttcataatactctttgaagttgaagacgctggcaagaacccaaaaaagccatcgagaaggactgtgagtgctgaaagggggtgaaaaatggggaaggctcaaatgatctttatgcttgatacactcattcccctcaccctcccttcctttaggaagtcaaagtggtgccgccctacatctctcaatgtggttcgaataattacatcagagctctatcgatcactgggagatgtcctccgtgatgttgatgccaaggctttggtgcgctctgactttcttctggtgtatggggatgtcatctcaaacatcaatatcaccagagcccttgaggaacacaggtcaggatgggaaaatgacaggaacaagggttaaagaccagcagagccctgagactgcttttttgcagttctgtccctcctgtcctttataggttgagacggaagctagaaaaaaatgtttctgtgatgacgatgatcttcaaggagtcatcccccagccacccaactcgttgccacgaagacaatgtggtagtggctgtggatagtaccacaaacagggttctccattttcagaagacccagggtctccggcgttttgcatttcctctggtgtgtggatatctggggtcctttgagatggggaagtgacaggcttcagtgggagaaacaaattaaagtccttgtaacttctccccacagagcctgtttcagggcagtagtgatggagtggaggttcgatatgatttactggattgtcatatcagcatctgttctcctcaggtgagctctttagggctggggctgcacacccaaagagtagaactctgtgggtctgttattgtccccttagaaggccagggtatatttcttctccctgtttattttcattatttttacttttattttttgagacagagtctcgctctgttgcccaggctggagtgcagtggtgtgatcccagctcactgcagactctgcctcctaggttcaagtgattctcctgcctcagcctcctgagtagcagggattacaggcacaccaccatgcctggctaatttttgtatttttagtagagatggggtttcaccatgttggccaggctggtctcgaactcctggtctcaagtgatctacctgtctcagcctcccaaagtgctgggattacaggcatgagccaccacacctggccttattttcatttttatttatatatattttttgagacagggtctcgctctgtggcccaggctggagcacagtggcaccatgactgctcactgcagcctcagcctcccaggttcaagggaacctcctgcctcagcctcctgagtagatggaaccacaggcatgcactaccactaatttttgtatttttttgtagagacggggttttgccatgttgtccggcctggtcacgaactcctgagctcaagcaatctgaccacctcagccttccaaaatgctgggattacaggcatgagccaccagttttttttgttgttgttgttgttattgttgttttgagatggagcctcgctctgtcgcccaggctggagtgcagtggcatgatctcagcttactgcagcctccacctcctgggttccagtgattctcctgcctcagcctctcaagtagctgggactacaggtacgcaccaccacatccggctattttttgtatttttcagtagagatggggtttcaccatattggccaggctggtctctaactcctgacctcaggtgatcctcccgccttggcctcccaaagtgctgcaatcacaggtgtgagcctctgcacccagcattttttttttttttttttttttttttttgagtcggagtttcactcttgttgcccaggctggatgcaatggtgcgatctcagctcactgcaacctccacctcccaggttcaagcaattcccctgcctcagcctcccaaatagctgggattgcaggcatgtgccaccacacccagctaatttttgtatttttagtagagacgaggttttaccatgttggtcaggctggtctcgaactcccaacctcaggtgatctgcctgcctcggcctcccaaagtgctggcattacgggcatgagccactgcacctggccttttttttttttttagaatctattgtaaagcaaagatcttgtctccagtatcccactgggagtctctttggaattctggtccatgttcagctgtcatagggtttgctaggtctctgggggattatctgtgctcctagagaatagtacttaatcctggccaagcgtggtggctcacgcttgtaatcccagcactttgggaggccgaggtgagtggatcatgaggtcaggagttcaagaccagcctgaccaacacagtgaaatcccatctctactaaaaaataaaaatacaaaaattagctgggcgtggtggcggacgcttgtaatcccagctacttgggaggctgaggcacaagaatcactttaacccaggaggtggaggttgcagtgagccgagatcatgcaactgcactccagcctgggcaacagagctagacttgtctcaaaaaaaaaaaaaaaagaatagtacttaattctagcccactccacttcccttccacaggtggcacaactctttacagacaactttgactaccaaactcgagatgactttgtgcgaggtctcttagtgaatgaggaggtgagaaaagtcttccaatgcctctttaggagagaggagaaggctatgattgtatctcatgctggtaacttttgatcttttttgtattttattgaggcttaggagggaggaaaagcaggggacaggaggaacagtacacaaagaagaatctttgtggcagtgagaggcagaggggaacttaaaaggattagaaaagttgtacttgggggcattcttcctgtctttcttgcttaggtgacctccctttccttctcattcagatcctagggaaccagatccacatgcacgtaacagctaaggaatatggtgcccgtgtctccaacctacacatgtactcagctgtctgtgctgacgtcatccgccgatgggtctaccctctcaccccagaggcgaacttcactgacagcaccacccagagctgcactcattcccggcacaacatctaccgagggcctgaggtcagcctgggccatggcagcatcctagaggaaaatgtgctcctgggctctggcactgtcattggcagcaattgctttatcaccaacagtgtcattggccccggctgccacattggtgagcacaggtggggaatcaagccaactatcctaggaacaggaacctgggggggccacgtctccagaaacacaagggatggctacacaagggacagtccctgggaataaggaactatagagcggctacctcaggaaaggaggaaacagggatttgaaaacagcgataccttaatttgtagcctgtgggcctctcattggatgactcttcacattccagggtaccctgtagtcacattcaggagcaagtagataattaacatgcagtaacaacatctatttagcacattacagtttacaaagggcttttatatacattgttacatttaatcttcataatttacaaataaacaggctcaacaagattttcttgcccaaggtcattggtaataatggtgggacctgaatctgggtattctgaatgtaagtccagtgttcttttgagtctaccataactgcctggttggcctcttggtatctcattttggttgcaggagtgtgatgcgtctaatagtactgcccctttccaagaacaacagtaaggctcagattctaggggctgagcgtggtggctcatgcttgtaatcctagcacactgggaagccatggtgggaggatcgcttgagcccaggagttcaagaccagcctgggcaacatagcgacaccccttctccacaaatgatacaaaaattagctgggcatgatggcgcgtgcctgtaatctcagctattcgggaggctgaggcaggaggattacctgagcccagaggtcgagggtgcagtgagtcatgatcatactactgcactccagcctgggtgatggaatgagaccgtgtctcaaaagaaaaaaaagacttggtttctaaaatgtaccagaagaggtggaattatttggttctgcttgtaggcgtggatatgattctaataaggttttttgagttcagagggtccccagaaatcctgaaggttctcgggttcttaagctctgtgtgtagtctataattgttgtaaacttggtgaagtatcttctcaggcctgggcttagggggtgagtgggtgtttctggtgacttgcgggatggggaatgagagctaggtgggagctgtgctggtgtcagtcagccctgtcctctatgaagggctctgctctgcggttggaaccctgagttacccagaggtcttcccatcctgagccaggtgataacgtggtgctggaccagacctacctgtggcagggtgttcgagtggcggctggagcacagatccatcagtctctgctttgtgacaatgctgaggtcaaggaacgagtgacactgaaaccacgctctgtcctcacttcccaggtgagacctgatctatactgtgcacaggccctgaattgcatggcagtcacactgagccagaaggggcattatttccacccataatcctgtctaaaaaagttgctctcattatcaggatgcacttttcctccacaccctaatggttctgtgttttttttccccttaggtggtcgtgggcccaaatatcacgctgcctgagggctcggtgatctctttgcaccctccagatgcagaggaagatgaagatgatggcgagttcagtgatgattctggggctgaccaagaaaaggacaaagtgaagatgaaaggtgtgagactcaacaggtgtggggcatctgtgtgtctcgctgcctcatagaagaaccagtgtttcctcctggagggattggtgcttccgccgggccctctctatagatcattgccttttccaggttacaatccagcagaagtaggagctgctggcaagggctacctctggaaagctgcaggcatgaacatggaggaagaggaggaactgcagcagaatctgtggggtgagctaggcctgatgcctgcccttctcctcctgaatcggaatattttgaaggataatgaatacttcagagtcacattacttattcactcctttattcaggcagacagggcaggtatattgctctctgtcaatgactctttttttctttttcctcacccattatggcttctcaggactcaagatcaacatggaagaagagagtgaaagtgaaagtgagcaaagtatggattctgaggagccggacagccggggaggctcccctcagatggatgacatcaaaggtgagtggcaggggagaaatgcgctggaccagtttattctctgcctggatcaactagccagaggcttacgttcctcagaaagggtttggtatcgagtcaagactagatgacttagagcattctgaatgatgttggcccatgaacttatccttgctttgatttcagtgttccagaatgaagttttaggaacactacagcggggcaaagaggagaacatttcttgtgacaatctcgtcctggaaatcaactctctcaagtaagagcagcccctccctgttctcctcggggtgatcccgggaaggtagaggctttctcgtaagtgttttgtctccaaataggaacctattccttcgacatcccaaatggaaagaccagtagtatttggagcaaggagagcattattaagttctagcctcagcatagactttctccttcctaaaccctccccttccatattgttccatccagattcctctccaatgtctatcaaagtcatagttctaagcctgctgaaaggccagtgaaggccctggtgtcaccccagtctccccacaggtatgcctataacataagtctaaaggaggtgatgcaggtactgagccacgtggtcctggagttccccctgcaacagatggattccccgcttgactcaagccgctactgtgccctgctgcttcctgtgagcaaagattggagctgagtacaagggattgggtacaggcaaaggaaatcaggagtagactgtcttgttatattgggtgtatgtcacttctggttcctttttccttgcctctggaagctggttgggctctagagcagccttggctggttcagaggggtcagattgagttcaatactgactggcctttgagactccaggatttcataccatcctaggcccacaaaggtatattcagaatggacctggacattcagactctatggcagcaatttgacccaacacaagatcagcctctggggtgggaataggtattttgaggcagcctatagcatctgatcccctttcaccttccctaaggaatctctttttcccaaaccctgtcaacaactcccaagtccctctgacataattccacagaacctgtatcatctcccttttgtccacccatgtcatcagtatggatttgcttggatgtccaggtataggtgaatgcttaggaatatactgcagctcccttctttcttccatagctgctaaaggcctggagccctgtttttaggaactacataaagcgcgcagccgaccatttggaagcgttagcagccattgaggacttcttcctagagcatgaagctcttggtatttccatggccaaggtgaatatgacctcaagccccattcttctgcacttgctttcaaacgagggttggtgacccccttgggagacataaaatagaagctaatgtgaatccagtatggaccatccactcccaatatgcttattgctagaatagtacagcttggagccggactaataaggtagccatctggggggtggtctggaaatgtgcaaagctctccccagcaatagttccagaagttagacctgccccaggagcagagcgaacagctcactcttgtccgttttggaggaggctactcagtgcatagagggatctgagggcctggtagagtatcctgctggactttccaaggcccctgaggtcccctttattggccttttgcaggtactgatggctttctaccagctggagatcctggctgaggaaacaattctgagctggttcagccaaagagatacaactgacaagggccagcagttgcgcaagaatcaacaggtgcgtcaggctgtcctcctctcgccaagatggttatctcattcccaggtcctggcccctagactctagggtggttggtttctggggctctggttgttagagctgtttatctgccgaggggagcaggagagttatgtgcacctcccccagccgatctctcctctgcttctttacagctgcagaggttcatccagtggctaaaagaggcagaagaggagtcatctgaagatgactgaagtcacactgcctgctcctttgggtgtgattgagtgccctcctggctcctgggctgggacaagtgaggaactagctgcagagggatgagtgaccaccatccaggctgagactgaaaggagcagaggctggaactacagtattctttcccctgctagcaaccatgtgcctcccatcctgactgtggagttgggatgtggaagtggggctggaacaaagcttctgcctagggaggagctaagcaggcccggcagttggaggaaggccagaggaacagctttgtgctccggctttccctcagggaacagcagagagcagttggctctttctgctgcttgtatatgttaatattaaaagagagagtggtgta

SEQ ID NO: 11759 - DNA, 3298 bp, Homo sapiens
gttctggtggccgatagcttcgatcgccgcttcttccccatctccaaggaccagcctcgggtcctcttgcccctggccaatgtggcattaattgactacactctggaattcctgactgccacaggtgtacaggaaacatttgtcttttgttgctggaaagctgctcaaatcaaagaacatttactgtaaggccctgcaacttttctttccatgtttcgccatctttttccagttttttcaggatgaatgtaactaaggggaaatgtgagaggggaaaaatgtgtctacttagatgtcattgtaagttctaagggtattttctacacttatcaggaggtgagcagctgaaactttgtatctgtctgtcttgggttttctgtgacaaagattaaagaataaacttgggttttttctgaatctcattataaagtttggtgccagtggactttgcttttatttaatggcttcagtatggaagttacaatgataacatctttgttttcccactgagtttctaaatcttgtttgttctcaccttcaaggatataaatgagctccttgtcatctttgtattcccactgcctagctcagtcccaagcatatagtgagcacttacatgtttgttgaaatcttgaaaactagggaatcgcattgcttatggaagtccaggatgtaaagactaggacattagcatggtctccatcagacagttcctaaatgttatatggattgcagaaggggaaagctgacgtgaagcgtgttcccaggctactttgtgtaccctaggcttcagcaggattttgagttcaaattgatgtttagggacaaggggtcaaggtatggagaggaaataaccatgtttcctaacccataaaacaagactggtgacacaggatgctgaaagcattcattatagttcataatactctttgaagttgaagacgctggcaagaacccaaaaaagccatcgagaaggactgtgagtgctgaaagggggtgaaaaatggggaaggctcaaatgatctttatgcttgatacactcattcccctcaccctcccttcctttaggaagtcaaagtggtgccgccctacatctctcaatgtggttcgaataattacatcagagctctatcgatcactgggagatgtcctccgtgatgttgatgccaaggctttggtgcgctctgactttcttctggtgtatggggatgtcatctcaaacatcaatatcaccagagcccttgaggaacacaggttgagacggaagctagaaaaaaatgtttctgtgatgacgatgatcttcaaggagtcatcccccagccacccaactcgttgccacgaagacaatgtggtagtggctgtggatagtaccacaaacagggttctccattttcagaagacccagggtctccggcgttttgcatttcctctgagcctgtttcagggcagtagtgatggagtggaggttcgatatgatttactggattgtcatatcagcatctgttctcctcaggtggcacaactctttacagacaactttgactaccaaactcgagatgactttgtgcgaggtctcttagtgaatgaggagatcctagggaaccagatccacatgcacgtaacagctaaggaatatggtgcccgtgtctccaacctacacatgtactcagctgtctgtgctgacgtcatccgccgatgggtctaccctctcaccccagaggcgaacttcactgacagcaccacccagagctgcactcattcccggcacaacatctaccgagggcctgaggtcagcctgggccatggcagcatcctagaggaaaatgtgctcctgggctctggcactgtcattggcagcaattgctttatcaccaacagtgtcattggccccggctgccacattggtgataacgtggtgctggaccagacctacctgtggcagggtgttcgagtggcggctggagcacagatccatcagtctctgctttgtgacaatgctgaggtcaaggaacgagtgacactgaaaccacgctctgtcctcacttcccaggtggtcgtgggcccaaatatcacgctgcctgagggctcggtgatctctttgcaccctccagatgcagaggaagatgaagatgatggcgagttcagtgatgattctggggctgaccaagaaaaggacaaagtgaagatgaaaggtgtgagactcaacaggttacaatccagcagaagtaggagctgctggcaagggctacctctggaaagctgcaggcatgaacatggaggaagaggaggaactgcagcagaatctgtggggactcaagatcaacatggaagaagagagtgaaagtgaaagtgagcaaagtatggattctgaggagccggacagccggggaggctcccctcagatggatgacatcaaagtgttccagaatgaagttttaggaacactacagcggggcaaagaggagaacatttcttgtgacaatctcgtcctggaaatcaactctctcaagtatgcctataacataagtctaaaggaggtgatgcaggtactgagccacgtggtcctggagttccccctgcaacagatggattccccgcttgactcaagccgctactgtgccctgctgcttcctctgctaaaggcctggagccctgtttttaggaactacataaagcgcgcagccgaccatttggaagcgttagcagccattgaggacttcttcctagagcatgaagctcttggtatttccatggccaaggtactgatggctttctaccagctggagatcctggctgaggaaacaattctgagctggttcagccaaagagatacaactgacaagggccagcagttgcgcaagaatcaacagctgcagaggttcatccagtggctaaaagaggcagaagaggagtcatctgaagatgactgaagtcacactgcctgctcctttgggtgtgattgagtgccctcctggctcctgggctgggacaagtgaggaactagctgcagagggatgagtgaccaccatccaggctgagactgaaaggagcagaggctggaactacagtattctttcccctgctagcaaccatgtgcctcccatcctgactgtggagttgggatgtggaagtggggctggaacaaagcttctgcctagggaggagctaagcaggcccggcagttggaggaaggccagaggaacagctttgtgctccggctttccctcagggaacagcagagagcagttggctctttctgctgcttgtatatgttaatattaaaagagagagtggtgta

SEQ ID NO: 11760 - DNA, 10274 bp, Homo sapiens
ggccccttcgtggcgaccacaagtcctatcacgccacaagaatctcggcttgttcacctacaaatgaaggccgacgatacttgcagaccgagtctgacatctatgggaccccactcctaccctgcgcctcaggggccgggacaaccgtgacccgtaccgactcctcgcgcctccgggatcaacctcagacccctgtgggctcccggggaagacgcatgcgcactgctccctcctcgtctccttcccttcgttaattagtccatcgcatttcaagtgctggatcctttttgtcccctactgcgtgcggtggcagcttccttgcggaagtggtgaccgtgagagaagaagatggcggcccctgtagtggcgccgcctggtgtggtggttagtcgggctaacaagcgcagcggcgcggggccgggaggcagcggtggcgggggagccagaggggcggaggaggaaccgccgccgcccctacaagcagttctggtggccgatagcttcgatcgccgcttcttccccatctccaaggaccagcctcgggtgagcgccgcgcacgcgagcagccagagggcaggaagggtggcagggctggagcaagttctcatttcggctaactacaacagcatgcccttgaaggacctgcgtctatgctgttatcctaaaaccggatgcagagggactgtctaaaccctgatgactgctgaccaagttagtggccggcagatttgggcattcgtaatgctgtccacctcgggtttgaaaggaatgaagagagctaaatgtagaaacagcgcttgagagaagccttcacgcggggattcagtgcccctagaagaggctgcgccgcttttaaccttgccgatgacggttgcttaggtgaaaagaaacgaccttttgcctctgaaagggcggtaatatgccttaaaaagagcgggctagatctcaggcagtgtattttttttttccttccaggttctaatgatagccggtgctatctgtcgaaaggacaaaatgggtttagtggttgattgccatcagcccccgagttgtctagacaatggggtattggactcagctgggtcgttcagcagtcagttcagaaagagggaactgcattggatttaaggaaaatcctctctaattccctcgaaaaagcctaatggctgttcatttttgacaagtgacgggagatggctaacctctgacacttagaaagggatcaaggaaggaaatcttatggggaagaaggccttagcaatgcttaaatttatggaaatatgattgatttccagtattatcctttgccagcagtgaactgccattctgtcacagctctgtgtctgatacaaggcacatagattctgtacttaccatccccaaattgcaatgtctcagactcaggcttagagcatggcatgaacatcaaaggcaggaacctgtttatctttgaattggaaagatacagcaaaattacactgtttggaaatacgaatagaggagtgaaaattgttgcagtggggtacccaaagggattcgagacctcaagttttttttcatcttgtatccttcaggtcctcttgcccctggccaatgtggcattaattgactacactctggaattcctgactgccacaggtgtacaggaaacatttgtcttttgttgctggaaagctgctcaaatcaaagaacatttactgtaaggccctgcaacttttctttccatgtttcgccatctttttccagttttttcaggatgaatgtaactaaggggaaatgtgagaggggaaaaatgtgtctacttagatgtcattgtaagttctaagggtattttctacacttatcaggaggtgagcagctgaaactttgtatctgtctgtcttgggttttctgtgacaaagattaaagaataaacttgggttttttctgaatctcattataaagtttggtgccagtggactttgcttttatttaatggcttcagtatggaagttacaatgataacatctttgttttcccactgagtttctaaatcttgtttgttctcaccttcaaggatataaatgagctccttgtcatctttgtattcccactgcctagctcagtcccaagcatatagtgagcacttacatgtttgttgaaatcttgaaaactagggaatcgcattgcttatggaagtccaggatgtaaagactaggacattagcatggtctccatcagacagttcctaaatgttatatggattgcagaaggggaaagctgacgtgaagcgtgttcccaggctactttgtgtaccctaggcttcagcaggattttgagttcaaattgatgtttagggacaaggggtcaaggtatggagaggaaataaccatgtttcctaacccataaaacaagactggtgacacaggatgctgaaagcattcattatagttcataatactctttgaagttgaagacgctggcaagaacccaaaaaagccatcgagaaggactgtgagtgctgaaagggggtgaaaaatggggaaggctcaaatgatctttatgcttgatacactcattcccctcaccctcccttcctttaggaagtcaaagtggtgccgccctacatctctcaatgtggttcgaataattacatcagagctctatcgatcactgggagatgtcctccgtgatgttgatgccaaggctttggtgcgctctgactttcttctggtgtatggggatgtcatctcaaacatcaatatcaccagagcccttgaggaacacaggtcaggatgggaaaatgacaggaacaagggttaaagaccagcagagccctgagactgcttttttgcagttctgtccctcctgtcctttataggttgagacggaagctagaaaaaaatgtttctgtgatgacgatgatcttcaaggagtcatcccccagccacccaactcgttgccacgaagacaatgtggtagtggctgtggatagtaccacaaacagggttctccattttcagaagacccagggtctccggcgttttgcatttcctctggtgtgtggatatctggggtcctttgagatggggaagtgacaggcttcagtgggagaaacaaattaaagtccttgtaacttctccccacagagcctgtttcagggcagtagtgatggagtggaggttcgatatgatttactggattgtcatatcagcatctgttctcctcaggtgagctctttagggctggggctgcacacccaaagagtagaactctgtgggtctgttattgtccccttagaaggccagggtatatttcttctccctgtttattttcattatttttacttttattttttgagacagagtctcgctctgttgcccaggctggagtgcagtggtgtgatcccagctcactgcagactctgcctcctaggttcaagtgattctcctgcctcagcctcctgagtagcagggattacaggcacaccaccatgcctggctaatttttgtatttttagtagagatggggtttcaccatgttggccaggctggtctcgaactcctggtctcaagtgatctacctgtctcagcctcccaaagtgctgggattacaggcatgagccaccacacctggccttattttcatttttatttatatatattttttgagacagggtctcgctctgtggcccaggctggagcacagtggcaccatgactgctcactgcagcctcagcctcccaggttcaagggaacctcctgcctcagcctcctgagtagatggaaccacaggcatgcactaccactaatttttgtatttttttgtagagacggggttttgccatgttgtccggcctggtcacgaactcctgagctcaagcaatctgaccacctcagccttccaaaatgctgggattacaggcatgagccaccagttttttttgttgttgttgttgttattgttgttttgagatggagcctcgctctgtcgcccaggctggagtgcagtggcatgatctcagcttactgcagcctccacctcctgggttccagtgattctcctgcctcagcctctcaagtagctgggactacaggtacgcaccaccacatccggctattttttgtatttttcagtagagatggggtttcaccatattggccaggctggtctctaactcctgacctcaggtgatcctcccgccttggcctcccaaagtgctgcaatcacaggtgtgagcctctgcacccagcattttttttttttttttttttttttttttgagtcggagtttcactcttgttgcccaggctggatgcaatggtgcgatctcagctcactgcaacctccacctcccaggttcaagcaattcccctgcctcagcctcccaaatagctgggattgcaggcatgtgccaccacacccagctaatttttgtatttttagtagagacgaggttttaccatgttggtcaggctggtctcgaactcccaacctcaggtgatctgcctgcctcggcctcccaaagtgctggcattacgggcatgagccactgcacctggccttttttttttttttagaatctattgtaaagcaaagatcttgtctccagtatcccactgggagtctctttggaattctggtccatgttcagctgtcatagggtttgctaggtctctgggggattatctgtgctcctagagaatagtacttaatcctggccaagcgtggtggctcacgcttgtaatcccagcactttgggaggccgaggtgagtggatcatgaggtcaggagttcaagaccagcctgaccaacacagtgaaatcccatctctactaaaaaataaaaatacaaaaattagctgggcgtggtggcggacgcttgtaatcccagctacttgggaggctgaggcacaagaatcactttaacccaggaggtggaggttgcagtgagccgagatcatgcaactgcactccagcctgggcaacagagctagacttgtctcaaaaaaaaaaaaaaaagaatagtacttaattctagcccactccacttcccttccacaggtggcacaactctttacagacaactttgactaccaaactcgagatgactttgtgcgaggtctcttagtgaatgaggaggtgagaaaagtcttccaatgcctctttaggagagaggagaaggctatgattgtatctcatgctggtaacttttgatcttttttgtattttattgaggcttaggagggaggaaaagcaggggacaggaggaacagtacacaaagaagaatctttgtggcagtgagaggcagaggggaacttaaaaggattagaaaagttgtacttgggggcattcttcctgtctttcttgcttaggtgacctccctttccttctcattcagatcctagggaaccagatccacatgcacgtaacagctaaggaatatggtgcccgtgtctccaacctacacatgtactcagctgtctgtgctgacgtcatccgccgatgggtctaccctctcaccccagaggcgaacttcactgacagcaccacccagagctgcactcattcccggcacaacatctaccgagggcctgaggtcagcctgggccatggcagcatcctagaggaaaatgtgctcctgggctctggcactgtcattggcagcaattgctttatcaccaacagtgtcattggccccggctgccacattggtgagcacaggtggggaatcaagccaactatcctaggaacaggaacctgggggggccacgtctccagaaacacaagggatggctacacaagggacagtccctgggaataaggaactatagagcggctacctcaggaaaggaggaaacagggatttgaaaacagcgataccttaatttgtagcctgtgggcctctcattggatgactcttcacattccagggtaccctgtagtcacattcaggagcaagtagataattaacatgcagtaacaacatctatttagcacattacagtttacaaagggcttttatatacattgttacatttaatcttcataatttacaaataaacaggctcaacaagattttcttgcccaaggtcattggtaataatggtgggacctgaatctgggtattctgaatgtaagtccagtgttcttttgagtctaccataactgcctggttggcctcttggtatctcattttggttgcaggagtgtgatgcgtctaatagtactgcccctttccaagaacaacagtaaggctcagattctaggggctgagcgtggtggctcatgcttgtaatcctagcacactgggaagccatggtgggaggatcgcttgagcccaggagttcaagaccagcctgggcaacatagcgacaccccttctccacaaatgatacaaaaattagctgggcatgatggcgcgtgcctgtaatctcagctattcgggaggctgaggcaggaggattacctgagcccagaggtcgagggtgcagtgagtcatgatcatactactgcactccagcctgggtgatggaatgagaccgtgtctcaaaagaaaaaaaagacttggtttctaaaatgtaccagaagaggtggaattatttggttctgcttgtaggcgtggatatgattctaataaggttttttgagttcagagggtccccagaaatcctgaaggttctcgggttcttaagctctgtgtgtagtctataattgttgtaaacttggtgaagtatcttctcaggcctgggcttagggggtgagtgggtgtttctggtgacttgcgggatggggaatgagagctaggtgggagctgtgctggtgtcagtcagccctgtcctctatgaagggctctgctctgcggttggaaccctgagttacccagaggtcttcccatcctgagccaggtgataacgtggtgctggaccagacctacctgtggcagggtgttcgagtggcggctggagcacagatccatcagtctctgctttgtgacaatgctgaggtcaaggaacgagtgacactgaaaccacgctctgtcctcacttcccaggtgagacctgatctatactgtgcacaggccctgaattgcatggcagtcacactgagccagaaggggcattatttccacccataatcctgtctaaaaaagttgctctcattatcaggatgcacttttcctccacaccctaatggttctgtgttttttttccccttaggtggtcgtgggcccaaatatcacgctgcctgagggctcggtgatctctttgcaccctccagatgcagaggaagatgaagatgatggcgagttcagtgatgattctggggctgaccaagaaaaggacaaagtgaagatgaaaggtgtgagactcaacaggtgtggggcatctgtgtgtctcgctgcctcatagaagaaccagtgtttcctcctggagggattggtgcttccgccgggccctctctatagatcattgccttttccaggttacaatccagcagaagtaggagctgctggcaagggctacctctggaaagctgcaggcatgaacatggaggaagaggaggaactgcagcagaatctgtggggtgagctaggcctgatgcctgcccttctcctcctgaatcggaatattttgaaggataatgaatacttcagagtcacattacttattcactcctttattcaggcagacagggcaggtatattgctctctgtcaatgactctttttttctttttcctcacccattatggcttctcaggactcaagatcaacatggaagaagagagtgaaagtgaaagtgagcaaagtatggattctgaggagccggacagccggggaggctcccctcagatggatgacatcaaaggtgagtggcaggggagaaatgcgctggaccagtttattctctgcctggatcaactagccagaggcttacgttcctcagaaagggtttggtatcgagtcaagactagatgacttagagcattctgaatgatgttggcccatgaacttatccttgctttgatttcagtgttccagaatgaagttttaggaacactacagcggggcaaagaggagaacatttcttgtgacaatctcgtcctggaaatcaactctctcaagtaagagcagcccctccctgttctcctcggggtgatcccgggaaggtagaggctttctcgtaagtgttttgtctccaaataggaacctattccttcgacatcccaaatggaaagaccagtagtatttggagcaaggagagcattattaagttctagcctcagcatagactttctccttcctaaaccctccccttccatattgttccatccagattcctctccaatgtctatcaaagtcatagttctaagcctgctgaaaggccagtgaaggccctggtgtcaccccagtctccccacaggtatgcctataacataagtctaaaggaggtgatgcaggtactgagccacgtggtcctggagttccccctgcaacagatggattccccgcttgactcaagccgctactgtgccctgctgcttcctgtgagcaaagattggagctgagtacaagggattgggtacaggcaaaggaaatcaggagtagactgtcttgttatattgggtgtatgtcacttctggttcctttttccttgcctctggaagctggttgggctctagagcagccttggctggttcagaggggtcagattgagttcaatactgactggcctttgagactccaggatttcataccatcctaggcccacaaaggtatattcagaatggacctggacattcagactctatggcagcaatttgacccaacacaagatcagcctctggggtgggaataggtattttgaggcagcctatagcatctgatcccctttcaccttccctaaggaatctctttttcccaaaccctgtcaacaactcccaagtccctctgacataattccacagaacctgtatcatctcccttttgtccacccatgtcatcagtatggatttgcttggatgtccaggtataggtgaatgcttaggaatatactgcagctcccttctttcttccatagctgctaaaggcctggagccctgtttttaggaactacataaagcgcgcagccgaccatttggaagcgttagcagccattgaggacttcttcctagagcatgaagctcttggtatttccatggccaaggtgaatatgacctcaagccccattcttctgcacttgctttcaaacgagggttggtgacccccttgggagacataaaatagaagctaatgtgaatccagtatggaccatccactcccaatatgcttattgctagaatagtacagcttggagccggactaataaggtagccatctggggggtggtctggaaatgtgcaaagctctccccagcaatagttccagaagttagacctgccccaggagcagagcgaacagctcactcttgtccgttttggaggaggctactcagtgcatagagggatctgagggcctggtagagtatcctgctggactttccaaggcccctgaggtcccctttattggccttttgcaggtactgatggctttctaccagctggagatcctggctgaggaaacaattctgagctggttcagccaaagagatacaactgacaagggccagcagttgcgcaagaatcaacaggtgcgtcaggctgtcctcctctcgccaagatggttatctcattcccaggtcctggcccctagactctagggtggttggtttctggggctctggttgttagagctgtttatctgccgaggggagcaggagagttatgtgcacctcccccagccgatctctcctctgcttctttacagctgcagaggttcatccagtggctaaaagaggcagaagaggagtcatctgaagatgactgaagtcacactgcctgctcctttgggtgtgattgagtgccctcctggctcctgggctgggacaagtgaggaactagctgcagagggatgagtgaccaccatccaggctgagactgaaaggagcagaggctggaactacagtattctttcccctgctagcaaccatgtgcctcccatcctgactgtggagttgggatgtggaagtggggctggaacaaagcttctgcctagggaggagctaagcaggcccggcagttggaggaaggccagaggaacagctttgtgctccggctttccctcagggaacagcagagagcagttggctctttctgctgcttgtatatgttaatattaaaagagagagtggtgta

SEQ ID NO: 11761 - DNA, 3038 bp, Homo sapiens
ggccccttcgtggcgaccacaagtcctatcacgccacaagaatctcggcttgttcacctacaaatgaaggccgacgatacttgcagaccgagtctgacatctatgggaccccactcctaccctgcgcctcaggggccgggacaaccgtgacccgtaccgactcctcgcgcctccgggatcaacctcagacccctgtgggctcccggggaagacgcatgcgcactgctccctcctcgtctccttcccttcgttaattagtccatcgcatttcaagtgctggatcctttttgtcccctactgcgtgcggtggcagcttccttgcggaagtggtgaccgtgagagaagaagatggcggcccctgtagtggcgccgcctggtgtggtggttagtcgggctaacaagcgcagcggcgcggggccgggaggcagcggtggcgggggagccagaggggcggaggaggaaccgccgccgcccctacaagcagttctggtggccgatagcttcgatcgccgcttcttccccatctccaaggaccagcctcgggtcctcttgcccctggccaatgtggcattaattgactacactctggaattcctgactgccacaggtgtacaggaaacatttgtcttttgttgctggaaagctgctcaaatcaaagaacatttactgaagtcaaagtggtgccgccctacatctctcaatgtggttcgaataattacatcagagctctatcgatcactgggagatgtcctccgtgatgttgatgccaaggctttggtgcgctctgactttcttctggtgtatggggatgtcatctcaaacatcaatatcaccagagcccttgaggaacacaggtcaggatgggaaaatgacaggaacaagggttaaagaccagcagagccctgagactgcttttttgcagttctgtccctcctgtcctttataggttgagacggaagctagaaaaaaatgtttctgtgatgacgatgatcttcaaggagtcatcccccagccacccaactcgttgccacgaagacaatgtggtagtggctgtggatagtaccacaaacagggttctccattttcagaagacccagggtctccggcgttttgcatttcctctgagcctgtttcagggcagtagtgatggagtggaggttcgatatgatttactggattgtcatatcagcatctgttctcctcaggtggcacaactctttacagacaactttgactaccaaactcgagatgactttgtgcgaggtctcttagtgaatgaggaggtgagaaaagtcttccaatgcctctttaggagagaggagaaggctatgattgtatctcatgctgatcctagggaaccagatccacatgcacgtaacagctaaggaatatggtgcccgtgtctccaacctacacatgtactcagctgtctgtgctgacgtcatccgccgatgggtctaccctctcaccccagaggcgaacttcactgacagcaccacccagagctgcactcattcccggcacaacatctaccgagggcctgaggtcagcctgggccatggcagcatcctagaggaaaatgtgctcctgggctctggcactgtcattggcagcaattgctttatcaccaacagtgtcattggccccggctgccacattggtgataacgtggtgctggaccagacctacctgtggcagggtgttcgagtggcggctggagcacagatccatcagtctctgctttgtgacaatgctgaggtcaaggaacgagtgacactgaaaccacgctctgtcctcacttcccaggtggtcgtgggcccaaatatcacgctgcctgagggctcggtgatctctttgcaccctccagatgcagaggaagatgaagatgatggcgagttcagtgatgattctggggctgaccaagaaaaggacaaagtgaagatgaaaggttacaatccagcagaagtaggagctgctggcaagggctacctctggaaagctgcaggcatgaacatggaggaagaggaggaactgcagcagaatctgtggggactcaagatcaacatggaagaagagagtgaaagtgaaagtgagcaaagtatggattctgaggagccggacagccggggaggctcccctcagatggatgacatcaaagtgttccagaatgaagttttaggaacactacagcggggcaaagaggagaacatttcttgtgacaatctcgtcctggaaatcaactctctcaagtatgcctataacataagtctaaaggaggtgatgcaggtactgagccacgtggtcctggagttccccctgcaacagatggattccccgcttgactcaagccgctactgtgccctgctgcttcctctgctaaaggcctggagccctgtttttaggaactacataaagcgcgcagccgaccatttggaagcgttagcagccattgaggacttcttcctagagcatgaagctcttggtatttccatggccaaggtactgatggctttctaccagctggagatcctggctgaggaaacaattctgagctggttcagccaaagagatacaactgacaagggccagcagttgcgcaagaatcaacagctgcagaggttcatccagtggctaaaagaggcagaagaggagtcatctgaagatgactgaagtcacactgcctgctcctttgggtgtgattgagtgccctcctggctcctgggctgggacaagtgaggaactagctgcagagggatgagtgaccaccatccaggctgagactgaaaggagcagaggctggaactacagtattctttcccctgctagcaaccatgtgcctcccatcctgactgtggagttgggatgtggaagtggggctggaacaaagcttctgcctagggaggagctaagcaggcccggcagttggaggaaggccagaggaacagctttgtgctccggctttccctcagggaacagcagagagcagttggctctttctgctgcttgtatatgttaatattaaaagagagagtggtgta

SEQ ID NO: 11762 - DNA, 9904 bp, Homo sapiens
gcggcccctgtagtggcgccgcctggtgtggtggttagtcgggctaacaagcgcagcggcgcggggccgggaggcagcggtggcgggggagccagaggggcggaggaggaaccgccgccgcccctacaagcagttctggtggccgatagcttcgatcgccgcttcttccccatctccaaggaccagcctcgggtgagcgccgcgcacgcgagcagccagagggcaggaagggtggcagggctggagcaagttctcatttcggctaactacaacagcatgcccttgaaggacctgcgtctatgctgttatcctaaaaccggatgcagagggactgtctaaaccctgatgactgctgaccaagttagtggccggcagatttgggcattcgtaatgctgtccacctcgggtttgaaaggaatgaagagagctaaatgtagaaacagcgcttgagagaagccttcacgcggggattcagtgcccctagaagaggctgcgccgcttttaaccttgccgatgacggttgcttaggtgaaaagaaacgaccttttgcctctgaaagggcggtaatatgccttaaaaagagcgggctagatctcaggcagtgtattttttttttccttccaggttctaatgatagccggtgctatctgtcgaaaggacaaaatgggtttagtggttgattgccatcagcccccgagttgtctagacaatggggtattggactcagctgggtcgttcagcagtcagttcagaaagagggaactgcattggatttaaggaaaatcctctctaattccctcgaaaaagcctaatggctgttcatttttgacaagtgacgggagatggctaacctctgacacttagaaagggatcaaggaaggaaatcttatggggaagaaggccttagcaatgcttaaatttatggaaatatgattgatttccagtattatcctttgccagcagtgaactgccattctgtcacagctctgtgtctgatacaaggcacatagattctgtacttaccatccccaaattgcaatgtctcagactcaggcttagagcatggcatgaacatcaaaggcaggaacctgtttatctttgaattggaaagatacagcaaaattacactgtttggaaatacgaatagaggagtgaaaattgttgcagtggggtacccaaagggattcgagacctcaagttttttttcatcttgtatccttcaggtcctcttgcccctggccaatgtggcattaattgactacactctggaattcctgactgccacaggtgtacaggaaacatttgtcttttgttgctggaaagctgctcaaatcaaagaacatttactgtaaggccctgcaacttttctttccatgtttcgccatctttttccagttttttcaggatgaatgtaactaaggggaaatgtgagaggggaaaaatgtgtctacttagatgtcattgtaagttctaagggtattttctacacttatcaggaggtgagcagctgaaactttgtatctgtctgtcttgggttttctgtgacaaagattaaagaataaacttgggttttttctgaatctcattataaagtttggtgccagtggactttgcttttatttaatggcttcagtatggaagttacaatgataacatctttgttttcccactgagtttctaaatcttgtttgttctcaccttcaaggatataaatgagctccttgtcatctttgtattcccactgcctagctcagtcccaagcatatagtgagcacttacatgtttgttgaaatcttgaaaactagggaatcgcattgcttatggaagtccaggatgtaaagactaggacattagcatggtctccatcagacagttcctaaatgttatatggattgcagaaggggaaagctgacgtgaagcgtgttcccaggctactttgtgtaccctaggcttcagcaggattttgagttcaaattgatgtttagggacaaggggtcaaggtatggagaggaaataaccatgtttcctaacccataaaacaagactggtgacacaggatgctgaaagcattcattatagttcataatactctttgaagttgaagacgctggcaagaacccaaaaaagccatcgagaaggactgtgagtgctgaaagggggtgaaaaatggggaaggctcaaatgatctttatgcttgatacactcattcccctcaccctcccttcctttaggaagtcaaagtggtgccgccctacatctctcaatgtggttcgaataattacatcagagctctatcgatcactgggagatgtcctccgtgatgttgatgccaaggctttggtgcgctctgactttcttctggtgtatggggatgtcatctcaaacatcaatatcaccagagcccttgaggaacacaggtcaggatgggaaaatgacaggaacaagggttaaagaccagcagagccctgagactgcttttttgcagttctgtccctcctgtcctttataggttgagacggaagctagaaaaaaatgtttctgtgatgacgatgatcttcaaggagtcatcccccagccacccaactcgttgccacgaagacaatgtggtagtggctgtggatagtaccacaaacagggttctccattttcagaagacccagggtctccggcgttttgcatttcctctggtgtgtggatatctggggtcctttgagatggggaagtgacaggcttcagtgggagaaacaaattaaagtccttgtaacttctccccacagagcctgtttcagggcagtagtgatggagtggaggttcgatatgatttactggattgtcatatcagcatctgttctcctcaggtgagctctttagggctggggctgcacacccaaagagtagaactctgtgggtctgttattgtccccttagaaggccagggtatatttcttctccctgtttattttcattatttttacttttattttttgagacagagtctcgctctgttgcccaggctggagtgcagtggtgtgatcccagctcactgcagactctgcctcctaggttcaagtgattctcctgcctcagcctcctgagtagcagggattacaggcacaccaccatgcctggctaatttttgtatttttagtagagatggggtttcaccatgttggccaggctggtctcgaactcctggtctcaagtgatctacctgtctcagcctcccaaagtgctgggattacaggcatgagccaccacacctggccttattttcatttttatttatatatattttttgagacagggtctcgctctgtggcccaggctggagcacagtggcaccatgactgctcactgcagcctcagcctcccaggttcaagggaacctcctgcctcagcctcctgagtagatggaaccacaggcatgcactaccactaatttttgtatttttttgtagagacggggttttgccatgttgtccggcctggtcacgaactcctgagctcaagcaatctgaccacctcagccttccaaaatgctgggattacaggcatgagccaccagttttttttgttgttgttgttgttattgttgttttgagatggagcctcgctctgtcgcccaggctggagtgcagtggcatgatctcagcttactgcagcctccacctcctgggttccagtgattctcctgcctcagcctctcaagtagctgggactacaggtacgcaccaccacatccggctattttttgtatttttcagtagagatggggtttcaccatattggccaggctggtctctaactcctgacctcaggtgatcctcccgccttggcctcccaaagtgctgcaatcacaggtgtgagcctctgcacccagcattttttttttttttttttttttttttttgagtcggagtttcactcttgttgcccaggctggatgcaatggtgcgatctcagctcactgcaacctccacctcccaggttcaagcaattcccctgcctcagcctcccaaatagctgggattgcaggcatgtgccaccacacccagctaatttttgtatttttagtagagacgaggttttaccatgttggtcaggctggtctcgaactcccaacctcaggtgatctgcctgcctcggcctcccaaagtgctggcattacgggcatgagccactgcacctggccttttttttttttttagaatctattgtaaagcaaagatcttgtctccagtatcccactgggagtctctttggaattctggtccatgttcagctgtcatagggtttgctaggtctctgggggattatctgtgctcctagagaatagtacttaatcctggccaagcgtggtggctcacgcttgtaatcccagcactttgggaggccgaggtgagtggatcatgaggtcaggagttcaagaccagcctgaccaacacagtgaaatcccatctctactaaaaaataaaaatacaaaaattagctgggcgtggtggcggacgcttgtaatcccagctacttgggaggctgaggcacaagaatcactttaacccaggaggtggaggttgcagtgagccgagatcatgcaactgcactccagcctgggcaacagagctagacttgtctcaaaaaaaaaaaaaaaagaatagtacttaattctagcccactccacttcccttccacaggtggcacaactctttacagacaactttgactaccaaactcgagatgactttgtgcgaggtctcttagtgaatgaggaggtgagaaaagtcttccaatgcctctttaggagagaggagaaggctatgattgtatctcatgctggtaacttttgatcttttttgtattttattgaggcttaggagggaggaaaagcaggggacaggaggaacagtacacaaagaagaatctttgtggcagtgagaggcagaggggaacttaaaaggattagaaaagttgtacttgggggcattcttcctgtctttcttgcttaggtgacctccctttccttctcattcagatcctagggaaccagatccacatgcacgtaacagctaaggaatatggtgcccgtgtctccaacctacacatgtactcagctgtctgtgctgacgtcatccgccgatgggtctaccctctcaccccagaggcgaacttcactgacagcaccacccagagctgcactcattcccggcacaacatctaccgagggcctgaggtcagcctgggccatggcagcatcctagaggaaaatgtgctcctgggctctggcactgtcattggcagcaattgctttatcaccaacagtgtcattggccccggctgccacattggtgagcacaggtggggaatcaagccaactatcctaggaacaggaacctgggggggccacgtctccagaaacacaagggatggctacacaagggacagtccctgggaataaggaactatagagcggctacctcaggaaaggaggaaacagggatttgaaaacagcgataccttaatttgtagcctgtgggcctctcattggatgactcttcacattccagggtaccctgtagtcacattcaggagcaagtagataattaacatgcagtaacaacatctatttagcacattacagtttacaaagggcttttatatacattgttacatttaatcttcataatttacaaataaacaggctcaacaagattttcttgcccaaggtcattggtaataatggtgggacctgaatctgggtattctgaatgtaagtccagtgttcttttgagtctaccataactgcctggttggcctcttggtatctcattttggttgcaggagtgtgatgcgtctaatagtactgcccctttccaagaacaacagtaaggctcagattctaggggctgagcgtggtggctcatgcttgtaatcctagcacactgggaagccatggtgggaggatcgcttgagcccaggagttcaagaccagcctgggcaacatagcgacaccccttctccacaaatgatacaaaaattagctgggcatgatggcgcgtgcctgtaatctcagctattcgggaggctgaggcaggaggattacctgagcccagaggtcgagggtgcagtgagtcatgatcatactactgcactccagcctgggtgatggaatgagaccgtgtctcaaaagaaaaaaaagacttggtttctaaaatgtaccagaagaggtggaattatttggttctgcttgtaggcgtggatatgattctaataaggttttttgagttcagagggtccccagaaatcctgaaggttctcgggttcttaagctctgtgtgtagtctataattgttgtaaacttggtgaagtatcttctcaggcctgggcttagggggtgagtgggtgtttctggtgacttgcgggatggggaatgagagctaggtgggagctgtgctggtgtcagtcagccctgtcctctatgaagggctctgctctgcggttggaaccctgagttacccagaggtcttcccatcctgagccaggtgataacgtggtgctggaccagacctacctgtggcagggtgttcgagtggcggctggagcacagatccatcagtctctgctttgtgacaatgctgaggtcaaggaacgagtgacactgaaaccacgctctgtcctcacttcccaggtgagacctgatctatactgtgcacaggccctgaattgcatggcagtcacactgagccagaaggggcattatttccacccataatcctgtctaaaaaagttgctctcattatcaggatgcacttttcctccacaccctaatggttctgtgttttttttccccttaggtggtcgtgggcccaaatatcacgctgcctgagggctcggtgatctctttgcaccctccagatgcagaggaagatgaagatgatggcgagttcagtgatgattctggggctgaccaagaaaaggacaaagtgaagatgaaaggtgtgagactcaacaggtgtggggcatctgtgtgtctcgctgcctcatagaagaaccagtgtttcctcctggagggattggtgcttccgccgggccctctctatagatcattgccttttccaggttacaatccagcagaagtaggagctgctggcaagggctacctctggaaagctgcaggcatgaacatggaggaagaggaggaactgcagcagaatctgtggggtgagctaggcctgatgcctgcccttctcctcctgaatcggaatattttgaaggataatgaatacttcagagtcacattacttattcactcctttattcaggcagacagggcaggtatattgctctctgtcaatgactctttttttctttttcctcacccattatggcttctcaggactcaagatcaacatggaagaagagagtgaaagtgaaagtgagcaaagtatggattctgaggagccggacagccggggaggctcccctcagatggatgacatcaaaggtgagtggcaggggagaaatgcgctggaccagtttattctctgcctggatcaactagccagaggcttacgttcctcagaaagggtttggtatcgagtcaagactagatgacttagagcattctgaatgatgttggcccatgaacttatccttgctttgatttcagtgttccagaatgaagttttaggaacactacagcggggcaaagaggagaacatttcttgtgacaatctcgtcctggaaatcaactctctcaagtaagagcagcccctccctgttctcctcggggtgatcccgggaaggtagaggctttctcgtaagtgttttgtctccaaataggaacctattccttcgacatcccaaatggaaagaccagtagtatttggagcaaggagagcattattaagttctagcctcagcatagactttctccttcctaaaccctccccttccatattgttccatccagattcctctccaatgtctatcaaagtcatagttctaagcctgctgaaaggccagtgaaggccctggtgtcaccccagtctccccacaggtatgcctataacataagtctaaaggaggtgatgcaggtactgagccacgtggtcctggagttccccctgcaacagatggattccccgcttgactcaagccgctactgtgccctgctgcttcctgtgagcaaagattggagctgagtacaagggattgggtacaggcaaaggaaatcaggagtagactgtcttgttatattgggtgtatgtcacttctggttcctttttccttgcctctggaagctggttgggctctagagcagccttggctggttcagaggggtcagattgagttcaatactgactggcctttgagactccaggatttcataccatcctaggcccacaaaggtatattcagaatggacctggacattcagactctatggcagcaatttgacccaacacaagatcagcctctggggtgggaataggtattttgaggcagcctatagcatctgatcccctttcaccttccctaaggaatctctttttcccaaaccctgtcaacaactcccaagtccctctgacataattccacagaacctgtatcatctcccttttgtccacccatgtcatcagtatggatttgcttggatgtccaggtataggtgaatgcttaggaatatactgcagctcccttctttcttccatagctgctaaaggcctggagccctgtttttaggaactacataaagcgcgcagccgaccatttggaagcgttagcagccattgaggacttcttcctagagcatgaagctcttggtatttccatggccaaggtgaatatgacctcaagccccattcttctgcacttgctttcaaacgagggttggtgacccccttgggagacataaaatagaagctaatgtgaatccagtatggaccatccactcccaatatgcttattgctagaatagtacagcttggagccggactaataaggtagccatctggggggtggtctggaaatgtgcaaagctctccccagcaatagttccagaagttagacctgccccaggagcagagcgaacagctcactcttgtccgttttggaggaggctactcagtgcatagagggatctgagggcctggtagagtatcctgctggactttccaaggcccctgaggtcccctttattggccttttgcaggtactgatggctttctaccagctggagatcctggctgaggaaacaattctgagctggttcagccaaagagatacaactgacaagggccagcagttgcgcaagaatcaacaggtgcgtcaggctgtcctcctctcgccaagatggttatctcattcccaggtcctggcccctagactctagggtggttggtttctggggctctggttgttagagctgtttatctgccgaggggagcaggagagttatgtgcacctcccccagccgatctctcctctgcttctttacagctgcagaggttcatccagtggctaaaagaggcagaagaggagtcatctgaagatgactgaagtcacactgcctgctcctttgggtgtgattgagtgccctcctggctcctgggctgggacaagtgaggaactagctgcagagggatgagtgaccaccatccaggctgagactgaaaggagcagaggctggaactacagtattctttcccctgctagcaaccatgtgcctcccatcctgactgtggagttgggatgtggaagtggggctggaacaaagcttctgcctagggaggagctaagcaggcccggcagttggaggaaggccagaggaacagctttgtgctccggctttccctcagggaacagcagagagcagttggctctttctgctgcttgtatatgttaatat

SEQ ID NO: 11763 - DNA, 3790 bp, Homo sapiens
gcggcccctgtagtggcgccgcctggtgtggtggttagtcgggctaacaagcgcagcggcgcggggccgggaggcagcggtggcgggggagccagaggggcggaggaggaaccgccgccgcccctacaagcagttctggtggccgatagcttcgatcgccgcttcttccccatctccaaggaccagcctcgggtcctcttgcccctggccaatgtggcattaattgactacactctggaattcctgactgccacaggtgtacaggaaacatttgtcttttgttgctggaaagctgctcaaatcaaagaacatttactgaagtcaaagtggtgccgccctacatctctcaatgtggttcgaataattacatcagagctctatcgatcactgggagatgtcctccgtgatgttgatgccaaggctttggtgcgctctgactttcttctggtgtatggggatgtcatctcaaacatcaatatcaccagagcccttgaggaacacaggttgagacggaagctagaaaaaaatgtttctgtgatgacgatgatcttcaaggagtcatcccccagccacccaactcgttgccacgaagacaatgtggtagtggctgtggatagtaccacaaacagggttctccattttcagaagacccagggtctccggcgttttgcatttcctctgagcctgtttcagggcagtagtgatggagtggaggttcgatatgatttactggattgtcatatcagcatctgttctcctcaggtggcacaactctttacagacaactttgactaccaaactcgagatgactttgtgcgaggtctcttagtgaatgaggaggtgagaaaagtcttccaatgcctctttaggagagaggagaaggctatgattgtatctcatgctggtaacttttgatcttttttgtattttattgaggcttaggagggaggaaaagcaggggacaggaggaacagtacacaaagaagaatctttgtggcagtgagaggcagaggggaacttaaaaggattagaaaagttgtacttgggggcattcttcctgtctttcttgcttaggtgacctccctttccttctcattcagatcctagggaaccagatccacatgcacgtaacagctaaggaatatggtgcccgtgtctccaacctacacatgtactcagctgtctgtgctgacgtcatccgccgatgggtctaccctctcaccccagaggcgaacttcactgacagcaccacccagagctgcactcattcccggcacaacatctaccgagggcctgaggtcagcctgggccatggcagcatcctagaggaaaatgtgctcctgggctctggcactgtcattggcagcaattgctttatcaccaacagtgtcattggccccggctgccacattggtgagcacaggtgataacgtggtgctggaccagacctacctgtggcagggtgttcgagtggcggctggagcacagatccatcagtctctgctttgtgacaatgctgaggtcaaggaacgagtgacactgaaaccacgctctgtcctcacttcccaggtggtcgtgggcccaaatatcacgctgcctgagggctcggtgatctctttgcaccctccagatgcagaggaagatgaagatgatggcgagttcagtgatgattctggggctgaccaagaaaaggacaaagtgaagatgaaaggttacaatccagcagaagtaggagctgctggcaagggctacctctggaaagctgcaggcatgaacatggaggaagaggaggaactgcagcagaatctgtggggactcaagatcaacatggaagaagagagtgaaagtgaaagtgagcaaagtatggattctgaggagccggacagccggggaggctcccctcagatggatgacatcaaagtgttccagaatgaagttttaggaacactacagcggggcaaagaggagaacatttcttgtgacaatctcgtcctggaaatcaactctctcaagtaagagcagcccctccctgttctcctcggggtgatcccgggaaggtagaggctttctcgtaagtgttttgtctccaaataggaacctattccttcgacatcccaaatggaaagaccagtagtatttggagcaaggagagcattattaagttctagcctcagcatagactttctccttcctaaaccctccccttccatattgttccatccagattcctctccaatgtctatcaaagtcatagttctaagcctgctgaaaggccagtgaaggccctggtgtcaccccagtctccccacaggtatgcctataacataagtctaaaggaggtgatgcaggtactgagccacgtggtcctggagttccccctgcaacagatggattccccgcttgactcaagccgctactgtgccctgctgcttcctgtgagcaaagattggagctgagtacaagggattgggtacaggcaaaggaaatcaggagtagactgtcttgttatattgggtgtatgtcacttctggttcctttttccttgcctctggaagctggttgggctctagagcagccttggctggttcagaggggtcagattgagttcaatactgactggcctttgagactccaggatttcataccatcctaggcccacaaaggtatattcagaatggacctggacattcagactctatggcagcaatttgacccaacacaagatcagcctctggggtgggaataggtattttgaggcagcctatagcatctgatcccctttcaccttccctaaggaatctctttttcccaaaccctgtcaacaactcccaagtccctctgacataattccacagaacctgtatcatctcccttttgtccacccatgtcatcagtatggatttgcttggatgtccaggtataggtgaatgcttaggaatatactgcagctcccttctttcttccatagctgctaaaggcctggagccctgtttttaggaactacataaagcgcgcagccgaccatttggaagcgttagcagccattgaggacttcttcctagagcatgaagctcttggtatttccatggccaaggtactgatggctttctaccagctggagatcctggctgaggaaacaattctgagctggttcagccaaagagatacaactgacaagggccagcagttgcgcaagaatcaacaggtgcgtcaggctgtcctcctctcgccaagatggttatctcattcccaggtcctggcccctagactctagggtggttggtttctggggctctggttgttagagctgtttatctgccgaggggagcaggagagttatgtgcacctcccccagccgatctctcctctgcttctttacagctgcagaggttcatccagtggctaaaagaggcagaagaggagtcatctgaagatgactgaagtcacactgcctgctcctttgggtgtgattgagtgccctcctggctcctgggctgggacaagtgaggaactagctgcagagggatgagtgaccaccatccaggctgagactgaaaggagcagaggctggaactacagtattctttcccctgctagcaaccatgtgcctcccatcctgactgtggagttgggatgtggaagtggggctggaacaaagcttctgcctagggaggagctaagcaggcccggcagttggaggaaggccagaggaacagctttgtgctccggctttccctcagggaacagcagagagcagttggctctttctgctgcttgtatatgttaatat

SEQ ID NO: 11764 - DNA, 8593 bp, Homo sapiens
aaacatttgtcttttgttgctggaaagctgctcaaatcaaagaacatttactgtaaggccctgcaacttttctttccatgtttcgccatctttttccagttttttcaggatgaatgtaactaaggggaaatgtgagaggggaaaaatgtgtctacttagatgtcattgtaagttctaagggtattttctacacttatcaggaggtgagcagctgaaactttgtatctgtctgtcttgggttttctgtgacaaagattaaagaataaacttgggttttttctgaatctcattataaagtttggtgccagtggactttgcttttatttaatggcttcagtatggaagttacaatgataacatctttgttttcccactgagtttctaaatcttgtttgttctcaccttcaaggatataaatgagctccttgtcatctttgtattcccactgcctagctcagtcccaagcatatagtgagcacttacatgtttgttgaaatcttgaaaactagggaatcgcattgcttatggaagtccaggatgtaaagactaggacattagcatggtctccatcagacagttcctaaatgttatatggattgcagaaggggaaagctgacgtgaagcgtgttcccaggctactttgtgtaccctaggcttcagcaggattttgagttcaaattgatgtttagggacaaggggtcaaggtatggagaggaaataaccatgtttcctaacccataaaacaagactggtgacacaggatgctgaaagcattcattatagttcataatactctttgaagttgaagacgctggcaagaacccaaaaaagccatcgagaaggactgtgagtgctgaaagggggtgaaaaatggggaaggctcaaatgatctttatgcttgatacactcattcccctcaccctcccttcctttaggaagtcaaagtggtgccgccctacatctctcaatgtggttcgaataattacatcagagctctatcgatcactgggagatgtcctccgtgatgttgatgccaaggctttggtgcgctctgactttcttctggtgtatggggatgtcatctcaaacatcaatatcaccagagcccttgaggaacacaggtcaggatgggaaaatgacaggaacaagggttaaagaccagcagagccctgagactgcttttttgcagttctgtccctcctgtcctttataggttgagacggaagctagaaaaaaatgtttctgtgatgacgatgatcttcaaggagtcatcccccagccacccaactcgttgccacgaagacaatgtggtagtggctgtggatagtaccacaaacagggttctccattttcagaagacccagggtctccggcgttttgcatttcctctggtgtgtggatatctggggtcctttgagatggggaagtgacaggcttcagtgggagaaacaaattaaagtccttgtaacttctccccacagagcctgtttcagggcagtagtgatggagtggaggttcgatatgatttactggattgtcatatcagcatctgttctcctcaggtgagctctttagggctggggctgcacacccaaagagtagaactctgtgggtctgttattgtccccttagaaggccagggtatatttcttctccctgtttattttcattatttttacttttattttttgagacagagtctcgctctgttgcccaggctggagtgcagtggtgtgatcccagctcactgcagactctgcctcctaggttcaagtgattctcctgcctcagcctcctgagtagcagggattacaggcacaccaccatgcctggctaatttttgtatttttagtagagatggggtttcaccatgttggccaggctggtctcgaactcctggtctcaagtgatctacctgtctcagcctcccaaagtgctgggattacaggcatgagccaccacacctggccttattttcatttttatttatatatattttttgagacagggtctcgctctgtggcccaggctggagcacagtggcaccatgactgctcactgcagcctcagcctcccaggttcaagggaacctcctgcctcagcctcctgagtagatggaaccacaggcatgcactaccactaatttttgtatttttttgtagagacggggttttgccatgttgtccggcctggtcacgaactcctgagctcaagcaatctgaccacctcagccttccaaaatgctgggattacaggcatgagccaccagttttttttgttgttgttgttgttattgttgttttgagatggagcctcgctctgtcgcccaggctggagtgcagtggcatgatctcagcttactgcagcctccacctcctgggttccagtgattctcctgcctcagcctctcaagtagctgggactacaggtacgcaccaccacatccggctattttttgtatttttcagtagagatggggtttcaccatattggccaggctggtctctaactcctgacctcaggtgatcctcccgccttggcctcccaaagtgctgcaatcacaggtgtgagcctctgcacccagcattttttttttttttttttttttttttttgagtcggagtttcactcttgttgcccaggctggatgcaatggtgcgatctcagctcactgcaacctccacctcccaggttcaagcaattcccctgcctcagcctcccaaatagctgggattgcaggcatgtgccaccacacccagctaatttttgtatttttagtagagacgaggttttaccatgttggtcaggctggtctcgaactcccaacctcaggtgatctgcctgcctcggcctcccaaagtgctggcattacgggcatgagccactgcacctggccttttttttttttttagaatctattgtaaagcaaagatcttgtctccagtatcccactgggagtctctttggaattctggtccatgttcagctgtcatagggtttgctaggtctctgggggattatctgtgctcctagagaatagtacttaatcctggccaagcgtggtggctcacgcttgtaatcccagcactttgggaggccgaggtgagtggatcatgaggtcaggagttcaagaccagcctgaccaacacagtgaaatcccatctctactaaaaaataaaaatacaaaaattagctgggcgtggtggcggacgcttgtaatcccagctacttgggaggctgaggcacaagaatcactttaacccaggaggtggaggttgcagtgagccgagatcatgcaactgcactccagcctgggcaacagagctagacttgtctcaaaaaaaaaaaaaaaagaatagtacttaattctagcccactccacttcccttccacaggtggcacaactctttacagacaactttgactaccaaactcgagatgactttgtgcgaggtctcttagtgaatgaggaggtgagaaaagtcttccaatgcctctttaggagagaggagaaggctatgattgtatctcatgctggtaacttttgatcttttttgtattttattgaggcttaggagggaggaaaagcaggggacaggaggaacagtacacaaagaagaatctttgtggcagtgagaggcagaggggaacttaaaaggattagaaaagttgtacttgggggcattcttcctgtctttcttgcttaggtgacctccctttccttctcattcagatcctagggaaccagatccacatgcacgtaacagctaaggaatatggtgcccgtgtctccaacctacacatgtactcagctgtctgtgctgacgtcatccgccgatgggtctaccctctcaccccagaggcgaacttcactgacagcaccacccagagctgcactcattcccggcacaacatctaccgagggcctgaggtcagcctgggccatggcagcatcctagaggaaaatgtgctcctgggctctggcactgtcattggcagcaattgctttatcaccaacagtgtcattggccccggctgccacattggtgagcacaggtggggaatcaagccaactatcctaggaacaggaacctgggggggccacgtctccagaaacacaagggatggctacacaagggacagtccctgggaataaggaactatagagcggctacctcaggaaaggaggaaacagggatttgaaaacagcgataccttaatttgtagcctgtgggcctctcattggatgactcttcacattccagggtaccctgtagtcacattcaggagcaagtagataattaacatgcagtaacaacatctatttagcacattacagtttacaaagggcttttatatacattgttacatttaatcttcataatttacaaataaacaggctcaacaagattttcttgcccaaggtcattggtaataatggtgggacctgaatctgggtattctgaatgtaagtccagtgttcttttgagtctaccataactgcctggttggcctcttggtatctcattttggttgcaggagtgtgatgcgtctaatagtactgcccctttccaagaacaacagtaaggctcagattctaggggctgagcgtggtggctcatgcttgtaatcctagcacactgggaagccatggtgggaggatcgcttgagcccaggagttcaagaccagcctgggcaacatagcgacaccccttctccacaaatgatacaaaaattagctgggcatgatggcgcgtgcctgtaatctcagctattcgggaggctgaggcaggaggattacctgagcccagaggtcgagggtgcagtgagtcatgatcatactactgcactccagcctgggtgatggaatgagaccgtgtctcaaaagaaaaaaaagacttggtttctaaaatgtaccagaagaggtggaattatttggttctgcttgtaggcgtggatatgattctaataaggttttttgagttcagagggtccccagaaatcctgaaggttctcgggttcttaagctctgtgtgtagtctataattgttgtaaacttggtgaagtatcttctcaggcctgggcttagggggtgagtgggtgtttctggtgacttgcgggatggggaatgagagctaggtgggagctgtgctggtgtcagtcagccctgtcctctatgaagggctctgctctgcggttggaaccctgagttacccagaggtcttcccatcctgagccaggtgataacgtggtgctggaccagacctacctgtggcagggtgttcgagtggcggctggagcacagatccatcagtctctgctttgtgacaatgctgaggtcaaggaacgagtgacactgaaaccacgctctgtcctcacttcccaggtgagacctgatctatactgtgcacaggccctgaattgcatggcagtcacactgagccagaaggggcattatttccacccataatcctgtctaaaaaagttgctctcattatcaggatgcacttttcctccacaccctaatggttctgtgttttttttccccttaggtggtcgtgggcccaaatatcacgctgcctgagggctcggtgatctctttgcaccctccagatgcagaggaagatgaagatgatggcgagttcagtgatgattctggggctgaccaagaaaaggacaaagtgaagatgaaaggtgtgagactcaacaggtgtggggcatctgtgtgtctcgctgcctcatagaagaaccagtgtttcctcctggagggattggtgcttccgccgggccctctctatagatcattgccttttccaggttacaatccagcagaagtaggagctgctggcaagggctacctctggaaagctgcaggcatgaacatggaggaagaggaggaactgcagcagaatctgtggggtgagctaggcctgatgcctgcccttctcctcctgaatcggaatattttgaaggataatgaatacttcagagtcacattacttattcactcctttattcaggcagacagggcaggtatattgctctctgtcaatgactctttttttctttttcctcacccattatggcttctcaggactcaagatcaacatggaagaagagagtgaaagtgaaagtgagcaaagtatggattctgaggagccggacagccggggaggctcccctcagatggatgacatcaaaggtgagtggcaggggagaaatgcgctggaccagtttattctctgcctggatcaactagccagaggcttacgttcctcagaaagggtttggtatcgagtcaagactagatgacttagagcattctgaatgatgttggcccatgaacttatccttgctttgatttcagtgttccagaatgaagttttaggaacactacagcggggcaaagaggagaacatttcttgtgacaatctcgtcctggaaatcaactctctcaagtaagagcagcccctccctgttctcctcggggtgatcccgggaaggtagaggctttctcgtaagtgttttgtctccaaataggaacctattccttcgacatcccaaatggaaagaccagtagtatttggagcaaggagagcattattaagttctagcctcagcatagactttctccttcctaaaccctccccttccatattgttccatccagattcctctccaatgtctatcaaagtcatagttctaagcctgctgaaaggccagtgaaggccctggtgtcaccccagtctccccacaggtatgcctataacataagtctaaaggaggtgatgcaggtactgagccacgtggtcctggagttccccctgcaacagatggattccccgcttgactcaagccgctactgtgccctgctgcttcctgtgagcaaagattggagctgagtacaagggattgggtacaggcaaaggaaatcaggagtagactgtcttgttatattgggtgtatgtcacttctggttcctttttccttgcctctggaagctggttgggctctagagcagccttggctggttcagaggggtcagattgagttcaatactgactggcctttgagactccaggatttcataccatcctaggcccacaaaggtatattcagaatggacctggacattcagactctatggcagcaatttgacccaacacaagatcagcctctggggtgggaataggtattttgaggcagcctatagcatctgatcccctttcaccttccctaaggaatctctttttcccaaaccctgtcaacaactcccaagtccctctgacataattccacagaacctgtatcatctcccttttgtccacccatgtcatcagtatggatttgcttggatgtccaggtataggtgaatgcttaggaatatactgcagctcccttctttcttccatagctgctaaaggcctggagccctgtttttaggaactacataaagcgcgcagccgaccatttggaagcgttagcagccattgaggacttcttcctagagcatgaagctcttggtatttccatggccaaggtgaatatgacctcaagccccattcttctgcacttgctttcaaacgagggttggtgacccccttgggagacataaaatagaagctaatgtgaatccagtatggaccatccactcccaatatgcttattgctagaatagtacagcttggagccggactaataaggtagccatctggggggtggtctggaaatgtgcaaagctctccccagcaatagttccagaagttagacctgccccaggagcagagcgaacagctcactcttgtccgttttggaggaggctactcagtgcatagagggatctgagggcctggtagagtatcctgctggactttccaaggcccctgaggtcccctttattggccttttgcaggtactgatggctttctaccagctggagatcctggctgaggaaacaattctgagctggttcagccaaagagatacaactgacaagggccagcagttgcgcaagaatcaacaggtgcgtcaggctgtcctcctctcgccaagatggttatctcattcccaggtcctggcccctagactctagggtggttggtttctggggctctggttgttagagctgtttatctgccgaggggagcaggagagttatgtgcacctcccccagccgatctctcctctgcttctttacagctgcagaggttcatccagtggctaaaagaggcagaagaggagtcatctgaagatgactgaagtcacactgcctgctcctttgggtgtgattgagtgccctcctggctcctgggctgggacaagtgaggaactagctgcagagggatgagtgaccaccatccaggctgagactgaaaggagcagaggctggaactacagtattctttcccctgctagcaaccatgtgcctcccatcctgactgtggagttgggatgtggaagtggggctggaacaaagcttctgcctagggaggagctaagcaggcccggcagttggaggaaggccagaggaacagctttgtgctccggctttccctcagggaacagcagagagcagttggctctttctgctgct

SEQ ID NO: 11765 - DNA, 2254 bp, Homo sapiens
aaacatttgtcttttgttgctggaaagctgctcaaatcaaagaacatttactgaagtcaaagtggtgccgccctacatctctcaatgtggttcgaataattacatcagagctctatcgatcactgggagatgtcctccgtgatgttgatgccaaggctttggtgcgctctgactttcttctggtgtatggggatgtcatctcaaacatcaatatcaccagagcccttgaggaacacaggttgagacggaagctagaaaaaaatgtttctgtgatgacgatgatcttcaaggagtcatcccccagccacccaactcgttgccacgaagacaatgtggtagtggctgtggatagtaccacaaacagggttctccattttcagaagacccagggtctccggcgttttgcatttcctctgtccttgtaacttctccccacagagcctgtttcagggcagtagtgatggagtggaggttcgatatgatttactggattgtcatatcagcatctgttctcctcaggtggcacaactctttacagacaactttgactaccaaactcgagatgactttgtgcgaggtctcttagtgaatgaggagatcctagggaaccagatccacatgcacgtaacagctaaggaatatggtgcccgtgtctccaacctacacatgtactcagctgtctgtgctgacgtcatccgccgatgggtctaccctctcaccccagaggcgaacttcactgacagcaccacccagagctgcactcattcccggcacaacatctaccgagggcctgaggtcagcctgggccatggcagcatcctagaggaaaatgtgctcctgggctctggcactgtcattggcagcaattgctttatcaccaacagtgtcattggccccggctgccacattggtgataacgtggtgctggaccagacctacctgtggcagggtgttcgagtggcggctggagcacagatccatcagtctctgctttgtgacaatgctgaggtcaaggaacgagtgacactgaaaccacgctctgtcctcacttcccaggtggtcgtgggcccaaatatcacgctgcctgagggctcggtgatctctttgcaccctccagatgcagaggaagatgaagatgatggcgagttcagtgatgattctggggctgaccaagaaaaggacaaagtgaagatgaaaggttacaatccagcagaagtaggagctgctggcaagggctacctctggaaagctgcaggcatgaacatggaggaagaggaggaactgcagcagaatctgtggggactcaagatcaacatggaagaagagagtgaaagtgaaagtgagcaaagtatggattctgaggagccggacagccggggaggctcccctcagatggatgacatcaaagtgttccagaatgaagttttaggaacactacagcggggcaaagaggagaacatttcttgtgacaatctcgtcctggaaatcaactctctcaagtatgcctataacataagtctaaaggaggtgatgcaggtactgagccacgtggtcctggagttccccctgcaacagatggattccccgcttgactcaagccgctactgtgccctgctgcttcctctgctaaaggcctggagccctgtttttaggaactacataaagcgcgcagccgaccatttggaagcgttagcagccattgaggacttcttcctagagcatgaagctcttggtatttccatggccaaggtactgatggctttctaccagctggagatcctggctgaggaaacaattctgagctggttcagccaaagagatacaactgacaagggccagcagttgcgcaagaatcaacagctgcagaggttcatccagtggctaaaagaggcagaagaggagtcatctgaagatgactgaagtcacactgcctgctcctttgggtgtgattgagtgccctcctggctcctgggctgggacaagtgaggaactagctgcagagggatgagtgaccaccatccaggctgagactgaaaggagcagaggctggaactacagtattctttcccctgctagcaaccatgtgcctcccatcctgactgtggagttgggatgtggaagtggggctggaacaaagcttctgcctagggaggagctaagcaggcccggcagttggaggaaggccagaggaacagctttgtgctccggctttccctcagggaacagcagagagcagttggctctttctgctgct

SEQ ID NO: 11766 - DNA, 760 bp, Homo sapiens
aatgaggaggtgagaaaagtcttccaatgcctctttaggagagaggagaaggctatgattgtatctcatgctggtaacttttgatcttttttgtattttattgaggcttaggagggaggaaaagcaggggacaggaggaacagtacacaaagaagaatctttgtggcagtgagaggcagaggggaacttaaaaggattagaaaagttgtacttgggggcattcttcctgtctttcttgcttaggtgacctccctttccttctcattcagatcctagggaaccagatccacatgcacgtaacagctaaggaatatggtgcccgtgtctccaacctacacatgtactcagctgtctgtgctgacgtcatccgccgatgggtctaccctctcaccccagaggcgaacttcactgacagcaccacccagagctgcactcattcccggcacaacatctaccgagggcctgaggtcagcctgggccatggcagcatcctagaggaaaatgtgctcctgggctctggcactgtcattggcagcaattgctttatcaccaacagtgtcattggccccggctgccacattggtgagcacaggtggggaatcaagccaactatcctaggaacaggaacctgggggggccacgtctccagaaacacaagggatggctacacaagggacagtccctgggaataaggaactatagagcggctacctcaggaaaggaggaaacagggatttgaaaacagcgataccttaatttg

SEQ ID NO: 11767 - DNA, 564 bp, Homo sapiens
aatgaggaggtgagaaaagtcttccaatgcctctttaggagagaggagaaggctatgattgtatctcatgctgatcctagggaaccagatccacatgcacgtaacagctaaggaatatggtgcccgtgtctccaacctacacatgtactcagctgtctgtgctgacgtcatccgccgatgggtctaccctctcaccccagaggcgaacttcactgacagcaccacccagagctgcactcattcccggcacaacatctaccgagggcctgaggtcagcctgggccatggcagcatcctagaggaaaatgtgctcctgggctctggcactgtcattggcagcaattgctttatcaccaacagtgtcattggccccggctgccacattggtgagcacaggtggggaatcaagccaactatcctaggaacaggaacctgggggggccacgtctccagaaacacaagggatggctacacaagggacagtccctgggaataaggaactatagagcggctacctcaggaaaggaggaaacagggatttgaaaacagcgataccttaatttg

SEQ ID NO: 11768 - DNA, 2133 bp, Homo sapiens
gatgacggttgcttaggtgaaaagaaacgaccttttgcctctgaaagggcggtaatatgccttaaaaagagcgggctagatctcaggcagtgtattttttttttccttccaggttctaatgatagccggtgctatctgtcgaaaggacaaaatgggtttagtggttgattgccatcagcccccgagttgtctagacaatggggtattggactcagctgggtcgttcagcagtcagttcagaaagagggaactgcattggatttaaggaaaatcctctctaattccctcgaaaaagcctaatggctgttcatttttgacaagtgacgggagatggctaacctctgacacttagaaagggatcaaggaaggaaatcttatggggaagaaggccttagcaatgcttaaatttatggaaatatgattgatttccagtattatcctttgccagcagtgaactgccattctgtcacagctctgtgtctgatacaaggcacatagattctgtacttaccatccccaaattgcaatgtctcagactcaggcttagagcatggcatgaacatcaaaggcaggaacctgtttatctttgaattggaaagatacagcaaaattacactgtttggaaatacgaatagaggagtgaaaattgttgcagtggggtacccaaagggattcgagacctcaagttttttttcatcttgtatccttcaggtcctcttgcccctggccaatgtggcattaattgactacactctggaattcctgactgccacaggtgtacaggaaacatttgtcttttgttgctggaaagctgctcaaatcaaagaacatttactgtaaggccctgcaacttttctttccatgtttcgccatctttttccagttttttcaggatgaatgtaactaaggggaaatgtgagaggggaaaaatgtgtctacttagatgtcattgtaagttctaagggtattttctacacttatcaggaggtgagcagctgaaactttgtatctgtctgtcttgggttttctgtgacaaagattaaagaataaacttgggttttttctgaatctcattataaagtttggtgccagtggactttgcttttatttaatggcttcagtatggaagttacaatgataacatctttgttttcccactgagtttctaaatcttgtttgttctcaccttcaaggatataaatgagctccttgtcatctttgtattcccactgcctagctcagtcccaagcatatagtgagcacttacatgtttgttgaaatcttgaaaactagggaatcgcattgcttatggaagtccaggatgtaaagactaggacattagcatggtctccatcagacagttcctaaatgttatatggattgcagaaggggaaagctgacgtgaagcgtgttcccaggctactttgtgtaccctaggcttcagcaggattttgagttcaaattgatgtttagggacaaggggtcaaggtatggagaggaaataaccatgtttcctaacccataaaacaagactggtgacacaggatgctgaaagcattcattatagttcataatactctttgaagttgaagacgctggcaagaacccaaaaaagccatcgagaaggactgtgagtgctgaaagggggtgaaaaatggggaaggctcaaatgatctttatgcttgatacactcattcccctcaccctcccttcctttaggaagtcaaagtggtgccgccctacatctctcaatgtggttcgaataattacatcagagctctatcgatcactgggagatgtcctccgtgatgttgatgccaaggctttggtgcgctctgactttcttctggtgtatggggatgtcatctcaaacatcaatatcaccagagcccttgaggaacacaggtcaggatgggaaaatgacaggaacaagggttaaagaccagcagagccctgagactgcttttttgcagttctgtccctcctgtcctttataggttgagacggaagctagaaaaaaatgtttctgtgatgacgatgatcttcaaggagtcatcccccagccacccaactcgttgccacgaagacaatgtggtagtggctgtggatagtaccacaaacagggttctccat

SEQ ID NO: 11769 - DNA, 597 bp, Homo sapiens
gatgacggttgcttaggtgaaaagaaacgaccttttgcctctgaaagggcggtcctcttgcccctggccaatgtggcattaattgactacactctggaattcctgactgccacaggtgtacaggaaacatttgtcttttgttgctggaaagctgctcaaatcaaagaacatttactactggtgacacaggatgctgaaagcattcattatagttcataatactctttgaagttgaagacgctggcaagaacccaaaaaagccatcgagaaggactgaagtcaaagtggtgccgccctacatctctcaatgtggttcgaataattacatcagagctctatcgatcactgggagatgtcctccgtgatgttgatgccaaggctttggtgcgctctgactttcttctggtgtatggggatgtcatctcaaacatcaatatcaccagagcccttgaggaacacaggttgagacggaagctagaaaaaaatgtttctgtgatgacgatgatcttcaaggagtcatcccccagccacccaactcgttgccacgaagacaatgtggtagtggctgtggatagtaccacaaacagggttctccat

SEQ ID NO: 11770 - DNA, 9930 bp, Homo sapiens
ggtgaccgtgagagaagaagatggcggcccctgtagtggcgccgcctggtgtggtggttagtcgggctaacaagcgcagcggcgcggggccgggaggcagcggtggcgggggagccagaggggcggaggaggaaccgccgccgcccctacaagcagttctggtggccgatagcttcgatcgccgcttcttccccatctccaaggaccagcctcgggtgagcgccgcgcacgcgagcagccagagggcaggaagggtggcagggctggagcaagttctcatttcggctaactacaacagcatgcccttgaaggacctgcgtctatgctgttatcctaaaaccggatgcagagggactgtctaaaccctgatgactgctgaccaagttagtggccggcagatttgggcattcgtaatgctgtccacctcgggtttgaaaggaatgaagagagctaaatgtagaaacagcgcttgagagaagccttcacgcggggattcagtgcccctagaagaggctgcgccgcttttaaccttgccgatgacggttgcttaggtgaaaagaaacgaccttttgcctctgaaagggcggtaatatgccttaaaaagagcgggctagatctcaggcagtgtattttttttttccttccaggttctaatgatagccggtgctatctgtcgaaaggacaaaatgggtttagtggttgattgccatcagcccccgagttgtctagacaatggggtattggactcagctgggtcgttcagcagtcagttcagaaagagggaactgcattggatttaaggaaaatcctctctaattccctcgaaaaagcctaatggctgttcatttttgacaagtgacgggagatggctaacctctgacacttagaaagggatcaaggaaggaaatcttatggggaagaaggccttagcaatgcttaaatttatggaaatatgattgatttccagtattatcctttgccagcagtgaactgccattctgtcacagctctgtgtctgatacaaggcacatagattctgtacttaccatccccaaattgcaatgtctcagactcaggcttagagcatggcatgaacatcaaaggcaggaacctgtttatctttgaattggaaagatacagcaaaattacactgtttggaaatacgaatagaggagtgaaaattgttgcagtggggtacccaaagggattcgagacctcaagttttttttcatcttgtatccttcaggtcctcttgcccctggccaatgtggcattaattgactacactctggaattcctgactgccacaggtgtacaggaaacatttgtcttttgttgctggaaagctgctcaaatcaaagaacatttactgtaaggccctgcaacttttctttccatgtttcgccatctttttccagttttttcaggatgaatgtaactaaggggaaatgtgagaggggaaaaatgtgtctacttagatgtcattgtaagttctaagggtattttctacacttatcaggaggtgagcagctgaaactttgtatctgtctgtcttgggttttctgtgacaaagattaaagaataaacttgggttttttctgaatctcattataaagtttggtgccagtggactttgcttttatttaatggcttcagtatggaagttacaatgataacatctttgttttcccactgagtttctaaatcttgtttgttctcaccttcaaggatataaatgagctccttgtcatctttgtattcccactgcctagctcagtcccaagcatatagtgagcacttacatgtttgttgaaatcttgaaaactagggaatcgcattgcttatggaagtccaggatgtaaagactaggacattagcatggtctccatcagacagttcctaaatgttatatggattgcagaaggggaaagctgacgtgaagcgtgttcccaggctactttgtgtaccctaggcttcagcaggattttgagttcaaattgatgtttagggacaaggggtcaaggtatggagaggaaataaccatgtttcctaacccataaaacaagactggtgacacaggatgctgaaagcattcattatagttcataatactctttgaagttgaagacgctggcaagaacccaaaaaagccatcgagaaggactgtgagtgctgaaagggggtgaaaaatggggaaggctcaaatgatctttatgcttgatacactcattcccctcaccctcccttcctttaggaagtcaaagtggtgccgccctacatctctcaatgtggttcgaataattacatcagagctctatcgatcactgggagatgtcctccgtgatgttgatgccaaggctttggtgcgctctgactttcttctggtgtatggggatgtcatctcaaacatcaatatcaccagagcccttgaggaacacaggtcaggatgggaaaatgacaggaacaagggttaaagaccagcagagccctgagactgcttttttgcagttctgtccctcctgtcctttataggttgagacggaagctagaaaaaaatgtttctgtgatgacgatgatcttcaaggagtcatcccccagccacccaactcgttgccacgaagacaatgtggtagtggctgtggatagtaccacaaacagggttctccattttcagaagacccagggtctccggcgttttgcatttcctctggtgtgtggatatctggggtcctttgagatggggaagtgacaggcttcagtgggagaaacaaattaaagtccttgtaacttctccccacagagcctgtttcagggcagtagtgatggagtggaggttcgatatgatttactggattgtcatatcagcatctgttctcctcaggtgagctctttagggctggggctgcacacccaaagagtagaactctgtgggtctgttattgtccccttagaaggccagggtatatttcttctccctgtttattttcattatttttacttttattttttgagacagagtctcgctctgttgcccaggctggagtgcagtggtgtgatcccagctcactgcagactctgcctcctaggttcaagtgattctcctgcctcagcctcctgagtagcagggattacaggcacaccaccatgcctggctaatttttgtatttttagtagagatggggtttcaccatgttggccaggctggtctcgaactcctggtctcaagtgatctacctgtctcagcctcccaaagtgctgggattacaggcatgagccaccacacctggccttattttcatttttatttatatatattttttgagacagggtctcgctctgtggcccaggctggagcacagtggcaccatgactgctcactgcagcctcagcctcccaggttcaagggaacctcctgcctcagcctcctgagtagatggaaccacaggcatgcactaccactaatttttgtatttttttgtagagacggggttttgccatgttgtccggcctggtcacgaactcctgagctcaagcaatctgaccacctcagccttccaaaatgctgggattacaggcatgagccaccagttttttttgttgttgttgttgttattgttgttttgagatggagcctcgctctgtcgcccaggctggagtgcagtggcatgatctcagcttactgcagcctccacctcctgggttccagtgattctcctgcctcagcctctcaagtagctgggactacaggtacgcaccaccacatccggctattttttgtatttttcagtagagatggggtttcaccatattggccaggctggtctctaactcctgacctcaggtgatcctcccgccttggcctcccaaagtgctgcaatcacaggtgtgagcctctgcacccagcattttttttttttttttttttttttttttgagtcggagtttcactcttgttgcccaggctggatgcaatggtgcgatctcagctcactgcaacctccacctcccaggttcaagcaattcccctgcctcagcctcccaaatagctgggattgcaggcatgtgccaccacacccagctaatttttgtatttttagtagagacgaggttttaccatgttggtcaggctggtctcgaactcccaacctcaggtgatctgcctgcctcggcctcccaaagtgctggcattacgggcatgagccactgcacctggccttttttttttttttagaatctattgtaaagcaaagatcttgtctccagtatcccactgggagtctctttggaattctggtccatgttcagctgtcatagggtttgctaggtctctgggggattatctgtgctcctagagaatagtacttaatcctggccaagcgtggtggctcacgcttgtaatcccagcactttgggaggccgaggtgagtggatcatgaggtcaggagttcaagaccagcctgaccaacacagtgaaatcccatctctactaaaaaataaaaatacaaaaattagctgggcgtggtggcggacgcttgtaatcccagctacttgggaggctgaggcacaagaatcactttaacccaggaggtggaggttgcagtgagccgagatcatgcaactgcactccagcctgggcaacagagctagacttgtctcaaaaaaaaaaaaaaaagaatagtacttaattctagcccactccacttcccttccacaggtggcacaactctttacagacaactttgactaccaaactcgagatgactttgtgcgaggtctcttagtgaatgaggaggtgagaaaagtcttccaatgcctctttaggagagaggagaaggctatgattgtatctcatgctggtaacttttgatcttttttgtattttattgaggcttaggagggaggaaaagcaggggacaggaggaacagtacacaaagaagaatctttgtggcagtgagaggcagaggggaacttaaaaggattagaaaagttgtacttgggggcattcttcctgtctttcttgcttaggtgacctccctttccttctcattcagatcctagggaaccagatccacatgcacgtaacagctaaggaatatggtgcccgtgtctccaacctacacatgtactcagctgtctgtgctgacgtcatccgccgatgggtctaccctctcaccccagaggcgaacttcactgacagcaccacccagagctgcactcattcccggcacaacatctaccgagggcctgaggtcagcctgggccatggcagcatcctagaggaaaatgtgctcctgggctctggcactgtcattggcagcaattgctttatcaccaacagtgtcattggccccggctgccacattggtgagcacaggtggggaatcaagccaactatcctaggaacaggaacctgggggggccacgtctccagaaacacaagggatggctacacaagggacagtccctgggaataaggaactatagagcggctacctcaggaaaggaggaaacagggatttgaaaacagcgataccttaatttgtagcctgtgggcctctcattggatgactcttcacattccagggtaccctgtagtcacattcaggagcaagtagataattaacatgcagtaacaacatctatttagcacattacagtttacaaagggcttttatatacattgttacatttaatcttcataatttacaaataaacaggctcaacaagattttcttgcccaaggtcattggtaataatggtgggacctgaatctgggtattctgaatgtaagtccagtgttcttttgagtctaccataactgcctggttggcctcttggtatctcattttggttgcaggagtgtgatgcgtctaatagtactgcccctttccaagaacaacagtaaggctcagattctaggggctgagcgtggtggctcatgcttgtaatcctagcacactgggaagccatggtgggaggatcgcttgagcccaggagttcaagaccagcctgggcaacatagcgacaccccttctccacaaatgatacaaaaattagctgggcatgatggcgcgtgcctgtaatctcagctattcgggaggctgaggcaggaggattacctgagcccagaggtcgagggtgcagtgagtcatgatcatactactgcactccagcctgggtgatggaatgagaccgtgtctcaaaagaaaaaaaagacttggtttctaaaatgtaccagaagaggtggaattatttggttctgcttgtaggcgtggatatgattctaataaggttttttgagttcagagggtccccagaaatcctgaaggttctcgggttcttaagctctgtgtgtagtctataattgttgtaaacttggtgaagtatcttctcaggcctgggcttagggggtgagtgggtgtttctggtgacttgcgggatggggaatgagagctaggtgggagctgtgctggtgtcagtcagccctgtcctctatgaagggctctgctctgcggttggaaccctgagttacccagaggtcttcccatcctgagccaggtgataacgtggtgctggaccagacctacctgtggcagggtgttcgagtggcggctggagcacagatccatcagtctctgctttgtgacaatgctgaggtcaaggaacgagtgacactgaaaccacgctctgtcctcacttcccaggtgagacctgatctatactgtgcacaggccctgaattgcatggcagtcacactgagccagaaggggcattatttccacccataatcctgtctaaaaaagttgctctcattatcaggatgcacttttcctccacaccctaatggttctgtgttttttttccccttaggtggtcgtgggcccaaatatcacgctgcctgagggctcggtgatctctttgcaccctccagatgcagaggaagatgaagatgatggcgagttcagtgatgattctggggctgaccaagaaaaggacaaagtgaagatgaaaggtgtgagactcaacaggtgtggggcatctgtgtgtctcgctgcctcatagaagaaccagtgtttcctcctggagggattggtgcttccgccgggccctctctatagatcattgccttttccaggttacaatccagcagaagtaggagctgctggcaagggctacctctggaaagctgcaggcatgaacatggaggaagaggaggaactgcagcagaatctgtggggtgagctaggcctgatgcctgcccttctcctcctgaatcggaatattttgaaggataatgaatacttcagagtcacattacttattcactcctttattcaggcagacagggcaggtatattgctctctgtcaatgactctttttttctttttcctcacccattatggcttctcaggactcaagatcaacatggaagaagagagtgaaagtgaaagtgagcaaagtatggattctgaggagccggacagccggggaggctcccctcagatggatgacatcaaaggtgagtggcaggggagaaatgcgctggaccagtttattctctgcctggatcaactagccagaggcttacgttcctcagaaagggtttggtatcgagtcaagactagatgacttagagcattctgaatgatgttggcccatgaacttatccttgctttgatttcagtgttccagaatgaagttttaggaacactacagcggggcaaagaggagaacatttcttgtgacaatctcgtcctggaaatcaactctctcaagtaagagcagcccctccctgttctcctcggggtgatcccgggaaggtagaggctttctcgtaagtgttttgtctccaaataggaacctattccttcgacatcccaaatggaaagaccagtagtatttggagcaaggagagcattattaagttctagcctcagcatagactttctccttcctaaaccctccccttccatattgttccatccagattcctctccaatgtctatcaaagtcatagttctaagcctgctgaaaggccagtgaaggccctggtgtcaccccagtctccccacaggtatgcctataacataagtctaaaggaggtgatgcaggtactgagccacgtggtcctggagttccccctgcaacagatggattccccgcttgactcaagccgctactgtgccctgctgcttcctgtgagcaaagattggagctgagtacaagggattgggtacaggcaaaggaaatcaggagtagactgtcttgttatattgggtgtatgtcacttctggttcctttttccttgcctctggaagctggttgggctctagagcagccttggctggttcagaggggtcagattgagttcaatactgactggcctttgagactccaggatttcataccatcctaggcccacaaaggtatattcagaatggacctggacattcagactctatggcagcaatttgacccaacacaagatcagcctctggggtgggaataggtattttgaggcagcctatagcatctgatcccctttcaccttccctaaggaatctctttttcccaaaccctgtcaacaactcccaagtccctctgacataattccacagaacctgtatcatctcccttttgtccacccatgtcatcagtatggatttgcttggatgtccaggtataggtgaatgcttaggaatatactgcagctcccttctttcttccatagctgctaaaggcctggagccctgtttttaggaactacataaagcgcgcagccgaccatttggaagcgttagcagccattgaggacttcttcctagagcatgaagctcttggtatttccatggccaaggtgaatatgacctcaagccccattcttctgcacttgctttcaaacgagggttggtgacccccttgggagacataaaatagaagctaatgtgaatccagtatggaccatccactcccaatatgcttattgctagaatagtacagcttggagccggactaataaggtagccatctggggggtggtctggaaatgtgcaaagctctccccagcaatagttccagaagttagacctgccccaggagcagagcgaacagctcactcttgtccgttttggaggaggctactcagtgcatagagggatctgagggcctggtagagtatcctgctggactttccaaggcccctgaggtcccctttattggccttttgcaggtactgatggctttctaccagctggagatcctggctgaggaaacaattctgagctggttcagccaaagagatacaactgacaagggccagcagttgcgcaagaatcaacaggtgcgtcaggctgtcctcctctcgccaagatggttatctcattcccaggtcctggcccctagactctagggtggttggtttctggggctctggttgttagagctgtttatctgccgaggggagcaggagagttatgtgcacctcccccagccgatctctcctctgcttctttacagctgcagaggttcatccagtggctaaaagaggcagaagaggagtcatctgaagatgactgaagtcacactgcctgctcctttgggtgtgattgagtgccctcctggctcctgggctgggacaagtgaggaactagctgcagagggatgagtgaccaccatccaggctgagactgaaaggagcagaggctggaactacagtattctttcccctgctagcaaccatgtgcctcccatcctgactgtggagttgggatgtggaagtggggctggaacaaagcttctgcctagggaggagctaagcaggcccggcagttggaggaaggccagaggaacagctttgtgctccggctttccctcagggaacagcagagagcagttggctctttctgctgcttgtatatgttaatattaa

SEQ ID NO: 11771 - DNA, 2596 bp, Homo sapiens
ggtgaccgtgagagaagaagatggcggcccctgtagtggcgccgcctggtgtggtggttagtcgggctaacaagcgcagcggcgcggggccgggaggcagcggtggcgggggagccagaggggcggaggaggaaccgccgccgcccctacaagcagttctggtggccgatagcttcgatcgccgcttcttccccatctccaaggaccagcctcgggtcctcttgcccctggccaatgtggcattaattgactacactctggaattcctgactgccacaggtgtacaggaaacatttgtcttttgttgctggaaagctgctcaaatcaaagaacatttactgaagtcaaagtggtgccgccctacatctctcaatgtggttcgaataattacatcagagctctatcgatcactgggagatgtcctccgtgatgttgatgccaaggctttggtgcgctctgactttcttctggtgtatggggatgtcatctcaaacatcaatatcaccagagcccttgaggaacacaggttgagacggaagctagaaaaaaatgtttctgtgatgacgatgatcttcaaggagtcatcccccagccacccaactcgttgccacgaagacaatgtggtagtggctgtggatagtaccacaaacagggttctccattttcagaagacccagggtctccggcgttttgcatttcctctgagcctgtttcagggcagtagtgatggagtggaggttcgatatgatttactggattgtcatatcagcatctgttctcctcaggtggcacaactctttacagacaactttgactaccaaactcgagatgactttgtgcgaggtctcttagtgaatgaggagatcctagggaaccagatccacatgcacgtaacagctaaggaatatggtgcccgtgtctccaacctacacatgtactcagctgtctgtgctgacgtcatccgccgatgggtctaccctctcaccccagaggcgaacttcactgacagcaccacccagagctgcactcattcccggcacaacatctaccgagggcctgaggtcagcctgggccatggcagcatcctagaggaaaatgtgctcctgggctctggcactgtcattggcagcaattgctttatcaccaacagtgtcattggccccggctgccacattgggctctgctctgcggttggaaccctgagttacccagaggtcttcccatcctgagccaggtgataacgtggtgctggaccagacctacctgtggcagggtgttcgagtggcggctggagcacagatccatcagtctctgctttgtgacaatgctgaggtcaaggaacgagtgacactgaaaccacgctctgtcctcacttcccaggtggtcgtgggcccaaatatcacgctgcctgagggctcggtgatctctttgcaccctccagatgcagaggaagatgaagatgatggcgagttcagtgatgattctggggctgaccaagaaaaggacaaagtgaagatgaaaggttacaatccagcagaagtaggagctgctggcaagggctacctctggaaagctgcaggcatgaacatggaggaagaggaggaactgcagcagaatctgtggggactcaagatcaacatggaagaagagagtgaaagtgaaagtgagcaaagtatggattctgaggagccggacagccggggaggctcccctcagatggatgacatcaaagtgttccagaatgaagttttaggaacactacagcggggcaaagaggagaacatttcttgtgacaatctcgtcctggaaatcaactctctcaagtatgcctataacataagtctaaaggaggtgatgcaggtactgagccacgtggtcctggagttccccctgcaacagatggattccccgcttgactcaagccgctactgtgccctgctgcttcctctgctaaaggcctggagccctgtttttaggaactacataaagcgcgcagccgaccatttggaagcgttagcagccattgaggacttcttcctagagcatgaagctcttggtatttccatggccaaggtactgatggctttctaccagctggagatcctggctgaggaaacaattctgagctggttcagccaaagagatacaactgacaagggccagcagttgcgcaagaatcaacagctgcagaggttcatccagtggctaaaagaggcagaagaggagtcatctgaagatgactgaagtcacactgcctgctcctttgggtgtgattgagtgccctcctggctcctgggctgggacaagtgaggaactagctgcagagggatgagtgaccaccatccaggctgagactgaaaggagcagaggctggaactacagtattctttcccctgctagcaaccatgtgcctcccatcctgactgtggagttgggatgtggaagtggggctggaacaaagcttctgcctagggaggagctaagcaggcccggcagttggaggaaggccagaggaacagctttgtgctccggctttccctcagggaacagcagagagcagttggctctttctgctgcttgtatatgttaatattaa

SEQ ID NO: 11772 - DNA, 9590 bp, Homo sapiens
gagaagaagatggcggcccctgtagtggcgccgcctggtgtggtggttagtcgggctaacaagcgcagcggcgcggggccgggaggcagcggtggcgggggagccagaggggcggaggaggaaccgccgccgcccctacaagcagttctggtggccgatagcttcgatcgccgcttcttccccatctccaaggaccagcctcgggtgagcgccgcgcacgcgagcagccagagggcaggaagggtggcagggctggagcaagttctcatttcggctaactacaacagcatgcccttgaaggacctgcgtctatgctgttatcctaaaaccggatgcagagggactgtctaaaccctgatgactgctgaccaagttagtggccggcagatttgggcattcgtaatgctgtccacctcgggtttgaaaggaatgaagagagctaaatgtagaaacagcgcttgagagaagccttcacgcggggattcagtgcccctagaagaggctgcgccgcttttaaccttgccgatgacggttgcttaggtgaaaagaaacgaccttttgcctctgaaagggcggtaatatgccttaaaaagagcgggctagatctcaggcagtgtattttttttttccttccaggttctaatgatagccggtgctatctgtcgaaaggacaaaatgggtttagtggttgattgccatcagcccccgagttgtctagacaatggggtattggactcagctgggtcgttcagcagtcagttcagaaagagggaactgcattggatttaaggaaaatcctctctaattccctcgaaaaagcctaatggctgttcatttttgacaagtgacgggagatggctaacctctgacacttagaaagggatcaaggaaggaaatcttatggggaagaaggccttagcaatgcttaaatttatggaaatatgattgatttccagtattatcctttgccagcagtgaactgccattctgtcacagctctgtgtctgatacaaggcacatagattctgtacttaccatccccaaattgcaatgtctcagactcaggcttagagcatggcatgaacatcaaaggcaggaacctgtttatctttgaattggaaagatacagcaaaattacactgtttggaaatacgaatagaggagtgaaaattgttgcagtggggtacccaaagggattcgagacctcaagttttttttcatcttgtatccttcaggtcctcttgcccctggccaatgtggcattaattgactacactctggaattcctgactgccacaggtgtacaggaaacatttgtcttttgttgctggaaagctgctcaaatcaaagaacatttactgtaaggccctgcaacttttctttccatgtttcgccatctttttccagttttttcaggatgaatgtaactaaggggaaatgtgagaggggaaaaatgtgtctacttagatgtcattgtaagttctaagggtattttctacacttatcaggaggtgagcagctgaaactttgtatctgtctgtcttgggttttctgtgacaaagattaaagaataaacttgggttttttctgaatctcattataaagtttggtgccagtggactttgcttttatttaatggcttcagtatggaagttacaatgataacatctttgttttcccactgagtttctaaatcttgtttgttctcaccttcaaggatataaatgagctccttgtcatctttgtattcccactgcctagctcagtcccaagcatatagtgagcacttacatgtttgttgaaatcttgaaaactagggaatcgcattgcttatggaagtccaggatgtaaagactaggacattagcatggtctccatcagacagttcctaaatgttatatggattgcagaaggggaaagctgacgtgaagcgtgttcccaggctactttgtgtaccctaggcttcagcaggattttgagttcaaattgatgtttagggacaaggggtcaaggtatggagaggaaataaccatgtttcctaacccataaaacaagactggtgacacaggatgctgaaagcattcattatagttcataatactctttgaagttgaagacgctggcaagaacccaaaaaagccatcgagaaggactgtgagtgctgaaagggggtgaaaaatggggaaggctcaaatgatctttatgcttgatacactcattcccctcaccctcccttcctttaggaagtcaaagtggtgccgccctacatctctcaatgtggttcgaataattacatcagagctctatcgatcactgggagatgtcctccgtgatgttgatgccaaggctttggtgcgctctgactttcttctggtgtatggggatgtcatctcaaacatcaatatcaccagagcccttgaggaacacaggtcaggatgggaaaatgacaggaacaagggttaaagaccagcagagccctgagactgcttttttgcagttctgtccctcctgtcctttataggttgagacggaagctagaaaaaaatgtttctgtgatgacgatgatcttcaaggagtcatcccccagccacccaactcgttgccacgaagacaatgtggtagtggctgtggatagtaccacaaacagggttctccattttcagaagacccagggtctccggcgttttgcatttcctctggtgtgtggatatctggggtcctttgagatggggaagtgacaggcttcagtgggagaaacaaattaaagtccttgtaacttctccccacagagcctgtttcagggcagtagtgatggagtggaggttcgatatgatttactggattgtcatatcagcatctgttctcctcaggtgagctctttagggctggggctgcacacccaaagagtagaactctgtgggtctgttattgtccccttagaaggccagggtatatttcttctccctgtttattttcattatttttacttttattttttgagacagagtctcgctctgttgcccaggctggagtgcagtggtgtgatcccagctcactgcagactctgcctcctaggttcaagtgattctcctgcctcagcctcctgagtagcagggattacaggcacaccaccatgcctggctaatttttgtatttttagtagagatggggtttcaccatgttggccaggctggtctcgaactcctggtctcaagtgatctacctgtctcagcctcccaaagtgctgggattacaggcatgagccaccacacctggccttattttcatttttatttatatatattttttgagacagggtctcgctctgtggcccaggctggagcacagtggcaccatgactgctcactgcagcctcagcctcccaggttcaagggaacctcctgcctcagcctcctgagtagatggaaccacaggcatgcactaccactaatttttgtatttttttgtagagacggggttttgccatgttgtccggcctggtcacgaactcctgagctcaagcaatctgaccacctcagccttccaaaatgctgggattacaggcatgagccaccagttttttttgttgttgttgttgttattgttgttttgagatggagcctcgctctgtcgcccaggctggagtgcagtggcatgatctcagcttactgcagcctccacctcctgggttccagtgattctcctgcctcagcctctcaagtagctgggactacaggtacgcaccaccacatccggctattttttgtatttttcagtagagatggggtttcaccatattggccaggctggtctctaactcctgacctcaggtgatcctcccgccttggcctcccaaagtgctgcaatcacaggtgtgagcctctgcacccagcattttttttttttttttttttttttttttgagtcggagtttcactcttgttgcccaggctggatgcaatggtgcgatctcagctcactgcaacctccacctcccaggttcaagcaattcccctgcctcagcctcccaaatagctgggattgcaggcatgtgccaccacacccagctaatttttgtatttttagtagagacgaggttttaccatgttggtcaggctggtctcgaactcccaacctcaggtgatctgcctgcctcggcctcccaaagtgctggcattacgggcatgagccactgcacctggccttttttttttttttagaatctattgtaaagcaaagatcttgtctccagtatcccactgggagtctctttggaattctggtccatgttcagctgtcatagggtttgctaggtctctgggggattatctgtgctcctagagaatagtacttaatcctggccaagcgtggtggctcacgcttgtaatcccagcactttgggaggccgaggtgagtggatcatgaggtcaggagttcaagaccagcctgaccaacacagtgaaatcccatctctactaaaaaataaaaatacaaaaattagctgggcgtggtggcggacgcttgtaatcccagctacttgggaggctgaggcacaagaatcactttaacccaggaggtggaggttgcagtgagccgagatcatgcaactgcactccagcctgggcaacagagctagacttgtctcaaaaaaaaaaaaaaaagaatagtacttaattctagcccactccacttcccttccacaggtggcacaactctttacagacaactttgactaccaaactcgagatgactttgtgcgaggtctcttagtgaatgaggaggtgagaaaagtcttccaatgcctctttaggagagaggagaaggctatgattgtatctcatgctggtaacttttgatcttttttgtattttattgaggcttaggagggaggaaaagcaggggacaggaggaacagtacacaaagaagaatctttgtggcagtgagaggcagaggggaacttaaaaggattagaaaagttgtacttgggggcattcttcctgtctttcttgcttaggtgacctccctttccttctcattcagatcctagggaaccagatccacatgcacgtaacagctaaggaatatggtgcccgtgtctccaacctacacatgtactcagctgtctgtgctgacgtcatccgccgatgggtctaccctctcaccccagaggcgaacttcactgacagcaccacccagagctgcactcattcccggcacaacatctaccgagggcctgaggtcagcctgggccatggcagcatcctagaggaaaatgtgctcctgggctctggcactgtcattggcagcaattgctttatcaccaacagtgtcattggccccggctgccacattggtgagcacaggtggggaatcaagccaactatcctaggaacaggaacctgggggggccacgtctccagaaacacaagggatggctacacaagggacagtccctgggaataaggaactatagagcggctacctcaggaaaggaggaaacagggatttgaaaacagcgataccttaatttgtagcctgtgggcctctcattggatgactcttcacattccagggtaccctgtagtcacattcaggagcaagtagataattaacatgcagtaacaacatctatttagcacattacagtttacaaagggcttttatatacattgttacatttaatcttcataatttacaaataaacaggctcaacaagattttcttgcccaaggtcattggtaataatggtgggacctgaatctgggtattctgaatgtaagtccagtgttcttttgagtctaccataactgcctggttggcctcttggtatctcattttggttgcaggagtgtgatgcgtctaatagtactgcccctttccaagaacaacagtaaggctcagattctaggggctgagcgtggtggctcatgcttgtaatcctagcacactgggaagccatggtgggaggatcgcttgagcccaggagttcaagaccagcctgggcaacatagcgacaccccttctccacaaatgatacaaaaattagctgggcatgatggcgcgtgcctgtaatctcagctattcgggaggctgaggcaggaggattacctgagcccagaggtcgagggtgcagtgagtcatgatcatactactgcactccagcctgggtgatggaatgagaccgtgtctcaaaagaaaaaaaagacttggtttctaaaatgtaccagaagaggtggaattatttggttctgcttgtaggcgtggatatgattctaataaggttttttgagttcagagggtccccagaaatcctgaaggttctcgggttcttaagctctgtgtgtagtctataattgttgtaaacttggtgaagtatcttctcaggcctgggcttagggggtgagtgggtgtttctggtgacttgcgggatggggaatgagagctaggtgggagctgtgctggtgtcagtcagccctgtcctctatgaagggctctgctctgcggttggaaccctgagttacccagaggtcttcccatcctgagccaggtgataacgtggtgctggaccagacctacctgtggcagggtgttcgagtggcggctggagcacagatccatcagtctctgctttgtgacaatgctgaggtcaaggaacgagtgacactgaaaccacgctctgtcctcacttcccaggtgagacctgatctatactgtgcacaggccctgaattgcatggcagtcacactgagccagaaggggcattatttccacccataatcctgtctaaaaaagttgctctcattatcaggatgcacttttcctccacaccctaatggttctgtgttttttttccccttaggtggtcgtgggcccaaatatcacgctgcctgagggctcggtgatctctttgcaccctccagatgcagaggaagatgaagatgatggcgagttcagtgatgattctggggctgaccaagaaaaggacaaagtgaagatgaaaggtgtgagactcaacaggtgtggggcatctgtgtgtctcgctgcctcatagaagaaccagtgtttcctcctggagggattggtgcttccgccgggccctctctatagatcattgccttttccaggttacaatccagcagaagtaggagctgctggcaagggctacctctggaaagctgcaggcatgaacatggaggaagaggaggaactgcagcagaatctgtggggtgagctaggcctgatgcctgcccttctcctcctgaatcggaatattttgaaggataatgaatacttcagagtcacattacttattcactcctttattcaggcagacagggcaggtatattgctctctgtcaatgactctttttttctttttcctcacccattatggcttctcaggactcaagatcaacatggaagaagagagtgaaagtgaaagtgagcaaagtatggattctgaggagccggacagccggggaggctcccctcagatggatgacatcaaaggtgagtggcaggggagaaatgcgctggaccagtttattctctgcctggatcaactagccagaggcttacgttcctcagaaagggtttggtatcgagtcaagactagatgacttagagcattctgaatgatgttggcccatgaacttatccttgctttgatttcagtgttccagaatgaagttttaggaacactacagcggggcaaagaggagaacatttcttgtgacaatctcgtcctggaaatcaactctctcaagtaagagcagcccctccctgttctcctcggggtgatcccgggaaggtagaggctttctcgtaagtgttttgtctccaaataggaacctattccttcgacatcccaaatggaaagaccagtagtatttggagcaaggagagcattattaagttctagcctcagcatagactttctccttcctaaaccctccccttccatattgttccatccagattcctctccaatgtctatcaaagtcatagttctaagcctgctgaaaggccagtgaaggccctggtgtcaccccagtctccccacaggtatgcctataacataagtctaaaggaggtgatgcaggtactgagccacgtggtcctggagttccccctgcaacagatggattccccgcttgactcaagccgctactgtgccctgctgcttcctgtgagcaaagattggagctgagtacaagggattgggtacaggcaaaggaaatcaggagtagactgtcttgttatattgggtgtatgtcacttctggttcctttttccttgcctctggaagctggttgggctctagagcagccttggctggttcagaggggtcagattgagttcaatactgactggcctttgagactccaggatttcataccatcctaggcccacaaaggtatattcagaatggacctggacattcagactctatggcagcaatttgacccaacacaagatcagcctctggggtgggaataggtattttgaggcagcctatagcatctgatcccctttcaccttccctaaggaatctctttttcccaaaccctgtcaacaactcccaagtccctctgacataattccacagaacctgtatcatctcccttttgtccacccatgtcatcagtatggatttgcttggatgtccaggtataggtgaatgcttaggaatatactgcagctcccttctttcttccatagctgctaaaggcctggagccctgtttttaggaactacataaagcgcgcagccgaccatttggaagcgttagcagccattgaggacttcttcctagagcatgaagctcttggtatttccatggccaaggtgaatatgacctcaagccccattcttctgcacttgctttcaaacgagggttggtgacccccttgggagacataaaatagaagctaatgtgaatccagtatggaccatccactcccaatatgcttattgctagaatagtacagcttggagccggactaataaggtagccatctggggggtggtctggaaatgtgcaaagctctccccagcaatagttccagaagttagacctgccccaggagcagagcgaacagctcactcttgtccgttttggaggaggctactcagtgcatagagggatctgagggcctggtagagtatcctgctggactttccaaggcccctgaggtcccctttattggccttttgcaggtactgatggctttctaccagctggagatcctggctgaggaaacaattctgagctggttcagccaaagagatacaactgacaagggccagcagttgcgcaagaatcaacaggtgcgtcaggctgtcctcctctcgccaagatggttatctcattcccaggtcctggcccctagactctagggtggttggtttctggggctctggttgttagagctgtttatctgccgaggggagcaggagagttatgtgcacctcccccagccgatctctcctctgcttctttacagctgcagaggttcatccagtggctaaaagaggcagaagaggagtcatctgaagatgactgaagtcacactgcctgctcctttgg

SEQ ID NO: 11773 - DNA, 2222 bp, Homo sapiens
gagaagaagatggcggcccctgtagtggcgccgcctggtgtggtggttagtcgggctaacaagcgcagcggcgcggggccgggaggcagcggtggcgggggagccagaggggcggaggaggaaccgccgccgcccctacaagcagttctggtggccgatagcttcgatcgccgcttcttccccatctccaaggaccagcctcgggtcctcttgcccctggccaatgtggcattaattgactacactctggaattcctgactgccacaggtgtacaggaaacatttgtcttttgttgctggaaagctgctcaaatcaaagaacatttactgaagtcaaagtggtgccgccctacatctctcaatgtggttcgaataattacatcagagctctatcgatcactgggagatgtcctccgtgatgttgatgccaaggctttggtgcgctctgactttcttctggtgtatggggatgtcatctcaaacatcaatatcaccagagcccttgaggaacacagttctgtccctcctgtcctttataggttgagacggaagctagaaaaaaatgtttctgtgatgacgatgatcttcaaggagtcatcccccagccacccaactcgttgccacgaagacaatgtggtagtggctgtggatagtaccacaaacagggttctccattttcagaagacccagggtctccggcgttttgcatttcctctgagcctgtttcagggcagtagtgatggagtggaggttcgatatgatttactggattgtcatatcagcatctgttctcctcaggtggcacaactctttacagacaactttgactaccaaactcgagatgactttgtgcgaggtctcttagtgaatgaggagatcctagggaaccagatccacatgcacgtaacagctaaggaatatggtgcccgtgtctccaacctacacatgtactcagctgtctgtgctgacgtcatccgccgatgggtctaccctctcaccccagaggcgaacttcactgacagcaccacccagagctgcactcattcccggcacaacatctaccgagggcctgaggtcagcctgggccatggcagcatcctagaggaaaatgtgctcctgggctctggcactgtcattggcagcaattgctttatcaccaacagtgtcattggccccggctgccacattggtgataacgtggtgctggaccagacctacctgtggcagggtgttcgagtggcggctggagcacagatccatcagtctctgctttgtgacaatgctgaggtcaaggaacgagtgacactgaaaccacgctctgtcctcacttcccaggtggtcgtgggcccaaatatcacgctgcctgagggctcggtgatctctttgcaccctccagatgcagaggaagatgaagatgatggcgagttcagtgatgattctggggctgaccaagaaaaggacaaagtgaagatgaaaggttacaatccagcagaagtaggagctgctggcaagggctacctctggaaagctgcaggcatgaacatggaggaagaggaggaactgcagcagaatctgtggggactcaagatcaacatggaagaagagagtgaaagtgaaagtgagcaaagtatggattctgaggagccggacagccggggaggctcccctcagatggatgacatcaaagtgttccagaatgaagttttaggaacactacagcggggcaaagaggagaacatttcttgtgacaatctcgtcctggaaatcaactctctcaagtatgcctataacataagtctaaaggaggtgatgcaggtactgagccacgtggtcctggagttccccctgcaacagatggattccccgcttgactcaagccgctactgtgccctgctgcttcctctgctaaaggcctggagccctgtttttaggaactacataaagcgcgcagccgaccatttggaagcgttagcagccattgaggacttcttcctagagcatgaagctcttggtatttccatggccaaggtactgatggctttctaccagctggagatcctggctgaggaaacaattctgagctggttcagccaaagagatacaactgacaagggccagcagttgcgcaagaatcaacagctgcagaggttcatccagtggctaaaagaggcagaagaggagtcatctgaagatgactgaagtcacactgcctgctcctttgg

SEQ ID NO: 11774 - DNA, 8644 bp, Homo sapiens
acactctggaattcctgactgccacaggtgtacaggaaacatttgtcttttgttgctggaaagctgctcaaatcaaagaacatttactgtaaggccctgcaacttttctttccatgtttcgccatctttttccagttttttcaggatgaatgtaactaaggggaaatgtgagaggggaaaaatgtgtctacttagatgtcattgtaagttctaagggtattttctacacttatcaggaggtgagcagctgaaactttgtatctgtctgtcttgggttttctgtgacaaagattaaagaataaacttgggttttttctgaatctcattataaagtttggtgccagtggactttgcttttatttaatggcttcagtatggaagttacaatgataacatctttgttttcccactgagtttctaaatcttgtttgttctcaccttcaaggatataaatgagctccttgtcatctttgtattcccactgcctagctcagtcccaagcatatagtgagcacttacatgtttgttgaaatcttgaaaactagggaatcgcattgcttatggaagtccaggatgtaaagactaggacattagcatggtctccatcagacagttcctaaatgttatatggattgcagaaggggaaagctgacgtgaagcgtgttcccaggctactttgtgtaccctaggcttcagcaggattttgagttcaaattgatgtttagggacaaggggtcaaggtatggagaggaaataaccatgtttcctaacccataaaacaagactggtgacacaggatgctgaaagcattcattatagttcataatactctttgaagttgaagacgctggcaagaacccaaaaaagccatcgagaaggactgtgagtgctgaaagggggtgaaaaatggggaaggctcaaatgatctttatgcttgatacactcattcccctcaccctcccttcctttaggaagtcaaagtggtgccgccctacatctctcaatgtggttcgaataattacatcagagctctatcgatcactgggagatgtcctccgtgatgttgatgccaaggctttggtgcgctctgactttcttctggtgtatggggatgtcatctcaaacatcaatatcaccagagcccttgaggaacacaggtcaggatgggaaaatgacaggaacaagggttaaagaccagcagagccctgagactgcttttttgcagttctgtccctcctgtcctttataggttgagacggaagctagaaaaaaatgtttctgtgatgacgatgatcttcaaggagtcatcccccagccacccaactcgttgccacgaagacaatgtggtagtggctgtggatagtaccacaaacagggttctccattttcagaagacccagggtctccggcgttttgcatttcctctggtgtgtggatatctggggtcctttgagatggggaagtgacaggcttcagtgggagaaacaaattaaagtccttgtaacttctccccacagagcctgtttcagggcagtagtgatggagtggaggttcgatatgatttactggattgtcatatcagcatctgttctcctcaggtgagctctttagggctggggctgcacacccaaagagtagaactctgtgggtctgttattgtccccttagaaggccagggtatatttcttctccctgtttattttcattatttttacttttattttttgagacagagtctcgctctgttgcccaggctggagtgcagtggtgtgatcccagctcactgcagactctgcctcctaggttcaagtgattctcctgcctcagcctcctgagtagcagggattacaggcacaccaccatgcctggctaatttttgtatttttagtagagatggggtttcaccatgttggccaggctggtctcgaactcctggtctcaagtgatctacctgtctcagcctcccaaagtgctgggattacaggcatgagccaccacacctggccttattttcatttttatttatatatattttttgagacagggtctcgctctgtggcccaggctggagcacagtggcaccatgactgctcactgcagcctcagcctcccaggttcaagggaacctcctgcctcagcctcctgagtagatggaaccacaggcatgcactaccactaatttttgtatttttttgtagagacggggttttgccatgttgtccggcctggtcacgaactcctgagctcaagcaatctgaccacctcagccttccaaaatgctgggattacaggcatgagccaccagttttttttgttgttgttgttgttattgttgttttgagatggagcctcgctctgtcgcccaggctggagtgcagtggcatgatctcagcttactgcagcctccacctcctgggttccagtgattctcctgcctcagcctctcaagtagctgggactacaggtacgcaccaccacatccggctattttttgtatttttcagtagagatggggtttcaccatattggccaggctggtctctaactcctgacctcaggtgatcctcccgccttggcctcccaaagtgctgcaatcacaggtgtgagcctctgcacccagcattttttttttttttttttttttttttttgagtcggagtttcactcttgttgcccaggctggatgcaatggtgcgatctcagctcactgcaacctccacctcccaggttcaagcaattcccctgcctcagcctcccaaatagctgggattgcaggcatgtgccaccacacccagctaatttttgtatttttagtagagacgaggttttaccatgttggtcaggctggtctcgaactcccaacctcaggtgatctgcctgcctcggcctcccaaagtgctggcattacgggcatgagccactgcacctggccttttttttttttttagaatctattgtaaagcaaagatcttgtctccagtatcccactgggagtctctttggaattctggtccatgttcagctgtcatagggtttgctaggtctctgggggattatctgtgctcctagagaatagtacttaatcctggccaagcgtggtggctcacgcttgtaatcccagcactttgggaggccgaggtgagtggatcatgaggtcaggagttcaagaccagcctgaccaacacagtgaaatcccatctctactaaaaaataaaaatacaaaaattagctgggcgtggtggcggacgcttgtaatcccagctacttgggaggctgaggcacaagaatcactttaacccaggaggtggaggttgcagtgagccgagatcatgcaactgcactccagcctgggcaacagagctagacttgtctcaaaaaaaaaaaaaaaagaatagtacttaattctagcccactccacttcccttccacaggtggcacaactctttacagacaactttgactaccaaactcgagatgactttgtgcgaggtctcttagtgaatgaggaggtgagaaaagtcttccaatgcctctttaggagagaggagaaggctatgattgtatctcatgctggtaacttttgatcttttttgtattttattgaggcttaggagggaggaaaagcaggggacaggaggaacagtacacaaagaagaatctttgtggcagtgagaggcagaggggaacttaaaaggattagaaaagttgtacttgggggcattcttcctgtctttcttgcttaggtgacctccctttccttctcattcagatcctagggaaccagatccacatgcacgtaacagctaaggaatatggtgcccgtgtctccaacctacacatgtactcagctgtctgtgctgacgtcatccgccgatgggtctaccctctcaccccagaggcgaacttcactgacagcaccacccagagctgcactcattcccggcacaacatctaccgagggcctgaggtcagcctgggccatggcagcatcctagaggaaaatgtgctcctgggctctggcactgtcattggcagcaattgctttatcaccaacagtgtcattggccccggctgccacattggtgagcacaggtggggaatcaagccaactatcctaggaacaggaacctgggggggccacgtctccagaaacacaagggatggctacacaagggacagtccctgggaataaggaactatagagcggctacctcaggaaaggaggaaacagggatttgaaaacagcgataccttaatttgtagcctgtgggcctctcattggatgactcttcacattccagggtaccctgtagtcacattcaggagcaagtagataattaacatgcagtaacaacatctatttagcacattacagtttacaaagggcttttatatacattgttacatttaatcttcataatttacaaataaacaggctcaacaagattttcttgcccaaggtcattggtaataatggtgggacctgaatctgggtattctgaatgtaagtccagtgttcttttgagtctaccataactgcctggttggcctcttggtatctcattttggttgcaggagtgtgatgcgtctaatagtactgcccctttccaagaacaacagtaaggctcagattctaggggctgagcgtggtggctcatgcttgtaatcctagcacactgggaagccatggtgggaggatcgcttgagcccaggagttcaagaccagcctgggcaacatagcgacaccccttctccacaaatgatacaaaaattagctgggcatgatggcgcgtgcctgtaatctcagctattcgggaggctgaggcaggaggattacctgagcccagaggtcgagggtgcagtgagtcatgatcatactactgcactccagcctgggtgatggaatgagaccgtgtctcaaaagaaaaaaaagacttggtttctaaaatgtaccagaagaggtggaattatttggttctgcttgtaggcgtggatatgattctaataaggttttttgagttcagagggtccccagaaatcctgaaggttctcgggttcttaagctctgtgtgtagtctataattgttgtaaacttggtgaagtatcttctcaggcctgggcttagggggtgagtgggtgtttctggtgacttgcgggatggggaatgagagctaggtgggagctgtgctggtgtcagtcagccctgtcctctatgaagggctctgctctgcggttggaaccctgagttacccagaggtcttcccatcctgagccaggtgataacgtggtgctggaccagacctacctgtggcagggtgttcgagtggcggctggagcacagatccatcagtctctgctttgtgacaatgctgaggtcaaggaacgagtgacactgaaaccacgctctgtcctcacttcccaggtgagacctgatctatactgtgcacaggccctgaattgcatggcagtcacactgagccagaaggggcattatttccacccataatcctgtctaaaaaagttgctctcattatcaggatgcacttttcctccacaccctaatggttctgtgttttttttccccttaggtggtcgtgggcccaaatatcacgctgcctgagggctcggtgatctctttgcaccctccagatgcagaggaagatgaagatgatggcgagttcagtgatgattctggggctgaccaagaaaaggacaaagtgaagatgaaaggtgtgagactcaacaggtgtggggcatctgtgtgtctcgctgcctcatagaagaaccagtgtttcctcctggagggattggtgcttccgccgggccctctctatagatcattgccttttccaggttacaatccagcagaagtaggagctgctggcaagggctacctctggaaagctgcaggcatgaacatggaggaagaggaggaactgcagcagaatctgtggggtgagctaggcctgatgcctgcccttctcctcctgaatcggaatattttgaaggataatgaatacttcagagtcacattacttattcactcctttattcaggcagacagggcaggtatattgctctctgtcaatgactctttttttctttttcctcacccattatggcttctcaggactcaagatcaacatggaagaagagagtgaaagtgaaagtgagcaaagtatggattctgaggagccggacagccggggaggctcccctcagatggatgacatcaaaggtgagtggcaggggagaaatgcgctggaccagtttattctctgcctggatcaactagccagaggcttacgttcctcagaaagggtttggtatcgagtcaagactagatgacttagagcattctgaatgatgttggcccatgaacttatccttgctttgatttcagtgttccagaatgaagttttaggaacactacagcggggcaaagaggagaacatttcttgtgacaatctcgtcctggaaatcaactctctcaagtaagagcagcccctccctgttctcctcggggtgatcccgggaaggtagaggctttctcgtaagtgttttgtctccaaataggaacctattccttcgacatcccaaatggaaagaccagtagtatttggagcaaggagagcattattaagttctagcctcagcatagactttctccttcctaaaccctccccttccatattgttccatccagattcctctccaatgtctatcaaagtcatagttctaagcctgctgaaaggccagtgaaggccctggtgtcaccccagtctccccacaggtatgcctataacataagtctaaaggaggtgatgcaggtactgagccacgtggtcctggagttccccctgcaacagatggattccccgcttgactcaagccgctactgtgccctgctgcttcctgtgagcaaagattggagctgagtacaagggattgggtacaggcaaaggaaatcaggagtagactgtcttgttatattgggtgtatgtcacttctggttcctttttccttgcctctggaagctggttgggctctagagcagccttggctggttcagaggggtcagattgagttcaatactgactggcctttgagactccaggatttcataccatcctaggcccacaaaggtatattcagaatggacctggacattcagactctatggcagcaatttgacccaacacaagatcagcctctggggtgggaataggtattttgaggcagcctatagcatctgatcccctttcaccttccctaaggaatctctttttcccaaaccctgtcaacaactcccaagtccctctgacataattccacagaacctgtatcatctcccttttgtccacccatgtcatcagtatggatttgcttggatgtccaggtataggtgaatgcttaggaatatactgcagctcccttctttcttccatagctgctaaaggcctggagccctgtttttaggaactacataaagcgcgcagccgaccatttggaagcgttagcagccattgaggacttcttcctagagcatgaagctcttggtatttccatggccaaggtgaatatgacctcaagccccattcttctgcacttgctttcaaacgagggttggtgacccccttgggagacataaaatagaagctaatgtgaatccagtatggaccatccactcccaatatgcttattgctagaatagtacagcttggagccggactaataaggtagccatctggggggtggtctggaaatgtgcaaagctctccccagcaatagttccagaagttagacctgccccaggagcagagcgaacagctcactcttgtccgttttggaggaggctactcagtgcatagagggatctgagggcctggtagagtatcctgctggactttccaaggcccctgaggtcccctttattggccttttgcaggtactgatggctttctaccagctggagatcctggctgaggaaacaattctgagctggttcagccaaagagatacaactgacaagggccagcagttgcgcaagaatcaacaggtgcgtcaggctgtcctcctctcgccaagatggttatctcattcccaggtcctggcccctagactctagggtggttggtttctggggctctggttgttagagctgtttatctgccgaggggagcaggagagttatgtgcacctcccccagccgatctctcctctgcttctttacagctgcagaggttcatccagtggctaaaagaggcagaagaggagtcatctgaagatgactgaagtcacactgcctgctcctttgggtgtgattgagtgccctcctggctcctgggctgggacaagtgaggaactagctgcagagggatgagtgaccaccatccaggctgagactgaaaggagcagaggctggaactacagtattctttcccctgctagcaaccatgtgcctcccatcctgactgtggagttgggatgtggaagtggggctggaacaaagcttctgcctagggaggagctaagcaggcccggcagttggaggaaggccagaggaacagctttgtgctccggctttccctcagggaacagcagagagcagttggctctttctgctgcttgtatatgttaatat

SEQ ID NO: 11775 - DNA, 2307 bp, Homo sapiens
acactctggaattcctgactgccacaggtgtacaggaaacatttgtcttttgttgctggaaagctgctcaaatcaaagaacatttactgaagtcaaagtggtgccgccctacatctctcaatgtggttcgaataattacatcagagctctatcgatcactgggagatgtcctccgtgatgttgatgccaaggctttggtgcgctctgactttcttctggtgtatggggatgtcatctcaaacatcaatatcaccagagcccttgaggaacacaggttgagacggaagctagaaaaaaatgtttctgtgatgacgatgatcttcaaggagtcatcccccagccacccaactcgttgccacgaagacaatgtggtagtggctgtggatagtaccacaaacagggttctccattttcagaagacccagggtctccggcgttttgcatttcctctgagcctgtttcagggcagtagtgatggagtggaggttcgatatgatttactggattgtcatatcagcatctgttctcctcaggtggcacaactctttacagacaactttgactaccaaactcgagatgactttgtgcgaggtctcttagtgaatgaggagatcctagggaaccagatccacatgcacgtaacagctaaggaatatggtgcccgtgtctccaacctacacatgtactcagctgtctgtgctgacgtcatccgccgatgggtctaccctctcaccccagaggcgaacttcactgacagcaccacccagagctgcactcattcccggcacaacatctaccgagggcctgaggtcagcctgggccatggcagcatcctagaggaaaatgtgctcctgggctctggcactgtcattggcagcaattgctttatcaccaacagtgtcattggccccggctgccacattgccaggtgataacgtggtgctggaccagacctacctgtggcagggtgttcgagtggcggctggagcacagatccatcagtctctgctttgtgacaatgctgaggtcaaggaacgagtgacactgaaaccacgctctgtcctcacttcccaggtggtcgtgggcccaaatatcacgctgcctgagggctcggtgatctctttgcaccctccagatgcagaggaagatgaagatgatggcgagttcagtgatgattctggggctgaccaagaaaaggacaaagtgaagatgaaaggttacaatccagcagaagtaggagctgctggcaagggctacctctggaaagctgcaggcatgaacatggaggaagaggaggaactgcagcagaatctgtggggactcaagatcaacatggaagaagagagtgaaagtgaaagtgagcaaagtatggattctgaggagccggacagccggggaggctcccctcagatggatgacatcaaagtgttccagaatgaagttttaggaacactacagcggggcaaagaggagaacatttcttgtgacaatctcgtcctggaaatcaactctctcaagtatgcctataacataagtctaaaggaggtgatgcaggtactgagccacgtggtcctggagttccccctgcaacagatggattccccgcttgactcaagccgctactgtgccctgctgcttcctctcccttctttcttccatagctgctaaaggcctggagccctgtttttaggaactacataaagcgcgcagccgaccatttggaagcgttagcagccattgaggacttcttcctagagcatgaagctcttggtatttccatggccaaggtactgatggctttctaccagctggagatcctggctgaggaaacaattctgagctggttcagccaaagagatacaactgacaagggccagcagttgcgcaagaatcaacagctgcagaggttcatccagtggctaaaagaggcagaagaggagtcatctgaagatgactgaagtcacactgcctgctcctttgggtgtgattgagtgccctcctggctcctgggctgggacaagtgaggaactagctgcagagggatgagtgaccaccatccaggctgagactgaaaggagcagaggctggaactacagtattctttcccctgctagcaaccatgtgcctcccatcctgactgtggagttgggatgtggaagtggggctggaacaaagcttctgcctagggaggagctaagcaggcccggcagttggaggaaggccagaggaacagctttgtgctccggctttccctcagggaacagcagagagcagttggctctttctgctgcttgtatatgttaatat

SEQ ID NO: 11776 - DNA, 8622 bp, Homo sapiens
ctgccacaggtgtacaggaaacatttgtcttttgttgctggaaagctgctcaaatcaaagaacatttactgtaaggccctgcaacttttctttccatgtttcgccatctttttccagttttttcaggatgaatgtaactaaggggaaatgtgagaggggaaaaatgtgtctacttagatgtcattgtaagttctaagggtattttctacacttatcaggaggtgagcagctgaaactttgtatctgtctgtcttgggttttctgtgacaaagattaaagaataaacttgggttttttctgaatctcattataaagtttggtgccagtggactttgcttttatttaatggcttcagtatggaagttacaatgataacatctttgttttcccactgagtttctaaatcttgtttgttctcaccttcaaggatataaatgagctccttgtcatctttgtattcccactgcctagctcagtcccaagcatatagtgagcacttacatgtttgttgaaatcttgaaaactagggaatcgcattgcttatggaagtccaggatgtaaagactaggacattagcatggtctccatcagacagttcctaaatgttatatggattgcagaaggggaaagctgacgtgaagcgtgttcccaggctactttgtgtaccctaggcttcagcaggattttgagttcaaattgatgtttagggacaaggggtcaaggtatggagaggaaataaccatgtttcctaacccataaaacaagactggtgacacaggatgctgaaagcattcattatagttcataatactctttgaagttgaagacgctggcaagaacccaaaaaagccatcgagaaggactgtgagtgctgaaagggggtgaaaaatggggaaggctcaaatgatctttatgcttgatacactcattcccctcaccctcccttcctttaggaagtcaaagtggtgccgccctacatctctcaatgtggttcgaataattacatcagagctctatcgatcactgggagatgtcctccgtgatgttgatgccaaggctttggtgcgctctgactttcttctggtgtatggggatgtcatctcaaacatcaatatcaccagagcccttgaggaacacaggtcaggatgggaaaatgacaggaacaagggttaaagaccagcagagccctgagactgcttttttgcagttctgtccctcctgtcctttataggttgagacggaagctagaaaaaaatgtttctgtgatgacgatgatcttcaaggagtcatcccccagccacccaactcgttgccacgaagacaatgtggtagtggctgtggatagtaccacaaacagggttctccattttcagaagacccagggtctccggcgttttgcatttcctctggtgtgtggatatctggggtcctttgagatggggaagtgacaggcttcagtgggagaaacaaattaaagtccttgtaacttctccccacagagcctgtttcagggcagtagtgatggagtggaggttcgatatgatttactggattgtcatatcagcatctgttctcctcaggtgagctctttagggctggggctgcacacccaaagagtagaactctgtgggtctgttattgtccccttagaaggccagggtatatttcttctccctgtttattttcattatttttacttttattttttgagacagagtctcgctctgttgcccaggctggagtgcagtggtgtgatcccagctcactgcagactctgcctcctaggttcaagtgattctcctgcctcagcctcctgagtagcagggattacaggcacaccaccatgcctggctaatttttgtatttttagtagagatggggtttcaccatgttggccaggctggtctcgaactcctggtctcaagtgatctacctgtctcagcctcccaaagtgctgggattacaggcatgagccaccacacctggccttattttcatttttatttatatatattttttgagacagggtctcgctctgtggcccaggctggagcacagtggcaccatgactgctcactgcagcctcagcctcccaggttcaagggaacctcctgcctcagcctcctgagtagatggaaccacaggcatgcactaccactaatttttgtatttttttgtagagacggggttttgccatgttgtccggcctggtcacgaactcctgagctcaagcaatctgaccacctcagccttccaaaatgctgggattacaggcatgagccaccagttttttttgttgttgttgttgttattgttgttttgagatggagcctcgctctgtcgcccaggctggagtgcagtggcatgatctcagcttactgcagcctccacctcctgggttccagtgattctcctgcctcagcctctcaagtagctgggactacaggtacgcaccaccacatccggctattttttgtatttttcagtagagatggggtttcaccatattggccaggctggtctctaactcctgacctcaggtgatcctcccgccttggcctcccaaagtgctgcaatcacaggtgtgagcctctgcacccagcattttttttttttttttttttttttttttgagtcggagtttcactcttgttgcccaggctggatgcaatggtgcgatctcagctcactgcaacctccacctcccaggttcaagcaattcccctgcctcagcctcccaaatagctgggattgcaggcatgtgccaccacacccagctaatttttgtatttttagtagagacgaggttttaccatgttggtcaggctggtctcgaactcccaacctcaggtgatctgcctgcctcggcctcccaaagtgctggcattacgggcatgagccactgcacctggccttttttttttttttagaatctattgtaaagcaaagatcttgtctccagtatcccactgggagtctctttggaattctggtccatgttcagctgtcatagggtttgctaggtctctgggggattatctgtgctcctagagaatagtacttaatcctggccaagcgtggtggctcacgcttgtaatcccagcactttgggaggccgaggtgagtggatcatgaggtcaggagttcaagaccagcctgaccaacacagtgaaatcccatctctactaaaaaataaaaatacaaaaattagctgggcgtggtggcggacgcttgtaatcccagctacttgggaggctgaggcacaagaatcactttaacccaggaggtggaggttgcagtgagccgagatcatgcaactgcactccagcctgggcaacagagctagacttgtctcaaaaaaaaaaaaaaaagaatagtacttaattctagcccactccacttcccttccacaggtggcacaactctttacagacaactttgactaccaaactcgagatgactttgtgcgaggtctcttagtgaatgaggaggtgagaaaagtcttccaatgcctctttaggagagaggagaaggctatgattgtatctcatgctggtaacttttgatcttttttgtattttattgaggcttaggagggaggaaaagcaggggacaggaggaacagtacacaaagaagaatctttgtggcagtgagaggcagaggggaacttaaaaggattagaaaagttgtacttgggggcattcttcctgtctttcttgcttaggtgacctccctttccttctcattcagatcctagggaaccagatccacatgcacgtaacagctaaggaatatggtgcccgtgtctccaacctacacatgtactcagctgtctgtgctgacgtcatccgccgatgggtctaccctctcaccccagaggcgaacttcactgacagcaccacccagagctgcactcattcccggcacaacatctaccgagggcctgaggtcagcctgggccatggcagcatcctagaggaaaatgtgctcctgggctctggcactgtcattggcagcaattgctttatcaccaacagtgtcattggccccggctgccacattggtgagcacaggtggggaatcaagccaactatcctaggaacaggaacctgggggggccacgtctccagaaacacaagggatggctacacaagggacagtccctgggaataaggaactatagagcggctacctcaggaaaggaggaaacagggatttgaaaacagcgataccttaatttgtagcctgtgggcctctcattggatgactcttcacattccagggtaccctgtagtcacattcaggagcaagtagataattaacatgcagtaacaacatctatttagcacattacagtttacaaagggcttttatatacattgttacatttaatcttcataatttacaaataaacaggctcaacaagattttcttgcccaaggtcattggtaataatggtgggacctgaatctgggtattctgaatgtaagtccagtgttcttttgagtctaccataactgcctggttggcctcttggtatctcattttggttgcaggagtgtgatgcgtctaatagtactgcccctttccaagaacaacagtaaggctcagattctaggggctgagcgtggtggctcatgcttgtaatcctagcacactgggaagccatggtgggaggatcgcttgagcccaggagttcaagaccagcctgggcaacatagcgacaccccttctccacaaatgatacaaaaattagctgggcatgatggcgcgtgcctgtaatctcagctattcgggaggctgaggcaggaggattacctgagcccagaggtcgagggtgcagtgagtcatgatcatactactgcactccagcctgggtgatggaatgagaccgtgtctcaaaagaaaaaaaagacttggtttctaaaatgtaccagaagaggtggaattatttggttctgcttgtaggcgtggatatgattctaataaggttttttgagttcagagggtccccagaaatcctgaaggttctcgggttcttaagctctgtgtgtagtctataattgttgtaaacttggtgaagtatcttctcaggcctgggcttagggggtgagtgggtgtttctggtgacttgcgggatggggaatgagagctaggtgggagctgtgctggtgtcagtcagccctgtcctctatgaagggctctgctctgcggttggaaccctgagttacccagaggtcttcccatcctgagccaggtgataacgtggtgctggaccagacctacctgtggcagggtgttcgagtggcggctggagcacagatccatcagtctctgctttgtgacaatgctgaggtcaaggaacgagtgacactgaaaccacgctctgtcctcacttcccaggtgagacctgatctatactgtgcacaggccctgaattgcatggcagtcacactgagccagaaggggcattatttccacccataatcctgtctaaaaaagttgctctcattatcaggatgcacttttcctccacaccctaatggttctgtgttttttttccccttaggtggtcgtgggcccaaatatcacgctgcctgagggctcggtgatctctttgcaccctccagatgcagaggaagatgaagatgatggcgagttcagtgatgattctggggctgaccaagaaaaggacaaagtgaagatgaaaggtgtgagactcaacaggtgtggggcatctgtgtgtctcgctgcctcatagaagaaccagtgtttcctcctggagggattggtgcttccgccgggccctctctatagatcattgccttttccaggttacaatccagcagaagtaggagctgctggcaagggctacctctggaaagctgcaggcatgaacatggaggaagaggaggaactgcagcagaatctgtggggtgagctaggcctgatgcctgcccttctcctcctgaatcggaatattttgaaggataatgaatacttcagagtcacattacttattcactcctttattcaggcagacagggcaggtatattgctctctgtcaatgactctttttttctttttcctcacccattatggcttctcaggactcaagatcaacatggaagaagagagtgaaagtgaaagtgagcaaagtatggattctgaggagccggacagccggggaggctcccctcagatggatgacatcaaaggtgagtggcaggggagaaatgcgctggaccagtttattctctgcctggatcaactagccagaggcttacgttcctcagaaagggtttggtatcgagtcaagactagatgacttagagcattctgaatgatgttggcccatgaacttatccttgctttgatttcagtgttccagaatgaagttttaggaacactacagcggggcaaagaggagaacatttcttgtgacaatctcgtcctggaaatcaactctctcaagtaagagcagcccctccctgttctcctcggggtgatcccgggaaggtagaggctttctcgtaagtgttttgtctccaaataggaacctattccttcgacatcccaaatggaaagaccagtagtatttggagcaaggagagcattattaagttctagcctcagcatagactttctccttcctaaaccctccccttccatattgttccatccagattcctctccaatgtctatcaaagtcatagttctaagcctgctgaaaggccagtgaaggccctggtgtcaccccagtctccccacaggtatgcctataacataagtctaaaggaggtgatgcaggtactgagccacgtggtcctggagttccccctgcaacagatggattccccgcttgactcaagccgctactgtgccctgctgcttcctgtgagcaaagattggagctgagtacaagggattgggtacaggcaaaggaaatcaggagtagactgtcttgttatattgggtgtatgtcacttctggttcctttttccttgcctctggaagctggttgggctctagagcagccttggctggttcagaggggtcagattgagttcaatactgactggcctttgagactccaggatttcataccatcctaggcccacaaaggtatattcagaatggacctggacattcagactctatggcagcaatttgacccaacacaagatcagcctctggggtgggaataggtattttgaggcagcctatagcatctgatcccctttcaccttccctaaggaatctctttttcccaaaccctgtcaacaactcccaagtccctctgacataattccacagaacctgtatcatctcccttttgtccacccatgtcatcagtatggatttgcttggatgtccaggtataggtgaatgcttaggaatatactgcagctcccttctttcttccatagctgctaaaggcctggagccctgtttttaggaactacataaagcgcgcagccgaccatttggaagcgttagcagccattgaggacttcttcctagagcatgaagctcttggtatttccatggccaaggtgaatatgacctcaagccccattcttctgcacttgctttcaaacgagggttggtgacccccttgggagacataaaatagaagctaatgtgaatccagtatggaccatccactcccaatatgcttattgctagaatagtacagcttggagccggactaataaggtagccatctggggggtggtctggaaatgtgcaaagctctccccagcaatagttccagaagttagacctgccccaggagcagagcgaacagctcactcttgtccgttttggaggaggctactcagtgcatagagggatctgagggcctggtagagtatcctgctggactttccaaggcccctgaggtcccctttattggccttttgcaggtactgatggctttctaccagctggagatcctggctgaggaaacaattctgagctggttcagccaaagagatacaactgacaagggccagcagttgcgcaagaatcaacaggtgcgtcaggctgtcctcctctcgccaagatggttatctcattcccaggtcctggcccctagactctagggtggttggtttctggggctctggttgttagagctgtttatctgccgaggggagcaggagagttatgtgcacctcccccagccgatctctcctctgcttctttacagctgcagaggttcatccagtggctaaaagaggcagaagaggagtcatctgaagatgactgaagtcacactgcctgctcctttgggtgtgattgagtgccctcctggctcctgggctgggacaagtgaggaactagctgcagagggatgagtgaccaccatccaggctgagactgaaaggagcagaggctggaactacagtattctttcccctgctagcaaccatgtgcctcccatcctgactgtggagttgggatgtggaagtggggctggaacaaagcttctgcctagggaggagctaagcaggcccggcagttggaggaaggccagaggaacagctttgtgctccggctttccctcagggaacagcagagagcagttggctctttctgctgcttgtatatgtta

SEQ ID NO: 11777 - DNA, 2345 bp, Homo sapiens
ctgccacaggtgtacaggaaacatttgtcttttgttgctggaaagctgctcaaatcaaagaacatttactgaagtcaaagtggtgccgccctacatctctcaatgtggttcgaataattacatcagagctctatcgatcactgggagatgtcctccgtgatgttgatgccaaggctttggtgcgctctgactttcttctggtgtatggggatgtcatctcaaacatcaatatcaccagagcccttgaggaacacaggttgagacggaagctagaaaaaaatgtttctgtgatgacgatgatcttcaaggagtcatcccccagccacccaactcgttgccacgaagacaatgtggtagtggctgtggatagtaccacaaacagggttctccattttcagaagacccagggtctccggcgttttgcatttcctctgagcctgtttcagggcagtagtgatggagtggaggttcgatatgatttactggattgtcatatcagcatctgttctcctcaggtggcacaactctttacagacaactttgactaccaaactcgagatgactttgtgcgaggtctcttagtgaatgaggaggtgagaaaagtcttccaatgcctctttaggagagaggagaaggctatgattgtatctcatgctgatcctagggaaccagatccacatgcacgtaacagctaaggaatatggtgcccgtgtctccaacctacacatgtactcagctgtctgtgctgacgtcatccgccgatgggtctaccctctcaccccagaggcgaacttcactgacagcaccacccagagctgcactcattcccggcacaacatctaccgagggcctgaggtcagcctgggccatggcagcatcctagaggaaaatgtgctcctgggctctggcactgtcattggcagcaattgctttatcaccaacagtgtcattggccccggctgccacattgccaggtgataacgtggtgctggaccagacctacctgtggcagggtgttcgagtggcggctggagcacagatccatcagtctctgctttgtgacaatgctgaggtcaaggaacgagtgacactgaaaccacgctctgtcctcacttcccaggtggtcgtgggcccaaatatcacgctgcctgagggctcggtgatctctttgcaccctccagatgcagaggaagatgaagatgatggcgagttcagtgatgattctggggctgaccaagaaaaggacaaagtgaagatgaaaggtgtgagactcaacaggttacaatccagcagaagtaggagctgctggcaagggctacctctggaaagctgcaggcatgaacatggaggaagaggaggaactgcagcagaatctgtggggactcaagatcaacatggaagaagagagtgaaagtgaaagtgagcaaagtatggattctgaggagccggacagccggggaggctcccctcagatggatgacatcaaagtgttccagaatgaagttttaggaacactacagcggggcaaagaggagaacatttcttgtgacaatctcgtcctggaaatcaactctctcaagtatgcctataacataagtctaaaggaggtgatgcaggtactgagccacgtggtcctggagttccccctgcaacagatggattccccgcttgactcaagccgctactgtgccctgctgcttcctctgctaaaggcctggagccctgtttttaggaactacataaagcgcgcagccgaccatttggaagcgttagcagccattgaggacttcttcctagagcatgaagctcttggtatttccatggccaaggtactgatggctttctaccagctggagatcctggctgaggaaacaattctgagctggttcagccaaagagatacaactgacaagggccagcagttgcgcaagaatcaacagctgcagaggttcatccagtggctaaaagaggcagaagaggagtcatctgaagatgactgaagtcacactgcctgctcctttgggtgtgattgagtgccctcctggctcctgggctgggacaagtgaggaactagctgcagagggatgagtgaccaccatccaggctgagactgaaaggagcagaggctggaactacagtattctttcccctgctagcaaccatgtgcctcccatcctgactgtggagttgggatgtggaagtggggctggaacaaagcttctgcctagggaggagctaagcaggcccggcagttggaggaaggccagaggaacagctttgtgctccggctttccctcagggaacagcagagagcagttggctctttctgctgcttgtatatgtta

SEQ ID NO: 11778 - DNA, 9852 bp, Homo sapiens
aagcgcagcggcgcggggccgggaggcagcggtggcgggggagccagaggggcggaggaggaaccgccgccgcccctacaagcagttctggtggccgatagcttcgatcgccgcttcttccccatctccaaggaccagcctcgggtgagcgccgcgcacgcgagcagccagagggcaggaagggtggcagggctggagcaagttctcatttcggctaactacaacagcatgcccttgaaggacctgcgtctatgctgttatcctaaaaccggatgcagagggactgtctaaaccctgatgactgctgaccaagttagtggccggcagatttgggcattcgtaatgctgtccacctcgggtttgaaaggaatgaagagagctaaatgtagaaacagcgcttgagagaagccttcacgcggggattcagtgcccctagaagaggctgcgccgcttttaaccttgccgatgacggttgcttaggtgaaaagaaacgaccttttgcctctgaaagggcggtaatatgccttaaaaagagcgggctagatctcaggcagtgtattttttttttccttccaggttctaatgatagccggtgctatctgtcgaaaggacaaaatgggtttagtggttgattgccatcagcccccgagttgtctagacaatggggtattggactcagctgggtcgttcagcagtcagttcagaaagagggaactgcattggatttaaggaaaatcctctctaattccctcgaaaaagcctaatggctgttcatttttgacaagtgacgggagatggctaacctctgacacttagaaagggatcaaggaaggaaatcttatggggaagaaggccttagcaatgcttaaatttatggaaatatgattgatttccagtattatcctttgccagcagtgaactgccattctgtcacagctctgtgtctgatacaaggcacatagattctgtacttaccatccccaaattgcaatgtctcagactcaggcttagagcatggcatgaacatcaaaggcaggaacctgtttatctttgaattggaaagatacagcaaaattacactgtttggaaatacgaatagaggagtgaaaattgttgcagtggggtacccaaagggattcgagacctcaagttttttttcatcttgtatccttcaggtcctcttgcccctggccaatgtggcattaattgactacactctggaattcctgactgccacaggtgtacaggaaacatttgtcttttgttgctggaaagctgctcaaatcaaagaacatttactgtaaggccctgcaacttttctttccatgtttcgccatctttttccagttttttcaggatgaatgtaactaaggggaaatgtgagaggggaaaaatgtgtctacttagatgtcattgtaagttctaagggtattttctacacttatcaggaggtgagcagctgaaactttgtatctgtctgtcttgggttttctgtgacaaagattaaagaataaacttgggttttttctgaatctcattataaagtttggtgccagtggactttgcttttatttaatggcttcagtatggaagttacaatgataacatctttgttttcccactgagtttctaaatcttgtttgttctcaccttcaaggatataaatgagctccttgtcatctttgtattcccactgcctagctcagtcccaagcatatagtgagcacttacatgtttgttgaaatcttgaaaactagggaatcgcattgcttatggaagtccaggatgtaaagactaggacattagcatggtctccatcagacagttcctaaatgttatatggattgcagaaggggaaagctgacgtgaagcgtgttcccaggctactttgtgtaccctaggcttcagcaggattttgagttcaaattgatgtttagggacaaggggtcaaggtatggagaggaaataaccatgtttcctaacccataaaacaagactggtgacacaggatgctgaaagcattcattatagttcataatactctttgaagttgaagacgctggcaagaacccaaaaaagccatcgagaaggactgtgagtgctgaaagggggtgaaaaatggggaaggctcaaatgatctttatgcttgatacactcattcccctcaccctcccttcctttaggaagtcaaagtggtgccgccctacatctctcaatgtggttcgaataattacatcagagctctatcgatcactgggagatgtcctccgtgatgttgatgccaaggctttggtgcgctctgactttcttctggtgtatggggatgtcatctcaaacatcaatatcaccagagcccttgaggaacacaggtcaggatgggaaaatgacaggaacaagggttaaagaccagcagagccctgagactgcttttttgcagttctgtccctcctgtcctttataggttgagacggaagctagaaaaaaatgtttctgtgatgacgatgatcttcaaggagtcatcccccagccacccaactcgttgccacgaagacaatgtggtagtggctgtggatagtaccacaaacagggttctccattttcagaagacccagggtctccggcgttttgcatttcctctggtgtgtggatatctggggtcctttgagatggggaagtgacaggcttcagtgggagaaacaaattaaagtccttgtaacttctccccacagagcctgtttcagggcagtagtgatggagtggaggttcgatatgatttactggattgtcatatcagcatctgttctcctcaggtgagctctttagggctggggctgcacacccaaagagtagaactctgtgggtctgttattgtccccttagaaggccagggtatatttcttctccctgtttattttcattatttttacttttattttttgagacagagtctcgctctgttgcccaggctggagtgcagtggtgtgatcccagctcactgcagactctgcctcctaggttcaagtgattctcctgcctcagcctcctgagtagcagggattacaggcacaccaccatgcctggctaatttttgtatttttagtagagatggggtttcaccatgttggccaggctggtctcgaactcctggtctcaagtgatctacctgtctcagcctcccaaagtgctgggattacaggcatgagccaccacacctggccttattttcatttttatttatatatattttttgagacagggtctcgctctgtggcccaggctggagcacagtggcaccatgactgctcactgcagcctcagcctcccaggttcaagggaacctcctgcctcagcctcctgagtagatggaaccacaggcatgcactaccactaatttttgtatttttttgtagagacggggttttgccatgttgtccggcctggtcacgaactcctgagctcaagcaatctgaccacctcagccttccaaaatgctgggattacaggcatgagccaccagttttttttgttgttgttgttgttattgttgttttgagatggagcctcgctctgtcgcccaggctggagtgcagtggcatgatctcagcttactgcagcctccacctcctgggttccagtgattctcctgcctcagcctctcaagtagctgggactacaggtacgcaccaccacatccggctattttttgtatttttcagtagagatggggtttcaccatattggccaggctggtctctaactcctgacctcaggtgatcctcccgccttggcctcccaaagtgctgcaatcacaggtgtgagcctctgcacccagcattttttttttttttttttttttttttttgagtcggagtttcactcttgttgcccaggctggatgcaatggtgcgatctcagctcactgcaacctccacctcccaggttcaagcaattcccctgcctcagcctcccaaatagctgggattgcaggcatgtgccaccacacccagctaatttttgtatttttagtagagacgaggttttaccatgttggtcaggctggtctcgaactcccaacctcaggtgatctgcctgcctcggcctcccaaagtgctggcattacgggcatgagccactgcacctggccttttttttttttttagaatctattgtaaagcaaagatcttgtctccagtatcccactgggagtctctttggaattctggtccatgttcagctgtcatagggtttgctaggtctctgggggattatctgtgctcctagagaatagtacttaatcctggccaagcgtggtggctcacgcttgtaatcccagcactttgggaggccgaggtgagtggatcatgaggtcaggagttcaagaccagcctgaccaacacagtgaaatcccatctctactaaaaaataaaaatacaaaaattagctgggcgtggtggcggacgcttgtaatcccagctacttgggaggctgaggcacaagaatcactttaacccaggaggtggaggttgcagtgagccgagatcatgcaactgcactccagcctgggcaacagagctagacttgtctcaaaaaaaaaaaaaaaagaatagtacttaattctagcccactccacttcccttccacaggtggcacaactctttacagacaactttgactaccaaactcgagatgactttgtgcgaggtctcttagtgaatgaggaggtgagaaaagtcttccaatgcctctttaggagagaggagaaggctatgattgtatctcatgctggtaacttttgatcttttttgtattttattgaggcttaggagggaggaaaagcaggggacaggaggaacagtacacaaagaagaatctttgtggcagtgagaggcagaggggaacttaaaaggattagaaaagttgtacttgggggcattcttcctgtctttcttgcttaggtgacctccctttccttctcattcagatcctagggaaccagatccacatgcacgtaacagctaaggaatatggtgcccgtgtctccaacctacacatgtactcagctgtctgtgctgacgtcatccgccgatgggtctaccctctcaccccagaggcgaacttcactgacagcaccacccagagctgcactcattcccggcacaacatctaccgagggcctgaggtcagcctgggccatggcagcatcctagaggaaaatgtgctcctgggctctggcactgtcattggcagcaattgctttatcaccaacagtgtcattggccccggctgccacattggtgagcacaggtggggaatcaagccaactatcctaggaacaggaacctgggggggccacgtctccagaaacacaagggatggctacacaagggacagtccctgggaataaggaactatagagcggctacctcaggaaaggaggaaacagggatttgaaaacagcgataccttaatttgtagcctgtgggcctctcattggatgactcttcacattccagggtaccctgtagtcacattcaggagcaagtagataattaacatgcagtaacaacatctatttagcacattacagtttacaaagggcttttatatacattgttacatttaatcttcataatttacaaataaacaggctcaacaagattttcttgcccaaggtcattggtaataatggtgggacctgaatctgggtattctgaatgtaagtccagtgttcttttgagtctaccataactgcctggttggcctcttggtatctcattttggttgcaggagtgtgatgcgtctaatagtactgcccctttccaagaacaacagtaaggctcagattctaggggctgagcgtggtggctcatgcttgtaatcctagcacactgggaagccatggtgggaggatcgcttgagcccaggagttcaagaccagcctgggcaacatagcgacaccccttctccacaaatgatacaaaaattagctgggcatgatggcgcgtgcctgtaatctcagctattcgggaggctgaggcaggaggattacctgagcccagaggtcgagggtgcagtgagtcatgatcatactactgcactccagcctgggtgatggaatgagaccgtgtctcaaaagaaaaaaaagacttggtttctaaaatgtaccagaagaggtggaattatttggttctgcttgtaggcgtggatatgattctaataaggttttttgagttcagagggtccccagaaatcctgaaggttctcgggttcttaagctctgtgtgtagtctataattgttgtaaacttggtgaagtatcttctcaggcctgggcttagggggtgagtgggtgtttctggtgacttgcgggatggggaatgagagctaggtgggagctgtgctggtgtcagtcagccctgtcctctatgaagggctctgctctgcggttggaaccctgagttacccagaggtcttcccatcctgagccaggtgataacgtggtgctggaccagacctacctgtggcagggtgttcgagtggcggctggagcacagatccatcagtctctgctttgtgacaatgctgaggtcaaggaacgagtgacactgaaaccacgctctgtcctcacttcccaggtgagacctgatctatactgtgcacaggccctgaattgcatggcagtcacactgagccagaaggggcattatttccacccataatcctgtctaaaaaagttgctctcattatcaggatgcacttttcctccacaccctaatggttctgtgttttttttccccttaggtggtcgtgggcccaaatatcacgctgcctgagggctcggtgatctctttgcaccctccagatgcagaggaagatgaagatgatggcgagttcagtgatgattctggggctgaccaagaaaaggacaaagtgaagatgaaaggtgtgagactcaacaggtgtggggcatctgtgtgtctcgctgcctcatagaagaaccagtgtttcctcctggagggattggtgcttccgccgggccctctctatagatcattgccttttccaggttacaatccagcagaagtaggagctgctggcaagggctacctctggaaagctgcaggcatgaacatggaggaagaggaggaactgcagcagaatctgtggggtgagctaggcctgatgcctgcccttctcctcctgaatcggaatattttgaaggataatgaatacttcagagtcacattacttattcactcctttattcaggcagacagggcaggtatattgctctctgtcaatgactctttttttctttttcctcacccattatggcttctcaggactcaagatcaacatggaagaagagagtgaaagtgaaagtgagcaaagtatggattctgaggagccggacagccggggaggctcccctcagatggatgacatcaaaggtgagtggcaggggagaaatgcgctggaccagtttattctctgcctggatcaactagccagaggcttacgttcctcagaaagggtttggtatcgagtcaagactagatgacttagagcattctgaatgatgttggcccatgaacttatccttgctttgatttcagtgttccagaatgaagttttaggaacactacagcggggcaaagaggagaacatttcttgtgacaatctcgtcctggaaatcaactctctcaagtaagagcagcccctccctgttctcctcggggtgatcccgggaaggtagaggctttctcgtaagtgttttgtctccaaataggaacctattccttcgacatcccaaatggaaagaccagtagtatttggagcaaggagagcattattaagttctagcctcagcatagactttctccttcctaaaccctccccttccatattgttccatccagattcctctccaatgtctatcaaagtcatagttctaagcctgctgaaaggccagtgaaggccctggtgtcaccccagtctccccacaggtatgcctataacataagtctaaaggaggtgatgcaggtactgagccacgtggtcctggagttccccctgcaacagatggattccccgcttgactcaagccgctactgtgccctgctgcttcctgtgagcaaagattggagctgagtacaagggattgggtacaggcaaaggaaatcaggagtagactgtcttgttatattgggtgtatgtcacttctggttcctttttccttgcctctggaagctggttgggctctagagcagccttggctggttcagaggggtcagattgagttcaatactgactggcctttgagactccaggatttcataccatcctaggcccacaaaggtatattcagaatggacctggacattcagactctatggcagcaatttgacccaacacaagatcagcctctggggtgggaataggtattttgaggcagcctatagcatctgatcccctttcaccttccctaaggaatctctttttcccaaaccctgtcaacaactcccaagtccctctgacataattccacagaacctgtatcatctcccttttgtccacccatgtcatcagtatggatttgcttggatgtccaggtataggtgaatgcttaggaatatactgcagctcccttctttcttccatagctgctaaaggcctggagccctgtttttaggaactacataaagcgcgcagccgaccatttggaagcgttagcagccattgaggacttcttcctagagcatgaagctcttggtatttccatggccaaggtgaatatgacctcaagccccattcttctgcacttgctttcaaacgagggttggtgacccccttgggagacataaaatagaagctaatgtgaatccagtatggaccatccactcccaatatgcttattgctagaatagtacagcttggagccggactaataaggtagccatctggggggtggtctggaaatgtgcaaagctctccccagcaatagttccagaagttagacctgccccaggagcagagcgaacagctcactcttgtccgttttggaggaggctactcagtgcatagagggatctgagggcctggtagagtatcctgctggactttccaaggcccctgaggtcccctttattggccttttgcaggtactgatggctttctaccagctggagatcctggctgaggaaacaattctgagctggttcagccaaagagatacaactgacaagggccagcagttgcgcaagaatcaacaggtgcgtcaggctgtcctcctctcgccaagatggttatctcattcccaggtcctggcccctagactctagggtggttggtttctggggctctggttgttagagctgtttatctgccgaggggagcaggagagttatgtgcacctcccccagccgatctctcctctgcttctttacagctgcagaggttcatccagtggctaaaagaggcagaagaggagtcatctgaagatgactgaagtcacactgcctgctcctttgggtgtgattgagtgccctcctggctcctgggctgggacaagtgaggaactagctgcagagggatgagtgaccaccatccaggctgagactgaaaggagcagaggctggaactacagtattctttcccctgctagcaaccatgtgcctcccatcctgactgtggagttgggatgtggaagtggggctggaacaaagcttctgcctagggaggagctaagcaggcccggcagttggaggaaggccagaggaacagctttgtgctccggctttccctcagggaacagcagagagcagttggctctttctgctgcttgtatatgtta

SEQ ID NO: 11779 - DNA, 2483 bp, Homo sapiens
aagcgcagcggcgcggggccgggaggcagcggtggcgggggagccagaggggcggaggaggaaccgccgccgcccctacaagcagttctggtggccgatagcttcgatcgccgcttcttccccatctccaaggaccagcctcgggtcctcttgcccctggccaatgtggcattaattgactacactctggaattcctgactgccacaggtgtacaggaaacatttgtcttttgttgctggaaagctgctcaaatcaaagaacatttactgaagtcaaagtggtgccgccctacatctctcaatgtggttcgaataattacatcagagctctatcgatcactgggagatgtcctccgtgatgttgatgccaaggctttggtgcgctctgactttcttctggtgtatggggatgtcatctcaaacatcaatatcaccagagcccttgaggaacacaggttgagacggaagctagaaaaaaatgtttctgtgatgacgatgatcttcaaggagtcatcccccagccacccaactcgttgccacgaagacaatgtggtagtggctgtggatagtaccacaaacagggttctccattttcagaagacccagggtctccggcgttttgcatttcctctgagcctgtttcagggcagtagtgatggagtggaggttcgatatgatttactggattgtcatatcagcatctgttctcctcagcccactccacttcccttccacaggtggcacaactctttacagacaactttgactaccaaactcgagatgactttgtgcgaggtctcttagtgaatgaggagatcctagggaaccagatccacatgcacgtaacagctaaggaatatggtgcccgtgtctccaacctacacatgtactcagctgtctgtgctgacgtcatccgccgatgggtctaccctctcaccccagaggcgaacttcactgacagcaccacccagagctgcactcattcccggcacaacatctaccgagggcctgaggtcagcctgggccatggcagcatcctagaggaaaatgtgctcctgggctctggcactgtcattggcagcaattgctttatcaccaacagtgtcattggccccggctgccacattggtgataacgtggtgctggaccagacctacctgtggcagggtgttcgagtggcggctggagcacagatccatcagtctctgctttgtgacaatgctgaggtcaaggaacgagtgacactgaaaccacgctctgtcctcacttcccaggtggtcgtgggcccaaatatcacgctgcctgagggctcggtgatctctttgcaccctccagatgcagaggaagatgaagatgatggcgagttcagtgatgattctggggctgaccaagaaaaggacaaagtgaagatgaaaggttacaatccagcagaagtaggagctgctggcaagggctacctctggaaagctgcaggcatgaacatggaggaagaggaggaactgcagcagaatctgtggggactcaagatcaacatggaagaagagagtgaaagtgaaagtgagcaaagtatggattctgaggagccggacagccggggaggctcccctcagatggatgacatcaaagtgttccagaatgaagttttaggaacactacagcggggcaaagaggagaacatttcttgtgacaatctcgtcctggaaatcaactctctcaagtatgcctataacataagtctaaaggaggtgatgcaggtactgagccacgtggtcctggagttccccctgcaacagatggattccccgcttgactcaagccgctactgtgccctgctgcttcctctgctaaaggcctggagccctgtttttaggaactacataaagcgcgcagccgaccatttggaagcgttagcagccattgaggacttcttcctagagcatgaagctcttggtatttccatggccaaggtactgatggctttctaccagctggagatcctggctgaggaaacaattctgagctggttcagccaaagagatacaactgacaagggccagcagttgcgcaagaatcaacagctgcagaggttcatccagtggctaaaagaggcagaagaggagtcatctgaagatgactgaagtcacactgcctgctcctttgggtgtgattgagtgccctcctggctcctgggctgggacaagtgaggaactagctgcagagggatgagtgaccaccatccaggctgagactgaaaggagcagaggctggaactacagtattctttcccctgctagcaaccatgtgcctcccatcctgactgtggagttgggatgtggaagtggggctggaacaaagcttctgcctagggaggagctaagcaggcccggcagttggaggaaggccagaggaacagctttgtgctccggctttccctcagggaacagcagagagcagttggctctttctgctgcttgtatatgtta

SEQ ID NO: 11780 - DNA, 9818 bp, Homo sapiens
gcggaagtggtgaccgtgagagaagaagatggcggcccctgtagtggcgccgcctggtgtggtggttagtcgggctaacaagcgcagcggcgcggggccgggaggcagcggtggcgggggagccagaggggcggaggaggaaccgccgccgcccctacaagcagttctggtggccgatagcttcgatcgccgcttcttccccatctccaaggaccagcctcgggtgagcgccgcgcacgcgagcagccagagggcaggaagggtggcagggctggagcaagttctcatttcggctaactacaacagcatgcccttgaaggacctgcgtctatgctgttatcctaaaaccggatgcagagggactgtctaaaccctgatgactgctgaccaagttagtggccggcagatttgggcattcgtaatgctgtccacctcgggtttgaaaggaatgaagagagctaaatgtagaaacagcgcttgagagaagccttcacgcggggattcagtgcccctagaagaggctgcgccgcttttaaccttgccgatgacggttgcttaggtgaaaagaaacgaccttttgcctctgaaagggcggtaatatgccttaaaaagagcgggctagatctcaggcagtgtattttttttttccttccaggttctaatgatagccggtgctatctgtcgaaaggacaaaatgggtttagtggttgattgccatcagcccccgagttgtctagacaatggggtattggactcagctgggtcgttcagcagtcagttcagaaagagggaactgcattggatttaaggaaaatcctctctaattccctcgaaaaagcctaatggctgttcatttttgacaagtgacgggagatggctaacctctgacacttagaaagggatcaaggaaggaaatcttatggggaagaaggccttagcaatgcttaaatttatggaaatatgattgatttccagtattatcctttgccagcagtgaactgccattctgtcacagctctgtgtctgatacaaggcacatagattctgtacttaccatccccaaattgcaatgtctcagactcaggcttagagcatggcatgaacatcaaaggcaggaacctgtttatctttgaattggaaagatacagcaaaattacactgtttggaaatacgaatagaggagtgaaaattgttgcagtggggtacccaaagggattcgagacctcaagttttttttcatcttgtatccttcaggtcctcttgcccctggccaatgtggcattaattgactacactctggaattcctgactgccacaggtgtacaggaaacatttgtcttttgttgctggaaagctgctcaaatcaaagaacatttactgtaaggccctgcaacttttctttccatgtttcgccatctttttccagttttttcaggatgaatgtaactaaggggaaatgtgagaggggaaaaatgtgtctacttagatgtcattgtaagttctaagggtattttctacacttatcaggaggtgagcagctgaaactttgtatctgtctgtcttgggttttctgtgacaaagattaaagaataaacttgggttttttctgaatctcattataaagtttggtgccagtggactttgcttttatttaatggcttcagtatggaagttacaatgataacatctttgttttcccactgagtttctaaatcttgtttgttctcaccttcaaggatataaatgagctccttgtcatctttgtattcccactgcctagctcagtcccaagcatatagtgagcacttacatgtttgttgaaatcttgaaaactagggaatcgcattgcttatggaagtccaggatgtaaagactaggacattagcatggtctccatcagacagttcctaaatgttatatggattgcagaaggggaaagctgacgtgaagcgtgttcccaggctactttgtgtaccctaggcttcagcaggattttgagttcaaattgatgtttagggacaaggggtcaaggtatggagaggaaataaccatgtttcctaacccataaaacaagactggtgacacaggatgctgaaagcattcattatagttcataatactctttgaagttgaagacgctggcaagaacccaaaaaagccatcgagaaggactgtgagtgctgaaagggggtgaaaaatggggaaggctcaaatgatctttatgcttgatacactcattcccctcaccctcccttcctttaggaagtcaaagtggtgccgccctacatctctcaatgtggttcgaataattacatcagagctctatcgatcactgggagatgtcctccgtgatgttgatgccaaggctttggtgcgctctgactttcttctggtgtatggggatgtcatctcaaacatcaatatcaccagagcccttgaggaacacaggtcaggatgggaaaatgacaggaacaagggttaaagaccagcagagccctgagactgcttttttgcagttctgtccctcctgtcctttataggttgagacggaagctagaaaaaaatgtttctgtgatgacgatgatcttcaaggagtcatcccccagccacccaactcgttgccacgaagacaatgtggtagtggctgtggatagtaccacaaacagggttctccattttcagaagacccagggtctccggcgttttgcatttcctctggtgtgtggatatctggggtcctttgagatggggaagtgacaggcttcagtgggagaaacaaattaaagtccttgtaacttctccccacagagcctgtttcagggcagtagtgatggagtggaggttcgatatgatttactggattgtcatatcagcatctgttctcctcaggtgagctctttagggctggggctgcacacccaaagagtagaactctgtgggtctgttattgtccccttagaaggccagggtatatttcttctccctgtttattttcattatttttacttttattttttgagacagagtctcgctctgttgcccaggctggagtgcagtggtgtgatcccagctcactgcagactctgcctcctaggttcaagtgattctcctgcctcagcctcctgagtagcagggattacaggcacaccaccatgcctggctaatttttgtatttttagtagagatggggtttcaccatgttggccaggctggtctcgaactcctggtctcaagtgatctacctgtctcagcctcccaaagtgctgggattacaggcatgagccaccacacctggccttattttcatttttatttatatatattttttgagacagggtctcgctctgtggcccaggctggagcacagtggcaccatgactgctcactgcagcctcagcctcccaggttcaagggaacctcctgcctcagcctcctgagtagatggaaccacaggcatgcactaccactaatttttgtatttttttgtagagacggggttttgccatgttgtccggcctggtcacgaactcctgagctcaagcaatctgaccacctcagccttccaaaatgctgggattacaggcatgagccaccagttttttttgttgttgttgttgttattgttgttttgagatggagcctcgctctgtcgcccaggctggagtgcagtggcatgatctcagcttactgcagcctccacctcctgggttccagtgattctcctgcctcagcctctcaagtagctgggactacaggtacgcaccaccacatccggctattttttgtatttttcagtagagatggggtttcaccatattggccaggctggtctctaactcctgacctcaggtgatcctcccgccttggcctcccaaagtgctgcaatcacaggtgtgagcctctgcacccagcattttttttttttttttttttttttttttgagtcggagtttcactcttgttgcccaggctggatgcaatggtgcgatctcagctcactgcaacctccacctcccaggttcaagcaattcccctgcctcagcctcccaaatagctgggattgcaggcatgtgccaccacacccagctaatttttgtatttttagtagagacgaggttttaccatgttggtcaggctggtctcgaactcccaacctcaggtgatctgcctgcctcggcctcccaaagtgctggcattacgggcatgagccactgcacctggccttttttttttttttagaatctattgtaaagcaaagatcttgtctccagtatcccactgggagtctctttggaattctggtccatgttcagctgtcatagggtttgctaggtctctgggggattatctgtgctcctagagaatagtacttaatcctggccaagcgtggtggctcacgcttgtaatcccagcactttgggaggccgaggtgagtggatcatgaggtcaggagttcaagaccagcctgaccaacacagtgaaatcccatctctactaaaaaataaaaatacaaaaattagctgggcgtggtggcggacgcttgtaatcccagctacttgggaggctgaggcacaagaatcactttaacccaggaggtggaggttgcagtgagccgagatcatgcaactgcactccagcctgggcaacagagctagacttgtctcaaaaaaaaaaaaaaaagaatagtacttaattctagcccactccacttcccttccacaggtggcacaactctttacagacaactttgactaccaaactcgagatgactttgtgcgaggtctcttagtgaatgaggaggtgagaaaagtcttccaatgcctctttaggagagaggagaaggctatgattgtatctcatgctggtaacttttgatcttttttgtattttattgaggcttaggagggaggaaaagcaggggacaggaggaacagtacacaaagaagaatctttgtggcagtgagaggcagaggggaacttaaaaggattagaaaagttgtacttgggggcattcttcctgtctttcttgcttaggtgacctccctttccttctcattcagatcctagggaaccagatccacatgcacgtaacagctaaggaatatggtgcccgtgtctccaacctacacatgtactcagctgtctgtgctgacgtcatccgccgatgggtctaccctctcaccccagaggcgaacttcactgacagcaccacccagagctgcactcattcccggcacaacatctaccgagggcctgaggtcagcctgggccatggcagcatcctagaggaaaatgtgctcctgggctctggcactgtcattggcagcaattgctttatcaccaacagtgtcattggccccggctgccacattggtgagcacaggtggggaatcaagccaactatcctaggaacaggaacctgggggggccacgtctccagaaacacaagggatggctacacaagggacagtccctgggaataaggaactatagagcggctacctcaggaaaggaggaaacagggatttgaaaacagcgataccttaatttgtagcctgtgggcctctcattggatgactcttcacattccagggtaccctgtagtcacattcaggagcaagtagataattaacatgcagtaacaacatctatttagcacattacagtttacaaagggcttttatatacattgttacatttaatcttcataatttacaaataaacaggctcaacaagattttcttgcccaaggtcattggtaataatggtgggacctgaatctgggtattctgaatgtaagtccagtgttcttttgagtctaccataactgcctggttggcctcttggtatctcattttggttgcaggagtgtgatgcgtctaatagtactgcccctttccaagaacaacagtaaggctcagattctaggggctgagcgtggtggctcatgcttgtaatcctagcacactgggaagccatggtgggaggatcgcttgagcccaggagttcaagaccagcctgggcaacatagcgacaccccttctccacaaatgatacaaaaattagctgggcatgatggcgcgtgcctgtaatctcagctattcgggaggctgaggcaggaggattacctgagcccagaggtcgagggtgcagtgagtcatgatcatactactgcactccagcctgggtgatggaatgagaccgtgtctcaaaagaaaaaaaagacttggtttctaaaatgtaccagaagaggtggaattatttggttctgcttgtaggcgtggatatgattctaataaggttttttgagttcagagggtccccagaaatcctgaaggttctcgggttcttaagctctgtgtgtagtctataattgttgtaaacttggtgaagtatcttctcaggcctgggcttagggggtgagtgggtgtttctggtgacttgcgggatggggaatgagagctaggtgggagctgtgctggtgtcagtcagccctgtcctctatgaagggctctgctctgcggttggaaccctgagttacccagaggtcttcccatcctgagccaggtgataacgtggtgctggaccagacctacctgtggcagggtgttcgagtggcggctggagcacagatccatcagtctctgctttgtgacaatgctgaggtcaaggaacgagtgacactgaaaccacgctctgtcctcacttcccaggtgagacctgatctatactgtgcacaggccctgaattgcatggcagtcacactgagccagaaggggcattatttccacccataatcctgtctaaaaaagttgctctcattatcaggatgcacttttcctccacaccctaatggttctgtgttttttttccccttaggtggtcgtgggcccaaatatcacgctgcctgagggctcggtgatctctttgcaccctccagatgcagaggaagatgaagatgatggcgagttcagtgatgattctggggctgaccaagaaaaggacaaagtgaagatgaaaggtgtgagactcaacaggtgtggggcatctgtgtgtctcgctgcctcatagaagaaccagtgtttcctcctggagggattggtgcttccgccgggccctctctatagatcattgccttttccaggttacaatccagcagaagtaggagctgctggcaagggctacctctggaaagctgcaggcatgaacatggaggaagaggaggaactgcagcagaatctgtggggtgagctaggcctgatgcctgcccttctcctcctgaatcggaatattttgaaggataatgaatacttcagagtcacattacttattcactcctttattcaggcagacagggcaggtatattgctctctgtcaatgactctttttttctttttcctcacccattatggcttctcaggactcaagatcaacatggaagaagagagtgaaagtgaaagtgagcaaagtatggattctgaggagccggacagccggggaggctcccctcagatggatgacatcaaaggtgagtggcaggggagaaatgcgctggaccagtttattctctgcctggatcaactagccagaggcttacgttcctcagaaagggtttggtatcgagtcaagactagatgacttagagcattctgaatgatgttggcccatgaacttatccttgctttgatttcagtgttccagaatgaagttttaggaacactacagcggggcaaagaggagaacatttcttgtgacaatctcgtcctggaaatcaactctctcaagtaagagcagcccctccctgttctcctcggggtgatcccgggaaggtagaggctttctcgtaagtgttttgtctccaaataggaacctattccttcgacatcccaaatggaaagaccagtagtatttggagcaaggagagcattattaagttctagcctcagcatagactttctccttcctaaaccctccccttccatattgttccatccagattcctctccaatgtctatcaaagtcatagttctaagcctgctgaaaggccagtgaaggccctggtgtcaccccagtctccccacaggtatgcctataacataagtctaaaggaggtgatgcaggtactgagccacgtggtcctggagttccccctgcaacagatggattccccgcttgactcaagccgctactgtgccctgctgcttcctgtgagcaaagattggagctgagtacaagggattgggtacaggcaaaggaaatcaggagtagactgtcttgttatattgggtgtatgtcacttctggttcctttttccttgcctctggaagctggttgggctctagagcagccttggctggttcagaggggtcagattgagttcaatactgactggcctttgagactccaggatttcataccatcctaggcccacaaaggtatattcagaatggacctggacattcagactctatggcagcaatttgacccaacacaagatcagcctctggggtgggaataggtattttgaggcagcctatagcatctgatcccctttcaccttccctaaggaatctctttttcccaaaccctgtcaacaactcccaagtccctctgacataattccacagaacctgtatcatctcccttttgtccacccatgtcatcagtatggatttgcttggatgtccaggtataggtgaatgcttaggaatatactgcagctcccttctttcttccatagctgctaaaggcctggagccctgtttttaggaactacataaagcgcgcagccgaccatttggaagcgttagcagccattgaggacttcttcctagagcatgaagctcttggtatttccatggccaaggtgaatatgacctcaagccccattcttctgcacttgctttcaaacgagggttggtgacccccttgggagacataaaatagaagctaatgtgaatccagtatggaccatccactcccaatatgcttattgctagaatagtacagcttggagccggactaataaggtagccatctggggggtggtctggaaatgtgcaaagctctccccagcaatagttccagaagttagacctgccccaggagcagagcgaacagctcactcttgtccgttttggaggaggctactcagtgcatagagggatctgagggcctggtagagtatcctgctggactttccaaggcccctgaggtcccctttattggccttttgcaggtactgatggctttctaccagctggagatcctggctgaggaaacaattctgagctggttcagccaaagagatacaactgacaagggccagcagttgcgcaagaatcaacaggtgcgtcaggctgtcctcctctcgccaagatggttatctcattcccaggtcctggcccctagactctagggtggttggtttctggggctctggttgttagagctgtttatctgccgaggggagcaggagagttatgtgcacctcccccagccgatctctcctctgcttctttacagctgcagaggttcatccagtggctaaaagaggcagaagaggagtcatctgaagatgactgaagtcacactgcctgctcctttgggtgtgattgagtgccctcctggctcctgggctgggacaagtgaggaactagctgcagagggatgagtgaccaccatccaggctgagactgaaaggagcagaggctggaactacagtattctttcccctgctagcaaccatgtgcctcccatcctgactgtggagttgggatgtggaagtggggctggaacaaagcttctgcctagggag

SEQ ID NO: 11781 - DNA, 2760 bp, Homo sapiens
gcggaagtggtgaccgtgagagaagaagatggcggcccctgtagtggcgccgcctggtgtggtggttagtcgggctaacaagcgcagcggcgcggggccgggaggcagcggtggcgggggagccagaggggcggaggaggaaccgccgccgcccctacaagcagttctggtggccgatagcttcgatcgccgcttcttccccatctccaaggaccagcctcgggtcctcttgcccctggccaatgtggcattaattgactacactctggaattcctgactgccacaggtgtacaggaaacatttgtcttttgttgctggaaagctgctcaaatcaaagaacatttactgaagtcaaagtggtgccgccctacatctctcaatgtggttcgaataattacatcagagctctatcgatcactgggagatgtcctccgtgatgttgatgccaaggctttggtgcgctctgactttcttctggtgtatggggatgtcatctcaaacatcaatatcaccagagcccttgaggaacacaggttgagacggaagctagaaaaaaatgtttctgtgatgacgatgatcttcaaggagtcatcccccagccacccaactcgttgccacgaagacaatgtggtagtggctgtggatagtaccacaaacagggttctccattttcagaagacccagggtctccggcgttttgcatttcctctgagcctgtttcagggcagtagtgatggagtggaggttcgatatgatttactggattgtcatatcagcatctgttctcctcaggtggcacaactctttacagacaactttgactaccaaactcgagatgactttgtgcgaggtctcttagtgaatgaggaggtgagaaaagtcttccaatgcctctttaggagagaggagaaggctatgattgtatctcatgctgatcctagggaaccagatccacatgcacgtaacagctaaggaatatggtgcccgtgtctccaacctacacatgtactcagctgtctgtgctgacgtcatccgccgatgggtctaccctctcaccccagaggcgaacttcactgacagcaccacccagagctgcactcattcccggcacaacatctaccgagggcctgaggtcagcctgggccatggcagcatcctagaggaaaatgtgctcctgggctctggcactgtcattggcagcaattgctttatcaccaacagtgtcattggccccggctgccacattggtgataacgtggtgctggaccagacctacctgtggcagggtgttcgagtggcggctggagcacagatccatcagtctctgctttgtgacaatgctgaggtcaaggaacgagtgacactgaaaccacgctctgtcctcacttcccaggtggtcgtgggcccaaatatcacgctgcctgagggctcggtgatctctttgcaccctccagatgcagaggaagatgaagatgatggcgagttcagtgatgattctggggctgaccaagaaaaggacaaagtgaagatgaaaggttacaatccagcagaagtaggagctgctggcaagggctacctctggaaagctgcaggcatgaacatggaggaagaggaggaactgcagcagaatctgtggggactcaagatcaacatggaagaagagagtgaaagtgaaagtgagcaaagtatggattctgaggagccggacagccggggaggctcccctcagatggatgacatcaaagtgttccagaatgaagttttaggaacactacagcggggcaaagaggagaacatttcttgtgacaatctcgtcctggaaatcaactctctcaagtaagagcagcccctccctgttctcctcggggtgatcccgggaaggtagaggctttctcgtaagtgttttgtctccaaataggaacctattccttcgacatcccaaatggaaagaccagtagtatttggagcaaggagagcattattaagttctagcctcagcatagactttctccttcctaaaccctccccttccatattgttccatccagattcctctccaatgtctatcaaagtcatagttctaagcctgctgaaaggccagtgaaggccctggtgtcaccccagtctccccacaggtatgcctataacataagtctaaaggaggtgatgcaggtactgagccacgtggtcctggagttccccctgcaacagatggattccccgcttgactcaagccgctactgtgccctgctgcttcctgaactacataaagcgcgcagccgaccatttggaagcgttagcagccattgaggacttcttcctagagcatgaagctcttggtatttccatggccaaggtactgatggctttctaccagctggagatcctggctgaggaaacaattctgagctggttcagccaaagagatacaactgacaagggccagcagttgcgcaagaatcaacagctgcagaggttcatccagtggctaaaagaggcagaagaggagtcatctgaagatgactgaagtcacactgcctgctcctttgggtgtgattgagtgccctcctggctcctgggctgggacaagtgaggaactagctgcagagggatgagtgaccaccatccaggctgagactgaaaggagcagaggctggaactacagtattctttcccctgctagcaaccatgtgcctcccatcctgactgtggagttgggatgtggaagtggggctggaacaaagcttctgcctagggag

SEQ ID NO: 11782 - DNA, 9912 bp, Homo sapiens
gaagaagatggcggcccctgtagtggcgccgcctggtgtggtggttagtcgggctaacaagcgcagcggcgcggggccgggaggcagcggtggcgggggagccagaggggcggaggaggaaccgccgccgcccctacaagcagttctggtggccgatagcttcgatcgccgcttcttccccatctccaaggaccagcctcgggtgagcgccgcgcacgcgagcagccagagggcaggaagggtggcagggctggagcaagttctcatttcggctaactacaacagcatgcccttgaaggacctgcgtctatgctgttatcctaaaaccggatgcagagggactgtctaaaccctgatgactgctgaccaagttagtggccggcagatttgggcattcgtaatgctgtccacctcgggtttgaaaggaatgaagagagctaaatgtagaaacagcgcttgagagaagccttcacgcggggattcagtgcccctagaagaggctgcgccgcttttaaccttgccgatgacggttgcttaggtgaaaagaaacgaccttttgcctctgaaagggcggtaatatgccttaaaaagagcgggctagatctcaggcagtgtattttttttttccttccaggttctaatgatagccggtgctatctgtcgaaaggacaaaatgggtttagtggttgattgccatcagcccccgagttgtctagacaatggggtattggactcagctgggtcgttcagcagtcagttcagaaagagggaactgcattggatttaaggaaaatcctctctaattccctcgaaaaagcctaatggctgttcatttttgacaagtgacgggagatggctaacctctgacacttagaaagggatcaaggaaggaaatcttatggggaagaaggccttagcaatgcttaaatttatggaaatatgattgatttccagtattatcctttgccagcagtgaactgccattctgtcacagctctgtgtctgatacaaggcacatagattctgtacttaccatccccaaattgcaatgtctcagactcaggcttagagcatggcatgaacatcaaaggcaggaacctgtttatctttgaattggaaagatacagcaaaattacactgtttggaaatacgaatagaggagtgaaaattgttgcagtggggtacccaaagggattcgagacctcaagttttttttcatcttgtatccttcaggtcctcttgcccctggccaatgtggcattaattgactacactctggaattcctgactgccacaggtgtacaggaaacatttgtcttttgttgctggaaagctgctcaaatcaaagaacatttactgtaaggccctgcaacttttctttccatgtttcgccatctttttccagttttttcaggatgaatgtaactaaggggaaatgtgagaggggaaaaatgtgtctacttagatgtcattgtaagttctaagggtattttctacacttatcaggaggtgagcagctgaaactttgtatctgtctgtcttgggttttctgtgacaaagattaaagaataaacttgggttttttctgaatctcattataaagtttggtgccagtggactttgcttttatttaatggcttcagtatggaagttacaatgataacatctttgttttcccactgagtttctaaatcttgtttgttctcaccttcaaggatataaatgagctccttgtcatctttgtattcccactgcctagctcagtcccaagcatatagtgagcacttacatgtttgttgaaatcttgaaaactagggaatcgcattgcttatggaagtccaggatgtaaagactaggacattagcatggtctccatcagacagttcctaaatgttatatggattgcagaaggggaaagctgacgtgaagcgtgttcccaggctactttgtgtaccctaggcttcagcaggattttgagttcaaattgatgtttagggacaaggggtcaaggtatggagaggaaataaccatgtttcctaacccataaaacaagactggtgacacaggatgctgaaagcattcattatagttcataatactctttgaagttgaagacgctggcaagaacccaaaaaagccatcgagaaggactgtgagtgctgaaagggggtgaaaaatggggaaggctcaaatgatctttatgcttgatacactcattcccctcaccctcccttcctttaggaagtcaaagtggtgccgccctacatctctcaatgtggttcgaataattacatcagagctctatcgatcactgggagatgtcctccgtgatgttgatgccaaggctttggtgcgctctgactttcttctggtgtatggggatgtcatctcaaacatcaatatcaccagagcccttgaggaacacaggtcaggatgggaaaatgacaggaacaagggttaaagaccagcagagccctgagactgcttttttgcagttctgtccctcctgtcctttataggttgagacggaagctagaaaaaaatgtttctgtgatgacgatgatcttcaaggagtcatcccccagccacccaactcgttgccacgaagacaatgtggtagtggctgtggatagtaccacaaacagggttctccattttcagaagacccagggtctccggcgttttgcatttcctctggtgtgtggatatctggggtcctttgagatggggaagtgacaggcttcagtgggagaaacaaattaaagtccttgtaacttctccccacagagcctgtttcagggcagtagtgatggagtggaggttcgatatgatttactggattgtcatatcagcatctgttctcctcaggtgagctctttagggctggggctgcacacccaaagagtagaactctgtgggtctgttattgtccccttagaaggccagggtatatttcttctccctgtttattttcattatttttacttttattttttgagacagagtctcgctctgttgcccaggctggagtgcagtggtgtgatcccagctcactgcagactctgcctcctaggttcaagtgattctcctgcctcagcctcctgagtagcagggattacaggcacaccaccatgcctggctaatttttgtatttttagtagagatggggtttcaccatgttggccaggctggtctcgaactcctggtctcaagtgatctacctgtctcagcctcccaaagtgctgggattacaggcatgagccaccacacctggccttattttcatttttatttatatatattttttgagacagggtctcgctctgtggcccaggctggagcacagtggcaccatgactgctcactgcagcctcagcctcccaggttcaagggaacctcctgcctcagcctcctgagtagatggaaccacaggcatgcactaccactaatttttgtatttttttgtagagacggggttttgccatgttgtccggcctggtcacgaactcctgagctcaagcaatctgaccacctcagccttccaaaatgctgggattacaggcatgagccaccagttttttttgttgttgttgttgttattgttgttttgagatggagcctcgctctgtcgcccaggctggagtgcagtggcatgatctcagcttactgcagcctccacctcctgggttccagtgattctcctgcctcagcctctcaagtagctgggactacaggtacgcaccaccacatccggctattttttgtatttttcagtagagatggggtttcaccatattggccaggctggtctctaactcctgacctcaggtgatcctcccgccttggcctcccaaagtgctgcaatcacaggtgtgagcctctgcacccagcattttttttttttttttttttttttttttgagtcggagtttcactcttgttgcccaggctggatgcaatggtgcgatctcagctcactgcaacctccacctcccaggttcaagcaattcccctgcctcagcctcccaaatagctgggattgcaggcatgtgccaccacacccagctaatttttgtatttttagtagagacgaggttttaccatgttggtcaggctggtctcgaactcccaacctcaggtgatctgcctgcctcggcctcccaaagtgctggcattacgggcatgagccactgcacctggccttttttttttttttagaatctattgtaaagcaaagatcttgtctccagtatcccactgggagtctctttggaattctggtccatgttcagctgtcatagggtttgctaggtctctgggggattatctgtgctcctagagaatagtacttaatcctggccaagcgtggtggctcacgcttgtaatcccagcactttgggaggccgaggtgagtggatcatgaggtcaggagttcaagaccagcctgaccaacacagtgaaatcccatctctactaaaaaataaaaatacaaaaattagctgggcgtggtggcggacgcttgtaatcccagctacttgggaggctgaggcacaagaatcactttaacccaggaggtggaggttgcagtgagccgagatcatgcaactgcactccagcctgggcaacagagctagacttgtctcaaaaaaaaaaaaaaaagaatagtacttaattctagcccactccacttcccttccacaggtggcacaactctttacagacaactttgactaccaaactcgagatgactttgtgcgaggtctcttagtgaatgaggaggtgagaaaagtcttccaatgcctctttaggagagaggagaaggctatgattgtatctcatgctggtaacttttgatcttttttgtattttattgaggcttaggagggaggaaaagcaggggacaggaggaacagtacacaaagaagaatctttgtggcagtgagaggcagaggggaacttaaaaggattagaaaagttgtacttgggggcattcttcctgtctttcttgcttaggtgacctccctttccttctcattcagatcctagggaaccagatccacatgcacgtaacagctaaggaatatggtgcccgtgtctccaacctacacatgtactcagctgtctgtgctgacgtcatccgccgatgggtctaccctctcaccccagaggcgaacttcactgacagcaccacccagagctgcactcattcccggcacaacatctaccgagggcctgaggtcagcctgggccatggcagcatcctagaggaaaatgtgctcctgggctctggcactgtcattggcagcaattgctttatcaccaacagtgtcattggccccggctgccacattggtgagcacaggtggggaatcaagccaactatcctaggaacaggaacctgggggggccacgtctccagaaacacaagggatggctacacaagggacagtccctgggaataaggaactatagagcggctacctcaggaaaggaggaaacagggatttgaaaacagcgataccttaatttgtagcctgtgggcctctcattggatgactcttcacattccagggtaccctgtagtcacattcaggagcaagtagataattaacatgcagtaacaacatctatttagcacattacagtttacaaagggcttttatatacattgttacatttaatcttcataatttacaaataaacaggctcaacaagattttcttgcccaaggtcattggtaataatggtgggacctgaatctgggtattctgaatgtaagtccagtgttcttttgagtctaccataactgcctggttggcctcttggtatctcattttggttgcaggagtgtgatgcgtctaatagtactgcccctttccaagaacaacagtaaggctcagattctaggggctgagcgtggtggctcatgcttgtaatcctagcacactgggaagccatggtgggaggatcgcttgagcccaggagttcaagaccagcctgggcaacatagcgacaccccttctccacaaatgatacaaaaattagctgggcatgatggcgcgtgcctgtaatctcagctattcgggaggctgaggcaggaggattacctgagcccagaggtcgagggtgcagtgagtcatgatcatactactgcactccagcctgggtgatggaatgagaccgtgtctcaaaagaaaaaaaagacttggtttctaaaatgtaccagaagaggtggaattatttggttctgcttgtaggcgtggatatgattctaataaggttttttgagttcagagggtccccagaaatcctgaaggttctcgggttcttaagctctgtgtgtagtctataattgttgtaaacttggtgaagtatcttctcaggcctgggcttagggggtgagtgggtgtttctggtgacttgcgggatggggaatgagagctaggtgggagctgtgctggtgtcagtcagccctgtcctctatgaagggctctgctctgcggttggaaccctgagttacccagaggtcttcccatcctgagccaggtgataacgtggtgctggaccagacctacctgtggcagggtgttcgagtggcggctggagcacagatccatcagtctctgctttgtgacaatgctgaggtcaaggaacgagtgacactgaaaccacgctctgtcctcacttcccaggtgagacctgatctatactgtgcacaggccctgaattgcatggcagtcacactgagccagaaggggcattatttccacccataatcctgtctaaaaaagttgctctcattatcaggatgcacttttcctccacaccctaatggttctgtgttttttttccccttaggtggtcgtgggcccaaatatcacgctgcctgagggctcggtgatctctttgcaccctccagatgcagaggaagatgaagatgatggcgagttcagtgatgattctggggctgaccaagaaaaggacaaagtgaagatgaaaggtgtgagactcaacaggtgtggggcatctgtgtgtctcgctgcctcatagaagaaccagtgtttcctcctggagggattggtgcttccgccgggccctctctatagatcattgccttttccaggttacaatccagcagaagtaggagctgctggcaagggctacctctggaaagctgcaggcatgaacatggaggaagaggaggaactgcagcagaatctgtggggtgagctaggcctgatgcctgcccttctcctcctgaatcggaatattttgaaggataatgaatacttcagagtcacattacttattcactcctttattcaggcagacagggcaggtatattgctctctgtcaatgactctttttttctttttcctcacccattatggcttctcaggactcaagatcaacatggaagaagagagtgaaagtgaaagtgagcaaagtatggattctgaggagccggacagccggggaggctcccctcagatggatgacatcaaaggtgagtggcaggggagaaatgcgctggaccagtttattctctgcctggatcaactagccagaggcttacgttcctcagaaagggtttggtatcgagtcaagactagatgacttagagcattctgaatgatgttggcccatgaacttatccttgctttgatttcagtgttccagaatgaagttttaggaacactacagcggggcaaagaggagaacatttcttgtgacaatctcgtcctggaaatcaactctctcaagtaagagcagcccctccctgttctcctcggggtgatcccgggaaggtagaggctttctcgtaagtgttttgtctccaaataggaacctattccttcgacatcccaaatggaaagaccagtagtatttggagcaaggagagcattattaagttctagcctcagcatagactttctccttcctaaaccctccccttccatattgttccatccagattcctctccaatgtctatcaaagtcatagttctaagcctgctgaaaggccagtgaaggccctggtgtcaccccagtctccccacaggtatgcctataacataagtctaaaggaggtgatgcaggtactgagccacgtggtcctggagttccccctgcaacagatggattccccgcttgactcaagccgctactgtgccctgctgcttcctgtgagcaaagattggagctgagtacaagggattgggtacaggcaaaggaaatcaggagtagactgtcttgttatattgggtgtatgtcacttctggttcctttttccttgcctctggaagctggttgggctctagagcagccttggctggttcagaggggtcagattgagttcaatactgactggcctttgagactccaggatttcataccatcctaggcccacaaaggtatattcagaatggacctggacattcagactctatggcagcaatttgacccaacacaagatcagcctctggggtgggaataggtattttgaggcagcctatagcatctgatcccctttcaccttccctaaggaatctctttttcccaaaccctgtcaacaactcccaagtccctctgacataattccacagaacctgtatcatctcccttttgtccacccatgtcatcagtatggatttgcttggatgtccaggtataggtgaatgcttaggaatatactgcagctcccttctttcttccatagctgctaaaggcctggagccctgtttttaggaactacataaagcgcgcagccgaccatttggaagcgttagcagccattgaggacttcttcctagagcatgaagctcttggtatttccatggccaaggtgaatatgacctcaagccccattcttctgcacttgctttcaaacgagggttggtgacccccttgggagacataaaatagaagctaatgtgaatccagtatggaccatccactcccaatatgcttattgctagaatagtacagcttggagccggactaataaggtagccatctggggggtggtctggaaatgtgcaaagctctccccagcaatagttccagaagttagacctgccccaggagcagagcgaacagctcactcttgtccgttttggaggaggctactcagtgcatagagggatctgagggcctggtagagtatcctgctggactttccaaggcccctgaggtcccctttattggccttttgcaggtactgatggctttctaccagctggagatcctggctgaggaaacaattctgagctggttcagccaaagagatacaactgacaagggccagcagttgcgcaagaatcaacaggtgcgtcaggctgtcctcctctcgccaagatggttatctcattcccaggtcctggcccctagactctagggtggttggtttctggggctctggttgttagagctgtttatctgccgaggggagcaggagagttatgtgcacctcccccagccgatctctcctctgcttctttacagctgcagaggttcatccagtggctaaaagaggcagaagaggagtcatctgaagatgactgaagtcacactgcctgctcctttgggtgtgattgagtgccctcctggctcctgggctgggacaagtgaggaactagctgcagagggatgagtgaccaccatccaggctgagactgaaaggagcagaggctggaactacagtattctttcccctgctagcaaccatgtgcctcccatcctgactgtggagttgggatgtggaagtggggctggaacaaagcttctgcctagggaggagctaagcaggcccggcagttggaggaaggccagaggaacagctttgtgctccggctttccctcagggaacagcagagagcagttggctctttctgctgcttgtatatgttaat

SEQ ID NO: 11783 - DNA, 2613 bp, Homo sapiens
gaagaagatggcggcccctgtagtggcgccgcctggtgtggtggttagtcgggctaacaagcgcagcggcgcggggccgggaggcagcggtggcgggggagccagaggggcggaggaggaaccgccgccgcccctacaagcagttctggtggccgatagcttcgatcgccgcttcttccccatctccaaggaccagcctcgggtcctcttgcccctggccaatgtggcattaattgactacactctggaattcctgactgccacaggtgtacaggaaacatttgtcttttgttgctggaaagctgctcaaatcaaagaacatttactgaagtcaaagtggtgccgccctacatctctcaatgtggttcgaataattacatcagagctctatcgatcactgggagatgtcctccgtgatgttgatgccaaggctttggtgcgctctgactttcttctggtgtatggggatgtcatctcaaacatcaatatcaccagagcccttgaggaacacaggttgagacggaagctagaaaaaaatgtttctgtgatgacgatgatcttcaaggagtcatcccccagccacccaactcgttgccacgaagacaatgtggtagtggctgtggatagtaccacaaacagggttctccattttcagaagacccagggtctccggcgttttgcatttcctctgagcctgtttcagggcagtagtgatggagtggaggttcgatatgatttactggattgtcatatcagcatctgttctcctcagagacggggttttgccatgttgtccggcctggtcacgaactcctgagctcaagcaatctgaccacctcagccttccaaaatgctgggattacaggtggcacaactctttacagacaactttgactaccaaactcgagatgactttgtgcgaggtctcttagtgaatgaggagatcctagggaaccagatccacatgcacgtaacagctaaggaatatggtgcccgtgtctccaacctacacatgtactcagctgtctgtgctgacgtcatccgccgatgggtctaccctctcaccccagaggcgaacttcactgacagcaccacccagagctgcactcattcccggcacaacatctaccgagggcctgaggtcagcctgggccatggcagcatcctagaggaaaatgtgctcctgggctctggcactgtcattggcagcaattgctttatcaccaacagtgtcattggccccggctgccacattggtgataacgtggtgctggaccagacctacctgtggcagggtgttcgagtggcggctggagcacagatccatcagtctctgctttgtgacaatgctgaggtcaaggaacgagtgacactgaaaccacgctctgtcctcacttcccaggtggtcgtgggcccaaatatcacgctgcctgagggctcggtgatctctttgcaccctccagatgcagaggaagatgaagatgatggcgagttcagtgatgattctggggctgaccaagaaaaggacaaagtgaagatgaaaggttacaatccagcagaagtaggagctgctggcaagggctacctctggaaagctgcaggcatgaacatggaggaagaggaggaactgcagcagaatctgtggggactcaagatcaacatggaagaagagagtgaaagtgaaagtgagcaaagtatggattctgaggagccggacagccggggaggctcccctcagatggatgacatcaaagtgttccagaatgaagttttaggaacactacagcggggcaaagaggagaacatttcttgtgacaatctcgtcctggaaatcaactctctcaagtatgcctataacataagtctaaaggaggtgatgcaggtactgagccacgtggtcctggagttccccctgcaacagatggattccccgcttgactcaagccgctactgtgccctgctgcttcctctgctaaaggcctggagccctgtttttaggaactacataaagcgcgcagccgaccatttggaagcgttagcagccattgaggacttcttcctagagcatgaagctcttggtatttccatggccaaggtactgatggctttctaccagctggagatcctggctgaggaaacaattctgagctggttcagccaaagagatacaactgacaagggccagcagttgcgcaagaatcaacagctgcagaggttcatccagtggctaaaagaggcagaagaggagtcatctgaagatgactgaagtcacactgcctgctcctttgggtgtgattgagtgccctcctggctcctgggctgggacaagtgaggaactagctgcagagggatgagtgaccaccatccaggctgagactgaaaggagcagaggctggaactacagtattctttcccctgctagcaaccatgtgcctcccatcctgactgtggagttgggatgtggaagtggggctggaacaaagcttctgcctagggaggagctaagcaggcccggcagttggaggaaggccagaggaacagctttgtgctccggctttccctcagggaacagcagagagcagttggctctttctgctgcttgtatatgttaat

SEQ ID NO: 11784 - DNA, 9882 bp, Homo sapiens
gcccctgtagtggcgccgcctggtgtggtggttagtcgggctaacaagcgcagcggcgcggggccgggaggcagcggtggcgggggagccagaggggcggaggaggaaccgccgccgcccctacaagcagttctggtggccgatagcttcgatcgccgcttcttccccatctccaaggaccagcctcgggtgagcgccgcgcacgcgagcagccagagggcaggaagggtggcagggctggagcaagttctcatttcggctaactacaacagcatgcccttgaaggacctgcgtctatgctgttatcctaaaaccggatgcagagggactgtctaaaccctgatgactgctgaccaagttagtggccggcagatttgggcattcgtaatgctgtccacctcgggtttgaaaggaatgaagagagctaaatgtagaaacagcgcttgagagaagccttcacgcggggattcagtgcccctagaagaggctgcgccgcttttaaccttgccgatgacggttgcttaggtgaaaagaaacgaccttttgcctctgaaagggcggtaatatgccttaaaaagagcgggctagatctcaggcagtgtattttttttttccttccaggttctaatgatagccggtgctatctgtcgaaaggacaaaatgggtttagtggttgattgccatcagcccccgagttgtctagacaatggggtattggactcagctgggtcgttcagcagtcagttcagaaagagggaactgcattggatttaaggaaaatcctctctaattccctcgaaaaagcctaatggctgttcatttttgacaagtgacgggagatggctaacctctgacacttagaaagggatcaaggaaggaaatcttatggggaagaaggccttagcaatgcttaaatttatggaaatatgattgatttccagtattatcctttgccagcagtgaactgccattctgtcacagctctgtgtctgatacaaggcacatagattctgtacttaccatccccaaattgcaatgtctcagactcaggcttagagcatggcatgaacatcaaaggcaggaacctgtttatctttgaattggaaagatacagcaaaattacactgtttggaaatacgaatagaggagtgaaaattgttgcagtggggtacccaaagggattcgagacctcaagttttttttcatcttgtatccttcaggtcctcttgcccctggccaatgtggcattaattgactacactctggaattcctgactgccacaggtgtacaggaaacatttgtcttttgttgctggaaagctgctcaaatcaaagaacatttactgtaaggccctgcaacttttctttccatgtttcgccatctttttccagttttttcaggatgaatgtaactaaggggaaatgtgagaggggaaaaatgtgtctacttagatgtcattgtaagttctaagggtattttctacacttatcaggaggtgagcagctgaaactttgtatctgtctgtcttgggttttctgtgacaaagattaaagaataaacttgggttttttctgaatctcattataaagtttggtgccagtggactttgcttttatttaatggcttcagtatggaagttacaatgataacatctttgttttcccactgagtttctaaatcttgtttgttctcaccttcaaggatataaatgagctccttgtcatctttgtattcccactgcctagctcagtcccaagcatatagtgagcacttacatgtttgttgaaatcttgaaaactagggaatcgcattgcttatggaagtccaggatgtaaagactaggacattagcatggtctccatcagacagttcctaaatgttatatggattgcagaaggggaaagctgacgtgaagcgtgttcccaggctactttgtgtaccctaggcttcagcaggattttgagttcaaattgatgtttagggacaaggggtcaaggtatggagaggaaataaccatgtttcctaacccataaaacaagactggtgacacaggatgctgaaagcattcattatagttcataatactctttgaagttgaagacgctggcaagaacccaaaaaagccatcgagaaggactgtgagtgctgaaagggggtgaaaaatggggaaggctcaaatgatctttatgcttgatacactcattcccctcaccctcccttcctttaggaagtcaaagtggtgccgccctacatctctcaatgtggttcgaataattacatcagagctctatcgatcactgggagatgtcctccgtgatgttgatgccaaggctttggtgcgctctgactttcttctggtgtatggggatgtcatctcaaacatcaatatcaccagagcccttgaggaacacaggtcaggatgggaaaatgacaggaacaagggttaaagaccagcagagccctgagactgcttttttgcagttctgtccctcctgtcctttataggttgagacggaagctagaaaaaaatgtttctgtgatgacgatgatcttcaaggagtcatcccccagccacccaactcgttgccacgaagacaatgtggtagtggctgtggatagtaccacaaacagggttctccattttcagaagacccagggtctccggcgttttgcatttcctctggtgtgtggatatctggggtcctttgagatggggaagtgacaggcttcagtgggagaaacaaattaaagtccttgtaacttctccccacagagcctgtttcagggcagtagtgatggagtggaggttcgatatgatttactggattgtcatatcagcatctgttctcctcaggtgagctctttagggctggggctgcacacccaaagagtagaactctgtgggtctgttattgtccccttagaaggccagggtatatttcttctccctgtttattttcattatttttacttttattttttgagacagagtctcgctctgttgcccaggctggagtgcagtggtgtgatcccagctcactgcagactctgcctcctaggttcaagtgattctcctgcctcagcctcctgagtagcagggattacaggcacaccaccatgcctggctaatttttgtatttttagtagagatggggtttcaccatgttggccaggctggtctcgaactcctggtctcaagtgatctacctgtctcagcctcccaaagtgctgggattacaggcatgagccaccacacctggccttattttcatttttatttatatatattttttgagacagggtctcgctctgtggcccaggctggagcacagtggcaccatgactgctcactgcagcctcagcctcccaggttcaagggaacctcctgcctcagcctcctgagtagatggaaccacaggcatgcactaccactaatttttgtatttttttgtagagacggggttttgccatgttgtccggcctggtcacgaactcctgagctcaagcaatctgaccacctcagccttccaaaatgctgggattacaggcatgagccaccagttttttttgttgttgttgttgttattgttgttttgagatggagcctcgctctgtcgcccaggctggagtgcagtggcatgatctcagcttactgcagcctccacctcctgggttccagtgattctcctgcctcagcctctcaagtagctgggactacaggtacgcaccaccacatccggctattttttgtatttttcagtagagatggggtttcaccatattggccaggctggtctctaactcctgacctcaggtgatcctcccgccttggcctcccaaagtgctgcaatcacaggtgtgagcctctgcacccagcattttttttttttttttttttttttttttgagtcggagtttcactcttgttgcccaggctggatgcaatggtgcgatctcagctcactgcaacctccacctcccaggttcaagcaattcccctgcctcagcctcccaaatagctgggattgcaggcatgtgccaccacacccagctaatttttgtatttttagtagagacgaggttttaccatgttggtcaggctggtctcgaactcccaacctcaggtgatctgcctgcctcggcctcccaaagtgctggcattacgggcatgagccactgcacctggccttttttttttttttagaatctattgtaaagcaaagatcttgtctccagtatcccactgggagtctctttggaattctggtccatgttcagctgtcatagggtttgctaggtctctgggggattatctgtgctcctagagaatagtacttaatcctggccaagcgtggtggctcacgcttgtaatcccagcactttgggaggccgaggtgagtggatcatgaggtcaggagttcaagaccagcctgaccaacacagtgaaatcccatctctactaaaaaataaaaatacaaaaattagctgggcgtggtggcggacgcttgtaatcccagctacttgggaggctgaggcacaagaatcactttaacccaggaggtggaggttgcagtgagccgagatcatgcaactgcactccagcctgggcaacagagctagacttgtctcaaaaaaaaaaaaaaaagaatagtacttaattctagcccactccacttcccttccacaggtggcacaactctttacagacaactttgactaccaaactcgagatgactttgtgcgaggtctcttagtgaatgaggaggtgagaaaagtcttccaatgcctctttaggagagaggagaaggctatgattgtatctcatgctggtaacttttgatcttttttgtattttattgaggcttaggagggaggaaaagcaggggacaggaggaacagtacacaaagaagaatctttgtggcagtgagaggcagaggggaacttaaaaggattagaaaagttgtacttgggggcattcttcctgtctttcttgcttaggtgacctccctttccttctcattcagatcctagggaaccagatccacatgcacgtaacagctaaggaatatggtgcccgtgtctccaacctacacatgtactcagctgtctgtgctgacgtcatccgccgatgggtctaccctctcaccccagaggcgaacttcactgacagcaccacccagagctgcactcattcccggcacaacatctaccgagggcctgaggtcagcctgggccatggcagcatcctagaggaaaatgtgctcctgggctctggcactgtcattggcagcaattgctttatcaccaacagtgtcattggccccggctgccacattggtgagcacaggtggggaatcaagccaactatcctaggaacaggaacctgggggggccacgtctccagaaacacaagggatggctacacaagggacagtccctgggaataaggaactatagagcggctacctcaggaaaggaggaaacagggatttgaaaacagcgataccttaatttgtagcctgtgggcctctcattggatgactcttcacattccagggtaccctgtagtcacattcaggagcaagtagataattaacatgcagtaacaacatctatttagcacattacagtttacaaagggcttttatatacattgttacatttaatcttcataatttacaaataaacaggctcaacaagattttcttgcccaaggtcattggtaataatggtgggacctgaatctgggtattctgaatgtaagtccagtgttcttttgagtctaccataactgcctggttggcctcttggtatctcattttggttgcaggagtgtgatgcgtctaatagtactgcccctttccaagaacaacagtaaggctcagattctaggggctgagcgtggtggctcatgcttgtaatcctagcacactgggaagccatggtgggaggatcgcttgagcccaggagttcaagaccagcctgggcaacatagcgacaccccttctccacaaatgatacaaaaattagctgggcatgatggcgcgtgcctgtaatctcagctattcgggaggctgaggcaggaggattacctgagcccagaggtcgagggtgcagtgagtcatgatcatactactgcactccagcctgggtgatggaatgagaccgtgtctcaaaagaaaaaaaagacttggtttctaaaatgtaccagaagaggtggaattatttggttctgcttgtaggcgtggatatgattctaataaggttttttgagttcagagggtccccagaaatcctgaaggttctcgggttcttaagctctgtgtgtagtctataattgttgtaaacttggtgaagtatcttctcaggcctgggcttagggggtgagtgggtgtttctggtgacttgcgggatggggaatgagagctaggtgggagctgtgctggtgtcagtcagccctgtcctctatgaagggctctgctctgcggttggaaccctgagttacccagaggtcttcccatcctgagccaggtgataacgtggtgctggaccagacctacctgtggcagggtgttcgagtggcggctggagcacagatccatcagtctctgctttgtgacaatgctgaggtcaaggaacgagtgacactgaaaccacgctctgtcctcacttcccaggtgagacctgatctatactgtgcacaggccctgaattgcatggcagtcacactgagccagaaggggcattatttccacccataatcctgtctaaaaaagttgctctcattatcaggatgcacttttcctccacaccctaatggttctgtgttttttttccccttaggtggtcgtgggcccaaatatcacgctgcctgagggctcggtgatctctttgcaccctccagatgcagaggaagatgaagatgatggcgagttcagtgatgattctggggctgaccaagaaaaggacaaagtgaagatgaaaggtgtgagactcaacaggtgtggggcatctgtgtgtctcgctgcctcatagaagaaccagtgtttcctcctggagggattggtgcttccgccgggccctctctatagatcattgccttttccaggttacaatccagcagaagtaggagctgctggcaagggctacctctggaaagctgcaggcatgaacatggaggaagaggaggaactgcagcagaatctgtggggtgagctaggcctgatgcctgcccttctcctcctgaatcggaatattttgaaggataatgaatacttcagagtcacattacttattcactcctttattcaggcagacagggcaggtatattgctctctgtcaatgactctttttttctttttcctcacccattatggcttctcaggactcaagatcaacatggaagaagagagtgaaagtgaaagtgagcaaagtatggattctgaggagccggacagccggggaggctcccctcagatggatgacatcaaaggtgagtggcaggggagaaatgcgctggaccagtttattctctgcctggatcaactagccagaggcttacgttcctcagaaagggtttggtatcgagtcaagactagatgacttagagcattctgaatgatgttggcccatgaacttatccttgctttgatttcagtgttccagaatgaagttttaggaacactacagcggggcaaagaggagaacatttcttgtgacaatctcgtcctggaaatcaactctctcaagtaagagcagcccctccctgttctcctcggggtgatcccgggaaggtagaggctttctcgtaagtgttttgtctccaaataggaacctattccttcgacatcccaaatggaaagaccagtagtatttggagcaaggagagcattattaagttctagcctcagcatagactttctccttcctaaaccctccccttccatattgttccatccagattcctctccaatgtctatcaaagtcatagttctaagcctgctgaaaggccagtgaaggccctggtgtcaccccagtctccccacaggtatgcctataacataagtctaaaggaggtgatgcaggtactgagccacgtggtcctggagttccccctgcaacagatggattccccgcttgactcaagccgctactgtgccctgctgcttcctgtgagcaaagattggagctgagtacaagggattgggtacaggcaaaggaaatcaggagtagactgtcttgttatattgggtgtatgtcacttctggttcctttttccttgcctctggaagctggttgggctctagagcagccttggctggttcagaggggtcagattgagttcaatactgactggcctttgagactccaggatttcataccatcctaggcccacaaaggtatattcagaatggacctggacattcagactctatggcagcaatttgacccaacacaagatcagcctctggggtgggaataggtattttgaggcagcctatagcatctgatcccctttcaccttccctaaggaatctctttttcccaaaccctgtcaacaactcccaagtccctctgacataattccacagaacctgtatcatctcccttttgtccacccatgtcatcagtatggatttgcttggatgtccaggtataggtgaatgcttaggaatatactgcagctcccttctttcttccatagctgctaaaggcctggagccctgtttttaggaactacataaagcgcgcagccgaccatttggaagcgttagcagccattgaggacttcttcctagagcatgaagctcttggtatttccatggccaaggtgaatatgacctcaagccccattcttctgcacttgctttcaaacgagggttggtgacccccttgggagacataaaatagaagctaatgtgaatccagtatggaccatccactcccaatatgcttattgctagaatagtacagcttggagccggactaataaggtagccatctggggggtggtctggaaatgtgcaaagctctccccagcaatagttccagaagttagacctgccccaggagcagagcgaacagctcactcttgtccgttttggaggaggctactcagtgcatagagggatctgagggcctggtagagtatcctgctggactttccaaggcccctgaggtcccctttattggccttttgcaggtactgatggctttctaccagctggagatcctggctgaggaaacaattctgagctggttcagccaaagagatacaactgacaagggccagcagttgcgcaagaatcaacaggtgcgtcaggctgtcctcctctcgccaagatggttatctcattcccaggtcctggcccctagactctagggtggttggtttctggggctctggttgttagagctgtttatctgccgaggggagcaggagagttatgtgcacctcccccagccgatctctcctctgcttctttacagctgcagaggttcatccagtggctaaaagaggcagaagaggagtcatctgaagatgactgaagtcacactgcctgctcctttgggtgtgattgagtgccctcctggctcctgggctgggacaagtgaggaactagctgcagagggatgagtgaccaccatccaggctgagactgaaaggagcagaggctggaactacagtattctttcccctgctagcaaccatgtgcctcccatcctgactgtggagttgggatgtggaagtggggctggaacaaagcttctgcctagggaggagctaagcaggcccggcagttggaggaaggccagaggaacagctttgtgctccggctttccctcagggaacagcagagagcagttggctctttctgc

SEQ ID NO: 11785 - DNA, 2674 bp, Homo sapiens
gcccctgtagtggcgccgcctggtgtggtggttagtcgggctaacaagcgcagcggcgcggggccgggaggcagcggtggcgggggagccagaggggcggaggaggaaccgccgccgcccctacaagcagttctggtggccgatagcttcgatcgccgcttcttccccatctccaaggaccagcctcgggtcctcttgcccctggccaatgtggcattaattgactacactctggaattcctgactgccacaggtgtacaggaaacatttgtcttttgttgctggaaagctgctcaaatcaaagaacatttactgaagtcaaagtggtgccgccctacatctctcaatgtggttcgaataattacatcagagctctatcgatcactgggagatgtcctccgtgatgttgatgccaaggctttggtgcgctctgactttcttctggtgtatggggatgtcatctcaaacatcaatatcaccagagcccttgaggaacacaggttgagacggaagctagaaaaaaatgtttctgtgatgacgatgatcttcaaggagtcatcccccagccacccaactcgttgccacgaagacaatgtggtagtggctgtggatagtaccacaaacagggttctccattttcagaagacccagggtctccggcgttttgcatttcctctgagcctgtttcagggcagtagtgatggagtggaggttcgatatgatttactggattgtcatatcagcatctgttctcctcaggtggcacaactctttacagacaactttgactaccaaactcgagatgactttgtgcgaggtctcttagtgaatgaggagatcctagggaaccagatccacatgcacgtaacagctaaggaatatggtgcccgtgtctccaacctacacatgtactcagctgtctgtgctgacgtcatccgccgatgggtctaccctctcaccccagaggcgaacttcactgacagcaccacccagagctgcactcattcccggcacaacatctaccgagggcctgaggtgataacgtggtgctggaccagacctacctgtggcagggtgttcgagtggcggctggagcacagatccatcagtctctgctttgtgacaatgctgaggtcaaggaacgagtgacactgaaaccacgctctgtcctcacttcccaggtggtcgtgggcccaaatatcacgctgcctgagggctcggtgatctctttgcaccctccagatgcagaggaagatgaagatgatggcgagttcagtgatgattctggggctgaccaagaaaaggacaaagtgaagatgaaaggttacaatccagcagaagtaggagctgctggcaagggctacctctggaaagctgcaggcatgaacatggaggaagaggaggaactgcagcagaatctgtggggactcaagatcaacatggaagaagagagtgaaagtgaaagtgagcaaagtatggattctgaggagccggacagccggggaggctcccctcagatggatgacatcaaagtgttccagaatgaagttttaggaacactacagcggggcaaagaggagaacatttcttgtgacaatctcgtcctggaaatcaactctctcaagtaagagcagcccctccctgttctcctcggggtgatcccgggaaggtagaggctttctcgtaagtgttttgtctccaaataggaacctattccttcgacatcccaaatggaaagaccagtagtatttggagcaaggagagcattattaagttctagcctcagcatagactttctccttcctaaaccctccccttccatattgttccatccagattcctctccaatgtctatcaaagtcatagttctaagcctgctgaaaggccagtgaaggccctggtgtcaccccagtctccccacaggtatgcctataacataagtctaaaggaggtgatgcaggtactgagccacgtggtcctggagttccccctgcaacagatggattccccgcttgactcaagccgctactgtgccctgctgcttcctctgctaaaggcctggagccctgtttttaggaactacataaagcgcgcagccgaccatttggaagcgttagcagccattgaggacttcttcctagagcatgaagctcttggtatttccatggccaaggtactgatggctttctaccagctggagatcctggctgaggaaacaattctgagctggttcagccaaagagatacaactgacaagggccagcagttgcgcaagaatcaacagctgcagaggttcatccagtggctaaaagaggcagaagaggagtcatctgaagatgactgaagtcacactgcctgctcctttgggtgtgattgagtgccctcctggctcctgggctgggacaagtgaggaactagctgcagagggatgagtgaccaccatccaggctgagactgaaaggagcagaggctggaactacagtattctttcccctgctagcaaccatgtgcctcccatcctgactgtggagttgggatgtggaagtggggctggaacaaagcttctgcctagggaggagctaagcaggcccggcagttggaggaaggccagaggaacagctttgtgctccggctttccctcagggaacagcagagagcagttggctctttctgc

SEQ ID NO: 11786 - DNA, 9748 bp, Homo sapiens
agagaagaagatggcggcccctgtagtggcgccgcctggtgtggtggttagtcgggctaacaagcgcagcggcgcggggccgggaggcagcggtggcgggggagccagaggggcggaggaggaaccgccgccgcccctacaagcagttctggtggccgatagcttcgatcgccgcttcttccccatctccaaggaccagcctcgggtgagcgccgcgcacgcgagcagccagagggcaggaagggtggcagggctggagcaagttctcatttcggctaactacaacagcatgcccttgaaggacctgcgtctatgctgttatcctaaaaccggatgcagagggactgtctaaaccctgatgactgctgaccaagttagtggccggcagatttgggcattcgtaatgctgtccacctcgggtttgaaaggaatgaagagagctaaatgtagaaacagcgcttgagagaagccttcacgcggggattcagtgcccctagaagaggctgcgccgcttttaaccttgccgatgacggttgcttaggtgaaaagaaacgaccttttgcctctgaaagggcggtaatatgccttaaaaagagcgggctagatctcaggcagtgtattttttttttccttccaggttctaatgatagccggtgctatctgtcgaaaggacaaaatgggtttagtggttgattgccatcagcccccgagttgtctagacaatggggtattggactcagctgggtcgttcagcagtcagttcagaaagagggaactgcattggatttaaggaaaatcctctctaattccctcgaaaaagcctaatggctgttcatttttgacaagtgacgggagatggctaacctctgacacttagaaagggatcaaggaaggaaatcttatggggaagaaggccttagcaatgcttaaatttatggaaatatgattgatttccagtattatcctttgccagcagtgaactgccattctgtcacagctctgtgtctgatacaaggcacatagattctgtacttaccatccccaaattgcaatgtctcagactcaggcttagagcatggcatgaacatcaaaggcaggaacctgtttatctttgaattggaaagatacagcaaaattacactgtttggaaatacgaatagaggagtgaaaattgttgcagtggggtacccaaagggattcgagacctcaagttttttttcatcttgtatccttcaggtcctcttgcccctggccaatgtggcattaattgactacactctggaattcctgactgccacaggtgtacaggaaacatttgtcttttgttgctggaaagctgctcaaatcaaagaacatttactgtaaggccctgcaacttttctttccatgtttcgccatctttttccagttttttcaggatgaatgtaactaaggggaaatgtgagaggggaaaaatgtgtctacttagatgtcattgtaagttctaagggtattttctacacttatcaggaggtgagcagctgaaactttgtatctgtctgtcttgggttttctgtgacaaagattaaagaataaacttgggttttttctgaatctcattataaagtttggtgccagtggactttgcttttatttaatggcttcagtatggaagttacaatgataacatctttgttttcccactgagtttctaaatcttgtttgttctcaccttcaaggatataaatgagctccttgtcatctttgtattcccactgcctagctcagtcccaagcatatagtgagcacttacatgtttgttgaaatcttgaaaactagggaatcgcattgcttatggaagtccaggatgtaaagactaggacattagcatggtctccatcagacagttcctaaatgttatatggattgcagaaggggaaagctgacgtgaagcgtgttcccaggctactttgtgtaccctaggcttcagcaggattttgagttcaaattgatgtttagggacaaggggtcaaggtatggagaggaaataaccatgtttcctaacccataaaacaagactggtgacacaggatgctgaaagcattcattatagttcataatactctttgaagttgaagacgctggcaagaacccaaaaaagccatcgagaaggactgtgagtgctgaaagggggtgaaaaatggggaaggctcaaatgatctttatgcttgatacactcattcccctcaccctcccttcctttaggaagtcaaagtggtgccgccctacatctctcaatgtggttcgaataattacatcagagctctatcgatcactgggagatgtcctccgtgatgttgatgccaaggctttggtgcgctctgactttcttctggtgtatggggatgtcatctcaaacatcaatatcaccagagcccttgaggaacacaggtcaggatgggaaaatgacaggaacaagggttaaagaccagcagagccctgagactgcttttttgcagttctgtccctcctgtcctttataggttgagacggaagctagaaaaaaatgtttctgtgatgacgatgatcttcaaggagtcatcccccagccacccaactcgttgccacgaagacaatgtggtagtggctgtggatagtaccacaaacagggttctccattttcagaagacccagggtctccggcgttttgcatttcctctggtgtgtggatatctggggtcctttgagatggggaagtgacaggcttcagtgggagaaacaaattaaagtccttgtaacttctccccacagagcctgtttcagggcagtagtgatggagtggaggttcgatatgatttactggattgtcatatcagcatctgttctcctcaggtgagctctttagggctggggctgcacacccaaagagtagaactctgtgggtctgttattgtccccttagaaggccagggtatatttcttctccctgtttattttcattatttttacttttattttttgagacagagtctcgctctgttgcccaggctggagtgcagtggtgtgatcccagctcactgcagactctgcctcctaggttcaagtgattctcctgcctcagcctcctgagtagcagggattacaggcacaccaccatgcctggctaatttttgtatttttagtagagatggggtttcaccatgttggccaggctggtctcgaactcctggtctcaagtgatctacctgtctcagcctcccaaagtgctgggattacaggcatgagccaccacacctggccttattttcatttttatttatatatattttttgagacagggtctcgctctgtggcccaggctggagcacagtggcaccatgactgctcactgcagcctcagcctcccaggttcaagggaacctcctgcctcagcctcctgagtagatggaaccacaggcatgcactaccactaatttttgtatttttttgtagagacggggttttgccatgttgtccggcctggtcacgaactcctgagctcaagcaatctgaccacctcagccttccaaaatgctgggattacaggcatgagccaccagttttttttgttgttgttgttgttattgttgttttgagatggagcctcgctctgtcgcccaggctggagtgcagtggcatgatctcagcttactgcagcctccacctcctgggttccagtgattctcctgcctcagcctctcaagtagctgggactacaggtacgcaccaccacatccggctattttttgtatttttcagtagagatggggtttcaccatattggccaggctggtctctaactcctgacctcaggtgatcctcccgccttggcctcccaaagtgctgcaatcacaggtgtgagcctctgcacccagcattttttttttttttttttttttttttttgagtcggagtttcactcttgttgcccaggctggatgcaatggtgcgatctcagctcactgcaacctccacctcccaggttcaagcaattcccctgcctcagcctcccaaatagctgggattgcaggcatgtgccaccacacccagctaatttttgtatttttagtagagacgaggttttaccatgttggtcaggctggtctcgaactcccaacctcaggtgatctgcctgcctcggcctcccaaagtgctggcattacgggcatgagccactgcacctggccttttttttttttttagaatctattgtaaagcaaagatcttgtctccagtatcccactgggagtctctttggaattctggtccatgttcagctgtcatagggtttgctaggtctctgggggattatctgtgctcctagagaatagtacttaatcctggccaagcgtggtggctcacgcttgtaatcccagcactttgggaggccgaggtgagtggatcatgaggtcaggagttcaagaccagcctgaccaacacagtgaaatcccatctctactaaaaaataaaaatacaaaaattagctgggcgtggtggcggacgcttgtaatcccagctacttgggaggctgaggcacaagaatcactttaacccaggaggtggaggttgcagtgagccgagatcatgcaactgcactccagcctgggcaacagagctagacttgtctcaaaaaaaaaaaaaaaagaatagtacttaattctagcccactccacttcccttccacaggtggcacaactctttacagacaactttgactaccaaactcgagatgactttgtgcgaggtctcttagtgaatgaggaggtgagaaaagtcttccaatgcctctttaggagagaggagaaggctatgattgtatctcatgctggtaacttttgatcttttttgtattttattgaggcttaggagggaggaaaagcaggggacaggaggaacagtacacaaagaagaatctttgtggcagtgagaggcagaggggaacttaaaaggattagaaaagttgtacttgggggcattcttcctgtctttcttgcttaggtgacctccctttccttctcattcagatcctagggaaccagatccacatgcacgtaacagctaaggaatatggtgcccgtgtctccaacctacacatgtactcagctgtctgtgctgacgtcatccgccgatgggtctaccctctcaccccagaggcgaacttcactgacagcaccacccagagctgcactcattcccggcacaacatctaccgagggcctgaggtcagcctgggccatggcagcatcctagaggaaaatgtgctcctgggctctggcactgtcattggcagcaattgctttatcaccaacagtgtcattggccccggctgccacattggtgagcacaggtggggaatcaagccaactatcctaggaacaggaacctgggggggccacgtctccagaaacacaagggatggctacacaagggacagtccctgggaataaggaactatagagcggctacctcaggaaaggaggaaacagggatttgaaaacagcgataccttaatttgtagcctgtgggcctctcattggatgactcttcacattccagggtaccctgtagtcacattcaggagcaagtagataattaacatgcagtaacaacatctatttagcacattacagtttacaaagggcttttatatacattgttacatttaatcttcataatttacaaataaacaggctcaacaagattttcttgcccaaggtcattggtaataatggtgggacctgaatctgggtattctgaatgtaagtccagtgttcttttgagtctaccataactgcctggttggcctcttggtatctcattttggttgcaggagtgtgatgcgtctaatagtactgcccctttccaagaacaacagtaaggctcagattctaggggctgagcgtggtggctcatgcttgtaatcctagcacactgggaagccatggtgggaggatcgcttgagcccaggagttcaagaccagcctgggcaacatagcgacaccccttctccacaaatgatacaaaaattagctgggcatgatggcgcgtgcctgtaatctcagctattcgggaggctgaggcaggaggattacctgagcccagaggtcgagggtgcagtgagtcatgatcatactactgcactccagcctgggtgatggaatgagaccgtgtctcaaaagaaaaaaaagacttggtttctaaaatgtaccagaagaggtggaattatttggttctgcttgtaggcgtggatatgattctaataaggttttttgagttcagagggtccccagaaatcctgaaggttctcgggttcttaagctctgtgtgtagtctataattgttgtaaacttggtgaagtatcttctcaggcctgggcttagggggtgagtgggtgtttctggtgacttgcgggatggggaatgagagctaggtgggagctgtgctggtgtcagtcagccctgtcctctatgaagggctctgctctgcggttggaaccctgagttacccagaggtcttcccatcctgagccaggtgataacgtggtgctggaccagacctacctgtggcagggtgttcgagtggcggctggagcacagatccatcagtctctgctttgtgacaatgctgaggtcaaggaacgagtgacactgaaaccacgctctgtcctcacttcccaggtgagacctgatctatactgtgcacaggccctgaattgcatggcagtcacactgagccagaaggggcattatttccacccataatcctgtctaaaaaagttgctctcattatcaggatgcacttttcctccacaccctaatggttctgtgttttttttccccttaggtggtcgtgggcccaaatatcacgctgcctgagggctcggtgatctctttgcaccctccagatgcagaggaagatgaagatgatggcgagttcagtgatgattctggggctgaccaagaaaaggacaaagtgaagatgaaaggtgtgagactcaacaggtgtggggcatctgtgtgtctcgctgcctcatagaagaaccagtgtttcctcctggagggattggtgcttccgccgggccctctctatagatcattgccttttccaggttacaatccagcagaagtaggagctgctggcaagggctacctctggaaagctgcaggcatgaacatggaggaagaggaggaactgcagcagaatctgtggggtgagctaggcctgatgcctgcccttctcctcctgaatcggaatattttgaaggataatgaatacttcagagtcacattacttattcactcctttattcaggcagacagggcaggtatattgctctctgtcaatgactctttttttctttttcctcacccattatggcttctcaggactcaagatcaacatggaagaagagagtgaaagtgaaagtgagcaaagtatggattctgaggagccggacagccggggaggctcccctcagatggatgacatcaaaggtgagtggcaggggagaaatgcgctggaccagtttattctctgcctggatcaactagccagaggcttacgttcctcagaaagggtttggtatcgagtcaagactagatgacttagagcattctgaatgatgttggcccatgaacttatccttgctttgatttcagtgttccagaatgaagttttaggaacactacagcggggcaaagaggagaacatttcttgtgacaatctcgtcctggaaatcaactctctcaagtaagagcagcccctccctgttctcctcggggtgatcccgggaaggtagaggctttctcgtaagtgttttgtctccaaataggaacctattccttcgacatcccaaatggaaagaccagtagtatttggagcaaggagagcattattaagttctagcctcagcatagactttctccttcctaaaccctccccttccatattgttccatccagattcctctccaatgtctatcaaagtcatagttctaagcctgctgaaaggccagtgaaggccctggtgtcaccccagtctccccacaggtatgcctataacataagtctaaaggaggtgatgcaggtactgagccacgtggtcctggagttccccctgcaacagatggattccccgcttgactcaagccgctactgtgccctgctgcttcctgtgagcaaagattggagctgagtacaagggattgggtacaggcaaaggaaatcaggagtagactgtcttgttatattgggtgtatgtcacttctggttcctttttccttgcctctggaagctggttgggctctagagcagccttggctggttcagaggggtcagattgagttcaatactgactggcctttgagactccaggatttcataccatcctaggcccacaaaggtatattcagaatggacctggacattcagactctatggcagcaatttgacccaacacaagatcagcctctggggtgggaataggtattttgaggcagcctatagcatctgatcccctttcaccttccctaaggaatctctttttcccaaaccctgtcaacaactcccaagtccctctgacataattccacagaacctgtatcatctcccttttgtccacccatgtcatcagtatggatttgcttggatgtccaggtataggtgaatgcttaggaatatactgcagctcccttctttcttccatagctgctaaaggcctggagccctgtttttaggaactacataaagcgcgcagccgaccatttggaagcgttagcagccattgaggacttcttcctagagcatgaagctcttggtatttccatggccaaggtgaatatgacctcaagccccattcttctgcacttgctttcaaacgagggttggtgacccccttgggagacataaaatagaagctaatgtgaatccagtatggaccatccactcccaatatgcttattgctagaatagtacagcttggagccggactaataaggtagccatctggggggtggtctggaaatgtgcaaagctctccccagcaatagttccagaagttagacctgccccaggagcagagcgaacagctcactcttgtccgttttggaggaggctactcagtgcatagagggatctgagggcctggtagagtatcctgctggactttccaaggcccctgaggtcccctttattggccttttgcaggtactgatggctttctaccagctggagatcctggctgaggaaacaattctgagctggttcagccaaagagatacaactgacaagggccagcagttgcgcaagaatcaacaggtgcgtcaggctgtcctcctctcgccaagatggttatctcattcccaggtcctggcccctagactctagggtggttggtttctggggctctggttgttagagctgtttatctgccgaggggagcaggagagttatgtgcacctcccccagccgatctctcctctgcttctttacagctgcagaggttcatccagtggctaaaagaggcagaagaggagtcatctgaagatgactgaagtcacactgcctgctcctttgggtgtgattgagtgccctcctggctcctgggctgggacaagtgaggaactagctgcagagggatgagtgaccaccatccaggctgagactgaaaggagcagaggctggaactacagtattctttcccctgctagcaaccatgtgcctcccatcctgac

SEQ ID NO: 11787 - DNA, 2665 bp, Homo sapiens
agagaagaagatggcggcccctgtagtggcgccgcctggtgtggtggttagtcgggctaacaagcgcagcggcgcggggccgggaggcagcggtggcgggggagccagaggggcggaggaggaaccgccgccgcccctacaagcagttctggtggccgatagcttcgatcgccgcttcttccccatctccaaggaccagcctcgggtcctcttgcccctggccaatgtggcattaattgactacactctggaattcctgactgccacaggtgtacaggaaacatttgtcttttgttgctggaaagctgctcaaatcaaagaacatttactgaagtcaaagtggtgccgccctacatctctcaatgtggttcgaataattacatcagagctctatcgatcactgggagatgtcctccgtgatgttgatgccaaggctttggtgcgctctgactttcttctggtgtatggggatgtcatctcaaacatcaatatcaccagagcccttgaggaacacaggttgagacggaagctagaaaaaaatgtttctgtgatgacgatgatcttcaaggagtcatcccccagccacccaactcgttgccacgaagacaatgtggtagtggctgtggatagtaccacaaacagggttctccattttcagaagacccagggtctccggcgttttgcatttcctctgagcctgtttcagggcagtagtgatggagtggaggttcgatatgatttactggattgtcatatcagcatctgttctcctcaggtggcacaactctttacagacaactttgactaccaaactcgagatgactttgtgcgaggtctcttagtgaatgaggagatcctagggaaccagatccacatgcacgtaacagctaaggaatatggtgcccgtgtctccaacctacacatgtactcagctgtctgtgctgacgtcatccgccgatgggtctaccctctcaccccagaggcgaacttcactgacagcaccacccagagctgcactcattcccggcacaacatctaccgagggcctgaggtcagcctgggccatggcagcatcctagaggaaaatgtgctcctgggctctggcactgtcattggcagcaattgctttatcaccaacagtgtcattggccccggctgccacattggtgagcacaggtgataacgtggtgctggaccagacctacctgtggcagggtgttcgagtggcggctggagcacagatccatcagtctctgctttgtgacaatgctgaggtcaaggaacgagtgacactgaaaccacgctctgtcctcacttcccaggtggtcgtgggcccaaatatcacgctgcctgagggctcggtgatctctttgcaccctccagatgcagaggaagatgaagatgatggcgagttcagtgatgattctggggctgaccaagaaaaggacaaagtgaagatgaaaggttacaatccagcagaagtaggagctgctggcaagggctacctctggaaagctgcaggcatgaacatggaggaagaggaggaactgcagcagaatctgtggggactcaagatcaacatggaagaagagagtgaaagtgaaagtgagcaaagtatggattctgaggagccggacagccggggaggctcccctcagatggatgacatcaaagtgttccagaatgaagttttaggaacactacagcggggcaaagaggagaacatttcttgtgacaatctcgtcctggaaatcaactctctcaagtaagagcagcccctccctgttctcctcggggtgatcccgggaaggtagaggctttctcgtaagtgttttgtctccaaataggaacctattccttcgacatcccaaatggaaagaccagtagtatttggagcaaggagagcattattaagttctagcctcagcatagactttctccttcctaaaccctccccttccatattgttccatccagattcctctccaatgtctatcaaagtcatagttctaagcctgctgaaaggccagtgaaggccctggtgtcaccccagtctccccacaggtatgcctataacataagtctaaaggaggtgatgcaggtactgagccacgtggtcctggagttccccctgcaacagatggattccccgcttgactcaagccgctactgtgccctgctgcttcctctgctaaaggcctggagccctgtttttaggaactacataaagcgcgcagccgaccatttggaagcgttagcagccattgaggacttcttcctagagcatgaagctcttggtatttccatggccaaggtactgatggctttctaccagctggagatcctggctgaggaaacaattctgagctggttcagccaaagagatacaactgacaagggccagcagttgcgcaagaatcaacagctgcagaggttcatccagtggctaaaagaggcagaagaggagtcatctgaagatgactgaagtcacactgcctgctcctttgggtgtgattgagtgccctcctggctcctgggctgggacaagtgaggaactagctgcagagggatgagtgaccaccatccaggctgagactgaaaggagcagaggctggaactacagtattctttcccctgctagcaaccatgtgcctcccatcctgac

SEQ ID NO: 11788 - DNA, 9729 bp, Homo sapiens
gatggcggcccctgtagtggcgccgcctggtgtggtggttagtcgggctaacaagcgcagcggcgcggggccgggaggcagcggtggcgggggagccagaggggcggaggaggaaccgccgccgcccctacaagcagttctggtggccgatagcttcgatcgccgcttcttccccatctccaaggaccagcctcgggtgagcgccgcgcacgcgagcagccagagggcaggaagggtggcagggctggagcaagttctcatttcggctaactacaacagcatgcccttgaaggacctgcgtctatgctgttatcctaaaaccggatgcagagggactgtctaaaccctgatgactgctgaccaagttagtggccggcagatttgggcattcgtaatgctgtccacctcgggtttgaaaggaatgaagagagctaaatgtagaaacagcgcttgagagaagccttcacgcggggattcagtgcccctagaagaggctgcgccgcttttaaccttgccgatgacggttgcttaggtgaaaagaaacgaccttttgcctctgaaagggcggtaatatgccttaaaaagagcgggctagatctcaggcagtgtattttttttttccttccaggttctaatgatagccggtgctatctgtcgaaaggacaaaatgggtttagtggttgattgccatcagcccccgagttgtctagacaatggggtattggactcagctgggtcgttcagcagtcagttcagaaagagggaactgcattggatttaaggaaaatcctctctaattccctcgaaaaagcctaatggctgttcatttttgacaagtgacgggagatggctaacctctgacacttagaaagggatcaaggaaggaaatcttatggggaagaaggccttagcaatgcttaaatttatggaaatatgattgatttccagtattatcctttgccagcagtgaactgccattctgtcacagctctgtgtctgatacaaggcacatagattctgtacttaccatccccaaattgcaatgtctcagactcaggcttagagcatggcatgaacatcaaaggcaggaacctgtttatctttgaattggaaagatacagcaaaattacactgtttggaaatacgaatagaggagtgaaaattgttgcagtggggtacccaaagggattcgagacctcaagttttttttcatcttgtatccttcaggtcctcttgcccctggccaatgtggcattaattgactacactctggaattcctgactgccacaggtgtacaggaaacatttgtcttttgttgctggaaagctgctcaaatcaaagaacatttactgtaaggccctgcaacttttctttccatgtttcgccatctttttccagttttttcaggatgaatgtaactaaggggaaatgtgagaggggaaaaatgtgtctacttagatgtcattgtaagttctaagggtattttctacacttatcaggaggtgagcagctgaaactttgtatctgtctgtcttgggttttctgtgacaaagattaaagaataaacttgggttttttctgaatctcattataaagtttggtgccagtggactttgcttttatttaatggcttcagtatggaagttacaatgataacatctttgttttcccactgagtttctaaatcttgtttgttctcaccttcaaggatataaatgagctccttgtcatctttgtattcccactgcctagctcagtcccaagcatatagtgagcacttacatgtttgttgaaatcttgaaaactagggaatcgcattgcttatggaagtccaggatgtaaagactaggacattagcatggtctccatcagacagttcctaaatgttatatggattgcagaaggggaaagctgacgtgaagcgtgttcccaggctactttgtgtaccctaggcttcagcaggattttgagttcaaattgatgtttagggacaaggggtcaaggtatggagaggaaataaccatgtttcctaacccataaaacaagactggtgacacaggatgctgaaagcattcattatagttcataatactctttgaagttgaagacgctggcaagaacccaaaaaagccatcgagaaggactgtgagtgctgaaagggggtgaaaaatggggaaggctcaaatgatctttatgcttgatacactcattcccctcaccctcccttcctttaggaagtcaaagtggtgccgccctacatctctcaatgtggttcgaataattacatcagagctctatcgatcactgggagatgtcctccgtgatgttgatgccaaggctttggtgcgctctgactttcttctggtgtatggggatgtcatctcaaacatcaatatcaccagagcccttgaggaacacaggtcaggatgggaaaatgacaggaacaagggttaaagaccagcagagccctgagactgcttttttgcagttctgtccctcctgtcctttataggttgagacggaagctagaaaaaaatgtttctgtgatgacgatgatcttcaaggagtcatcccccagccacccaactcgttgccacgaagacaatgtggtagtggctgtggatagtaccacaaacagggttctccattttcagaagacccagggtctccggcgttttgcatttcctctggtgtgtggatatctggggtcctttgagatggggaagtgacaggcttcagtgggagaaacaaattaaagtccttgtaacttctccccacagagcctgtttcagggcagtagtgatggagtggaggttcgatatgatttactggattgtcatatcagcatctgttctcctcaggtgagctctttagggctggggctgcacacccaaagagtagaactctgtgggtctgttattgtccccttagaaggccagggtatatttcttctccctgtttattttcattatttttacttttattttttgagacagagtctcgctctgttgcccaggctggagtgcagtggtgtgatcccagctcactgcagactctgcctcctaggttcaagtgattctcctgcctcagcctcctgagtagcagggattacaggcacaccaccatgcctggctaatttttgtatttttagtagagatggggtttcaccatgttggccaggctggtctcgaactcctggtctcaagtgatctacctgtctcagcctcccaaagtgctgggattacaggcatgagccaccacacctggccttattttcatttttatttatatatattttttgagacagggtctcgctctgtggcccaggctggagcacagtggcaccatgactgctcactgcagcctcagcctcccaggttcaagggaacctcctgcctcagcctcctgagtagatggaaccacaggcatgcactaccactaatttttgtatttttttgtagagacggggttttgccatgttgtccggcctggtcacgaactcctgagctcaagcaatctgaccacctcagccttccaaaatgctgggattacaggcatgagccaccagttttttttgttgttgttgttgttattgttgttttgagatggagcctcgctctgtcgcccaggctggagtgcagtggcatgatctcagcttactgcagcctccacctcctgggttccagtgattctcctgcctcagcctctcaagtagctgggactacaggtacgcaccaccacatccggctattttttgtatttttcagtagagatggggtttcaccatattggccaggctggtctctaactcctgacctcaggtgatcctcccgccttggcctcccaaagtgctgcaatcacaggtgtgagcctctgcacccagcattttttttttttttttttttttttttttgagtcggagtttcactcttgttgcccaggctggatgcaatggtgcgatctcagctcactgcaacctccacctcccaggttcaagcaattcccctgcctcagcctcccaaatagctgggattgcaggcatgtgccaccacacccagctaatttttgtatttttagtagagacgaggttttaccatgttggtcaggctggtctcgaactcccaacctcaggtgatctgcctgcctcggcctcccaaagtgctggcattacgggcatgagccactgcacctggccttttttttttttttagaatctattgtaaagcaaagatcttgtctccagtatcccactgggagtctctttggaattctggtccatgttcagctgtcatagggtttgctaggtctctgggggattatctgtgctcctagagaatagtacttaatcctggccaagcgtggtggctcacgcttgtaatcccagcactttgggaggccgaggtgagtggatcatgaggtcaggagttcaagaccagcctgaccaacacagtgaaatcccatctctactaaaaaataaaaatacaaaaattagctgggcgtggtggcggacgcttgtaatcccagctacttgggaggctgaggcacaagaatcactttaacccaggaggtggaggttgcagtgagccgagatcatgcaactgcactccagcctgggcaacagagctagacttgtctcaaaaaaaaaaaaaaaagaatagtacttaattctagcccactccacttcccttccacaggtggcacaactctttacagacaactttgactaccaaactcgagatgactttgtgcgaggtctcttagtgaatgaggaggtgagaaaagtcttccaatgcctctttaggagagaggagaaggctatgattgtatctcatgctggtaacttttgatcttttttgtattttattgaggcttaggagggaggaaaagcaggggacaggaggaacagtacacaaagaagaatctttgtggcagtgagaggcagaggggaacttaaaaggattagaaaagttgtacttgggggcattcttcctgtctttcttgcttaggtgacctccctttccttctcattcagatcctagggaaccagatccacatgcacgtaacagctaaggaatatggtgcccgtgtctccaacctacacatgtactcagctgtctgtgctgacgtcatccgccgatgggtctaccctctcaccccagaggcgaacttcactgacagcaccacccagagctgcactcattcccggcacaacatctaccgagggcctgaggtcagcctgggccatggcagcatcctagaggaaaatgtgctcctgggctctggcactgtcattggcagcaattgctttatcaccaacagtgtcattggccccggctgccacattggtgagcacaggtggggaatcaagccaactatcctaggaacaggaacctgggggggccacgtctccagaaacacaagggatggctacacaagggacagtccctgggaataaggaactatagagcggctacctcaggaaaggaggaaacagggatttgaaaacagcgataccttaatttgtagcctgtgggcctctcattggatgactcttcacattccagggtaccctgtagtcacattcaggagcaagtagataattaacatgcagtaacaacatctatttagcacattacagtttacaaagggcttttatatacattgttacatttaatcttcataatttacaaataaacaggctcaacaagattttcttgcccaaggtcattggtaataatggtgggacctgaatctgggtattctgaatgtaagtccagtgttcttttgagtctaccataactgcctggttggcctcttggtatctcattttggttgcaggagtgtgatgcgtctaatagtactgcccctttccaagaacaacagtaaggctcagattctaggggctgagcgtggtggctcatgcttgtaatcctagcacactgggaagccatggtgggaggatcgcttgagcccaggagttcaagaccagcctgggcaacatagcgacaccccttctccacaaatgatacaaaaattagctgggcatgatggcgcgtgcctgtaatctcagctattcgggaggctgaggcaggaggattacctgagcccagaggtcgagggtgcagtgagtcatgatcatactactgcactccagcctgggtgatggaatgagaccgtgtctcaaaagaaaaaaaagacttggtttctaaaatgtaccagaagaggtggaattatttggttctgcttgtaggcgtggatatgattctaataaggttttttgagttcagagggtccccagaaatcctgaaggttctcgggttcttaagctctgtgtgtagtctataattgttgtaaacttggtgaagtatcttctcaggcctgggcttagggggtgagtgggtgtttctggtgacttgcgggatggggaatgagagctaggtgggagctgtgctggtgtcagtcagccctgtcctctatgaagggctctgctctgcggttggaaccctgagttacccagaggtcttcccatcctgagccaggtgataacgtggtgctggaccagacctacctgtggcagggtgttcgagtggcggctggagcacagatccatcagtctctgctttgtgacaatgctgaggtcaaggaacgagtgacactgaaaccacgctctgtcctcacttcccaggtgagacctgatctatactgtgcacaggccctgaattgcatggcagtcacactgagccagaaggggcattatttccacccataatcctgtctaaaaaagttgctctcattatcaggatgcacttttcctccacaccctaatggttctgtgttttttttccccttaggtggtcgtgggcccaaatatcacgctgcctgagggctcggtgatctctttgcaccctccagatgcagaggaagatgaagatgatggcgagttcagtgatgattctggggctgaccaagaaaaggacaaagtgaagatgaaaggtgtgagactcaacaggtgtggggcatctgtgtgtctcgctgcctcatagaagaaccagtgtttcctcctggagggattggtgcttccgccgggccctctctatagatcattgccttttccaggttacaatccagcagaagtaggagctgctggcaagggctacctctggaaagctgcaggcatgaacatggaggaagaggaggaactgcagcagaatctgtggggtgagctaggcctgatgcctgcccttctcctcctgaatcggaatattttgaaggataatgaatacttcagagtcacattacttattcactcctttattcaggcagacagggcaggtatattgctctctgtcaatgactctttttttctttttcctcacccattatggcttctcaggactcaagatcaacatggaagaagagagtgaaagtgaaagtgagcaaagtatggattctgaggagccggacagccggggaggctcccctcagatggatgacatcaaaggtgagtggcaggggagaaatgcgctggaccagtttattctctgcctggatcaactagccagaggcttacgttcctcagaaagggtttggtatcgagtcaagactagatgacttagagcattctgaatgatgttggcccatgaacttatccttgctttgatttcagtgttccagaatgaagttttaggaacactacagcggggcaaagaggagaacatttcttgtgacaatctcgtcctggaaatcaactctctcaagtaagagcagcccctccctgttctcctcggggtgatcccgggaaggtagaggctttctcgtaagtgttttgtctccaaataggaacctattccttcgacatcccaaatggaaagaccagtagtatttggagcaaggagagcattattaagttctagcctcagcatagactttctccttcctaaaccctccccttccatattgttccatccagattcctctccaatgtctatcaaagtcatagttctaagcctgctgaaaggccagtgaaggccctggtgtcaccccagtctccccacaggtatgcctataacataagtctaaaggaggtgatgcaggtactgagccacgtggtcctggagttccccctgcaacagatggattccccgcttgactcaagccgctactgtgccctgctgcttcctgtgagcaaagattggagctgagtacaagggattgggtacaggcaaaggaaatcaggagtagactgtcttgttatattgggtgtatgtcacttctggttcctttttccttgcctctggaagctggttgggctctagagcagccttggctggttcagaggggtcagattgagttcaatactgactggcctttgagactccaggatttcataccatcctaggcccacaaaggtatattcagaatggacctggacattcagactctatggcagcaatttgacccaacacaagatcagcctctggggtgggaataggtattttgaggcagcctatagcatctgatcccctttcaccttccctaaggaatctctttttcccaaaccctgtcaacaactcccaagtccctctgacataattccacagaacctgtatcatctcccttttgtccacccatgtcatcagtatggatttgcttggatgtccaggtataggtgaatgcttaggaatatactgcagctcccttctttcttccatagctgctaaaggcctggagccctgtttttaggaactacataaagcgcgcagccgaccatttggaagcgttagcagccattgaggacttcttcctagagcatgaagctcttggtatttccatggccaaggtgaatatgacctcaagccccattcttctgcacttgctttcaaacgagggttggtgacccccttgggagacataaaatagaagctaatgtgaatccagtatggaccatccactcccaatatgcttattgctagaatagtacagcttggagccggactaataaggtagccatctggggggtggtctggaaatgtgcaaagctctccccagcaatagttccagaagttagacctgccccaggagcagagcgaacagctcactcttgtccgttttggaggaggctactcagtgcatagagggatctgagggcctggtagagtatcctgctggactttccaaggcccctgaggtcccctttattggccttttgcaggtactgatggctttctaccagctggagatcctggctgaggaaacaattctgagctggttcagccaaagagatacaactgacaagggccagcagttgcgcaagaatcaacaggtgcgtcaggctgtcctcctctcgccaagatggttatctcattcccaggtcctggcccctagactctagggtggttggtttctggggctctggttgttagagctgtttatctgccgaggggagcaggagagttatgtgcacctcccccagccgatctctcctctgcttctttacagctgcagaggttcatccagtggctaaaagaggcagaagaggagtcatctgaagatgactgaagtcacactgcctgctcctttgggtgtgattgagtgccctcctggctcctgggctgggacaagtgaggaactagctgcagagggatgagtgaccaccatccaggctgagactgaaaggagcagaggctggaactacagtattctttcccctgctagcaaccatgtgcctc

SEQ ID NO: 11789 - DNA, 2505 bp, Homo sapiens
gatggcggcccctgtagtggcgccgcctggtgtggtggttagtcgggctaacaagcgcagcggcgcggggccgggaggcagcggtggcgggggagccagaggggcggaggaggaaccgccgccgcccctacaagcagttctggtggccgatagcttcgatcgccgcttcttccccatctccaaggaccagcctcgggtgagcgccgcgcacgcgagcagccagagggcaggaagggtggcagggctggagcaagttctcatttcggctaactacaacagcatgcccttgaaggacctgcgtctatgctgttatcctaaaaccggatgcagagggactgtctaaaccctgatgactgctgaccaagtcctcttgcccctggccaatgtggcattaattgactacactctggaattcctgactgccacaggtgtacaggaaacatttgtcttttgttgctggaaagctgctcaaatcaaagaacatttactgaagtcaaagtggtgccgccctacatctctcaatgtggttcgaataattacatcagagctctatcgatcactgggagatgtcctccgtgatgttgatgccaaggctttggtgcgctctgactttcttctggtgtatggggatgtcatctcaaacatcaatatcaccagagcccttgaggaacacaggttgagacggaagctagaaaaaaatgtttctgtgatgacgatgatcttcaaggagtcatcccccagccacccaactcgttgccacgaagacaatgtggtagtggctgtggatagtaccacaaacagggttctccattttcagaagacccagggtctccggcgttttgcatttcctctgagcctgtttcagggcagtagtgatggagtggaggttcgatatgatttactggattgtcatatcagcatctgttctcctcaggtggcacaactctttacagacaactttgactaccaaactcgagatgactttgtgcgaggtctcttagtgaatgaggagatcctagggaaccagatccacatgcacgtaacagctaaggaatatggtgcccgtgtctccaacctacacatgtactcagctgtctgtgctgacgtcatccgccgatgggtctaccctctcaccccagaggcgaacttcactgacagcaccacccagagctgcactcattcccggcacaacatctaccgagggcctgaggtcagcctgggccatggcagcatcctagaggaaaatgtgctcctgggctctggcactgtcattggcagcaattgctttatcaccaacagtgtcattggccccggctgccacattggtgataacgtggtgctggaccagacctacctgtggcagggtgttcgagtggcggctggagcacagatccatcagtctctgctttgtgacaatgctgaggtcaaggaacgagtgacactgaaaccacgctctgtcctcacttcccaggtggtcgtgggcccaaatatcacgctgcctgagggctcggtgatctctttgcaccctccagatgcagaggaagatgaagatgatggcgagttcagtgatgattctggggctgaccaagaaaaggacaaagtgaagatgaaaggttacaatccagcagaagtaggagctgctggcaagggctacctctggaaagctgcaggcatgaacatggaggaagaggaggaactgcagcagaatctgtggggactcaagatcaacatggaagaagagagtgaaagtgaaagtgagcaaagtatggattctgaggagccggacagccggggaggctcccctcagatggatgacatcaaagtgttccagaatgaagttttaggaacactacagcggggcaaagaggagaacatttcttgtgacaatctcgtcctggaaatcaactctctcaagtatgcctataacataagtctaaaggaggtgatgcaggtactgagccacgtggtcctggagttccccctgcaacagatggattccccgcttgactcaagccgctactgtgccctgctgcttcctctgctaaaggcctggagccctgtttttaggaactacataaagcgcgcagccgaccatttggaagcgttagcagccattgaggacttcttcctagagcatgaagctcttggtatttccatggccaaggtactgatggctttctaccagctggagatcctggctgaggaaacaattctgagctggttcagccaaagagatacaactgacaagggccagcagttgcgcaagaatcaacagctgcagaggttcatccagtggctaaaagaggcagaagaggagtcatctgaagatgactgaagtcacactgcctgctcctttgggtgtgattgagtgccctcctggctcctgggctgggacaagtgaggaactagctgcagagggatgagtgaccaccatccaggctgagactgaaaggagcagaggctggaactacagtattctttcccctgctagcaaccatgtgcctc

SEQ ID NO: 11790 - DNA, 9928 bp, Homo sapiens
gagagaagaagatggcggcccctgtagtggcgccgcctggtgtggtggttagtcgggctaacaagcgcagcggcgcggggccgggaggcagcggtggcgggggagccagaggggcggaggaggaaccgccgccgcccctacaagcagttctggtggccgatagcttcgatcgccgcttcttccccatctccaaggaccagcctcgggtgagcgccgcgcacgcgagcagccagagggcaggaagggtggcagggctggagcaagttctcatttcggctaactacaacagcatgcccttgaaggacctgcgtctatgctgttatcctaaaaccggatgcagagggactgtctaaaccctgatgactgctgaccaagttagtggccggcagatttgggcattcgtaatgctgtccacctcgggtttgaaaggaatgaagagagctaaatgtagaaacagcgcttgagagaagccttcacgcggggattcagtgcccctagaagaggctgcgccgcttttaaccttgccgatgacggttgcttaggtgaaaagaaacgaccttttgcctctgaaagggcggtaatatgccttaaaaagagcgggctagatctcaggcagtgtattttttttttccttccaggttctaatgatagccggtgctatctgtcgaaaggacaaaatgggtttagtggttgattgccatcagcccccgagttgtctagacaatggggtattggactcagctgggtcgttcagcagtcagttcagaaagagggaactgcattggatttaaggaaaatcctctctaattccctcgaaaaagcctaatggctgttcatttttgacaagtgacgggagatggctaacctctgacacttagaaagggatcaaggaaggaaatcttatggggaagaaggccttagcaatgcttaaatttatggaaatatgattgatttccagtattatcctttgccagcagtgaactgccattctgtcacagctctgtgtctgatacaaggcacatagattctgtacttaccatccccaaattgcaatgtctcagactcaggcttagagcatggcatgaacatcaaaggcaggaacctgtttatctttgaattggaaagatacagcaaaattacactgtttggaaatacgaatagaggagtgaaaattgttgcagtggggtacccaaagggattcgagacctcaagttttttttcatcttgtatccttcaggtcctcttgcccctggccaatgtggcattaattgactacactctggaattcctgactgccacaggtgtacaggaaacatttgtcttttgttgctggaaagctgctcaaatcaaagaacatttactgtaaggccctgcaacttttctttccatgtttcgccatctttttccagttttttcaggatgaatgtaactaaggggaaatgtgagaggggaaaaatgtgtctacttagatgtcattgtaagttctaagggtattttctacacttatcaggaggtgagcagctgaaactttgtatctgtctgtcttgggttttctgtgacaaagattaaagaataaacttgggttttttctgaatctcattataaagtttggtgccagtggactttgcttttatttaatggcttcagtatggaagttacaatgataacatctttgttttcccactgagtttctaaatcttgtttgttctcaccttcaaggatataaatgagctccttgtcatctttgtattcccactgcctagctcagtcccaagcatatagtgagcacttacatgtttgttgaaatcttgaaaactagggaatcgcattgcttatggaagtccaggatgtaaagactaggacattagcatggtctccatcagacagttcctaaatgttatatggattgcagaaggggaaagctgacgtgaagcgtgttcccaggctactttgtgtaccctaggcttcagcaggattttgagttcaaattgatgtttagggacaaggggtcaaggtatggagaggaaataaccatgtttcctaacccataaaacaagactggtgacacaggatgctgaaagcattcattatagttcataatactctttgaagttgaagacgctggcaagaacccaaaaaagccatcgagaaggactgtgagtgctgaaagggggtgaaaaatggggaaggctcaaatgatctttatgcttgatacactcattcccctcaccctcccttcctttaggaagtcaaagtggtgccgccctacatctctcaatgtggttcgaataattacatcagagctctatcgatcactgggagatgtcctccgtgatgttgatgccaaggctttggtgcgctctgactttcttctggtgtatggggatgtcatctcaaacatcaatatcaccagagcccttgaggaacacaggtcaggatgggaaaatgacaggaacaagggttaaagaccagcagagccctgagactgcttttttgcagttctgtccctcctgtcctttataggttgagacggaagctagaaaaaaatgtttctgtgatgacgatgatcttcaaggagtcatcccccagccacccaactcgttgccacgaagacaatgtggtagtggctgtggatagtaccacaaacagggttctccattttcagaagacccagggtctccggcgttttgcatttcctctggtgtgtggatatctggggtcctttgagatggggaagtgacaggcttcagtgggagaaacaaattaaagtccttgtaacttctccccacagagcctgtttcagggcagtagtgatggagtggaggttcgatatgatttactggattgtcatatcagcatctgttctcctcaggtgagctctttagggctggggctgcacacccaaagagtagaactctgtgggtctgttattgtccccttagaaggccagggtatatttcttctccctgtttattttcattatttttacttttattttttgagacagagtctcgctctgttgcccaggctggagtgcagtggtgtgatcccagctcactgcagactctgcctcctaggttcaagtgattctcctgcctcagcctcctgagtagcagggattacaggcacaccaccatgcctggctaatttttgtatttttagtagagatggggtttcaccatgttggccaggctggtctcgaactcctggtctcaagtgatctacctgtctcagcctcccaaagtgctgggattacaggcatgagccaccacacctggccttattttcatttttatttatatatattttttgagacagggtctcgctctgtggcccaggctggagcacagtggcaccatgactgctcactgcagcctcagcctcccaggttcaagggaacctcctgcctcagcctcctgagtagatggaaccacaggcatgcactaccactaatttttgtatttttttgtagagacggggttttgccatgttgtccggcctggtcacgaactcctgagctcaagcaatctgaccacctcagccttccaaaatgctgggattacaggcatgagccaccagttttttttgttgttgttgttgttattgttgttttgagatggagcctcgctctgtcgcccaggctggagtgcagtggcatgatctcagcttactgcagcctccacctcctgggttccagtgattctcctgcctcagcctctcaagtagctgggactacaggtacgcaccaccacatccggctattttttgtatttttcagtagagatggggtttcaccatattggccaggctggtctctaactcctgacctcaggtgatcctcccgccttggcctcccaaagtgctgcaatcacaggtgtgagcctctgcacccagcattttttttttttttttttttttttttttgagtcggagtttcactcttgttgcccaggctggatgcaatggtgcgatctcagctcactgcaacctccacctcccaggttcaagcaattcccctgcctcagcctcccaaatagctgggattgcaggcatgtgccaccacacccagctaatttttgtatttttagtagagacgaggttttaccatgttggtcaggctggtctcgaactcccaacctcaggtgatctgcctgcctcggcctcccaaagtgctggcattacgggcatgagccactgcacctggccttttttttttttttagaatctattgtaaagcaaagatcttgtctccagtatcccactgggagtctctttggaattctggtccatgttcagctgtcatagggtttgctaggtctctgggggattatctgtgctcctagagaatagtacttaatcctggccaagcgtggtggctcacgcttgtaatcccagcactttgggaggccgaggtgagtggatcatgaggtcaggagttcaagaccagcctgaccaacacagtgaaatcccatctctactaaaaaataaaaatacaaaaattagctgggcgtggtggcggacgcttgtaatcccagctacttgggaggctgaggcacaagaatcactttaacccaggaggtggaggttgcagtgagccgagatcatgcaactgcactccagcctgggcaacagagctagacttgtctcaaaaaaaaaaaaaaaagaatagtacttaattctagcccactccacttcccttccacaggtggcacaactctttacagacaactttgactaccaaactcgagatgactttgtgcgaggtctcttagtgaatgaggaggtgagaaaagtcttccaatgcctctttaggagagaggagaaggctatgattgtatctcatgctggtaacttttgatcttttttgtattttattgaggcttaggagggaggaaaagcaggggacaggaggaacagtacacaaagaagaatctttgtggcagtgagaggcagaggggaacttaaaaggattagaaaagttgtacttgggggcattcttcctgtctttcttgcttaggtgacctccctttccttctcattcagatcctagggaaccagatccacatgcacgtaacagctaaggaatatggtgcccgtgtctccaacctacacatgtactcagctgtctgtgctgacgtcatccgccgatgggtctaccctctcaccccagaggcgaacttcactgacagcaccacccagagctgcactcattcccggcacaacatctaccgagggcctgaggtcagcctgggccatggcagcatcctagaggaaaatgtgctcctgggctctggcactgtcattggcagcaattgctttatcaccaacagtgtcattggccccggctgccacattggtgagcacaggtggggaatcaagccaactatcctaggaacaggaacctgggggggccacgtctccagaaacacaagggatggctacacaagggacagtccctgggaataaggaactatagagcggctacctcaggaaaggaggaaacagggatttgaaaacagcgataccttaatttgtagcctgtgggcctctcattggatgactcttcacattccagggtaccctgtagtcacattcaggagcaagtagataattaacatgcagtaacaacatctatttagcacattacagtttacaaagggcttttatatacattgttacatttaatcttcataatttacaaataaacaggctcaacaagattttcttgcccaaggtcattggtaataatggtgggacctgaatctgggtattctgaatgtaagtccagtgttcttttgagtctaccataactgcctggttggcctcttggtatctcattttggttgcaggagtgtgatgcgtctaatagtactgcccctttccaagaacaacagtaaggctcagattctaggggctgagcgtggtggctcatgcttgtaatcctagcacactgggaagccatggtgggaggatcgcttgagcccaggagttcaagaccagcctgggcaacatagcgacaccccttctccacaaatgatacaaaaattagctgggcatgatggcgcgtgcctgtaatctcagctattcgggaggctgaggcaggaggattacctgagcccagaggtcgagggtgcagtgagtcatgatcatactactgcactccagcctgggtgatggaatgagaccgtgtctcaaaagaaaaaaaagacttggtttctaaaatgtaccagaagaggtggaattatttggttctgcttgtaggcgtggatatgattctaataaggttttttgagttcagagggtccccagaaatcctgaaggttctcgggttcttaagctctgtgtgtagtctataattgttgtaaacttggtgaagtatcttctcaggcctgggcttagggggtgagtgggtgtttctggtgacttgcgggatggggaatgagagctaggtgggagctgtgctggtgtcagtcagccctgtcctctatgaagggctctgctctgcggttggaaccctgagttacccagaggtcttcccatcctgagccaggtgataacgtggtgctggaccagacctacctgtggcagggtgttcgagtggcggctggagcacagatccatcagtctctgctttgtgacaatgctgaggtcaaggaacgagtgacactgaaaccacgctctgtcctcacttcccaggtgagacctgatctatactgtgcacaggccctgaattgcatggcagtcacactgagccagaaggggcattatttccacccataatcctgtctaaaaaagttgctctcattatcaggatgcacttttcctccacaccctaatggttctgtgttttttttccccttaggtggtcgtgggcccaaatatcacgctgcctgagggctcggtgatctctttgcaccctccagatgcagaggaagatgaagatgatggcgagttcagtgatgattctggggctgaccaagaaaaggacaaagtgaagatgaaaggtgtgagactcaacaggtgtggggcatctgtgtgtctcgctgcctcatagaagaaccagtgtttcctcctggagggattggtgcttccgccgggccctctctatagatcattgccttttccaggttacaatccagcagaagtaggagctgctggcaagggctacctctggaaagctgcaggcatgaacatggaggaagaggaggaactgcagcagaatctgtggggtgagctaggcctgatgcctgcccttctcctcctgaatcggaatattttgaaggataatgaatacttcagagtcacattacttattcactcctttattcaggcagacagggcaggtatattgctctctgtcaatgactctttttttctttttcctcacccattatggcttctcaggactcaagatcaacatggaagaagagagtgaaagtgaaagtgagcaaagtatggattctgaggagccggacagccggggaggctcccctcagatggatgacatcaaaggtgagtggcaggggagaaatgcgctggaccagtttattctctgcctggatcaactagccagaggcttacgttcctcagaaagggtttggtatcgagtcaagactagatgacttagagcattctgaatgatgttggcccatgaacttatccttgctttgatttcagtgttccagaatgaagttttaggaacactacagcggggcaaagaggagaacatttcttgtgacaatctcgtcctggaaatcaactctctcaagtaagagcagcccctccctgttctcctcggggtgatcccgggaaggtagaggctttctcgtaagtgttttgtctccaaataggaacctattccttcgacatcccaaatggaaagaccagtagtatttggagcaaggagagcattattaagttctagcctcagcatagactttctccttcctaaaccctccccttccatattgttccatccagattcctctccaatgtctatcaaagtcatagttctaagcctgctgaaaggccagtgaaggccctggtgtcaccccagtctccccacaggtatgcctataacataagtctaaaggaggtgatgcaggtactgagccacgtggtcctggagttccccctgcaacagatggattccccgcttgactcaagccgctactgtgccctgctgcttcctgtgagcaaagattggagctgagtacaagggattgggtacaggcaaaggaaatcaggagtagactgtcttgttatattgggtgtatgtcacttctggttcctttttccttgcctctggaagctggttgggctctagagcagccttggctggttcagaggggtcagattgagttcaatactgactggcctttgagactccaggatttcataccatcctaggcccacaaaggtatattcagaatggacctggacattcagactctatggcagcaatttgacccaacacaagatcagcctctggggtgggaataggtattttgaggcagcctatagcatctgatcccctttcaccttccctaaggaatctctttttcccaaaccctgtcaacaactcccaagtccctctgacataattccacagaacctgtatcatctcccttttgtccacccatgtcatcagtatggatttgcttggatgtccaggtataggtgaatgcttaggaatatactgcagctcccttctttcttccatagctgctaaaggcctggagccctgtttttaggaactacataaagcgcgcagccgaccatttggaagcgttagcagccattgaggacttcttcctagagcatgaagctcttggtatttccatggccaaggtgaatatgacctcaagccccattcttctgcacttgctttcaaacgagggttggtgacccccttgggagacataaaatagaagctaatgtgaatccagtatggaccatccactcccaatatgcttattgctagaatagtacagcttggagccggactaataaggtagccatctggggggtggtctggaaatgtgcaaagctctccccagcaatagttccagaagttagacctgccccaggagcagagcgaacagctcactcttgtccgttttggaggaggctactcagtgcatagagggatctgagggcctggtagagtatcctgctggactttccaaggcccctgaggtcccctttattggccttttgcaggtactgatggctttctaccagctggagatcctggctgaggaaacaattctgagctggttcagccaaagagatacaactgacaagggccagcagttgcgcaagaatcaacaggtgcgtcaggctgtcctcctctcgccaagatggttatctcattcccaggtcctggcccctagactctagggtggttggtttctggggctctggttgttagagctgtttatctgccgaggggagcaggagagttatgtgcacctcccccagccgatctctcctctgcttctttacagctgcagaggttcatccagtggctaaaagaggcagaagaggagtcatctgaagatgactgaagtcacactgcctgctcctttgggtgtgattgagtgccctcctggctcctgggctgggacaagtgaggaactagctgcagagggatgagtgaccaccatccaggctgagactgaaaggagcagaggctggaactacagtattctttcccctgctagcaaccatgtgcctcccatcctgactgtggagttgggatgtggaagtggggctggaacaaagcttctgcctagggaggagctaagcaggcccggcagttggaggaaggccagaggaacagctttgtgctccggctttccctcagggaacagcagagagcagttggctctttctgctgcttgtatatgttaatattaaaagagag

SEQ ID NO: 11791 - DNA, 2552 bp, Homo sapiens
gagagaagaagatggcggcccctgtagtggcgccgcctggtgtggtggttagtcgggctaacaagcgcagcggcgcggggccgggaggcagcggtggcgggggagccagaggggcggaggaggaaccgccgccgcccctacaagcagttctggtggccgatagcttcgatcgccgcttcttccccatctccaaggaccagcctcgggtcctcttgcccctggccaatgtggcattaattgactacactctggaattcctgactgccacaggtgtacaggaaacatttgtcttttgttgctggaaagctgctcaaatcaaagaacatttactgaagtcaaagtggtgccgccctacatctctcaatgtggttcgaataattacatcagagctctatcgatcactgggagatgtcctccgtgatgttgatgccaaggctttggtgcgctctgactttcttctggtgtatggggatgtcatctcaaacatcaatatcaccagagcccttgaggaacacaggttgagacggaagctagaaaaaaatgtttctgtgatgacgatgatcttcaaggagtcatcccccagccacccaactcgttgccacgaagacaatgtggtagtggctgtggatagtaccacaaacagggttctccattttcagaagacccagggtctccggcgttttgcatttcctctgagcctgtttcagggcagtagtgatggagtggaggttcgatatgatttactggattgtcatatcagcatctgttctcctcaggtggcacaactctttacagacaactttgactaccaaactcgagatgactttgtgcgaggtctcttagtgaatgaggagatcctagggaaccagatccacatgcacgtaacagctaaggaatatggtgcccgtgtctccaacctacacatgtactcagctgtctgtgctgacgtcatccgccgatgggtctaccctctcaccccagaggcgaacttcactgacagcaccacccagagctgcactcattcccggcacaacatctaccgagggcctgaggtcagcctgggccatggcagcatcctagaggaaaatgtgctcctgggctctggcactgtcattggcagcaattgctttatcaccaacagtgtcattggccccggctgccacattggtgataacgtggtgctggaccagacctacctgtggcagggtgttcgagtggcggctggagcacagatccatcagtctctgctttgtgacaatgctgaggtcaaggaacgagtgacactgaaaccacgctctgtcctcacttcccaggtggtcgtgggcccaaatatcacgctgcctgagggctcggtgatctctttgcaccctccagatgcagaggaagatgaagatgatggcgagttcagtgatgattctggggctgaccaagaaaaggacaaagtgaagatgaaaggtgtgagactcaacaggttacaatccagcagaagtaggagctgctggcaagggctacctctggaaagctgcaggcatgaacatggaggaagaggaggaactgcagcagaatctgtggggactcaagatcaacatggaagaagagagtgaaagtgaaagtgagcaaagtatggattctgaggagccggacagccggggaggctcccctcagatggatgacatcaaagtgttccagaatgaagttttaggaacactacagcggggcaaagaggagaacatttcttgtgacaatctcgtcctggaaatcaactctctcaagtatgcctataacataagtctaaaggaggtgatgcaggtactgagccacgtggtcctggagttccccctgcaacagatggattccccgcttgactcaagccgctactgtgccctgctgcttcctctgctaaaggcctggagccctgtttttaggaactacataaagcgcgcagccgaccatttggaagcgttagcagccattgaggacttcttcctagagcatgaagctcttggtatttccatggccaaggtactgatggctttctaccagctggagatcctggctgaggaaacaattctgagctggttcagccaaagagatacaactgacaagggccagcagttgcgcaagaatcaacagctgcagaggttcatccagtggctaaaagaggcagaagaggagtcatctgaagatgactgaagtcacactgcctgctcctttgggtgtgattgagtgccctcctggctcctgggctgggacaagtgaggaactagctgcagagggatgagtgaccaccatccaggctgagactgaaaggagcagaggctggaactacagtattctttcccctgctagcaaccatgtgcctcccatcctgactgtggagttgggatgtggaagtggggctggaacaaagcttctgcctagggaggagctaagcaggcccggcagttggaggaaggccagaggaacagctttgtgctccggctttccctcagggaacagcagagagcagttggctctttctgctgcttgtatatgttaatattaaaagagag

SEQ ID NO: 11792 - DNA, 9954 bp, Homo sapiens
gcggaagtggtgaccgtgagagaagaagatggcggcccctgtagtggcgccgcctggtgtggtggttagtcgggctaacaagcgcagcggcgcggggccgggaggcagcggtggcgggggagccagaggggcggaggaggaaccgccgccgcccctacaagcagttctggtggccgatagcttcgatcgccgcttcttccccatctccaaggaccagcctcgggtgagcgccgcgcacgcgagcagccagagggcaggaagggtggcagggctggagcaagttctcatttcggctaactacaacagcatgcccttgaaggacctgcgtctatgctgttatcctaaaaccggatgcagagggactgtctaaaccctgatgactgctgaccaagttagtggccggcagatttgggcattcgtaatgctgtccacctcgggtttgaaaggaatgaagagagctaaatgtagaaacagcgcttgagagaagccttcacgcggggattcagtgcccctagaagaggctgcgccgcttttaaccttgccgatgacggttgcttaggtgaaaagaaacgaccttttgcctctgaaagggcggtaatatgccttaaaaagagcgggctagatctcaggcagtgtattttttttttccttccaggttctaatgatagccggtgctatctgtcgaaaggacaaaatgggtttagtggttgattgccatcagcccccgagttgtctagacaatggggtattggactcagctgggtcgttcagcagtcagttcagaaagagggaactgcattggatttaaggaaaatcctctctaattccctcgaaaaagcctaatggctgttcatttttgacaagtgacgggagatggctaacctctgacacttagaaagggatcaaggaaggaaatcttatggggaagaaggccttagcaatgcttaaatttatggaaatatgattgatttccagtattatcctttgccagcagtgaactgccattctgtcacagctctgtgtctgatacaaggcacatagattctgtacttaccatccccaaattgcaatgtctcagactcaggcttagagcatggcatgaacatcaaaggcaggaacctgtttatctttgaattggaaagatacagcaaaattacactgtttggaaatacgaatagaggagtgaaaattgttgcagtggggtacccaaagggattcgagacctcaagttttttttcatcttgtatccttcaggtcctcttgcccctggccaatgtggcattaattgactacactctggaattcctgactgccacaggtgtacaggaaacatttgtcttttgttgctggaaagctgctcaaatcaaagaacatttactgtaaggccctgcaacttttctttccatgtttcgccatctttttccagttttttcaggatgaatgtaactaaggggaaatgtgagaggggaaaaatgtgtctacttagatgtcattgtaagttctaagggtattttctacacttatcaggaggtgagcagctgaaactttgtatctgtctgtcttgggttttctgtgacaaagattaaagaataaacttgggttttttctgaatctcattataaagtttggtgccagtggactttgcttttatttaatggcttcagtatggaagttacaatgataacatctttgttttcccactgagtttctaaatcttgtttgttctcaccttcaaggatataaatgagctccttgtcatctttgtattcccactgcctagctcagtcccaagcatatagtgagcacttacatgtttgttgaaatcttgaaaactagggaatcgcattgcttatggaagtccaggatgtaaagactaggacattagcatggtctccatcagacagttcctaaatgttatatggattgcagaaggggaaagctgacgtgaagcgtgttcccaggctactttgtgtaccctaggcttcagcaggattttgagttcaaattgatgtttagggacaaggggtcaaggtatggagaggaaataaccatgtttcctaacccataaaacaagactggtgacacaggatgctgaaagcattcattatagttcataatactctttgaagttgaagacgctggcaagaacccaaaaaagccatcgagaaggactgtgagtgctgaaagggggtgaaaaatggggaaggctcaaatgatctttatgcttgatacactcattcccctcaccctcccttcctttaggaagtcaaagtggtgccgccctacatctctcaatgtggttcgaataattacatcagagctctatcgatcactgggagatgtcctccgtgatgttgatgccaaggctttggtgcgctctgactttcttctggtgtatggggatgtcatctcaaacatcaatatcaccagagcccttgaggaacacaggtcaggatgggaaaatgacaggaacaagggttaaagaccagcagagccctgagactgcttttttgcagttctgtccctcctgtcctttataggttgagacggaagctagaaaaaaatgtttctgtgatgacgatgatcttcaaggagtcatcccccagccacccaactcgttgccacgaagacaatgtggtagtggctgtggatagtaccacaaacagggttctccattttcagaagacccagggtctccggcgttttgcatttcctctggtgtgtggatatctggggtcctttgagatggggaagtgacaggcttcagtgggagaaacaaattaaagtccttgtaacttctccccacagagcctgtttcagggcagtagtgatggagtggaggttcgatatgatttactggattgtcatatcagcatctgttctcctcaggtgagctctttagggctggggctgcacacccaaagagtagaactctgtgggtctgttattgtccccttagaaggccagggtatatttcttctccctgtttattttcattatttttacttttattttttgagacagagtctcgctctgttgcccaggctggagtgcagtggtgtgatcccagctcactgcagactctgcctcctaggttcaagtgattctcctgcctcagcctcctgagtagcagggattacaggcacaccaccatgcctggctaatttttgtatttttagtagagatggggtttcaccatgttggccaggctggtctcgaactcctggtctcaagtgatctacctgtctcagcctcccaaagtgctgggattacaggcatgagccaccacacctggccttattttcatttttatttatatatattttttgagacagggtctcgctctgtggcccaggctggagcacagtggcaccatgactgctcactgcagcctcagcctcccaggttcaagggaacctcctgcctcagcctcctgagtagatggaaccacaggcatgcactaccactaatttttgtatttttttgtagagacggggttttgccatgttgtccggcctggtcacgaactcctgagctcaagcaatctgaccacctcagccttccaaaatgctgggattacaggcatgagccaccagttttttttgttgttgttgttgttattgttgttttgagatggagcctcgctctgtcgcccaggctggagtgcagtggcatgatctcagcttactgcagcctccacctcctgggttccagtgattctcctgcctcagcctctcaagtagctgggactacaggtacgcaccaccacatccggctattttttgtatttttcagtagagatggggtttcaccatattggccaggctggtctctaactcctgacctcaggtgatcctcccgccttggcctcccaaagtgctgcaatcacaggtgtgagcctctgcacccagcattttttttttttttttttttttttttttgagtcggagtttcactcttgttgcccaggctggatgcaatggtgcgatctcagctcactgcaacctccacctcccaggttcaagcaattcccctgcctcagcctcccaaatagctgggattgcaggcatgtgccaccacacccagctaatttttgtatttttagtagagacgaggttttaccatgttggtcaggctggtctcgaactcccaacctcaggtgatctgcctgcctcggcctcccaaagtgctggcattacgggcatgagccactgcacctggccttttttttttttttagaatctattgtaaagcaaagatcttgtctccagtatcccactgggagtctctttggaattctggtccatgttcagctgtcatagggtttgctaggtctctgggggattatctgtgctcctagagaatagtacttaatcctggccaagcgtggtggctcacgcttgtaatcccagcactttgggaggccgaggtgagtggatcatgaggtcaggagttcaagaccagcctgaccaacacagtgaaatcccatctctactaaaaaataaaaatacaaaaattagctgggcgtggtggcggacgcttgtaatcccagctacttgggaggctgaggcacaagaatcactttaacccaggaggtggaggttgcagtgagccgagatcatgcaactgcactccagcctgggcaacagagctagacttgtctcaaaaaaaaaaaaaaaagaatagtacttaattctagcccactccacttcccttccacaggtggcacaactctttacagacaactttgactaccaaactcgagatgactttgtgcgaggtctcttagtgaatgaggaggtgagaaaagtcttccaatgcctctttaggagagaggagaaggctatgattgtatctcatgctggtaacttttgatcttttttgtattttattgaggcttaggagggaggaaaagcaggggacaggaggaacagtacacaaagaagaatctttgtggcagtgagaggcagaggggaacttaaaaggattagaaaagttgtacttgggggcattcttcctgtctttcttgcttaggtgacctccctttccttctcattcagatcctagggaaccagatccacatgcacgtaacagctaaggaatatggtgcccgtgtctccaacctacacatgtactcagctgtctgtgctgacgtcatccgccgatgggtctaccctctcaccccagaggcgaacttcactgacagcaccacccagagctgcactcattcccggcacaacatctaccgagggcctgaggtcagcctgggccatggcagcatcctagaggaaaatgtgctcctgggctctggcactgtcattggcagcaattgctttatcaccaacagtgtcattggccccggctgccacattggtgagcacaggtggggaatcaagccaactatcctaggaacaggaacctgggggggccacgtctccagaaacacaagggatggctacacaagggacagtccctgggaataaggaactatagagcggctacctcaggaaaggaggaaacagggatttgaaaacagcgataccttaatttgtagcctgtgggcctctcattggatgactcttcacattccagggtaccctgtagtcacattcaggagcaagtagataattaacatgcagtaacaacatctatttagcacattacagtttacaaagggcttttatatacattgttacatttaatcttcataatttacaaataaacaggctcaacaagattttcttgcccaaggtcattggtaataatggtgggacctgaatctgggtattctgaatgtaagtccagtgttcttttgagtctaccataactgcctggttggcctcttggtatctcattttggttgcaggagtgtgatgcgtctaatagtactgcccctttccaagaacaacagtaaggctcagattctaggggctgagcgtggtggctcatgcttgtaatcctagcacactgggaagccatggtgggaggatcgcttgagcccaggagttcaagaccagcctgggcaacatagcgacaccccttctccacaaatgatacaaaaattagctgggcatgatggcgcgtgcctgtaatctcagctattcgggaggctgaggcaggaggattacctgagcccagaggtcgagggtgcagtgagtcatgatcatactactgcactccagcctgggtgatggaatgagaccgtgtctcaaaagaaaaaaaagacttggtttctaaaatgtaccagaagaggtggaattatttggttctgcttgtaggcgtggatatgattctaataaggttttttgagttcagagggtccccagaaatcctgaaggttctcgggttcttaagctctgtgtgtagtctataattgttgtaaacttggtgaagtatcttctcaggcctgggcttagggggtgagtgggtgtttctggtgacttgcgggatggggaatgagagctaggtgggagctgtgctggtgtcagtcagccctgtcctctatgaagggctctgctctgcggttggaaccctgagttacccagaggtcttcccatcctgagccaggtgataacgtggtgctggaccagacctacctgtggcagggtgttcgagtggcggctggagcacagatccatcagtctctgctttgtgacaatgctgaggtcaaggaacgagtgacactgaaaccacgctctgtcctcacttcccaggtgagacctgatctatactgtgcacaggccctgaattgcatggcagtcacactgagccagaaggggcattatttccacccataatcctgtctaaaaaagttgctctcattatcaggatgcacttttcctccacaccctaatggttctgtgttttttttccccttaggtggtcgtgggcccaaatatcacgctgcctgagggctcggtgatctctttgcaccctccagatgcagaggaagatgaagatgatggcgagttcagtgatgattctggggctgaccaagaaaaggacaaagtgaagatgaaaggtgtgagactcaacaggtgtggggcatctgtgtgtctcgctgcctcatagaagaaccagtgtttcctcctggagggattggtgcttccgccgggccctctctatagatcattgccttttccaggttacaatccagcagaagtaggagctgctggcaagggctacctctggaaagctgcaggcatgaacatggaggaagaggaggaactgcagcagaatctgtggggtgagctaggcctgatgcctgcccttctcctcctgaatcggaatattttgaaggataatgaatacttcagagtcacattacttattcactcctttattcaggcagacagggcaggtatattgctctctgtcaatgactctttttttctttttcctcacccattatggcttctcaggactcaagatcaacatggaagaagagagtgaaagtgaaagtgagcaaagtatggattctgaggagccggacagccggggaggctcccctcagatggatgacatcaaaggtgagtggcaggggagaaatgcgctggaccagtttattctctgcctggatcaactagccagaggcttacgttcctcagaaagggtttggtatcgagtcaagactagatgacttagagcattctgaatgatgttggcccatgaacttatccttgctttgatttcagtgttccagaatgaagttttaggaacactacagcggggcaaagaggagaacatttcttgtgacaatctcgtcctggaaatcaactctctcaagtaagagcagcccctccctgttctcctcggggtgatcccgggaaggtagaggctttctcgtaagtgttttgtctccaaataggaacctattccttcgacatcccaaatggaaagaccagtagtatttggagcaaggagagcattattaagttctagcctcagcatagactttctccttcctaaaccctccccttccatattgttccatccagattcctctccaatgtctatcaaagtcatagttctaagcctgctgaaaggccagtgaaggccctggtgtcaccccagtctccccacaggtatgcctataacataagtctaaaggaggtgatgcaggtactgagccacgtggtcctggagttccccctgcaacagatggattccccgcttgactcaagccgctactgtgccctgctgcttcctgtgagcaaagattggagctgagtacaagggattgggtacaggcaaaggaaatcaggagtagactgtcttgttatattgggtgtatgtcacttctggttcctttttccttgcctctggaagctggttgggctctagagcagccttggctggttcagaggggtcagattgagttcaatactgactggcctttgagactccaggatttcataccatcctaggcccacaaaggtatattcagaatggacctggacattcagactctatggcagcaatttgacccaacacaagatcagcctctggggtgggaataggtattttgaggcagcctatagcatctgatcccctttcaccttccctaaggaatctctttttcccaaaccctgtcaacaactcccaagtccctctgacataattccacagaacctgtatcatctcccttttgtccacccatgtcatcagtatggatttgcttggatgtccaggtataggtgaatgcttaggaatatactgcagctcccttctttcttccatagctgctaaaggcctggagccctgtttttaggaactacataaagcgcgcagccgaccatttggaagcgttagcagccattgaggacttcttcctagagcatgaagctcttggtatttccatggccaaggtgaatatgacctcaagccccattcttctgcacttgctttcaaacgagggttggtgacccccttgggagacataaaatagaagctaatgtgaatccagtatggaccatccactcccaatatgcttattgctagaatagtacagcttggagccggactaataaggtagccatctggggggtggtctggaaatgtgcaaagctctccccagcaatagttccagaagttagacctgccccaggagcagagcgaacagctcactcttgtccgttttggaggaggctactcagtgcatagagggatctgagggcctggtagagtatcctgctggactttccaaggcccctgaggtcccctttattggccttttgcaggtactgatggctttctaccagctggagatcctggctgaggaaacaattctgagctggttcagccaaagagatacaactgacaagggccagcagttgcgcaagaatcaacaggtgcgtcaggctgtcctcctctcgccaagatggttatctcattcccaggtcctggcccctagactctagggtggttggtttctggggctctggttgttagagctgtttatctgccgaggggagcaggagagttatgtgcacctcccccagccgatctctcctctgcttctttacagctgcagaggttcatccagtggctaaaagaggcagaagaggagtcatctgaagatgactgaagtcacactgcctgctcctttgggtgtgattgagtgccctcctggctcctgggctgggacaagtgaggaactagctgcagagggatgagtgaccaccatccaggctgagactgaaaggagcagaggctggaactacagtattctttcccctgctagcaaccatgtgcctcccatcctgactgtggagttgggatgtggaagtggggctggaacaaagcttctgcctagggaggagctaagcaggcccggcagttggaggaaggccagaggaacagctttgtgctccggctttccctcagggaacagcagagagcagttggctctttctgctgcttgtatatgttaatattaaaagagagagtggtgta

SEQ ID NO: 11793 - DNA, 2562 bp, Homo sapiens
gcggaagtggtgaccgtgagagaagaagatggcggcccctgtagtggcgccgcctggtgtggtggttagtcgggctaacaagcgcagcggcgcggggccgggaggcagcggtggcgggggagccagaggggcggaggaggaaccgccgccgcccctacaagcagttctggtggccgatagcttcgatcgccgcttcttccccatctccaaggaccagcctcgggtcctcttgcccctggccaatgtggcattaattgactacactctggaattcctgactgccacaggtgtacaggaaacatttgtcttttgttgctggaaagctgctcaaatcaaagaacatttactgaagtcaaagtggtgccgccctacatctctcaatgtggttcgaataattacatcagagctctatcgatcactgggagatgtcctccgtgatgttgatgccaaggctttggtgcgctctgactttcttctggtgtatggggatgtcatctcaaacatcaatatcaccagagcccttgaggaacacaggttgagacggaagctagaaaaaaatgtttctgtgatgacgatgatcttcaaggagtcatcccccagccacccaactcgttgccacgaagacaatgtggtagtggctgtggatagtaccacaaacagggttctccattttcagaagacccagggtctccggcgttttgcatttcctctgagcctgtttcagggcagtagtgatggagtggaggttcgatatgatttactggattgtcatatcagcatctgttctcctcaggtggcacaactctttacagacaactttgactaccaaactcgagatgactttgtgcgaggtctcttagtgaatgaggagatcctagggaaccagatccacatgcacgtaacagctaaggaatatggtgcccgtgtctccaacctacacatgtactcagctgtctgtgctgacgtcatccgccgatgggtctaccctctcaccccagaggcgaacttcactgacagcaccacccagagctgcactcattcccggcacaacatctaccgagggcctgaggtcagcctgggccatggcagcatcctagaggaaaatgtgctcctgggctctggcactgtcattggcagcaattgctttatcaccaacagtgtcattggccccggctgccacattggtgataacgtggtgctggaccagacctacctgtggcagggtgttcgagtggcggctggagcacagatccatcagtctctgctttgtgacaatgctgaggtcaaggaacgagtgacactgaaaccacgctctgtcctcacttcccaggtggtcgtgggcccaaatatcacgctgcctgagggctcggtgatctctttgcaccctccagatgcagaggaagatgaagatgatggcgagttcagtgatgattctggggctgaccaagaaaaggacaaagtgaagatgaaaggttacaatccagcagaagtaggagctgctggcaagggctacctctggaaagctgcaggcatgaacatggaggaagaggaggaactgcagcagaatctgtggggactcaagatcaacatggaagaagagagtgaaagtgaaagtgagcaaagtatggattctgaggagccggacagccggggaggctcccctcagatggatgacatcaaagtgttccagaatgaagttttaggaacactacagcggggcaaagaggagaacatttcttgtgacaatctcgtcctggaaatcaactctctcaagtatgcctataacataagtctaaaggaggtgatgcaggtactgagccacgtggtcctggagttccccctgcaacagatggattccccgcttgactcaagccgctactgtgccctgctgcttcctctgctaaaggcctggagccctgtttttaggaactacataaagcgcgcagccgaccatttggaagcgttagcagccattgaggacttcttcctagagcatgaagctcttggtatttccatggccaaggtactgatggctttctaccagctggagatcctggctgaggaaacaattctgagctggttcagccaaagagatacaactgacaagggccagcagttgcgcaagaatcaacagctgcagaggttcatccagtggctaaaagaggcagaagaggagtcatctgaagatgactgaagtcacactgcctgctcctttgggtgtgattgagtgccctcctggctcctgggctgggacaagtgaggaactagctgcagagggatgagtgaccaccatccaggctgagactgaaaggagcagaggctggaactacagtattctttcccctgctagcaaccatgtgcctcccatcctgactgtggagttgggatgtggaagtggggctggaacaaagcttctgcctagggaggagctaagcaggcccggcagttggaggaaggccagaggaacagctttgtgctccggctttccctcagggaacagcagagagcagttggctctttctgctgcttgtatatgttaatattaaaagagagagtggtgta

SEQ ID NO: 11794 - DNA, 8600 bp, Homo sapiens
ggaaacatttgtcttttgttgctggaaagctgctcaaatcaaagaacatttactgtaaggccctgcaacttttctttccatgtttcgccatctttttccagttttttcaggatgaatgtaactaaggggaaatgtgagaggggaaaaatgtgtctacttagatgtcattgtaagttctaagggtattttctacacttatcaggaggtgagcagctgaaactttgtatctgtctgtcttgggttttctgtgacaaagattaaagaataaacttgggttttttctgaatctcattataaagtttggtgccagtggactttgcttttatttaatggcttcagtatggaagttacaatgataacatctttgttttcccactgagtttctaaatcttgtttgttctcaccttcaaggatataaatgagctccttgtcatctttgtattcccactgcctagctcagtcccaagcatatagtgagcacttacatgtttgttgaaatcttgaaaactagggaatcgcattgcttatggaagtccaggatgtaaagactaggacattagcatggtctccatcagacagttcctaaatgttatatggattgcagaaggggaaagctgacgtgaagcgtgttcccaggctactttgtgtaccctaggcttcagcaggattttgagttcaaattgatgtttagggacaaggggtcaaggtatggagaggaaataaccatgtttcctaacccataaaacaagactggtgacacaggatgctgaaagcattcattatagttcataatactctttgaagttgaagacgctggcaagaacccaaaaaagccatcgagaaggactgtgagtgctgaaagggggtgaaaaatggggaaggctcaaatgatctttatgcttgatacactcattcccctcaccctcccttcctttaggaagtcaaagtggtgccgccctacatctctcaatgtggttcgaataattacatcagagctctatcgatcactgggagatgtcctccgtgatgttgatgccaaggctttggtgcgctctgactttcttctggtgtatggggatgtcatctcaaacatcaatatcaccagagcccttgaggaacacaggtcaggatgggaaaatgacaggaacaagggttaaagaccagcagagccctgagactgcttttttgcagttctgtccctcctgtcctttataggttgagacggaagctagaaaaaaatgtttctgtgatgacgatgatcttcaaggagtcatcccccagccacccaactcgttgccacgaagacaatgtggtagtggctgtggatagtaccacaaacagggttctccattttcagaagacccagggtctccggcgttttgcatttcctctggtgtgtggatatctggggtcctttgagatggggaagtgacaggcttcagtgggagaaacaaattaaagtccttgtaacttctccccacagagcctgtttcagggcagtagtgatggagtggaggttcgatatgatttactggattgtcatatcagcatctgttctcctcaggtgagctctttagggctggggctgcacacccaaagagtagaactctgtgggtctgttattgtccccttagaaggccagggtatatttcttctccctgtttattttcattatttttacttttattttttgagacagagtctcgctctgttgcccaggctggagtgcagtggtgtgatcccagctcactgcagactctgcctcctaggttcaagtgattctcctgcctcagcctcctgagtagcagggattacaggcacaccaccatgcctggctaatttttgtatttttagtagagatggggtttcaccatgttggccaggctggtctcgaactcctggtctcaagtgatctacctgtctcagcctcccaaagtgctgggattacaggcatgagccaccacacctggccttattttcatttttatttatatatattttttgagacagggtctcgctctgtggcccaggctggagcacagtggcaccatgactgctcactgcagcctcagcctcccaggttcaagggaacctcctgcctcagcctcctgagtagatggaaccacaggcatgcactaccactaatttttgtatttttttgtagagacggggttttgccatgttgtccggcctggtcacgaactcctgagctcaagcaatctgaccacctcagccttccaaaatgctgggattacaggcatgagccaccagttttttttgttgttgttgttgttattgttgttttgagatggagcctcgctctgtcgcccaggctggagtgcagtggcatgatctcagcttactgcagcctccacctcctgggttccagtgattctcctgcctcagcctctcaagtagctgggactacaggtacgcaccaccacatccggctattttttgtatttttcagtagagatggggtttcaccatattggccaggctggtctctaactcctgacctcaggtgatcctcccgccttggcctcccaaagtgctgcaatcacaggtgtgagcctctgcacccagcattttttttttttttttttttttttttttgagtcggagtttcactcttgttgcccaggctggatgcaatggtgcgatctcagctcactgcaacctccacctcccaggttcaagcaattcccctgcctcagcctcccaaatagctgggattgcaggcatgtgccaccacacccagctaatttttgtatttttagtagagacgaggttttaccatgttggtcaggctggtctcgaactcccaacctcaggtgatctgcctgcctcggcctcccaaagtgctggcattacgggcatgagccactgcacctggccttttttttttttttagaatctattgtaaagcaaagatcttgtctccagtatcccactgggagtctctttggaattctggtccatgttcagctgtcatagggtttgctaggtctctgggggattatctgtgctcctagagaatagtacttaatcctggccaagcgtggtggctcacgcttgtaatcccagcactttgggaggccgaggtgagtggatcatgaggtcaggagttcaagaccagcctgaccaacacagtgaaatcccatctctactaaaaaataaaaatacaaaaattagctgggcgtggtggcggacgcttgtaatcccagctacttgggaggctgaggcacaagaatcactttaacccaggaggtggaggttgcagtgagccgagatcatgcaactgcactccagcctgggcaacagagctagacttgtctcaaaaaaaaaaaaaaaagaatagtacttaattctagcccactccacttcccttccacaggtggcacaactctttacagacaactttgactaccaaactcgagatgactttgtgcgaggtctcttagtgaatgaggaggtgagaaaagtcttccaatgcctctttaggagagaggagaaggctatgattgtatctcatgctggtaacttttgatcttttttgtattttattgaggcttaggagggaggaaaagcaggggacaggaggaacagtacacaaagaagaatctttgtggcagtgagaggcagaggggaacttaaaaggattagaaaagttgtacttgggggcattcttcctgtctttcttgcttaggtgacctccctttccttctcattcagatcctagggaaccagatccacatgcacgtaacagctaaggaatatggtgcccgtgtctccaacctacacatgtactcagctgtctgtgctgacgtcatccgccgatgggtctaccctctcaccccagaggcgaacttcactgacagcaccacccagagctgcactcattcccggcacaacatctaccgagggcctgaggtcagcctgggccatggcagcatcctagaggaaaatgtgctcctgggctctggcactgtcattggcagcaattgctttatcaccaacagtgtcattggccccggctgccacattggtgagcacaggtggggaatcaagccaactatcctaggaacaggaacctgggggggccacgtctccagaaacacaagggatggctacacaagggacagtccctgggaataaggaactatagagcggctacctcaggaaaggaggaaacagggatttgaaaacagcgataccttaatttgtagcctgtgggcctctcattggatgactcttcacattccagggtaccctgtagtcacattcaggagcaagtagataattaacatgcagtaacaacatctatttagcacattacagtttacaaagggcttttatatacattgttacatttaatcttcataatttacaaataaacaggctcaacaagattttcttgcccaaggtcattggtaataatggtgggacctgaatctgggtattctgaatgtaagtccagtgttcttttgagtctaccataactgcctggttggcctcttggtatctcattttggttgcaggagtgtgatgcgtctaatagtactgcccctttccaagaacaacagtaaggctcagattctaggggctgagcgtggtggctcatgcttgtaatcctagcacactgggaagccatggtgggaggatcgcttgagcccaggagttcaagaccagcctgggcaacatagcgacaccccttctccacaaatgatacaaaaattagctgggcatgatggcgcgtgcctgtaatctcagctattcgggaggctgaggcaggaggattacctgagcccagaggtcgagggtgcagtgagtcatgatcatactactgcactccagcctgggtgatggaatgagaccgtgtctcaaaagaaaaaaaagacttggtttctaaaatgtaccagaagaggtggaattatttggttctgcttgtaggcgtggatatgattctaataaggttttttgagttcagagggtccccagaaatcctgaaggttctcgggttcttaagctctgtgtgtagtctataattgttgtaaacttggtgaagtatcttctcaggcctgggcttagggggtgagtgggtgtttctggtgacttgcgggatggggaatgagagctaggtgggagctgtgctggtgtcagtcagccctgtcctctatgaagggctctgctctgcggttggaaccctgagttacccagaggtcttcccatcctgagccaggtgataacgtggtgctggaccagacctacctgtggcagggtgttcgagtggcggctggagcacagatccatcagtctctgctttgtgacaatgctgaggtcaaggaacgagtgacactgaaaccacgctctgtcctcacttcccaggtgagacctgatctatactgtgcacaggccctgaattgcatggcagtcacactgagccagaaggggcattatttccacccataatcctgtctaaaaaagttgctctcattatcaggatgcacttttcctccacaccctaatggttctgtgttttttttccccttaggtggtcgtgggcccaaatatcacgctgcctgagggctcggtgatctctttgcaccctccagatgcagaggaagatgaagatgatggcgagttcagtgatgattctggggctgaccaagaaaaggacaaagtgaagatgaaaggtgtgagactcaacaggtgtggggcatctgtgtgtctcgctgcctcatagaagaaccagtgtttcctcctggagggattggtgcttccgccgggccctctctatagatcattgccttttccaggttacaatccagcagaagtaggagctgctggcaagggctacctctggaaagctgcaggcatgaacatggaggaagaggaggaactgcagcagaatctgtggggtgagctaggcctgatgcctgcccttctcctcctgaatcggaatattttgaaggataatgaatacttcagagtcacattacttattcactcctttattcaggcagacagggcaggtatattgctctctgtcaatgactctttttttctttttcctcacccattatggcttctcaggactcaagatcaacatggaagaagagagtgaaagtgaaagtgagcaaagtatggattctgaggagccggacagccggggaggctcccctcagatggatgacatcaaaggtgagtggcaggggagaaatgcgctggaccagtttattctctgcctggatcaactagccagaggcttacgttcctcagaaagggtttggtatcgagtcaagactagatgacttagagcattctgaatgatgttggcccatgaacttatccttgctttgatttcagtgttccagaatgaagttttaggaacactacagcggggcaaagaggagaacatttcttgtgacaatctcgtcctggaaatcaactctctcaagtaagagcagcccctccctgttctcctcggggtgatcccgggaaggtagaggctttctcgtaagtgttttgtctccaaataggaacctattccttcgacatcccaaatggaaagaccagtagtatttggagcaaggagagcattattaagttctagcctcagcatagactttctccttcctaaaccctccccttccatattgttccatccagattcctctccaatgtctatcaaagtcatagttctaagcctgctgaaaggccagtgaaggccctggtgtcaccccagtctccccacaggtatgcctataacataagtctaaaggaggtgatgcaggtactgagccacgtggtcctggagttccccctgcaacagatggattccccgcttgactcaagccgctactgtgccctgctgcttcctgtgagcaaagattggagctgagtacaagggattgggtacaggcaaaggaaatcaggagtagactgtcttgttatattgggtgtatgtcacttctggttcctttttccttgcctctggaagctggttgggctctagagcagccttggctggttcagaggggtcagattgagttcaatactgactggcctttgagactccaggatttcataccatcctaggcccacaaaggtatattcagaatggacctggacattcagactctatggcagcaatttgacccaacacaagatcagcctctggggtgggaataggtattttgaggcagcctatagcatctgatcccctttcaccttccctaaggaatctctttttcccaaaccctgtcaacaactcccaagtccctctgacataattccacagaacctgtatcatctcccttttgtccacccatgtcatcagtatggatttgcttggatgtccaggtataggtgaatgcttaggaatatactgcagctcccttctttcttccatagctgctaaaggcctggagccctgtttttaggaactacataaagcgcgcagccgaccatttggaagcgttagcagccattgaggacttcttcctagagcatgaagctcttggtatttccatggccaaggtgaatatgacctcaagccccattcttctgcacttgctttcaaacgagggttggtgacccccttgggagacataaaatagaagctaatgtgaatccagtatggaccatccactcccaatatgcttattgctagaatagtacagcttggagccggactaataaggtagccatctggggggtggtctggaaatgtgcaaagctctccccagcaatagttccagaagttagacctgccccaggagcagagcgaacagctcactcttgtccgttttggaggaggctactcagtgcatagagggatctgagggcctggtagagtatcctgctggactttccaaggcccctgaggtcccctttattggccttttgcaggtactgatggctttctaccagctggagatcctggctgaggaaacaattctgagctggttcagccaaagagatacaactgacaagggccagcagttgcgcaagaatcaacaggtgcgtcaggctgtcctcctctcgccaagatggttatctcattcccaggtcctggcccctagactctagggtggttggtttctggggctctggttgttagagctgtttatctgccgaggggagcaggagagttatgtgcacctcccccagccgatctctcctctgcttctttacagctgcagaggttcatccagtggctaaaagaggcagaagaggagtcatctgaagatgactgaagtcacactgcctgctcctttgggtgtgattgagtgccctcctggctcctgggctgggacaagtgaggaactagctgcagagggatgagtgaccaccatccaggctgagactgaaaggagcagaggctggaactacagtattctttcccctgctagcaaccatgtgcctcccatcctgactgtggagttgggatgtggaagtggggctggaacaaagcttctgcctagggaggagctaagcaggcccggcagttggaggaaggccagaggaacagctttgtgctccggctttccctcagggaacagcagagagcagttggctctttctgctgcttgtat

SEQ ID NO: 11795 - DNA, 2164 bp, Homo sapiens
ggaaacatttgtcttttgttgctggaaagctgctcaaatcaaagaacatttactgaagtcaaagtggtgccgccctacatctctcaatgtggttcgaataattacatcagagctctatcgatcactgggagatgtcctccgtgatgttgatgccaaggctttggtgcgctctgactttcttctggtgtatggggatgtcatctcaaacatcaatatcaccagagcccttgaggaacacaggttgagacggaagctagaaaaaaatgtttctgtgatgacgatgatcttcaaggagtcatcccccagccacccaactcgttgccacgaagacaatgtggtagtggctgtggatagtaccacaaacagggttctccattttcagaagacccagggtctccggcgttttgcatttcctctgagcctgtttcagggcagtagtgatggagtggaggttcgatatgatttactggattgtcatatcagcatctgttctcctcaggtggcacaactctttacagacaactttgactaccaaactcgagatgactttgtgcgaggtctcttagtgaatgaggaggtgataacgtggtgctggaccagacctacctgtggcagggtgttcgagtggcggctggagcacagatccatcagtctctgctttgtgacaatgctgaggtcaaggaacgagtgacactgaaaccacgctctgtcctcacttcccagatgcagaggaagatgaagatgatggcgagttcagtgatgattctggggctgaccaagaaaaggacaaagtgaagatgaaaggttacaatccagcagaagtaggagctgctggcaagggctacctctggaaagctgcaggcatgaacatggaggaagaggaggaactgcagcagaatctgtggggactcaagatcaacatggaagaagagagtgaaagtgaaagtgagcaaagtatggattctgaggagccggacagccggggaggctcccctcagatggatgacatcaaagtgttccagaatgaagttttaggaacactacagcggggcaaagaggagaacatttcttgtgacaatctcgtcctggaaatcaactctctcaagtaagagcagcccctccctgttctcctcggggtgatcccgggaaggtagaggctttctcgtaagtgttttgtctccaaataggaacctattccttcgacatcccaaatggaaagaccagtagtatttggagcaaggagagcattattaagttctagcctcagcatagactttctccttcctaaaccctccccttccatattgttccatccagattcctctccaatgtctatcaaagtcatagttctaagcctgctgaaaggccagtgaaggccctggtgtcaccccagtctccccacaggtatgcctataacataagtctaaaggaggtgatgcaggtactgagccacgtggtcctggagttccccctgcaacagatggattccccgcttgactcaagccgctactgtgccctgctgcttcctctgctaaaggcctggagccctgtttttaggaactacataaagcgcgcagccgaccatttggaagcgttagcagccattgaggacttcttcctagagcatgaagctcttggtatttccatggccaaggtactgatggctttctaccagctggagatcctggctgaggaaacaattctgagctggttcagccaaagagatacaactgacaagggccagcagttgcgcaagaatcaacagctgcagaggttcatccagtggctaaaagaggcagaagaggagtcatctgaagatgactgaagtcacactgcctgctcctttgggtgtgattgagtgccctcctggctcctgggctgggacaagtgaggaactagctgcagagggatgagtgaccaccatccaggctgagactgaaaggagcagaggctggaactacagtattctttcccctgctagcaaccatgtgcctcccatcctgactgtggagttgggatgtggaagtggggctggaacaaagcttctgcctagggaggagctaagcaggcccggcagttggaggaaggccagaggaacagctttgtgctccggctttccctcagggaacagcagagagcagttggctctttctgctgcttgtat

SEQ ID NO: 11796 - DNA, 9922 bp, Homo sapiens
gaagaagatggcggcccctgtagtggcgccgcctggtgtggtggttagtcgggctaacaagcgcagcggcgcggggccgggaggcagcggtggcgggggagccagaggggcggaggaggaaccgccgccgcccctacaagcagttctggtggccgatagcttcgatcgccgcttcttccccatctccaaggaccagcctcgggtgagcgccgcgcacgcgagcagccagagggcaggaagggtggcagggctggagcaagttctcatttcggctaactacaacagcatgcccttgaaggacctgcgtctatgctgttatcctaaaaccggatgcagagggactgtctaaaccctgatgactgctgaccaagttagtggccggcagatttgggcattcgtaatgctgtccacctcgggtttgaaaggaatgaagagagctaaatgtagaaacagcgcttgagagaagccttcacgcggggattcagtgcccctagaagaggctgcgccgcttttaaccttgccgatgacggttgcttaggtgaaaagaaacgaccttttgcctctgaaagggcggtaatatgccttaaaaagagcgggctagatctcaggcagtgtattttttttttccttccaggttctaatgatagccggtgctatctgtcgaaaggacaaaatgggtttagtggttgattgccatcagcccccgagttgtctagacaatggggtattggactcagctgggtcgttcagcagtcagttcagaaagagggaactgcattggatttaaggaaaatcctctctaattccctcgaaaaagcctaatggctgttcatttttgacaagtgacgggagatggctaacctctgacacttagaaagggatcaaggaaggaaatcttatggggaagaaggccttagcaatgcttaaatttatggaaatatgattgatttccagtattatcctttgccagcagtgaactgccattctgtcacagctctgtgtctgatacaaggcacatagattctgtacttaccatccccaaattgcaatgtctcagactcaggcttagagcatggcatgaacatcaaaggcaggaacctgtttatctttgaattggaaagatacagcaaaattacactgtttggaaatacgaatagaggagtgaaaattgttgcagtggggtacccaaagggattcgagacctcaagttttttttcatcttgtatccttcaggtcctcttgcccctggccaatgtggcattaattgactacactctggaattcctgactgccacaggtgtacaggaaacatttgtcttttgttgctggaaagctgctcaaatcaaagaacatttactgtaaggccctgcaacttttctttccatgtttcgccatctttttccagttttttcaggatgaatgtaactaaggggaaatgtgagaggggaaaaatgtgtctacttagatgtcattgtaagttctaagggtattttctacacttatcaggaggtgagcagctgaaactttgtatctgtctgtcttgggttttctgtgacaaagattaaagaataaacttgggttttttctgaatctcattataaagtttggtgccagtggactttgcttttatttaatggcttcagtatggaagttacaatgataacatctttgttttcccactgagtttctaaatcttgtttgttctcaccttcaaggatataaatgagctccttgtcatctttgtattcccactgcctagctcagtcccaagcatatagtgagcacttacatgtttgttgaaatcttgaaaactagggaatcgcattgcttatggaagtccaggatgtaaagactaggacattagcatggtctccatcagacagttcctaaatgttatatggattgcagaaggggaaagctgacgtgaagcgtgttcccaggctactttgtgtaccctaggcttcagcaggattttgagttcaaattgatgtttagggacaaggggtcaaggtatggagaggaaataaccatgtttcctaacccataaaacaagactggtgacacaggatgctgaaagcattcattatagttcataatactctttgaagttgaagacgctggcaagaacccaaaaaagccatcgagaaggactgtgagtgctgaaagggggtgaaaaatggggaaggctcaaatgatctttatgcttgatacactcattcccctcaccctcccttcctttaggaagtcaaagtggtgccgccctacatctctcaatgtggttcgaataattacatcagagctctatcgatcactgggagatgtcctccgtgatgttgatgccaaggctttggtgcgctctgactttcttctggtgtatggggatgtcatctcaaacatcaatatcaccagagcccttgaggaacacaggtcaggatgggaaaatgacaggaacaagggttaaagaccagcagagccctgagactgcttttttgcagttctgtccctcctgtcctttataggttgagacggaagctagaaaaaaatgtttctgtgatgacgatgatcttcaaggagtcatcccccagccacccaactcgttgccacgaagacaatgtggtagtggctgtggatagtaccacaaacagggttctccattttcagaagacccagggtctccggcgttttgcatttcctctggtgtgtggatatctggggtcctttgagatggggaagtgacaggcttcagtgggagaaacaaattaaagtccttgtaacttctccccacagagcctgtttcagggcagtagtgatggagtggaggttcgatatgatttactggattgtcatatcagcatctgttctcctcaggtgagctctttagggctggggctgcacacccaaagagtagaactctgtgggtctgttattgtccccttagaaggccagggtatatttcttctccctgtttattttcattatttttacttttattttttgagacagagtctcgctctgttgcccaggctggagtgcagtggtgtgatcccagctcactgcagactctgcctcctaggttcaagtgattctcctgcctcagcctcctgagtagcagggattacaggcacaccaccatgcctggctaatttttgtatttttagtagagatggggtttcaccatgttggccaggctggtctcgaactcctggtctcaagtgatctacctgtctcagcctcccaaagtgctgggattacaggcatgagccaccacacctggccttattttcatttttatttatatatattttttgagacagggtctcgctctgtggcccaggctggagcacagtggcaccatgactgctcactgcagcctcagcctcccaggttcaagggaacctcctgcctcagcctcctgagtagatggaaccacaggcatgcactaccactaatttttgtatttttttgtagagacggggttttgccatgttgtccggcctggtcacgaactcctgagctcaagcaatctgaccacctcagccttccaaaatgctgggattacaggcatgagccaccagttttttttgttgttgttgttgttattgttgttttgagatggagcctcgctctgtcgcccaggctggagtgcagtggcatgatctcagcttactgcagcctccacctcctgggttccagtgattctcctgcctcagcctctcaagtagctgggactacaggtacgcaccaccacatccggctattttttgtatttttcagtagagatggggtttcaccatattggccaggctggtctctaactcctgacctcaggtgatcctcccgccttggcctcccaaagtgctgcaatcacaggtgtgagcctctgcacccagcattttttttttttttttttttttttttttgagtcggagtttcactcttgttgcccaggctggatgcaatggtgcgatctcagctcactgcaacctccacctcccaggttcaagcaattcccctgcctcagcctcccaaatagctgggattgcaggcatgtgccaccacacccagctaatttttgtatttttagtagagacgaggttttaccatgttggtcaggctggtctcgaactcccaacctcaggtgatctgcctgcctcggcctcccaaagtgctggcattacgggcatgagccactgcacctggccttttttttttttttagaatctattgtaaagcaaagatcttgtctccagtatcccactgggagtctctttggaattctggtccatgttcagctgtcatagggtttgctaggtctctgggggattatctgtgctcctagagaatagtacttaatcctggccaagcgtggtggctcacgcttgtaatcccagcactttgggaggccgaggtgagtggatcatgaggtcaggagttcaagaccagcctgaccaacacagtgaaatcccatctctactaaaaaataaaaatacaaaaattagctgggcgtggtggcggacgcttgtaatcccagctacttgggaggctgaggcacaagaatcactttaacccaggaggtggaggttgcagtgagccgagatcatgcaactgcactccagcctgggcaacagagctagacttgtctcaaaaaaaaaaaaaaaagaatagtacttaattctagcccactccacttcccttccacaggtggcacaactctttacagacaactttgactaccaaactcgagatgactttgtgcgaggtctcttagtgaatgaggaggtgagaaaagtcttccaatgcctctttaggagagaggagaaggctatgattgtatctcatgctggtaacttttgatcttttttgtattttattgaggcttaggagggaggaaaagcaggggacaggaggaacagtacacaaagaagaatctttgtggcagtgagaggcagaggggaacttaaaaggattagaaaagttgtacttgggggcattcttcctgtctttcttgcttaggtgacctccctttccttctcattcagatcctagggaaccagatccacatgcacgtaacagctaaggaatatggtgcccgtgtctccaacctacacatgtactcagctgtctgtgctgacgtcatccgccgatgggtctaccctctcaccccagaggcgaacttcactgacagcaccacccagagctgcactcattcccggcacaacatctaccgagggcctgaggtcagcctgggccatggcagcatcctagaggaaaatgtgctcctgggctctggcactgtcattggcagcaattgctttatcaccaacagtgtcattggccccggctgccacattggtgagcacaggtggggaatcaagccaactatcctaggaacaggaacctgggggggccacgtctccagaaacacaagggatggctacacaagggacagtccctgggaataaggaactatagagcggctacctcaggaaaggaggaaacagggatttgaaaacagcgataccttaatttgtagcctgtgggcctctcattggatgactcttcacattccagggtaccctgtagtcacattcaggagcaagtagataattaacatgcagtaacaacatctatttagcacattacagtttacaaagggcttttatatacattgttacatttaatcttcataatttacaaataaacaggctcaacaagattttcttgcccaaggtcattggtaataatggtgggacctgaatctgggtattctgaatgtaagtccagtgttcttttgagtctaccataactgcctggttggcctcttggtatctcattttggttgcaggagtgtgatgcgtctaatagtactgcccctttccaagaacaacagtaaggctcagattctaggggctgagcgtggtggctcatgcttgtaatcctagcacactgggaagccatggtgggaggatcgcttgagcccaggagttcaagaccagcctgggcaacatagcgacaccccttctccacaaatgatacaaaaattagctgggcatgatggcgcgtgcctgtaatctcagctattcgggaggctgaggcaggaggattacctgagcccagaggtcgagggtgcagtgagtcatgatcatactactgcactccagcctgggtgatggaatgagaccgtgtctcaaaagaaaaaaaagacttggtttctaaaatgtaccagaagaggtggaattatttggttctgcttgtaggcgtggatatgattctaataaggttttttgagttcagagggtccccagaaatcctgaaggttctcgggttcttaagctctgtgtgtagtctataattgttgtaaacttggtgaagtatcttctcaggcctgggcttagggggtgagtgggtgtttctggtgacttgcgggatggggaatgagagctaggtgggagctgtgctggtgtcagtcagccctgtcctctatgaagggctctgctctgcggttggaaccctgagttacccagaggtcttcccatcctgagccaggtgataacgtggtgctggaccagacctacctgtggcagggtgttcgagtggcggctggagcacagatccatcagtctctgctttgtgacaatgctgaggtcaaggaacgagtgacactgaaaccacgctctgtcctcacttcccaggtgagacctgatctatactgtgcacaggccctgaattgcatggcagtcacactgagccagaaggggcattatttccacccataatcctgtctaaaaaagttgctctcattatcaggatgcacttttcctccacaccctaatggttctgtgttttttttccccttaggtggtcgtgggcccaaatatcacgctgcctgagggctcggtgatctctttgcaccctccagatgcagaggaagatgaagatgatggcgagttcagtgatgattctggggctgaccaagaaaaggacaaagtgaagatgaaaggtgtgagactcaacaggtgtggggcatctgtgtgtctcgctgcctcatagaagaaccagtgtttcctcctggagggattggtgcttccgccgggccctctctatagatcattgccttttccaggttacaatccagcagaagtaggagctgctggcaagggctacctctggaaagctgcaggcatgaacatggaggaagaggaggaactgcagcagaatctgtggggtgagctaggcctgatgcctgcccttctcctcctgaatcggaatattttgaaggataatgaatacttcagagtcacattacttattcactcctttattcaggcagacagggcaggtatattgctctctgtcaatgactctttttttctttttcctcacccattatggcttctcaggactcaagatcaacatggaagaagagagtgaaagtgaaagtgagcaaagtatggattctgaggagccggacagccggggaggctcccctcagatggatgacatcaaaggtgagtggcaggggagaaatgcgctggaccagtttattctctgcctggatcaactagccagaggcttacgttcctcagaaagggtttggtatcgagtcaagactagatgacttagagcattctgaatgatgttggcccatgaacttatccttgctttgatttcagtgttccagaatgaagttttaggaacactacagcggggcaaagaggagaacatttcttgtgacaatctcgtcctggaaatcaactctctcaagtaagagcagcccctccctgttctcctcggggtgatcccgggaaggtagaggctttctcgtaagtgttttgtctccaaataggaacctattccttcgacatcccaaatggaaagaccagtagtatttggagcaaggagagcattattaagttctagcctcagcatagactttctccttcctaaaccctccccttccatattgttccatccagattcctctccaatgtctatcaaagtcatagttctaagcctgctgaaaggccagtgaaggccctggtgtcaccccagtctccccacaggtatgcctataacataagtctaaaggaggtgatgcaggtactgagccacgtggtcctggagttccccctgcaacagatggattccccgcttgactcaagccgctactgtgccctgctgcttcctgtgagcaaagattggagctgagtacaagggattgggtacaggcaaaggaaatcaggagtagactgtcttgttatattgggtgtatgtcacttctggttcctttttccttgcctctggaagctggttgggctctagagcagccttggctggttcagaggggtcagattgagttcaatactgactggcctttgagactccaggatttcataccatcctaggcccacaaaggtatattcagaatggacctggacattcagactctatggcagcaatttgacccaacacaagatcagcctctggggtgggaataggtattttgaggcagcctatagcatctgatcccctttcaccttccctaaggaatctctttttcccaaaccctgtcaacaactcccaagtccctctgacataattccacagaacctgtatcatctcccttttgtccacccatgtcatcagtatggatttgcttggatgtccaggtataggtgaatgcttaggaatatactgcagctcccttctttcttccatagctgctaaaggcctggagccctgtttttaggaactacataaagcgcgcagccgaccatttggaagcgttagcagccattgaggacttcttcctagagcatgaagctcttggtatttccatggccaaggtgaatatgacctcaagccccattcttctgcacttgctttcaaacgagggttggtgacccccttgggagacataaaatagaagctaatgtgaatccagtatggaccatccactcccaatatgcttattgctagaatagtacagcttggagccggactaataaggtagccatctggggggtggtctggaaatgtgcaaagctctccccagcaatagttccagaagttagacctgccccaggagcagagcgaacagctcactcttgtccgttttggaggaggctactcagtgcatagagggatctgagggcctggtagagtatcctgctggactttccaaggcccctgaggtcccctttattggccttttgcaggtactgatggctttctaccagctggagatcctggctgaggaaacaattctgagctggttcagccaaagagatacaactgacaagggccagcagttgcgcaagaatcaacaggtgcgtcaggctgtcctcctctcgccaagatggttatctcattcccaggtcctggcccctagactctagggtggttggtttctggggctctggttgttagagctgtttatctgccgaggggagcaggagagttatgtgcacctcccccagccgatctctcctctgcttctttacagctgcagaggttcatccagtggctaaaagaggcagaagaggagtcatctgaagatgactgaagtcacactgcctgctcctttgggtgtgattgagtgccctcctggctcctgggctgggacaagtgaggaactagctgcagagggatgagtgaccaccatccaggctgagactgaaaggagcagaggctggaactacagtattctttcccctgctagcaaccatgtgcctcccatcctgactgtggagttgggatgtggaagtggggctggaacaaagcttctgcctagggaggagctaagcaggcccggcagttggaggaaggccagaggaacagctttgtgctccggctttccctcagggaacagcagagagcagttggctctttctgctgcttgtatatgttaatattaaaagag

SEQ ID NO: 11797 - DNA, 2932 bp, Homo sapiens
gaagaagatggcggcccctgtagtggcgccgcctggtgtggtggttagtcgggctaacaagcgcagcggcgcggggccgggaggcagcggtggcgggggagccagaggggcggaggaggaaccgccgccgcccctacaagcagttctggtggccgatagcttcgatcgccgcttcttccccatctccaaggaccagcctcgggtcctcttgcccctggccaatgtggcattaattgactacactctggaattcctgactgccacaggtgtacaggaaacatttgtcttttgttgctggaaagctgctcaaatcaaagaacatttactgaagtcaaagtggtgccgccctacatctctcaatgtggttcgaataattacatcagagctctatcgatcactgggagatgtcctccgtgatgttgatgccaaggctttggtgcgctctgactttcttctggtgtatggggatgtcatctcaaacatcaatatcaccagagcccttgaggaacacaggttgagacggaagctagaaaaaaatgtttctgtgatgacgatgatcttcaaggagtcatcccccagccacccaactcgttgccacgaagacaatgtggtagtggctgtggatagtaccacaaacagggttctccattttcagaagacccagggtctccggcgttttgcatttcctctgagcctgtttcagggcagtagtgatggagtggaggttcgatatgatttactggattgtcatatcagcatctgttctcctcagagacggggttttgccatgttgtccggcctggtcacgaactcctgagctcaagcaatctgaccacctcagccttccaaaatgctgggattacaggtggcacaactctttacagacaactttgactaccaaactcgagatgactttgtgcgaggtctcttagtgaatgaggagatcctagggaaccagatccacatgcacgtaacagctaaggaatatggtgcccgtgtctccaacctacacatgtactcagctgtctgtgctgacgtcatccgccgatgggtctaccctctcaccccagaggcgaacttcactgacagcaccacccagagctgcactcattcccggcacaacatctaccgagggcctgaggtcagcctgggccatggcagcatcctagaggaaaatgtgctcctgggctctggcactgtcattggcagcaattgctttatcaccaacagtgtcattggccccggctgccacattggtgagcacaggtgataacgtggtgctggaccagacctacctgtggcagggtgttcgagtggcggctggagcacagatccatcagtctctgctttgtgacaatgctgaggtcaaggaacgagtgacactgaaaccacgctctgtcctcacttcccaggtggtcgtgggcccaaatatcacgctgcctgagggctcggtgatctctttgcaccctccagatgcagaggaagatgaagatgatggcgagttcagtgatgattctggggctgaccaagaaaaggacaaagtgaagatgaaaggttacaatccagcagaagtaggagctgctggcaagggctacctctggaaagctgcaggcatgaacatggaggaagaggaggaactgcagcagaatctgtggggactcaagatcaacatggaagaagagagtgaaagtgaaagtgagcaaagtatggattctgaggagccggacagccggggaggctcccctcagatggatgacatcaaagtgttccagaatgaagttttaggaacactacagcggggcaaagaggagaacatttcttgtgacaatctcgtcctggaaatcaactctctcaagtaagagcagcccctccctgttctcctcggggtgatcccgggaaggtagaggctttctcgtaagtgttttgtctccaaataggaacctattccttcgacatcccaaatggaaagaccagtagtatttggagcaaggagagcattattaagttctagcctcagcatagactttctccttcctaaaccctccccttccatattgttccatccagattcctctccaatgtctatcaaagtcatagttctaagcctgctgaaaggccagtgaaggccctggtgtcaccccagtctccccacaggtatgcctataacataagtctaaaggaggtgatgcaggtactgagccacgtggtcctggagttccccctgcaacagatggattccccgcttgactcaagccgctactgtgccctgctgcttcctctgctaaaggcctggagccctgtttttaggaactacataaagcgcgcagccgaccatttggaagcgttagcagccattgaggacttcttcctagagcatgaagctcttggtatttccatggccaaggtactgatggctttctaccagctggagatcctggctgaggaaacaattctgagctggttcagccaaagagatacaactgacaagggccagcagttgcgcaagaatcaacagctgcagaggttcatccagtggctaaaagaggcagaagaggagtcatctgaagatgactgaagtcacactgcctgctcctttgggtgtgattgagtgccctcctggctcctgggctgggacaagtgaggaactagctgcagagggatgagtgaccaccatccaggctgagactgaaaggagcagaggctggaactacagtattctttcccctgctagcaaccatgtgcctcccatcctgactgtggagttgggatgtggaagtggggctggaacaaagcttctgcctagggaggagctaagcaggcccggcagttggaggaaggccagaggaacagctttgtgctccggctttccctcagggaacagcagagagcagttggctctttctgctgcttgtatatgttaatattaaaagag

SEQ ID NO: 11798 - DNA, 9927 bp, Homo sapiens
gcgtgcggtggcagcttccttgcggaagtggtgaccgtgagagaagaagatggcggcccctgtagtggcgccgcctggtgtggtggttagtcgggctaacaagcgcagcggcgcggggccgggaggcagcggtggcgggggagccagaggggcggaggaggaaccgccgccgcccctacaagcagttctggtggccgatagcttcgatcgccgcttcttccccatctccaaggaccagcctcgggtgagcgccgcgcacgcgagcagccagagggcaggaagggtggcagggctggagcaagttctcatttcggctaactacaacagcatgcccttgaaggacctgcgtctatgctgttatcctaaaaccggatgcagagggactgtctaaaccctgatgactgctgaccaagttagtggccggcagatttgggcattcgtaatgctgtccacctcgggtttgaaaggaatgaagagagctaaatgtagaaacagcgcttgagagaagccttcacgcggggattcagtgcccctagaagaggctgcgccgcttttaaccttgccgatgacggttgcttaggtgaaaagaaacgaccttttgcctctgaaagggcggtaatatgccttaaaaagagcgggctagatctcaggcagtgtattttttttttccttccaggttctaatgatagccggtgctatctgtcgaaaggacaaaatgggtttagtggttgattgccatcagcccccgagttgtctagacaatggggtattggactcagctgggtcgttcagcagtcagttcagaaagagggaactgcattggatttaaggaaaatcctctctaattccctcgaaaaagcctaatggctgttcatttttgacaagtgacgggagatggctaacctctgacacttagaaagggatcaaggaaggaaatcttatggggaagaaggccttagcaatgcttaaatttatggaaatatgattgatttccagtattatcctttgccagcagtgaactgccattctgtcacagctctgtgtctgatacaaggcacatagattctgtacttaccatccccaaattgcaatgtctcagactcaggcttagagcatggcatgaacatcaaaggcaggaacctgtttatctttgaattggaaagatacagcaaaattacactgtttggaaatacgaatagaggagtgaaaattgttgcagtggggtacccaaagggattcgagacctcaagttttttttcatcttgtatccttcaggtcctcttgcccctggccaatgtggcattaattgactacactctggaattcctgactgccacaggtgtacaggaaacatttgtcttttgttgctggaaagctgctcaaatcaaagaacatttactgtaaggccctgcaacttttctttccatgtttcgccatctttttccagttttttcaggatgaatgtaactaaggggaaatgtgagaggggaaaaatgtgtctacttagatgtcattgtaagttctaagggtattttctacacttatcaggaggtgagcagctgaaactttgtatctgtctgtcttgggttttctgtgacaaagattaaagaataaacttgggttttttctgaatctcattataaagtttggtgccagtggactttgcttttatttaatggcttcagtatggaagttacaatgataacatctttgttttcccactgagtttctaaatcttgtttgttctcaccttcaaggatataaatgagctccttgtcatctttgtattcccactgcctagctcagtcccaagcatatagtgagcacttacatgtttgttgaaatcttgaaaactagggaatcgcattgcttatggaagtccaggatgtaaagactaggacattagcatggtctccatcagacagttcctaaatgttatatggattgcagaaggggaaagctgacgtgaagcgtgttcccaggctactttgtgtaccctaggcttcagcaggattttgagttcaaattgatgtttagggacaaggggtcaaggtatggagaggaaataaccatgtttcctaacccataaaacaagactggtgacacaggatgctgaaagcattcattatagttcataatactctttgaagttgaagacgctggcaagaacccaaaaaagccatcgagaaggactgtgagtgctgaaagggggtgaaaaatggggaaggctcaaatgatctttatgcttgatacactcattcccctcaccctcccttcctttaggaagtcaaagtggtgccgccctacatctctcaatgtggttcgaataattacatcagagctctatcgatcactgggagatgtcctccgtgatgttgatgccaaggctttggtgcgctctgactttcttctggtgtatggggatgtcatctcaaacatcaatatcaccagagcccttgaggaacacaggtcaggatgggaaaatgacaggaacaagggttaaagaccagcagagccctgagactgcttttttgcagttctgtccctcctgtcctttataggttgagacggaagctagaaaaaaatgtttctgtgatgacgatgatcttcaaggagtcatcccccagccacccaactcgttgccacgaagacaatgtggtagtggctgtggatagtaccacaaacagggttctccattttcagaagacccagggtctccggcgttttgcatttcctctggtgtgtggatatctggggtcctttgagatggggaagtgacaggcttcagtgggagaaacaaattaaagtccttgtaacttctccccacagagcctgtttcagggcagtagtgatggagtggaggttcgatatgatttactggattgtcatatcagcatctgttctcctcaggtgagctctttagggctggggctgcacacccaaagagtagaactctgtgggtctgttattgtccccttagaaggccagggtatatttcttctccctgtttattttcattatttttacttttattttttgagacagagtctcgctctgttgcccaggctggagtgcagtggtgtgatcccagctcactgcagactctgcctcctaggttcaagtgattctcctgcctcagcctcctgagtagcagggattacaggcacaccaccatgcctggctaatttttgtatttttagtagagatggggtttcaccatgttggccaggctggtctcgaactcctggtctcaagtgatctacctgtctcagcctcccaaagtgctgggattacaggcatgagccaccacacctggccttattttcatttttatttatatatattttttgagacagggtctcgctctgtggcccaggctggagcacagtggcaccatgactgctcactgcagcctcagcctcccaggttcaagggaacctcctgcctcagcctcctgagtagatggaaccacaggcatgcactaccactaatttttgtatttttttgtagagacggggttttgccatgttgtccggcctggtcacgaactcctgagctcaagcaatctgaccacctcagccttccaaaatgctgggattacaggcatgagccaccagttttttttgttgttgttgttgttattgttgttttgagatggagcctcgctctgtcgcccaggctggagtgcagtggcatgatctcagcttactgcagcctccacctcctgggttccagtgattctcctgcctcagcctctcaagtagctgggactacaggtacgcaccaccacatccggctattttttgtatttttcagtagagatggggtttcaccatattggccaggctggtctctaactcctgacctcaggtgatcctcccgccttggcctcccaaagtgctgcaatcacaggtgtgagcctctgcacccagcattttttttttttttttttttttttttttgagtcggagtttcactcttgttgcccaggctggatgcaatggtgcgatctcagctcactgcaacctccacctcccaggttcaagcaattcccctgcctcagcctcccaaatagctgggattgcaggcatgtgccaccacacccagctaatttttgtatttttagtagagacgaggttttaccatgttggtcaggctggtctcgaactcccaacctcaggtgatctgcctgcctcggcctcccaaagtgctggcattacgggcatgagccactgcacctggccttttttttttttttagaatctattgtaaagcaaagatcttgtctccagtatcccactgggagtctctttggaattctggtccatgttcagctgtcatagggtttgctaggtctctgggggattatctgtgctcctagagaatagtacttaatcctggccaagcgtggtggctcacgcttgtaatcccagcactttgggaggccgaggtgagtggatcatgaggtcaggagttcaagaccagcctgaccaacacagtgaaatcccatctctactaaaaaataaaaatacaaaaattagctgggcgtggtggcggacgcttgtaatcccagctacttgggaggctgaggcacaagaatcactttaacccaggaggtggaggttgcagtgagccgagatcatgcaactgcactccagcctgggcaacagagctagacttgtctcaaaaaaaaaaaaaaaagaatagtacttaattctagcccactccacttcccttccacaggtggcacaactctttacagacaactttgactaccaaactcgagatgactttgtgcgaggtctcttagtgaatgaggaggtgagaaaagtcttccaatgcctctttaggagagaggagaaggctatgattgtatctcatgctggtaacttttgatcttttttgtattttattgaggcttaggagggaggaaaagcaggggacaggaggaacagtacacaaagaagaatctttgtggcagtgagaggcagaggggaacttaaaaggattagaaaagttgtacttgggggcattcttcctgtctttcttgcttaggtgacctccctttccttctcattcagatcctagggaaccagatccacatgcacgtaacagctaaggaatatggtgcccgtgtctccaacctacacatgtactcagctgtctgtgctgacgtcatccgccgatgggtctaccctctcaccccagaggcgaacttcactgacagcaccacccagagctgcactcattcccggcacaacatctaccgagggcctgaggtcagcctgggccatggcagcatcctagaggaaaatgtgctcctgggctctggcactgtcattggcagcaattgctttatcaccaacagtgtcattggccccggctgccacattggtgagcacaggtggggaatcaagccaactatcctaggaacaggaacctgggggggccacgtctccagaaacacaagggatggctacacaagggacagtccctgggaataaggaactatagagcggctacctcaggaaaggaggaaacagggatttgaaaacagcgataccttaatttgtagcctgtgggcctctcattggatgactcttcacattccagggtaccctgtagtcacattcaggagcaagtagataattaacatgcagtaacaacatctatttagcacattacagtttacaaagggcttttatatacattgttacatttaatcttcataatttacaaataaacaggctcaacaagattttcttgcccaaggtcattggtaataatggtgggacctgaatctgggtattctgaatgtaagtccagtgttcttttgagtctaccataactgcctggttggcctcttggtatctcattttggttgcaggagtgtgatgcgtctaatagtactgcccctttccaagaacaacagtaaggctcagattctaggggctgagcgtggtggctcatgcttgtaatcctagcacactgggaagccatggtgggaggatcgcttgagcccaggagttcaagaccagcctgggcaacatagcgacaccccttctccacaaatgatacaaaaattagctgggcatgatggcgcgtgcctgtaatctcagctattcgggaggctgaggcaggaggattacctgagcccagaggtcgagggtgcagtgagtcatgatcatactactgcactccagcctgggtgatggaatgagaccgtgtctcaaaagaaaaaaaagacttggtttctaaaatgtaccagaagaggtggaattatttggttctgcttgtaggcgtggatatgattctaataaggttttttgagttcagagggtccccagaaatcctgaaggttctcgggttcttaagctctgtgtgtagtctataattgttgtaaacttggtgaagtatcttctcaggcctgggcttagggggtgagtgggtgtttctggtgacttgcgggatggggaatgagagctaggtgggagctgtgctggtgtcagtcagccctgtcctctatgaagggctctgctctgcggttggaaccctgagttacccagaggtcttcccatcctgagccaggtgataacgtggtgctggaccagacctacctgtggcagggtgttcgagtggcggctggagcacagatccatcagtctctgctttgtgacaatgctgaggtcaaggaacgagtgacactgaaaccacgctctgtcctcacttcccaggtgagacctgatctatactgtgcacaggccctgaattgcatggcagtcacactgagccagaaggggcattatttccacccataatcctgtctaaaaaagttgctctcattatcaggatgcacttttcctccacaccctaatggttctgtgttttttttccccttaggtggtcgtgggcccaaatatcacgctgcctgagggctcggtgatctctttgcaccctccagatgcagaggaagatgaagatgatggcgagttcagtgatgattctggggctgaccaagaaaaggacaaagtgaagatgaaaggtgtgagactcaacaggtgtggggcatctgtgtgtctcgctgcctcatagaagaaccagtgtttcctcctggagggattggtgcttccgccgggccctctctatagatcattgccttttccaggttacaatccagcagaagtaggagctgctggcaagggctacctctggaaagctgcaggcatgaacatggaggaagaggaggaactgcagcagaatctgtggggtgagctaggcctgatgcctgcccttctcctcctgaatcggaatattttgaaggataatgaatacttcagagtcacattacttattcactcctttattcaggcagacagggcaggtatattgctctctgtcaatgactctttttttctttttcctcacccattatggcttctcaggactcaagatcaacatggaagaagagagtgaaagtgaaagtgagcaaagtatggattctgaggagccggacagccggggaggctcccctcagatggatgacatcaaaggtgagtggcaggggagaaatgcgctggaccagtttattctctgcctggatcaactagccagaggcttacgttcctcagaaagggtttggtatcgagtcaagactagatgacttagagcattctgaatgatgttggcccatgaacttatccttgctttgatttcagtgttccagaatgaagttttaggaacactacagcggggcaaagaggagaacatttcttgtgacaatctcgtcctggaaatcaactctctcaagtaagagcagcccctccctgttctcctcggggtgatcccgggaaggtagaggctttctcgtaagtgttttgtctccaaataggaacctattccttcgacatcccaaatggaaagaccagtagtatttggagcaaggagagcattattaagttctagcctcagcatagactttctccttcctaaaccctccccttccatattgttccatccagattcctctccaatgtctatcaaagtcatagttctaagcctgctgaaaggccagtgaaggccctggtgtcaccccagtctccccacaggtatgcctataacataagtctaaaggaggtgatgcaggtactgagccacgtggtcctggagttccccctgcaacagatggattccccgcttgactcaagccgctactgtgccctgctgcttcctgtgagcaaagattggagctgagtacaagggattgggtacaggcaaaggaaatcaggagtagactgtcttgttatattgggtgtatgtcacttctggttcctttttccttgcctctggaagctggttgggctctagagcagccttggctggttcagaggggtcagattgagttcaatactgactggcctttgagactccaggatttcataccatcctaggcccacaaaggtatattcagaatggacctggacattcagactctatggcagcaatttgacccaacacaagatcagcctctggggtgggaataggtattttgaggcagcctatagcatctgatcccctttcaccttccctaaggaatctctttttcccaaaccctgtcaacaactcccaagtccctctgacataattccacagaacctgtatcatctcccttttgtccacccatgtcatcagtatggatttgcttggatgtccaggtataggtgaatgcttaggaatatactgcagctcccttctttcttccatagctgctaaaggcctggagccctgtttttaggaactacataaagcgcgcagccgaccatttggaagcgttagcagccattgaggacttcttcctagagcatgaagctcttggtatttccatggccaaggtgaatatgacctcaagccccattcttctgcacttgctttcaaacgagggttggtgacccccttgggagacataaaatagaagctaatgtgaatccagtatggaccatccactcccaatatgcttattgctagaatagtacagcttggagccggactaataaggtagccatctggggggtggtctggaaatgtgcaaagctctccccagcaatagttccagaagttagacctgccccaggagcagagcgaacagctcactcttgtccgttttggaggaggctactcagtgcatagagggatctgagggcctggtagagtatcctgctggactttccaaggcccctgaggtcccctttattggccttttgcaggtactgatggctttctaccagctggagatcctggctgaggaaacaattctgagctggttcagccaaagagatacaactgacaagggccagcagttgcgcaagaatcaacaggtgcgtcaggctgtcctcctctcgccaagatggttatctcattcccaggtcctggcccctagactctagggtggttggtttctggggctctggttgttagagctgtttatctgccgaggggagcaggagagttatgtgcacctcccccagccgatctctcctctgcttctttacagctgcagaggttcatccagtggctaaaagaggcagaagaggagtcatctgaagatgactgaagtcacactgcctgctcctttgggtgtgattgagtgccctcctggctcctgggctgggacaagtgaggaactagctgcagagggatgagtgaccaccatccaggctgagactgaaaggagcagaggctggaactacagtattctttcccctgctagcaaccatgtgcctcccatcctgactgtggagttgggatgtggaagtggggctggaacaaagcttctgcctagggaggagctaagcaggcccggcagttggaggaaggccagaggaacagctttgtgctccggctttccctcagggaacagcagagagcagttgg

SEQ ID NO: 11799 - DNA, 3084 bp, Homo sapiens
gcgtgcggtggcagcttccttgcggaagtggtgaccgtgagagaagaagatggcggcccctgtagtggcgccgcctggtgtggtggttagtcgggctaacaagcgcagcggcgcggggccgggaggcagcggtggcgggggagccagaggggcggaggaggaaccgccgccgcccctacaagcagttctggtggccgatagcttcgatcgccgcttcttccccatctccaaggaccagcctcgggtcctcttgcccctggccaatgtggcattaattgactacactctggaattcctgactgccacaggtgtacaggaaacatttgtcttttgttgctggaaagctgctcaaatcaaagaacatttactgaagtcaaagtggtgccgccctacatctctcaatgtggttcgaataattacatcagagctctatcgatcactgggagatgtcctccgtgatgttgatgccaaggctttggtgcgctctgactttcttctggtgtatggggatgtcatctcaaacatcaatatcaccagagcccttgaggaacacaggttgagacggaagctagaaaaaaatgtttctgtgatgacgatgatcttcaaggagtcatcccccagccacccaactcgttgccacgaagacaatgtggtagtggctgtggatagtaccacaaacagggttctccattttcagaagacccagggtctccggcgttttgcatttcctctgagcctgtttcagggcagtagtgatggagtggaggttcgatatgatttactggattgtcatatcagcatctgttctcctcaggtggcacaactctttacagacaactttgactaccaaactcgagatgactttgtgcgaggtctcttagtgaatgaggagatcctagggaaccagatccacatgcacgtaacagctaaggaatatggtgcccgtgtctccaacctacacatgtactcagctgtctgtgctgacgtcatccgccgatgggtctaccctctcaccccagaggcgaacttcactgacagcaccacccagagctgcactcattcccggcacaacatctaccgagggcctgaggtcagcctgggccatggcagcatcctagaggaaaatgtgctcctgggctctggcactgtcattggcagcaattgctttatcaccaacagtgtcattggccccggctgccacattggtgataacgtggtgctggaccagacctacctgtggcagggtgttcgagtggcggctggagcacagatccatcagtctctgctttgtgacaatgctgaggtcaaggaacgagtgacactgaaaccacgctctgtcctcacttcccaggtggtcgtgggcccaaatatcacgctgcctgagggctcggtgatctctttgcaccctccagatgcagaggaagatgaagatgatggcgagttcagtgatgattctggggctgaccaagaaaaggacaaagtgaagatgaaaggtgtgagactcaacaggttacaatccagcagaagtaggagctgctggcaagggctacctctggaaagctgcaggcatgaacatggaggaagaggaggaactgcagcagaatctgtggggactcaagatcaacatggaagaagagagtgaaagtgaaagtgagcaaagtatggattctgaggagccggacagccggggaggctcccctcagatggatgacatcaaagtgttccagaatgaagttttaggaacactacagcggggcaaagaggagaacatttcttgtgacaatctcgtcctggaaatcaactctctcaagtatgcctataacataagtctaaaggaggtgatgcaggtactgagccacgtggtcctggagttccccctgcaacagatggattccccgcttgactcaagccgctactgtgccctgctgcttcctgtgagcaaagattggagctgagtacaagggattgggtacaggcaaaggaaatcaggagtagactgtcttgttatattgggtgtatgtcacttctggttcctttttccttgcctctggaagctggttgggctctagagcagccttggctggttcagaggggtcagattgagttcaatactgactggcctttgagactccaggatttcataccatcctaggcccacaaaggtatattcagaatggacctggacattcagactctatggcagcaatttgacccaacacaagatcagcctctggggtgggaataggtattttgaggcagcctatagcatctgatcccctttcaccttccctaaggaatctctttttcccaaaccctgtcaacaactcccaagtccctctgacataattccacagaacctgtatcatctcccttttgtccacccatgtcatcagtatggatttgcttggatgtccaggtataggtgaatgcttaggaatatactgcagctcccttctttcttccatagctgctaaaggcctggagccctgtttttaggaactacataaagcgcgcagccgaccatttggaagcgttagcagccattgaggacttcttcctagagcatgaagctcttggtatttccatggccaaggtactgatggctttctaccagctggagatcctggctgaggaaacaattctgagctggttcagccaaagagatacaactgacaagggccagcagttgcgcaagaatcaacagctgcagaggttcatccagtggctaaaagaggcagaagaggagtcatctgaagatgactgaagtcacactgcctgctcctttgggtgtgattgagtgccctcctggctcctgggctgggacaagtgaggaactagctgcagagggatgagtgaccaccatccaggctgagactgaaaggagcagaggctggaactacagtattctttcccctgctagcaaccatgtgcctcccatcctgactgtggagttgggatgtggaagtggggctggaacaaagcttctgcctagggaggagctaagcaggcccggcagttggaggaaggccagaggaacagctttgtgctccggctttccctcagggaacagcagagagcagttgg

SEQ ID NO: 11800 - DNA, 2449 bp, Homo sapiens
gaggaaccgccgccgcccctacaagcagttctggtggccgatagcttcgatcgccgcttcttccccatctccaaggaccagcctcgggtgagcgccgcgcacgcgagcagccagagggcaggaagggtggcagggctggagcaagttctcatttcggctaactacaacagcatgcccttgaaggacctgcgtctatgctgttatcctaaaaccggatgcagagggactgtctaaaccctgatgactgctgaccaagttagtggccggcagatttgggcattcgtaatgctgtccacctcgggtttgaaaggaatgaagagagctaaatgtagaaacagcgcttgagagaagccttcacgcggggattcagtgcccctagaagaggctgcgccgcttttaaccttgccgatgacggttgcttaggtgaaaagaaacgaccttttgcctctgaaagggcggtaatatgccttaaaaagagcgggctagatctcaggcagtgtattttttttttccttccaggttctaatgatagccggtgctatctgtcgaaaggacaaaatgggtttagtggttgattgccatcagcccccgagttgtctagacaatggggtattggactcagctgggtcgttcagcagtcagttcagaaagagggaactgcattggatttaaggaaaatcctctctaattccctcgaaaaagcctaatggctgttcatttttgacaagtgacgggagatggctaacctctgacacttagaaagggatcaaggaaggaaatcttatggggaagaaggccttagcaatgcttaaatttatggaaatatgattgatttccagtattatcctttgccagcagtgaactgccattctgtcacagctctgtgtctgatacaaggcacatagattctgtacttaccatccccaaattgcaatgtctcagactcaggcttagagcatggcatgaacatcaaaggcaggaacctgtttatctttgaattggaaagatacagcaaaattacactgtttggaaatacgaatagaggagtgaaaattgttgcagtggggtacccaaagggattcgagacctcaagttttttttcatcttgtatccttcaggtcctcttgcccctggccaatgtggcattaattgactacactctggaattcctgactgccacaggtgtacaggaaacatttgtcttttgttgctggaaagctgctcaaatcaaagaacatttactgtaaggccctgcaacttttctttccatgtttcgccatctttttccagttttttcaggatgaatgtaactaaggggaaatgtgagaggggaaaaatgtgtctacttagatgtcattgtaagttctaagggtattttctacacttatcaggaggtgagcagctgaaactttgtatctgtctgtcttgggttttctgtgacaaagattaaagaataaacttgggttttttctgaatctcattataaagtttggtgccagtggactttgcttttatttaatggcttcagtatggaagttacaatgataacatctttgttttcccactgagtttctaaatcttgtttgttctcaccttcaaggatataaatgagctccttgtcatctttgtattcccactgcctagctcagtcccaagcatatagtgagcacttacatgtttgttgaaatcttgaaaactagggaatcgcattgcttatggaagtccaggatgtaaagactaggacattagcatggtctccatcagacagttcctaaatgttatatggattgcagaaggggaaagctgacgtgaagcgtgttcccaggctactttgtgtaccctaggcttcagcaggattttgagttcaaattgatgtttagggacaaggggtcaaggtatggagaggaaataaccatgtttcctaacccataaaacaagactggtgacacaggatgctgaaagcattcattatagttcataatactctttgaagttgaagacgctggcaagaacccaaaaaagccatcgagaaggactgtgagtgctgaaagggggtgaaaaatggggaaggctcaaatgatctttatgcttgatacactcattcccctcaccctcccttcctttaggaagtcaaagtggtgccgccctacatctctcaatgtggttcgaataattacatcagagctctatcgatcactgggagatgtcctccgtgatgttgatgccaaggctttggtgcgctctgactttcttctggtgtatggggatgtcatctcaaacatcaatatcaccagagcccttgaggaacacaggtcaggatgggaaaatgacaggaacaagggttaaagaccagcagagccctgagactgcttttttgcagttctgtccctcctgtcctttataggttgagacggaagctagaaaaaaatgtttctgtgatgacgatgat

SEQ ID NO: 11801 - DNA, 696 bp, Homo sapiens
gaggaaccgccgccgcccctacaagcagttctggtggccgatagcttcgatcgccgcttcttccccatctccaaggaccagcctcggcatgcccttgaaggacctgcgtctatgctgttatcctaaaaccggatgcagagggactgtctaaaccctgatgactgctgaccaagttagtggccggcagatttgggcattcgtaatgctgtccacctcgggtttgaaaggaatgaagagagctaaatgtagaaacagcgcttgagagaagccttcacgcggggattcagtgcccctagaagaggctgcgccgcttttaaccttgccgatgacggttgcttaggtcctcttgcccctggccaatgtggcattaattgactacactctggaattcctgactgccacaggtgtacaggaaacatttgtcttttgttgctggaaagctgctcaaatcaaagaacatttactgaagtcaaagtggtgccgccctacatctctcaatgtggttcgaataattacatcagagctctatcgatcactgggagatgtcctccgtgatgttgatgccaaggctttggtgcgctctgactttcttctggtgtatggggatgtcatctcaaacatcaatatcaccagagcccttgaggaacacaggttgagacggaagctagaaaaaaatgtttctgtgatgacgatgat

SEQ ID NO: 11802 - DNA, 9770 bp, Homo sapiens
cagttctggtggccgatagcttcgatcgccgcttcttccccatctccaaggaccagcctcgggtgagcgccgcgcacgcgagcagccagagggcaggaagggtggcagggctggagcaagttctcatttcggctaactacaacagcatgcccttgaaggacctgcgtctatgctgttatcctaaaaccggatgcagagggactgtctaaaccctgatgactgctgaccaagttagtggccggcagatttgggcattcgtaatgctgtccacctcgggtttgaaaggaatgaagagagctaaatgtagaaacagcgcttgagagaagccttcacgcggggattcagtgcccctagaagaggctgcgccgcttttaaccttgccgatgacggttgcttaggtgaaaagaaacgaccttttgcctctgaaagggcggtaatatgccttaaaaagagcgggctagatctcaggcagtgtattttttttttccttccaggttctaatgatagccggtgctatctgtcgaaaggacaaaatgggtttagtggttgattgccatcagcccccgagttgtctagacaatggggtattggactcagctgggtcgttcagcagtcagttcagaaagagggaactgcattggatttaaggaaaatcctctctaattccctcgaaaaagcctaatggctgttcatttttgacaagtgacgggagatggctaacctctgacacttagaaagggatcaaggaaggaaatcttatggggaagaaggccttagcaatgcttaaatttatggaaatatgattgatttccagtattatcctttgccagcagtgaactgccattctgtcacagctctgtgtctgatacaaggcacatagattctgtacttaccatccccaaattgcaatgtctcagactcaggcttagagcatggcatgaacatcaaaggcaggaacctgtttatctttgaattggaaagatacagcaaaattacactgtttggaaatacgaatagaggagtgaaaattgttgcagtggggtacccaaagggattcgagacctcaagttttttttcatcttgtatccttcaggtcctcttgcccctggccaatgtggcattaattgactacactctggaattcctgactgccacaggtgtacaggaaacatttgtcttttgttgctggaaagctgctcaaatcaaagaacatttactgtaaggccctgcaacttttctttccatgtttcgccatctttttccagttttttcaggatgaatgtaactaaggggaaatgtgagaggggaaaaatgtgtctacttagatgtcattgtaagttctaagggtattttctacacttatcaggaggtgagcagctgaaactttgtatctgtctgtcttgggttttctgtgacaaagattaaagaataaacttgggttttttctgaatctcattataaagtttggtgccagtggactttgcttttatttaatggcttcagtatggaagttacaatgataacatctttgttttcccactgagtttctaaatcttgtttgttctcaccttcaaggatataaatgagctccttgtcatctttgtattcccactgcctagctcagtcccaagcatatagtgagcacttacatgtttgttgaaatcttgaaaactagggaatcgcattgcttatggaagtccaggatgtaaagactaggacattagcatggtctccatcagacagttcctaaatgttatatggattgcagaaggggaaagctgacgtgaagcgtgttcccaggctactttgtgtaccctaggcttcagcaggattttgagttcaaattgatgtttagggacaaggggtcaaggtatggagaggaaataaccatgtttcctaacccataaaacaagactggtgacacaggatgctgaaagcattcattatagttcataatactctttgaagttgaagacgctggcaagaacccaaaaaagccatcgagaaggactgtgagtgctgaaagggggtgaaaaatggggaaggctcaaatgatctttatgcttgatacactcattcccctcaccctcccttcctttaggaagtcaaagtggtgccgccctacatctctcaatgtggttcgaataattacatcagagctctatcgatcactgggagatgtcctccgtgatgttgatgccaaggctttggtgcgctctgactttcttctggtgtatggggatgtcatctcaaacatcaatatcaccagagcccttgaggaacacaggtcaggatgggaaaatgacaggaacaagggttaaagaccagcagagccctgagactgcttttttgcagttctgtccctcctgtcctttataggttgagacggaagctagaaaaaaatgtttctgtgatgacgatgatcttcaaggagtcatcccccagccacccaactcgttgccacgaagacaatgtggtagtggctgtggatagtaccacaaacagggttctccattttcagaagacccagggtctccggcgttttgcatttcctctggtgtgtggatatctggggtcctttgagatggggaagtgacaggcttcagtgggagaaacaaattaaagtccttgtaacttctccccacagagcctgtttcagggcagtagtgatggagtggaggttcgatatgatttactggattgtcatatcagcatctgttctcctcaggtgagctctttagggctggggctgcacacccaaagagtagaactctgtgggtctgttattgtccccttagaaggccagggtatatttcttctccctgtttattttcattatttttacttttattttttgagacagagtctcgctctgttgcccaggctggagtgcagtggtgtgatcccagctcactgcagactctgcctcctaggttcaagtgattctcctgcctcagcctcctgagtagcagggattacaggcacaccaccatgcctggctaatttttgtatttttagtagagatggggtttcaccatgttggccaggctggtctcgaactcctggtctcaagtgatctacctgtctcagcctcccaaagtgctgggattacaggcatgagccaccacacctggccttattttcatttttatttatatatattttttgagacagggtctcgctctgtggcccaggctggagcacagtggcaccatgactgctcactgcagcctcagcctcccaggttcaagggaacctcctgcctcagcctcctgagtagatggaaccacaggcatgcactaccactaatttttgtatttttttgtagagacggggttttgccatgttgtccggcctggtcacgaactcctgagctcaagcaatctgaccacctcagccttccaaaatgctgggattacaggcatgagccaccagttttttttgttgttgttgttgttattgttgttttgagatggagcctcgctctgtcgcccaggctggagtgcagtggcatgatctcagcttactgcagcctccacctcctgggttccagtgattctcctgcctcagcctctcaagtagctgggactacaggtacgcaccaccacatccggctattttttgtatttttcagtagagatggggtttcaccatattggccaggctggtctctaactcctgacctcaggtgatcctcccgccttggcctcccaaagtgctgcaatcacaggtgtgagcctctgcacccagcattttttttttttttttttttttttttttgagtcggagtttcactcttgttgcccaggctggatgcaatggtgcgatctcagctcactgcaacctccacctcccaggttcaagcaattcccctgcctcagcctcccaaatagctgggattgcaggcatgtgccaccacacccagctaatttttgtatttttagtagagacgaggttttaccatgttggtcaggctggtctcgaactcccaacctcaggtgatctgcctgcctcggcctcccaaagtgctggcattacgggcatgagccactgcacctggccttttttttttttttagaatctattgtaaagcaaagatcttgtctccagtatcccactgggagtctctttggaattctggtccatgttcagctgtcatagggtttgctaggtctctgggggattatctgtgctcctagagaatagtacttaatcctggccaagcgtggtggctcacgcttgtaatcccagcactttgggaggccgaggtgagtggatcatgaggtcaggagttcaagaccagcctgaccaacacagtgaaatcccatctctactaaaaaataaaaatacaaaaattagctgggcgtggtggcggacgcttgtaatcccagctacttgggaggctgaggcacaagaatcactttaacccaggaggtggaggttgcagtgagccgagatcatgcaactgcactccagcctgggcaacagagctagacttgtctcaaaaaaaaaaaaaaaagaatagtacttaattctagcccactccacttcccttccacaggtggcacaactctttacagacaactttgactaccaaactcgagatgactttgtgcgaggtctcttagtgaatgaggaggtgagaaaagtcttccaatgcctctttaggagagaggagaaggctatgattgtatctcatgctggtaacttttgatcttttttgtattttattgaggcttaggagggaggaaaagcaggggacaggaggaacagtacacaaagaagaatctttgtggcagtgagaggcagaggggaacttaaaaggattagaaaagttgtacttgggggcattcttcctgtctttcttgcttaggtgacctccctttccttctcattcagatcctagggaaccagatccacatgcacgtaacagctaaggaatatggtgcccgtgtctccaacctacacatgtactcagctgtctgtgctgacgtcatccgccgatgggtctaccctctcaccccagaggcgaacttcactgacagcaccacccagagctgcactcattcccggcacaacatctaccgagggcctgaggtcagcctgggccatggcagcatcctagaggaaaatgtgctcctgggctctggcactgtcattggcagcaattgctttatcaccaacagtgtcattggccccggctgccacattggtgagcacaggtggggaatcaagccaactatcctaggaacaggaacctgggggggccacgtctccagaaacacaagggatggctacacaagggacagtccctgggaataaggaactatagagcggctacctcaggaaaggaggaaacagggatttgaaaacagcgataccttaatttgtagcctgtgggcctctcattggatgactcttcacattccagggtaccctgtagtcacattcaggagcaagtagataattaacatgcagtaacaacatctatttagcacattacagtttacaaagggcttttatatacattgttacatttaatcttcataatttacaaataaacaggctcaacaagattttcttgcccaaggtcattggtaataatggtgggacctgaatctgggtattctgaatgtaagtccagtgttcttttgagtctaccataactgcctggttggcctcttggtatctcattttggttgcaggagtgtgatgcgtctaatagtactgcccctttccaagaacaacagtaaggctcagattctaggggctgagcgtggtggctcatgcttgtaatcctagcacactgggaagccatggtgggaggatcgcttgagcccaggagttcaagaccagcctgggcaacatagcgacaccccttctccacaaatgatacaaaaattagctgggcatgatggcgcgtgcctgtaatctcagctattcgggaggctgaggcaggaggattacctgagcccagaggtcgagggtgcagtgagtcatgatcatactactgcactccagcctgggtgatggaatgagaccgtgtctcaaaagaaaaaaaagacttggtttctaaaatgtaccagaagaggtggaattatttggttctgcttgtaggcgtggatatgattctaataaggttttttgagttcagagggtccccagaaatcctgaaggttctcgggttcttaagctctgtgtgtagtctataattgttgtaaacttggtgaagtatcttctcaggcctgggcttagggggtgagtgggtgtttctggtgacttgcgggatggggaatgagagctaggtgggagctgtgctggtgtcagtcagccctgtcctctatgaagggctctgctctgcggttggaaccctgagttacccagaggtcttcccatcctgagccaggtgataacgtggtgctggaccagacctacctgtggcagggtgttcgagtggcggctggagcacagatccatcagtctctgctttgtgacaatgctgaggtcaaggaacgagtgacactgaaaccacgctctgtcctcacttcccaggtgagacctgatctatactgtgcacaggccctgaattgcatggcagtcacactgagccagaaggggcattatttccacccataatcctgtctaaaaaagttgctctcattatcaggatgcacttttcctccacaccctaatggttctgtgttttttttccccttaggtggtcgtgggcccaaatatcacgctgcctgagggctcggtgatctctttgcaccctccagatgcagaggaagatgaagatgatggcgagttcagtgatgattctggggctgaccaagaaaaggacaaagtgaagatgaaaggtgtgagactcaacaggtgtggggcatctgtgtgtctcgctgcctcatagaagaaccagtgtttcctcctggagggattggtgcttccgccgggccctctctatagatcattgccttttccaggttacaatccagcagaagtaggagctgctggcaagggctacctctggaaagctgcaggcatgaacatggaggaagaggaggaactgcagcagaatctgtggggtgagctaggcctgatgcctgcccttctcctcctgaatcggaatattttgaaggataatgaatacttcagagtcacattacttattcactcctttattcaggcagacagggcaggtatattgctctctgtcaatgactctttttttctttttcctcacccattatggcttctcaggactcaagatcaacatggaagaagagagtgaaagtgaaagtgagcaaagtatggattctgaggagccggacagccggggaggctcccctcagatggatgacatcaaaggtgagtggcaggggagaaatgcgctggaccagtttattctctgcctggatcaactagccagaggcttacgttcctcagaaagggtttggtatcgagtcaagactagatgacttagagcattctgaatgatgttggcccatgaacttatccttgctttgatttcagtgttccagaatgaagttttaggaacactacagcggggcaaagaggagaacatttcttgtgacaatctcgtcctggaaatcaactctctcaagtaagagcagcccctccctgttctcctcggggtgatcccgggaaggtagaggctttctcgtaagtgttttgtctccaaataggaacctattccttcgacatcccaaatggaaagaccagtagtatttggagcaaggagagcattattaagttctagcctcagcatagactttctccttcctaaaccctccccttccatattgttccatccagattcctctccaatgtctatcaaagtcatagttctaagcctgctgaaaggccagtgaaggccctggtgtcaccccagtctccccacaggtatgcctataacataagtctaaaggaggtgatgcaggtactgagccacgtggtcctggagttccccctgcaacagatggattccccgcttgactcaagccgctactgtgccctgctgcttcctgtgagcaaagattggagctgagtacaagggattgggtacaggcaaaggaaatcaggagtagactgtcttgttatattgggtgtatgtcacttctggttcctttttccttgcctctggaagctggttgggctctagagcagccttggctggttcagaggggtcagattgagttcaatactgactggcctttgagactccaggatttcataccatcctaggcccacaaaggtatattcagaatggacctggacattcagactctatggcagcaatttgacccaacacaagatcagcctctggggtgggaataggtattttgaggcagcctatagcatctgatcccctttcaccttccctaaggaatctctttttcccaaaccctgtcaacaactcccaagtccctctgacataattccacagaacctgtatcatctcccttttgtccacccatgtcatcagtatggatttgcttggatgtccaggtataggtgaatgcttaggaatatactgcagctcccttctttcttccatagctgctaaaggcctggagccctgtttttaggaactacataaagcgcgcagccgaccatttggaagcgttagcagccattgaggacttcttcctagagcatgaagctcttggtatttccatggccaaggtgaatatgacctcaagccccattcttctgcacttgctttcaaacgagggttggtgacccccttgggagacataaaatagaagctaatgtgaatccagtatggaccatccactcccaatatgcttattgctagaatagtacagcttggagccggactaataaggtagccatctggggggtggtctggaaatgtgcaaagctctccccagcaatagttccagaagttagacctgccccaggagcagagcgaacagctcactcttgtccgttttggaggaggctactcagtgcatagagggatctgagggcctggtagagtatcctgctggactttccaaggcccctgaggtcccctttattggccttttgcaggtactgatggctttctaccagctggagatcctggctgaggaaacaattctgagctggttcagccaaagagatacaactgacaagggccagcagttgcgcaagaatcaacaggtgcgtcaggctgtcctcctctcgccaagatggttatctcattcccaggtcctggcccctagactctagggtggttggtttctggggctctggttgttagagctgtttatctgccgaggggagcaggagagttatgtgcacctcccccagccgatctctcctctgcttctttacagctgcagaggttcatccagtggctaaaagaggcagaagaggagtcatctgaagatgactgaagtcacactgcctgctcctttgggtgtgattgagtgccctcctggctcctgggctgggacaagtgaggaactagctgcagagggatgagtgaccaccatccaggctgagactgaaaggagcagaggctggaactacagtattctttcccctgctagcaaccatgtgcctcccatcctgactgtggagttgggatgtggaagtggggctggaacaaagcttctgcctagggaggagctaagcaggcccggcagttggaggaaggccagaggaacagctttgtgctccggctttccctcagggaacagcagagagcagttggctctttctgctgcttgtatatgtta

SEQ ID NO: 11803 - DNA, 2389 bp, Homo sapiens
cagttctggtggccgatagcttcgatcgccgcttcttccccatctccaaggaccagcctcgggtcctcttgcccctggccaatgtggcattaattgactacactctggaattcctgactgccacaggtgtacaggaaacatttgtcttttgttgctggaaagctgctcaaatcaaagaacatttactgaagtcaaagtggtgccgccctacatctctcaatgtggttcgaataattacatcagagctctatcgatcactgggagatgtcctccgtgatgttgatgccaaggctttggtgcgctctgactttcttctggtgtatggggatgtcatctcaaacatcaatatcaccagagcccttgaggaacacaggttgagacggaagctagaaaaaaatgtttctgtgatgacgatgatcttcaaggagtcatcccccagccacccaactcgttgccacgaagacaatgtggtagtggctgtggatagtaccacaaacagggttctccattttcagaagacccagggtctccggcgttttgcatttcctctgagcctgtttcagggcagtagtgatggagtggaggttcgatatgatttactggattgtcatatcagcatctgttctcctcaggtggcacaactctttacagacaactttgactaccaaactcgagatgactttgtgcgaggtctcttagtgaatgaggagatcctagggaaccagatccacatgcacgtaacagctaaggaatatggtgcccgtgtctccaacctacacatgtactcagctgtctgtgctgacgtcatccgccgatgggtctaccctctcaccccagaggcgaacttcactgacagcaccacccagagctgcactcattcccggcacaacatctaccgagggcctgaggtcagcctgggccatggcagcatcctagaggaaaatgtgctcctgggctctggcactgtcattggcagcaattgctttatcaccaacagtgtcattggccccggctgccacattggtgataacgtggtgctggaccagacctacctgtggcagggtgttcgagtggcggctggagcacagatccatcagtctctgctttgtgacaatgctgaggtcaaggaacgagtgacactgaaaccacgctctgtcctcacttcccaggtggtcgtgggcccaaatatcacgctgcctgagggctcggtgatctctttgcaccctccagatgcagaggaagatgaagatgatggcgagttcagtgatgattctggggctgaccaagaaaaggacaaagtgaagatgaaaggttacaatccagcagaagtaggagctgctggcaagggctacctctggaaagctgcaggcatgaacatggaggaagaggaggaactgcagcagaatctgtggggactcaagatcaacatggaagaagagagtgaaagtgaaagtgagcaaagtatggattctgaggagccggacagccggggaggctcccctcagatggatgacatcaaagtgttccagaatgaagttttaggaacactacagcggggcaaagaggagaacatttcttgtgacaatctcgtcctggaaatcaactctctcaatctccccacaggtatgcctataacataagtctaaaggaggtgatgcaggtactgagccacgtggtcctggagttccccctgcaacagatggattccccgcttgactcaagccgctactgtgccctgctgcttcctctgctaaaggcctggagccctgtttttaggaactacataaagcgcgcagccgaccatttggaagcgttagcagccattgaggacttcttcctagagcatgaagctcttggtatttccatggccaaggtactgatggctttctaccagctggagatcctggctgaggaaacaattctgagctggttcagccaaagagatacaactgacaagggccagcagttgcgcaagaatcaacagctgcagaggttcatccagtggctaaaagaggcagaagaggagtcatctgaagatgactgaagtcacactgcctgctcctttgggtgtgattgagtgccctcctggctcctgggctgggacaagtgaggaactagctgcagagggatgagtgaccaccatccaggctgagactgaaaggagcagaggctggaactacagtattctttcccctgctagcaaccatgtgcctcccatcctgactgtggagttgggatgtggaagtggggctggaacaaagcttctgcctagggaggagctaagcaggcccggcagttggaggaaggccagaggaacagctttgtgctccggctttccctcagggaacagcagagagcagttggctctttctgctgcttgtatatgtta

SEQ ID NO: 11804 - DNA, 26416 bp, Homo sapiens
atgcggagcggctaggtggtgcacgggaaacgcgggcgtaggtgaccggcggctttctcagttttggtggagacgggcgcatgtgggcgctttgctcgctgctgcggtccgcggccggacgcaccatgtcgcagggacgcaccatatcgcaggcacccgcccgccgcgagcggccgcgcaaggacccgctgcggcacctgcgcacgcgagagaagcgcggaccgtcggggtgctccggcggcccaaacaccgtgtacctgcaggtggtggcagcgggtagccgggactcgggcgccgcgctctacgtcttctccgagttcaaccggtcagtcaacgagccacgccccgtcccgctgggccctcagtgcggcgcagcctctgagcatcggggcacctcccagggcttcggcttccctgcttcacacatgtggttcactgttgcgggggttcgtggagttatggtgggtgggaaatccgagattctttgcatccatgtgatttctgcggatctgtgaagaacttcaggcctgggtctgagcgtccttttcccaacccttgggccccggcctggctgtcagcactttcggagctccaccctcttccgtgcaccccaaggccagtgtgtcgttgttagcgtgtggggtggacagatctggtgtgtagccggtggtggagaaaggactcattttgtcctagcacccacacacacaggcccccactcctctccacctctgctaaggagggctcaaaacccaccagcataaatgtggctcggtagtccaacgtggacttttaatttttttttcttttttttttttccagagtctacaataaaacatctaattggtgtcagagagtttacagaataaaaccttctgaatgtcttgtgtaatgtttgtcttgtaggtatctcttcaactgtggagaaggcgttcagagactcatgcaggagcacaagtgagtcagtctcttgctttcggagggggagttgattacggggcttgaaagccgaaatgagaggccagttgttttttatagcaaaagtggtccttgttctgttcatgttatcctgtttaaatgttttttcattcttaggttaaaggttgctcgcctggacaacatattcctgacacgaatgcactggtctaatgttgggggcttaagtggtgagtatattctttgcagtgtcagaggctggtgggaagtctctgggattttaaccggctttaccatttttccaagtctggggtgggcagctacttttttttttttttttttttttgtcagtggcgtgatcttggctcactgcaacctttgccttctgggctcaggtgatcccctcacctcagcctcccaaatagctgggaccacacgtgtgccccatcacacctggctaattttttttgtatgttttgtagcgacggggttttgctatgttgcccaggctggtctcaaacttctgcgatcctcctgtctcggcctcccagagtgctgggattacaggcatgagccaccgcacctggcctggaattctttttataccagcccagtcagcagcagcacagagcattaaaagctgtgactcaggagaacagattttaatatggataccacctcttaagtgttaccatccacttagtttcttgcgttgcggggacagagatttgtggcagtaaactggagagtctagcagtggtgattacagttaatatgtttaccgcagacgccattggcacattggcagccacacacatacccactgtccagattaccctgtcatttatgtctatcaaccggaaggtcaggattgtgttgcagccaaattgtgtgggcttggtggcatggaccggaaggagtgaagtgttagaccagtctcccttctcagggctgagactagggtgaggcacttagggtgccagcccttcacttgcatgattccttacattttgcacactgggtgccttgctgcttcaccctagtgacagctcagcccattctagaggcatttaaagaatatttggtgtctgttacacctctagctggcatcacttctgctctgtacatcttccctggttgtacttccaaagctggaaggtggagatgtagataaatagttggattagtacggggtgctcctcctgttagtgacgacaggtcaaattgatgagagatctgattttatgcatcctttttaggaatgattcttactttaaaggaaaccgggcttccaaagtgtgtactttctggacctccacaactggtgagtctttcctgacacatctttcaaaagcaatctttccttttgtaatatcagtaacaagaattttcctttttgcaaatcagtcttctgccctccagagatacctggtcgttgaaacgcttcccctttcaagttaaaaagacttgagttctgattaactatgtgaccttgatcaagttactttacctttctgagctttagtttattcatctataagatgactatcacgtttcatagagttgttaaagattaaatgacgtagcagcacatataaagcactaaatcactttattagatatatgtttggcaccaagtaggcacacaagaaagggcagcttttgtttttattcaataaatttctgacatcttcttacctttcagtccagcttattacactcttgagaaggcgtgtgtgtgttgttgaatataacagttcattttccagtccttaagaagaaagtcaccaagacctgttaagtctttccccaaaataacgtttgaaatccatccatttgtctcttattgaggccttccttatttctgttttctatgcctgtaaactacaatagcctcccatattcattctcgccttcctgtaatccatctgccacacagcagccagagaggtcacttcaagacagaaaagtagtgtgtcacttgccaccctaaagcccttcatgggctccccattgcaatacaatcaaaacaccttgatatggcctacaagtcctgtaggccccggccgctacccacacttccatctgtacccatcgctgaactgcagctgcatgggctgactcttatgtccctctaactccctggccacttcaggactttcgcccttccgcgggttccctctgcctcttctaattgctgcctatattgttactgaaccttcagggctcagctagagggtcatttactccagaactgcctcttcttctctagacaagttggatcccagccttctgtatttttcattttccttgcagagcacttagcataatgccactaagctgtttctgttatcgtgtttccttttgtctcctccactggcctgattagagcaaggcctccatctctttttcctgctatatccttggcatctgatataatggatactcagtaaatatttgtaataaatgatgttcaaaatatttactaagctttgttttatgttgatacctattggtaaccttttaaatacttgaatagttgctgtgttctacatttgttcaaccataactgctcatttctttgtttttcattaggaaaaatacctcgaagcaatcaaaatattttctggtccattgaaaggaatagaactgggtacgtctttgtctgtgactcatcctctgctatttctaacttatatatgccctgacctctcaaattagaatccattaaaaacatcaacatcaaacctcaaaatcaaatgcttcatcaccacgagatttttttttttttttttttttttggatagagtcttgctttcttaccaggctggagtgcagtggcatgatctcggctcactgcaacctccacctcctgggttcaagccattctcccacctcagcctcctgagtagctaggactacaggcgcatgccatcacgctcagctaattttttgtatttttagtagagacggggtttcaccatgttggccaggatagtctcgatctcttgaccttgtgatctgcccgcctcagcctcccaaaatgagctaccatgtggctggagatgggatttctaaatagtgacattttctgtgttcccacctcatgctgtaaaaataggggccaggtcggcaggagtgattgaacagctgatgcctgcctgtgtacatgctgtgtggcattctccatccagacggcagggctcctgcctcagttccagaggtgcttctcgtcgttgagttgctttgagttgggggcgggggtgacaagggttccctagaggttttgtggccaactttgtacattgaaacgcagctccagctgcgcaggggggcttacagcctcttgatgggaagaggcctcactgaggatgctagtagggctcttgtcctggcactggtgtgtatctgtggcttgttaatactcctcttttatagaaacactaatactttgtttcaaaatatacatcagctcttctggtttgcgatgataggttccctggcttcactattctgtttgttaacttgggtctctgaaagttgagtactagtttcttgtttttcaatttttaacggatagtcaccaaagattataatgtcttttcatctggctgtagtaaatataaatggctgaccaaaatacacttttatttatttcctaaaaatggtaatctccttagaaagtctggttttcgtgtcagattcccaccataattctgaggcaattcagttgctcgtggttggtgatcctgaagttactcttcccacacatcttcactaatgcaatcactttgctgttgtgtggttttcttgtagctgtgcggccccactctgccccagaatacgaggatgaaaccatgacagtttaccagatccccatacacagtgagtatgaaagccaggtttcccaggaggagggtgtacgtcctgagtaaagaaaacatggatgaaaatagaaactgaacacttgctgtgggcaccctgttttgtgttctgagcatgattagaaaatttagttgaggaatgaagatatggctcctgccctggcttataaacttacggatgtctgacttatgcctaatgatagtgattatgctttggaatattagataatcaagcactgttggtaaatagattgcattcaagtttgcacattcattgcttggaggttttttcccacaggcgtaataccctcttttgatcagacgatcatgaagaggtttgcacagatagatttttttaaataaataatgattacagcaacctaaaagaagtgttgttgggggttagaagctcctgcaaattccgaagtatcagggccagatgatgtggtcttagcttaggaaaagagttagtcttgtccttgaacttggctaaagacattcatgtctggttttacttacatgtgaagagagtaccaagcagtaggggtatttccttgttagtactaactaatgtgatgcttactaagtagtgctgatgggtgacagaccagagcacccagcaaaggccagagaagtccagaacctggcgaggagatgaggcttacactgactgaaggcagaaggcagcagggaggagaggaatgtgccggagcaatggcacaagtgctcctaggccagtgctgtgatgagctgatcagcactcccattgcctggcttgctcctcctgctcagatgccttctctcacctgacccctgctgtagccacccccagcctgagttgcatccacctgtttgttgtccatttccagcaccctgttcttcgctccatggcatgtgacagttaactttcatatgtgatttgcgtgatcgatgttaacatgctcagttttgccgatcactgttttttcagtgtccagcggccctcagtgagtgaacttacgttcattctcgttgcagctgtgctttagcttcttagagcagcgaatttttttcccttgatcttgagccttaactaaatgtaaaatgaggctccttcttgagataggtaccctttgggtctatgtgttttagcgggagtgatgataataaataagcatgtctacaacccacatgctgtttagataacacgttgttgagttggtactgtggccgaggctgtgagctaagcagaaacataaacattaataggacataggtgcagcccagaaaccaggtaggaagttaactaactagttatttcctactgtatagtaaaaggtgtgctgatttaattggcgttctggcattcccatgtatgaacgtctgggccttggctgtcagctcaccttgtgcagtgtgtaatttggtggtatctgtactgaccaggtgaacagaggaggggaaagcaccaaccatggcagagtccagaaaggcctctcagcaggctcagtccagagcgatcttcagactccgagtcgaatgaaaatgagccacaccttccacatggtaatagtataaacaaaacagagcagcagaaaggcttgcgttttcttaattctctgccttgtaatgcttgtagagagtcattattgtaagaaagccaggtgtgtaaacagatccttcttcctgggcttactataacttggcccgttgggggaatgagaagggttgttgtaaaggtggcagcctgcaactttaataatgaccagtccacagttttggccacccagggtctgggtaggcccaaaactgtgttctgttttcccagaggagaacagggcctgacaaacggattcattttgtatttttcattaatgtaacatttatgcaaattttccattaatgtggaaactataactgctaagccaatgagacagtcaaatcagtgagaggctctgcacgtcttccagaatgacagcccactgggaaacggagttaaaagtccaagatgagatgtagctcaggagtcaggccgcttcgggagtttgttgtccttaacagaaggtcagcgttggcaaagctcggcagctcctctttctgtcctgaggtcttgtctagtgactgagaacaggctgacccctatgtgctgtccttgtttggatggcaccgggtaaagactgacaccagcattttctctgcaggcctttgaacttttgtgttatttcatatattatatgtgttataaagcacattacaatatatttttctctgtcttctccagtcctaggtgaaatgtgtcatttaaaaaaaatttcacttgccattctaaagtttttctggtgagagttttgtgtttttcatttacgcaaacacatctccacataagtagggaaaaaaagtcttcttgagtatattagtgtcttcagcctttgtattgggacagtagcgtccattaatttttatgtgaagtgaaattaggtatcgggtcataatcagtctgtgatgtcttcacagctttcacatttaccttgtgataatcaagtgtgtttttcctcaggtgttagccagagaagaggggtcagggactcttccctggtcgtagctttcatctgtaaggtaaggaagactttccggagggctgtacatgactggggtcttggtcagcgacctctggtttgcactttttcattaatttgagggtaggcactcctgttacctgagacaagaagagatagcagatcttcagaaaagctgatggaaggccgggtgcagtggctcacgcctgtaatcccagcactttgggagtccaaggcaggtggatcacgaggtcaggagtttgagaacagcctgaccaacgtggtgaaaccctgtctgtactaaaaatacaaaaattagctgggtgtggtggcgcatgcctgtaatcccagctacttgagaggccaaggcaagagaatcgcttgaacacaggaggcggaggttgcagtgagttgagattgcaccattgcactccagcctgggtgacagagcaagactctctcaaagaaaaaaaaaattcgatagaaatgacactggcaatgagcctgcaacaagtattactactgacctttcataattgtcatcacttgtaggtttcagagtttagatgctctgtttctcaaaataaccccatacttttatttccttttaaatttttttccagtgccctgtcagcctccgtacattttttttttttttttttgagaccatgtctgtctccatcgcctaggctggagtgtgcagtggcacaatctcggctcactgcagcctccacctcccaggttcaagtgattctcctgcctcagcctcccaagtagctaggattataggtgcgcgccaccacacccagttaatttttgtatttttagtagagatggggtttcaccatgttggccaggctggtttcactcctgacctcaggtgatccacccaccttggcctcccaaaatgctgggattacaggcgtgaagcactgtgcctggtccatattcttttatatttgccaatgattggtccttttagaattcagaaattattgaaggcagctgtgtttgttttccttcaactccatcaggcctttattcaaagtcttttaactctgttttactttatttcattcccctgcaatagctaaggtctaacaccagattaattggaatattagctagcattcacaaaggcctagatctgtaactctgaaattggtcaaattccattaaaaatttttgttacaataagctgtttgtaagatctgactagtggcttatttttaatagaattttgcattaaaattttatcaatacaatttgcaacaaatttgtctaaatatgtgaaaagatttcattgcctttttgtgggcttagattattttttaatgttgattttgaaatatatttggaattgttatctaaattctaaaagctacaagtgaaaataataatgaaagtaagtagttaatattagtggcaagatcattgccagtatcatttctatcgatttatttgaataatgtgattttcataaaagttaagtactactgttaacaggcttattacttgtatgtttctgagttttagatagcaaaatcattttttaaagttttaaaaatattttatttttgataatctatatttatattgtctgatttttaaactgttttctatggtaatctttaaatcgtattcctgctttccggaataggtaacagtgagcatgatgaaaagtgacaagctcacttttacacactcgggcagttgccctattatcaggcagccgttcctgggggctgccagctgcctgccctggcttttccatctccttccttgctgtcttctgcggctccttctgagggctgctgtcactggattagcctataacgcctttcccctcttctaattaatttgctgctctcaggtgaggttttggaaagcaataaagctgagctaggtcaagttccaggagtctcttggcatgaggacctgaaaaactcatctgttggaagacctcggctttgggcagctggtgcactgttggggcgttattggctgcgttctggctctcatcagtcttccagatactctgcattcctcagagaggaacatatctccatgggttgagttcagctcccagggagatgggtttccctgccttaagtcggcaagtacctttttttttctttttttgagacagagtctcgctctgtcaccaggctggagtgcagtggtgcgatcttggctcactgcaacctctgcctcccagggtcaagcagttctcctgcctcagcctcccgagtagctgggactacaggagcgcaccaccatgcccagctaatttttgtatttttttagtagagacggggtttcaccatgttggccaggatggtctggatctcttgatttcctgatccgcctgccttggcctcccaaagtgctgggattacaggcgtgagccatcatgaccagcctttatgtttctttgtttgttttgtttttctgagatggagtctcgctctgttgcccaggctggagtgcagtgttgccatctcgacttactgcaacctctgccttccaggttcaagtgattccttgcctcagcctcccgtgtagctgggatcacaggtgcctgccaccatgcccggctaatttttgtattgttagtagacacagggtttcgccatgttggccaggctagtctcgaactcctgacctcaagtgatctgccttcctcagcctcctaaagtgctggggttacaggagtgaaccaccatgcccagccttcaattaccttttatttattttatttatttatttatttttgagacggagtctttctgtgttgcccaggctggagtgcggtggcgcaatcttagctcactgcaacctcctcctcccaggctcaagtgattctcatgcatcagcttcccgagtagctgggacttcaggtgcccgccaccacacttggctaatttttgtgtttttagtagagacggggtttcaccatgttggccaggctggtcttgaatttctgacctcaaatgatcctcctgcttcagcctcccaaagtgctgggattacaggcgtgagccactgcccccaacagcaagtaccttttaaacattagagacatttagttgccatcctcaaacccgtttgggtgtgtggagagaatgttgggtcgtgacatggttgttagttatctaaagatgtcagccatcaatcatcactgtgtgatgtgcacactgaagctgtaatccttcatctaggatgatattttttaagatggaaaattctacaaccctgagaataaggatttcagatccaaatttgagactcagccctacgagtaactctttaacttcagagagttaaaagaagatgcacagttgatgaagatttaaaggagaaaatggaaatcaaatgtcatttagcactcaaaggcctacatgtcatttctgacatttttctgtttgtgtgaaattttttttttcctataaaatgattgtgaagttttctggtagaattattgtttgcctttctaatgtaatagcatattagggtttttttttttttctttttctttttttgagacagagtctcactctgtcgcccaggctggagtgcagtggcacgatctcgggtcactgcaatcttccgcctcctgggttcctgcctcagcctcccgagtagctgggactacaggcgcacgtcaccacacccggctaattttttgtatttttagtagtgacagggattcaccgtcttagccagggtggtcttgatctcctgacctcatgatctacccgcctcggcttcccaaagtgctgggattacaggcatgagccgctgtgcctggctattagagattttttattataatttatctccaagataaaagcagtgacattatattgccacataattgaaaaatacaagagaaataaaaatcatccatgcttttgttagcctatcactgtcattgaaatattatgttacatggcagtttgcttgctggttgctctgttaggcaacgctctggtgacattcctttagctattaattgaggaatgtagaatgacagaacagtgtttctcctcaatgatacttgaaggatatttattaactttcatattgaattacattttattaaatttataatgagttaatgctgggaaataaaacactgatttaagtcattttggcttttagtactaaagcatttgacaataaatgacttcttcagaatatggtataccttctgaaagcaataaacgcattttaatgaattgtaaggaaacaacatcattttattttttatttttttttttgagacagactttcgcttttgttgcctaggctggagtgcaatggcgcgatctcggctcactgcaacatccgcctctgggttcaagcgattctcctgcctcagcttcctgagttgctgggattacaggcacgtgccaccacgcctggccaattttgtatttttagtagagacggggtttctccacgttggtcaggctggtctcaaactcctgacctcaggtgatctgcccgcctcagcctccgaaagtactggaattacaggcgtgagccaccgtgcctggccaacattattatttttttttaatctagaaaaatacacttctaagaaaattgattaaaaccaaccttcttcattagcccctaagatcacatctatgttctctttgttgcagcttcacttaaagagaggaaacttcttggtgctcaaagcaaaggagatgggcctcccagtgtgagtgtggggggtaaggcttctggggactcactgggtacacctgtccacttaaggaaatcacatttcacagaggccttgcctcttcatttcagtgggacagctgccatcgctcccatcattgctgctgtcaaggacgggaaaagcatcactcatgaaggaagagaggtgagatgcctggttttcttgattcagcagttacaggtagggtctgaaatgctgggcagagtctgtcttcttcaggccctacagacaccacttttgaaggacgtggaacagtttggacatcactcagctaagtgataaaatggcctcttttatctgtgtttgtcccgcatgtcaacacggctgcattcgagcatttttgtagattgtccatttaggatctagtcaccgtcctccttaaagggtgcatgctttccttggtacttgagctcaggacagtgtctaacaacagaccccatatggatgggcctggggtttatggtccagaggaatgccacagtattctatgtcaagatatttcctctgacttctgaggacattaggaccagtggccacagactgaagaaaaccttaatgccaagcctcctttcctggccagtgtaggcctgaagtgcctcaacctgacagttacctgtttaggtatccacaaagagaccagaagggtgttgatggtgatgtgtaaagttggttttgtgctttgtttacctctcagctcactggataggatatgtcatgttagcagttgccttgaaggcagttcagtttggtggctgagctgtgacccccagtgggcgggcttatttggttttgcagattttggctgaagagctgtgtactcctccagatcctggtgctgcttttgtggtggtagaatgtccagatgaaagcttcattcaacccatctgtgagaatgccacctttcagaggtaatgaggggtctctagggtgggagaagtgagagctgaaacccagcccagcatcgacatgggcatcttgtggcaagagctgtgtttctgggaagaccactatctgggtttacagttcagaggccggcactcctgccttaagtcactgttggtagttggtgggctccggtgtacacagcctcaaagtgaaattagaaaagattgaaaactagaaacaactgaggactagaaattcaactagaactcttacagctcttataccagaagaaattctagaacttttttgaattctaactaatgccccagattatcatttggattattttgaactgaattaattttcttccattacctgcattgaaacaaatgaggtgggtcagagtgtgtgagactgtcgtggtcaagagtccgtgttatgggatggactcacagctggggaatgtcttttgggctaactgccactctgttgttgtcctctatcgaagttaaccagttttgcggttcagctttcattccagatggaatcatctttgacccacctatctgagtttgaatcttttcccccactcttaatggtttacctgtatttttcctgttcctagtttgtatctatctgtattttttcacttgtttttttctacttaccacaacaaatccttttgggctgctgtaccccttccgagtcagagcgttaggagttgtttcatggtctgctttattctctgtgggtgaatttggatgcgctggtagccccggctttgtattttaatccagttttgggcagcaaaacctcttcaatgaatcaggtgtcatttgagagccatgtgtggatgtgtgatgatgctgggatagataaaaatagctactgtgtatatttctttttaaagggaactggagggaaacacatcagcatgttagtaagtggtctgttgtccaggtggtgaaatttcagatgattttcatttctcgtgcctgtgtctcaggtcctctggaaggcagacaccagggtggcattggaggtgcaggaggtttattcgaggaaatttgactgtgagagaggaaggagagagggagcaggaggaggcagggagagcctgggtctggctttgcaggttggacccgtatgagtggagagggtaggaaggaagtgcagtgctgagaaaggatcagccaggcctactggaaagcccagagcagagcttgccagatacaggaatcccacgtccattggaaatggcccagcaccggggtctgccgtgagcagcctgctgtgagagcatggcctgggcgtggaggctgtcagctcactgcagtgctgcagagggccgcacgatacccctccctggctgcgtggtccctgtcttggtgtgtcctgagtctgcatcactttgtaaagccccactcttctgcccaggtaccaaggaaaggcagatgcccccgtggccttggtggttcacatggccccagcatctgtgcttgtggacagcaggtaccagcagtggatggagaggtatggagcccagcccagcggcacttggggtaactcttctgggcagtggtggattcccctttcctcccctcgtgctctttccagcgctacctacccttctgcacctgcctaaactttctgtgggattcctgccttcccagaattctaggcttcccagatctgtgctacactcgtgaagaaaatgcaccgctaggtggcgcagtgtccacacgattccatttattttacaccctccacactcttcagggtgtctgaacaaatactgccgtttggttgaggattccataagtgaattccaaagaagagattgcagctataaaatgatagcttccatttactgaatgcccactttgtgggaggcagtgtgtgaaatacccttcatttcacttcatttcctctagggtcgtcgccagcagccctgggaggtagatgtttagtcactggaaggcatctttttcctcggggcatcgctggccagggccaggtggaggagtatgagttgagctcgggtgcggggtgaccttgggctgctttttggcccctgcccgtatctccccacatggcccgtttacctgcccctcactccatggcctgctctcctgctgtctctttcattcctcagggtttgggtcccctatttgtatgccctggacatcttctttttcttgtttttcctctcactcttcccagcacacctgaaaggcagctgagctagggaacaccgggctttgagacagcaggagtgggaccatgtttggccatgtagtaacactgcttggggcaagtcactgaactgtttgaacacctcatcctcattaccactcctgagctcagcaccactcctcagggggagctgcctcctaacagacgctgcaaatgccgggtctgtttcttcacaggtttgggcctgacacccagcacttggtcctgaatgagaactgtgcctcagttcacaaccttcgcagccacaagattcaaacccagctcaacctcatccacccggacatcttccccctgctcaccagtttccgctgtaaggtagtgtctcagaccggccccttgtcggcccagctctcgtcccctctctttctctccatgaatgtgttttgtctctttcagaaggagggccccaccctcagtgtgcccatggttcagggtgaatgcctcctcaagtaccagctccgtcccaggagggagtggcagaggtctgtgccatcttgaactaatggaatcgtctcagtcgagttgggaaacatttctgtaaatagccacatagtaaatgttccaggaggctctccagaccatatggtctctgttgtaactattcaactccgctttgagcacaaaagaaacacggacaataagctaatgaatgggcttggctgtgtgccagcgtgaatttatttagaaaagcagcctactccaggctgggttgaggtgggcggattggggccagtagttctccttttccaaaattgccttgcatgggaatagcagtgatagagctcgtgtgtttcacagtatagaaaataggaaatgtgtgatgaacaaagtcacccataatcctgttgcccagagataatgattgataacattttgtgtttcttgatttgtgtatgtgggtttatattgtcagtcttttcctgtatcactaaacagtcttaagtaacaagatttttattggtattccaaatagggatgtttactcatttgggatgtttccaattttttgttgtttttaatgaatgaaacaataaatgtcttatatataaatctttgatgggaactctgttcccttcaagtcattcctaaatgtgggattactggcccagagtgtgagacttgttaaggtacttgataaatgtaagatgccatcttgaaagcctcttccagtacaatccaaccaggaaagtgaacagccttactgccccacatctttattttaattaattaatttatttattttatttatttatttatttttttgagacggagtttcactcttgttgcccaggctggagtgcaatggcgtgatctcagctcactgcaacctccgcctcccgggttcaagcatttctcctgccccagcctcccgaatagctggaattacaggcgcctgctaccacgcccggctaattttttgtaattttagcagagacgggtttcaccatgttggcaggctggtctcgaactcctgacctcaggtgatccacccacctcagcctcccaaagtgttgggattacaggcgtgagccgtgcccggcctgttttaatttttaaggatctgaaccttgattttaagtttcctgcccactccacagtatttgtattagaatagagcatgtgctggattatgactggatgctgtgtgctgttgaggttgggtagttggggccctttaagagactatactagcaagactcgggcccacaggcaacatcacggggttgaagaacctggtgtccctttgttggcatctgcgcaggctcttaacacacagcagcgatacacagccctagccgacattcagatttaccttgtgcttgtgaaaaatattgcacagggcctgccctagacctagtgaattagaatcttgagagttaggcttgggactcacaagctcccagatgattttaatgctcagcgaggttgaagagccgcctgtccaaggagttgccactccgtgtgatctggggcttgctaggaaagtgggatctcaggcctcactgcagagctgccgaactggcttctgcgttttgccaaggttcctgggtgtgaacatgagtttcagagtcactcctctagggcccctgcttctcagctcggaccattgacccctcagaggacatttggcaacatctggaaacgttcttggttgtcacagcctaggaggtgggtagtggtgctgctagtgggtagaggtcaggggtactgcaccaggacagcagcactggccacagaaaaaaactgtcttgccctgagcatcagtagttccccgttgactggccctgaggcagagcgatgcagcatccaaaaggcggtggagcagacctgccccagatcctagtcacttaaccttcagtgttgatctgaaggaacttcctgcagattgtccccctgaatttattctggacatccccaatggggtctgctgaggccatataccctgtccgtcacctgagatgcttctctctcttcctgcagggatgccattattacttgcaatcctgaggaattcatagttgaggcgctgcagcttcccaacttccagcagagcgtgcaggagtacaggaggagtgcgcaggacggcccagccccagcaggtgagtgggagcccacagagcagcctttctttcctgggctctgcccctgctgctgttttcctagcattaagtggagtgctggtggggcgcattctaacctggcttttcagtctaatccagggcttctctactcagctctacattagaattatagtcattggaggagggggctttggggagtttaagaatcccaattcctggctgggcgcggtggctcacacctgtaatcccagcacttcgggaggccgaggcaggtggatcgcgaggtcgggagatcgagaccatcctggctaacatgatgaaaccccgtctctactaaaaatacaaaaattagctgggcgtggcggcgggcgcctgtagtcccagctactcgggagactgaggcaggagaatggcgagaacccgggaggcggagcttgcagtgagccaaggtcgtgccactgcgctccagcctggacgacagagtgagactccgtctcaaaaaaaaaaatcccaattcctgtgccccatcccacccaatcagagcatttggcgatggcacccaggcattcttggcaaggcacgcactgagtgaaacgttttagtgaacacctgtggaaagagctctgagcagggacttggctggcagagatctagtcctggctttgcggatgcaaatccatggaggatcttggccacgtcactcaactgaggctgagggccgggcacaggctttggaaccatcgggtctccctggatttgaatcctgaccctgcctcttaccatcttcactggagacctgggcgtctgagcctgtttcccccttgggaagcagagcatttcctacctggtagggctgggaggatgcgaccgaagtgcatggtcttgcagtgagagctggatgcaaggcacacactgttctcttgaaataaatgacagttcccagcataaagaaatgtcattttttaaatgtaaaagaattacagcaattcttttgaagaaaggactggagaatttatttgttcttcttagccttttggtgacagatagcctgtgggtcccacactggtgcgaagtcctttgtttcagagcggttgccaggggcctgccagtccccctcctgggaagctggatagaactatgttgcttacccatctgtcttagtctgtgttttgttattataaaagaatatgtgagactgggtaatttatcaagaaaagaggtgtatttagttcacggttctgcgggctgagaattgaaggtcacggccctagcttccagtgaaggcttccatgctgcatcataacgtggcagaggagcgcaagtaggaagtggacgcttgtgaagacgggataacctgagctgcactctggctttataacaacccccctctcctgggaacaaatccattcccttgagaagtaatgcagtctcctgagagccagtacttactactgcagctccaagccactcaggagggtccgtccctgtagcccaaacgccttccactaggccccgcctcccaaaaccgccatactagggagcacgtttccacatgaggtctggggacaaaccaatgacactcaaaccattgcaccttctcatggctgcatgctggctcacttttgacccaaaggaatggattgtttcacatggattttttcacagagaaaagaagtcagtacccagaaatcatcttccttggaacagggtctgccatcccgatgaagattcgaaatgtcagtgccacacttgtcaacataaggtatgctgctttcccaggaagcatccttccatcaagggcacgtttactttttaaacaaaagtcctgctgtactcaccagtcgatttgaaatgcggtatcaagccctgtcacttgtcatgtcgactggagtgtccaggagaggagcgtggccttactgcattttatagcctcagtagcaaactttaccctgggaatcaccaaaattcatcccatgatgtcttttaataaacagctgattttactgtgggcagtacacctagctaagaaattagctcctttaatttttacattaatcctatgaagtggtgaataactacccattttgttgatgagtgacctgatattcagagaggtgacttgctatggttcctacagctggtaagtggggcatctgaagtttgagcggggacttggggtcttgattgctacatggtattgtcccccagccatttgttggtagtatgttaaaaagctttagggttttgcacatttgtgttcagaacctttattggattccccttgacatgttttttagttgattctcttgggtttgcctggggtcatcagcagagagattagtcaaatgcgttgtgacatgtacacgttatctctacagatagtatgtgaagaaaataagattgtgaattaccaggtttgttttaaattttgctctgccatcttacatgctagtggtggatgataaacaaccaaatagtgcattaaatatatacagcagtgacgagatgtgccctgacatcagaaatatacaatctggggtgtgtttctctgtggatgaggacatgcaataaagcagcttggagtgagccggcctctcccgggggctgagatcctgggggaagaagggctttttgagtttgacctgacaccctgcgagcagcttttgaaccagctgaagctaatgggaaggtgctattgccaccttgcctccgcctcccgactcctttttcccccagaaggtaatgtcttagcaccggggcttctctctgcaaaatgggtgcagccctctcagtgttcgtggctcctcccagagaatgaaggaggccagagcgggtcagcactctctctgccttggagcagagcttctgaaatggactgcacagcagaatagcccaagaagtttgtcagaatccagacttccagagccctgcctaaaaccaagtcagaaaccccgagtgacacctgggagtctgcgttaactggctccctgaatgaagcacctgcagcccgccctgcaccaggtgtctttgaggacatgagctgaggaaaccccgaccacttgcaaagggggaaaagtccgatggcagctggacctagaaagagtctcatatggcccagtgcctgtcctggtattttcaacagaggctgtggccacagtcaatctgcatggtcagattcattgttaggactaaatgctttaagcctcctataaactttttttttttttttttgatgcccagcctttgtgtaagtctacttgaaagggtttcagggttccatggatacttctttgctataaagaggatgacacatgtaaaatcacctttatggttaaattaattggcttttatattagctcctcaaagcaaagcaggagagacagaaatttctgcagttgcttcttggtcctgtccaaagcagacatcagcctctgaaccatcagcagtcttcctagtggcagtgactctcttcctcttctcttctgcagccccgacacgtctctgctactggactgtggtgagggcacatttgggcagctgtgccgtcattacggagaccaggtggacagggtcctgggcaccctggctgctgtgtttgtgtcccacctgcacgcagatcaccacacggtgagtgttgggctggaccacaaagctggagcctggaggaggcactgccacgttgagttggccctttggctgcgtcttttcctccgcttccaaacttgcccagagcttttgttactcatctctggctaggaaatggttttttgcaaaactcaacatagtccttctgcgccacaagaatgtcttctcttcctgttcagttcctttcctgcagcaggacaggtttgagtttacccagccttccttgagtcttgaatctcacacggcctgctcagcggaagctttgaccggatgcaggaggtgtggctatgagaccctcaccttggtctcctggggtgccgggccctgggccgttgccctcttcccagcacgggtcgtgtcgctttctgcctgtgacatttcagggccatggcgcagggggctcggcctgtgccacccccactgcggctgtgttagaggctggtgggtgacgtcgggctggcaactcctgcaagagagagggctgcagaccctaacccggaggggatggccctggggcctggctgacgcatgtctcctgtttccttgccagggcttgccaagtatcttgctgcagagagaacgcgccttggtaagtgtggcacttgatgggcgttctgagtttcagcggtttacacatcatccgccatgcctcttggcactccagtttttattgagatgttctgtcgtcgagtcggcacttgcattttttgttccaggcatctttgggaaagccgcttcaccctttgctggtggttgcccccaaccagctcaaagcctggctccagcagtaccacaaccagtgccaggaggtcctgcaccacatcaggtgagcatccagggcagcctggcccgctgggctgttgcttgctgccgtctccttcagaagctcaaggtggacactggggtagttaccaatatcccccagcagccttgcccttgacatggtcccagatggcagaagcaggggagaagtgcattggctgaaggacagaaaccattagatagttcccatgtaatgcttattttcttagaagcatttcttcccagtcctcatttgagttctgagctgctttctaaacttcgagcagcttttcttgatgagacagttccagagccaagcacccaaatagtggctagcacagagaatgtccatagcaggtgtgtggctagctggcaggtggcaccatcctcaccccaaggggaaggagtcccctctgctggagccatccgtggcccgtgctgcctgagccggaggcagcattcacctgctgggtttctcccagtggcctagaggctttggtttggctctttatatttgactgctgtttcctcatcatagtgactatgatttaactcatgttttctcctaagaatgattttggggttctccagccaaagacttaaactttggttccagatgtccaagaaacgtttattatcattttaaatgttttgtctttttacagtatgattcctgccaaatgccttcaggaaggggctgagatctccagtcctgcagtggaaagattgatcagttcgctgttgcgaacatgtgatttggaagaggtaaggggcacagccgcaggcatcatgggggcgaggtggggagcagagctgcagagccctccagccccaccctttcagtttcagacctgtctggtgcggcactgcaagcatgcgtttggctgtgcgctggtgcacacctctggctggaaagtggtctattccggggacaccatgccctgcgaggctctggtccggatgggtgagtagaggaagaagcaagccaccctgaggttgctctggggtttgtgtagctggaggtgaatgcaggtgggcttgcagggaaacgtcagcagaggcaggagactcaggtccccaccctcagagtctctggttgtcatcctagtaggcagacccagggccaggggagctgagtgttgagaccaggaaacagcacgtgactgaggcctgtgtgccgctctcgcagagaactctgccctgatccttgtgctgcttctccagggaaagatgccaccctcctgatacatgaagccaccctggaagatggtttggaagaggaagcagtggaaaagacacacaggtagcaaaggccggtcagtccttgtcgcccacatcctctccctcccccactacgtgacactgagcagccgtcgtttgtctccactgatgtggggctgccctgcttcctatcaagggctatgggggcttccttgacctgtggcagtgctcacaggctcttggcctttatttttgcagaattttctaagcaagattctagagtgaggcacagttttttgaaagcatctagaaatcggctgaataaactataagccatgtcagggaattgccaggggaaggcgggggctgggggactgaatttttggctgctaatttcaacgaaagagtgcattaccccaggtgggccctgtggtttctcttgggtgccctcatggacagatttggcagccagcacagagggtgggcttcatccaggggtgtgtgcgaaggctctggccctcaggggagattgtgctggctacggaggtgcccgttaagaaaacccaccagcttccccgggtgccctggcagttgatggccagggtctgtgccactgtctgctttgcagtcttgcagttgagttcagcttcagtctgctctgtccttcacctgcagcacaacgtcccaagccatcagcgtggggatgcggatgaacgcggagttcattatgctgaaccacttcagccagcgctatgccaaggtccccctcttcagccccaacttcagcgagaaagtgggagttgcctttgaccacatgaaggtctgtatgtcacacggacagcacagggcggggacggggcagggagacaggactctacacactgagtaggacggtcagctggagtttgctttcttatttggggccaccgtgggaaaaggttatctacccatcactaaccaggtcgaaccaccctgggtttgctggtgagacccacctcctgcaggggccaactagtcttcagtctcagttcactggaaatttctgagaatccttttaggcctggactgctcacacagtcatggcatttgagcctcagcacagacctgtgagacaggtggttgcctcttgtgagtgggaaagccaggcctgacccttggccttccggaatgaaggggcagagccggagccaggcctcgtttttcaggagcttgattttgagagcatctggactgctctcccttccctctccggaggcccttagccaggcctggggagcctctgcccctttagagggttccctccatgccattcttttttccatttcagctgtggcctgttggcttgtgccaaggaaggggcgttggcgctgctgtgtgagcacatgactgcatcccttccagctcctgtcccccacccctgcccctctgagacatgtccttgtcttctattgtgtcttctaggtctgctttggagactttccaacaatgcccaagctgattcccccactgaaagccctgtttgctggcgacatcgaggagatggaggagcgcagggagaagcgggagctgcggcaggtgcgggcggccctcctgtccagggagctggcaggcggcctggaggatggggagcctcagcagaagcgggcccacacagaggagccacaggccaagaaggtcagagcccagtgaagatctgggagaccctgaactcagaaggctgtgtgtcttctgccccacgcacgcacccgtatctgccctccttgctggtagaagctgaagagcacggtcccccaggaggcagctcaggataggtggtatggagctgtgccgaggcttgggctcccacataagcactagtctatagatgcctcttaggactggtgcctggcacagccgcgggccaggaggctgccacacggaagcaagcagatgaactaatttcatttcaaggcagtttttaaagaagtcttggaaacagacggcggcacctttcctctaatccagcaaagtgattccctgcacaccagagacaagcagagtaacaggatcagtgggtctaagtgtccgagacttaacgaaaatagtatttcagctgcaataaagattgagtttgcaattgtgagttcttttgcttcctcctgctgctgctacagagcagggtctgctgtgcaccaccttggagaaggctctctgtgctgtagtgtggcagctgcctggtacccgggtggcttggaagaagtcagctcccgtcgtagtgagcacctctggaacctgtcctcagagagccacccttattcgccaagtctttttgacaactcgagctgtgccagctcacagcagggcgtgctttctctatcaatcaatcaatcaatcaatcaaatcaatcagtgagagcctggctgggctggtgtcattggtcagggaaatgcaagtcttctggtggttctgggtaaaagtggagacaatagatttgctgtgttgttgcttccatactgagaggagtgaggatcactttgccctcgaaggttttgagaaatggcacacggggctggtttccattgtcctccttgcgggatttacagacgtggattagtgctcgacaaatggagagcattttccaaggaagtaagtaagtaaagtaagtaagtaagtaagtaagttgaatctagtatttattgtgtatattccctacccaggagaatgtaaaaagaagagctttaaaaactcaaaagacaagcaagcgagagatcagccagggacctggctttacacaggtggtgaccttcaggctccatcccggtgtgcatttgagattgacggccatgtccccgcaggtttattaaagcaagaacagatgccaagctcagggataataaatctattttaataacgtta

SEQ ID NO: 11805 - DNA, 3767 bp, Homo sapiens
atgcggagcggctaggtggtgcacgggaaacgcgggcgtaggtgaccggcggctttctcagttttggtggagacgggcgcatgtgggcgctttgctcgctgctgcggtccgcggccggacgcaccatgtcgcagggacgcaccatatcgcaggcacccgcccgccgcgagcggccgcgcaaggacccgctgcggcacctgcgcacgcgagagaagcgcggaccgtcggggtgctccggcggcccaaacaccgtgtacctgcaggtggtggcagcgggtagccgggactcgggcgccgcgctctacgtcttctccgagttcaaccggtatctcttcaactgtggagaaggcgttcagagactcatgcaggagcacaagttaaaggttgctcgcctggacaacatattcctgacacgaatgcactggtctaatgttgggggcttaagtggaatgattcttactttaaaggaaaccgggcttccaaagtgtgtactttctggacctccacaactggaaaaatacctcgaagcaatcaaaatattttctggtccattgaaaggaatagaactggctgtgcggccccactctgccccagaatacgaggatgaaaccatgacagtttaccagatccccatacacagtgaacagaggaggggaaagcaccaaccatggcagagtccagaaaggcctctcagcaggctcagtccagagcgatcttcagactccgagtcgaatgaaaatgagccacaccttccacatggtgttagccagagaagaggggtcagggactcttccctggtcgtagctttcatctgtaagcttcacttaaagagaggaaacttcttggtgctcaaagcaaaggagatgggcctcccagttgggacagctgccatcgctcccatcattgctgctgtcaaggacgggaaaagcatcactcatgaaggaagagagattttggctgaagagctgtgtactcctccagatcctggtgctgcttttgtggtggtagaatgtccagatgaaagcttcattcaacccatctgtgagaatgccacctttcagaggtaccaaggaaaggcagatgcccccgtggccttggtggttcacatggccccagcatctgtgcttgtggacagcaggtaccagcagtggatggagaggtttgggcctgacacccagcacttggtcctgaatgagaactgtgcctcagttcacaaccttcgcagccacaagattcaaacccagctcaacctcatccacccggacatcttccccctgctcaccagtttccgctgtaagaaggagggccccaccctcagtgtgcccatggttcagggtgaatgcctcctcaagtaccagctccgtcccaggagggagtggcagagggatgccattattacttgcaatcctgaggaattcatagttgaggcgctgcagcttcccaacttccagcagagcgtgcaggagtacaggaggagtgcgcaggacggcccagccccagcagagaaaagaagtcagtacccagaaatcatcttccttggaacagggtctgccatcccgatgaagattcgaaatgtcagtgccacacttgtcaacataagccccgacacgtctctgctactggactgtggtgagggcacatttgggcagctgtgccgtcattacggagaccaggtggacagggtcctgggcaccctggctgctgtgtttgtgtcccacctgcacgcagatcaccacacgggcttgccaagtatcttgctgcagagagaacgcgccttggcatctttgggaaagccgcttcaccctttgctggtggttgcccccaaccagctcaaagcctggctccagcagtaccacaaccagtgccaggaggtcctgcaccacatcagtatgattcctgccaaatgccttcaggaaggggctgagatctccagtcctgcagtggaaagattgatcagttcgctgttgcgaacatgtgatttggaagagtttcagacctgtctggtgcggcactgcaagcatgcgtttggctgtgcgctggtgcacacctctggctggaaagtggtctattccggggacaccatgccctgcgaggctctggtccggatggggaaagatgccaccctcctgatacatgaagccaccctggaagatggtttggaagaggaagcagtggaaaagacacacagcacaacgtcccaagccatcagcgtggggatgcggatgaacgcggagttcattatgctgaaccacttcagccagcgctatgccaaggtccccctcttcagccccaacttcagcgagaaagtgggagttgcctttgaccacatgaaggtctgctttggagactttccaacaatgcccaagctgattcccccactgaaagccctgtttgctggcgacatcgaggagatggaggagcgcagggagaagcgggagctgcggcaggtgcgggcggccctcctgtccagggagctggcaggcggcctggaggatggggagcctcagcagaagcgggcccacacagaggagccacaggccaagaaggtcagagcccagtgaagatctgggagaccctgaactcagaaggctgtgtgtcttctgccccacgcacgcacccgtatctgccctccttgctggtagaagctgaagagcacggtcccccaggaggcagctcaggataggtggtatggagctgtgccgaggcttgggctcccacataagcactagtctatagatgcctcttaggactggtgcctggcacagccgcgggccaggaggctgccacacggaagcaagcagatgaactaatttcatttcaaggcagtttttaaagaagtcttggaaacagacggcggcacctttcctctaatccagcaaagtgattccctgcacaccagagacaagcagagtaacaggatcagtgggtctaagtgtccgagacttaacgaaaatagtatttcagctgcaataaagattgagtttgcaattgtgagttcttttgcttcctcctgctgctgctacagagcagggtctgctgtgcaccaccttggagaaggctctctgtgctgtagtgtggcagctgcctggtacccgggtggcttggaagaagtcagctcccgtcgtagtgagcacctctggaacctgtcctcagagagccacccttattcgccaagtctttttgacaactcgagctgtgccagctcacagcagggcgtgctttctctatcaatcaatcaatcaatcaatcaaatcaatcagtgagagcctggctgggctggtgtcattggtcagggaaatgcaagtcttctggtggttctgggtaaaagtggagacaatagatttgctgtgttgttgcttccatactgagaggagtgaggatcactttgccctcgaaggttttgagaaatggcacacggggctggtttccattgtcctccttgcgggatttacagacgtggattagtgctcgacaaatggagagcattttccaaggaagtaagtaagtaaagtaagtaagtaagtaagtaagttgaatctagtatttattgtgtatattccctacccaggagaatgtaaaaagaagagctttaaaaactcaaaagacaagcaagcgagagatcagccagggacctggctttacacaggtggtgaccttcaggctccatcccggtgtgcatttgagattgacggccatgtccccgcaggtttattaaagcaagaacagatgccaagctcagggataataaatctattttaataacgtta

SEQ ID NO: 11806 - DNA, 25630 bp, Homo sapiens
agcggctaggtggtgcacgggaaacgcgggcgtaggtgaccggcggctttctcagttttggtggagacgggcgcatgtgggcgctttgctcgctgctgcggtccgcggccggacgcaccatgtcgcagggacgcaccatatcgcaggcacccgcccgccgcgagcggccgcgcaaggacccgctgcggcacctgcgcacgcgagagaagcgcggaccgtcggggtgctccggcggcccaaacaccgtgtacctgcaggtggtggcagcgggtagccgggactcgggcgccgcgctctacgtcttctccgagttcaaccggtcagtcaacgagccacgccccgtcccgctgggccctcagtgcggcgcagcctctgagcatcggggcacctcccagggcttcggcttccctgcttcacacatgtggttcactgttgcgggggttcgtggagttatggtgggtgggaaatccgagattctttgcatccatgtgatttctgcggatctgtgaagaacttcaggcctgggtctgagcgtccttttcccaacccttgggccccggcctggctgtcagcactttcggagctccaccctcttccgtgcaccccaaggccagtgtgtcgttgttagcgtgtggggtggacagatctggtgtgtagccggtggtggagaaaggactcattttgtcctagcacccacacacacaggcccccactcctctccacctctgctaaggagggctcaaaacccaccagcataaatgtggctcggtagtccaacgtggacttttaatttttttttcttttttttttttccagagtctacaataaaacatctaattggtgtcagagagtttacagaataaaaccttctgaatgtcttgtgtaatgtttgtcttgtaggtatctcttcaactgtggagaaggcgttcagagactcatgcaggagcacaagtgagtcagtctcttgctttcggagggggagttgattacggggcttgaaagccgaaatgagaggccagttgttttttatagcaaaagtggtccttgttctgttcatgttatcctgtttaaatgttttttcattcttaggttaaaggttgctcgcctggacaacatattcctgacacgaatgcactggtctaatgttgggggcttaagtggtgagtatattctttgcagtgtcagaggctggtgggaagtctctgggattttaaccggctttaccatttttccaagtctggggtgggcagctacttttttttttttttttttttttgtcagtggcgtgatcttggctcactgcaacctttgccttctgggctcaggtgatcccctcacctcagcctcccaaatagctgggaccacacgtgtgccccatcacacctggctaattttttttgtatgttttgtagcgacggggttttgctatgttgcccaggctggtctcaaacttctgcgatcctcctgtctcggcctcccagagtgctgggattacaggcatgagccaccgcacctggcctggaattctttttataccagcccagtcagcagcagcacagagcattaaaagctgtgactcaggagaacagattttaatatggataccacctcttaagtgttaccatccacttagtttcttgcgttgcggggacagagatttgtggcagtaaactggagagtctagcagtggtgattacagttaatatgtttaccgcagacgccattggcacattggcagccacacacatacccactgtccagattaccctgtcatttatgtctatcaaccggaaggtcaggattgtgttgcagccaaattgtgtgggcttggtggcatggaccggaaggagtgaagtgttagaccagtctcccttctcagggctgagactagggtgaggcacttagggtgccagcccttcacttgcatgattccttacattttgcacactgggtgccttgctgcttcaccctagtgacagctcagcccattctagaggcatttaaagaatatttggtgtctgttacacctctagctggcatcacttctgctctgtacatcttccctggttgtacttccaaagctggaaggtggagatgtagataaatagttggattagtacggggtgctcctcctgttagtgacgacaggtcaaattgatgagagatctgattttatgcatcctttttaggaatgattcttactttaaaggaaaccgggcttccaaagtgtgtactttctggacctccacaactggtgagtctttcctgacacatctttcaaaagcaatctttccttttgtaatatcagtaacaagaattttcctttttgcaaatcagtcttctgccctccagagatacctggtcgttgaaacgcttcccctttcaagttaaaaagacttgagttctgattaactatgtgaccttgatcaagttactttacctttctgagctttagtttattcatctataagatgactatcacgtttcatagagttgttaaagattaaatgacgtagcagcacatataaagcactaaatcactttattagatatatgtttggcaccaagtaggcacacaagaaagggcagcttttgtttttattcaataaatttctgacatcttcttacctttcagtccagcttattacactcttgagaaggcgtgtgtgtgttgttgaatataacagttcattttccagtccttaagaagaaagtcaccaagacctgttaagtctttccccaaaataacgtttgaaatccatccatttgtctcttattgaggccttccttatttctgttttctatgcctgtaaactacaatagcctcccatattcattctcgccttcctgtaatccatctgccacacagcagccagagaggtcacttcaagacagaaaagtagtgtgtcacttgccaccctaaagcccttcatgggctccccattgcaatacaatcaaaacaccttgatatggcctacaagtcctgtaggccccggccgctacccacacttccatctgtacccatcgctgaactgcagctgcatgggctgactcttatgtccctctaactccctggccacttcaggactttcgcccttccgcgggttccctctgcctcttctaattgctgcctatattgttactgaaccttcagggctcagctagagggtcatttactccagaactgcctcttcttctctagacaagttggatcccagccttctgtatttttcattttccttgcagagcacttagcataatgccactaagctgtttctgttatcgtgtttccttttgtctcctccactggcctgattagagcaaggcctccatctctttttcctgctatatccttggcatctgatataatggatactcagtaaatatttgtaataaatgatgttcaaaatatttactaagctttgttttatgttgatacctattggtaaccttttaaatacttgaatagttgctgtgttctacatttgttcaaccataactgctcatttctttgtttttcattaggaaaaatacctcgaagcaatcaaaatattttctggtccattgaaaggaatagaactgggtacgtctttgtctgtgactcatcctctgctatttctaacttatatatgccctgacctctcaaattagaatccattaaaaacatcaacatcaaacctcaaaatcaaatgcttcatcaccacgagatttttttttttttttttttttttggatagagtcttgctttcttaccaggctggagtgcagtggcatgatctcggctcactgcaacctccacctcctgggttcaagccattctcccacctcagcctcctgagtagctaggactacaggcgcatgccatcacgctcagctaattttttgtatttttagtagagacggggtttcaccatgttggccaggatagtctcgatctcttgaccttgtgatctgcccgcctcagcctcccaaaatgagctaccatgtggctggagatgggatttctaaatagtgacattttctgtgttcccacctcatgctgtaaaaataggggccaggtcggcaggagtgattgaacagctgatgcctgcctgtgtacatgctgtgtggcattctccatccagacggcagggctcctgcctcagttccagaggtgcttctcgtcgttgagttgctttgagttgggggcgggggtgacaagggttccctagaggttttgtggccaactttgtacattgaaacgcagctccagctgcgcaggggggcttacagcctcttgatgggaagaggcctcactgaggatgctagtagggctcttgtcctggcactggtgtgtatctgtggcttgttaatactcctcttttatagaaacactaatactttgtttcaaaatatacatcagctcttctggtttgcgatgataggttccctggcttcactattctgtttgttaacttgggtctctgaaagttgagtactagtttcttgtttttcaatttttaacggatagtcaccaaagattataatgtcttttcatctggctgtagtaaatataaatggctgaccaaaatacacttttatttatttcctaaaaatggtaatctccttagaaagtctggttttcgtgtcagattcccaccataattctgaggcaattcagttgctcgtggttggtgatcctgaagttactcttcccacacatcttcactaatgcaatcactttgctgttgtgtggttttcttgtagctgtgcggccccactctgccccagaatacgaggatgaaaccatgacagtttaccagatccccatacacagtgagtatgaaagccaggtttcccaggaggagggtgtacgtcctgagtaaagaaaacatggatgaaaatagaaactgaacacttgctgtgggcaccctgttttgtgttctgagcatgattagaaaatttagttgaggaatgaagatatggctcctgccctggcttataaacttacggatgtctgacttatgcctaatgatagtgattatgctttggaatattagataatcaagcactgttggtaaatagattgcattcaagtttgcacattcattgcttggaggttttttcccacaggcgtaataccctcttttgatcagacgatcatgaagaggtttgcacagatagatttttttaaataaataatgattacagcaacctaaaagaagtgttgttgggggttagaagctcctgcaaattccgaagtatcagggccagatgatgtggtcttagcttaggaaaagagttagtcttgtccttgaacttggctaaagacattcatgtctggttttacttacatgtgaagagagtaccaagcagtaggggtatttccttgttagtactaactaatgtgatgcttactaagtagtgctgatgggtgacagaccagagcacccagcaaaggccagagaagtccagaacctggcgaggagatgaggcttacactgactgaaggcagaaggcagcagggaggagaggaatgtgccggagcaatggcacaagtgctcctaggccagtgctgtgatgagctgatcagcactcccattgcctggcttgctcctcctgctcagatgccttctctcacctgacccctgctgtagccacccccagcctgagttgcatccacctgtttgttgtccatttccagcaccctgttcttcgctccatggcatgtgacagttaactttcatatgtgatttgcgtgatcgatgttaacatgctcagttttgccgatcactgttttttcagtgtccagcggccctcagtgagtgaacttacgttcattctcgttgcagctgtgctttagcttcttagagcagcgaatttttttcccttgatcttgagccttaactaaatgtaaaatgaggctccttcttgagataggtaccctttgggtctatgtgttttagcgggagtgatgataataaataagcatgtctacaacccacatgctgtttagataacacgttgttgagttggtactgtggccgaggctgtgagctaagcagaaacataaacattaataggacataggtgcagcccagaaaccaggtaggaagttaactaactagttatttcctactgtatagtaaaaggtgtgctgatttaattggcgttctggcattcccatgtatgaacgtctgggccttggctgtcagctcaccttgtgcagtgtgtaatttggtggtatctgtactgaccaggtgaacagaggaggggaaagcaccaaccatggcagagtccagaaaggcctctcagcaggctcagtccagagcgatcttcagactccgagtcgaatgaaaatgagccacaccttccacatggtaatagtataaacaaaacagagcagcagaaaggcttgcgttttcttaattctctgccttgtaatgcttgtagagagtcattattgtaagaaagccaggtgtgtaaacagatccttcttcctgggcttactataacttggcccgttgggggaatgagaagggttgttgtaaaggtggcagcctgcaactttaataatgaccagtccacagttttggccacccagggtctgggtaggcccaaaactgtgttctgttttcccagaggagaacagggcctgacaaacggattcattttgtatttttcattaatgtaacatttatgcaaattttccattaatgtggaaactataactgctaagccaatgagacagtcaaatcagtgagaggctctgcacgtcttccagaatgacagcccactgggaaacggagttaaaagtccaagatgagatgtagctcaggagtcaggccgcttcgggagtttgttgtccttaacagaaggtcagcgttggcaaagctcggcagctcctctttctgtcctgaggtcttgtctagtgactgagaacaggctgacccctatgtgctgtccttgtttggatggcaccgggtaaagactgacaccagcattttctctgcaggcctttgaacttttgtgttatttcatatattatatgtgttataaagcacattacaatatatttttctctgtcttctccagtcctaggtgaaatgtgtcatttaaaaaaaatttcacttgccattctaaagtttttctggtgagagttttgtgtttttcatttacgcaaacacatctccacataagtagggaaaaaaagtcttcttgagtatattagtgtcttcagcctttgtattgggacagtagcgtccattaatttttatgtgaagtgaaattaggtatcgggtcataatcagtctgtgatgtcttcacagctttcacatttaccttgtgataatcaagtgtgtttttcctcaggtgttagccagagaagaggggtcagggactcttccctggtcgtagctttcatctgtaaggtaaggaagactttccggagggctgtacatgactggggtcttggtcagcgacctctggtttgcactttttcattaatttgagggtaggcactcctgttacctgagacaagaagagatagcagatcttcagaaaagctgatggaaggccgggtgcagtggctcacgcctgtaatcccagcactttgggagtccaaggcaggtggatcacgaggtcaggagtttgagaacagcctgaccaacgtggtgaaaccctgtctgtactaaaaatacaaaaattagctgggtgtggtggcgcatgcctgtaatcccagctacttgagaggccaaggcaagagaatcgcttgaacacaggaggcggaggttgcagtgagttgagattgcaccattgcactccagcctgggtgacagagcaagactctctcaaagaaaaaaaaaattcgatagaaatgacactggcaatgagcctgcaacaagtattactactgacctttcataattgtcatcacttgtaggtttcagagtttagatgctctgtttctcaaaataaccccatacttttatttccttttaaatttttttccagtgccctgtcagcctccgtacattttttttttttttttttgagaccatgtctgtctccatcgcctaggctggagtgtgcagtggcacaatctcggctcactgcagcctccacctcccaggttcaagtgattctcctgcctcagcctcccaagtagctaggattataggtgcgcgccaccacacccagttaatttttgtatttttagtagagatggggtttcaccatgttggccaggctggtttcactcctgacctcaggtgatccacccaccttggcctcccaaaatgctgggattacaggcgtgaagcactgtgcctggtccatattcttttatatttgccaatgattggtccttttagaattcagaaattattgaaggcagctgtgtttgttttccttcaactccatcaggcctttattcaaagtcttttaactctgttttactttatttcattcccctgcaatagctaaggtctaacaccagattaattggaatattagctagcattcacaaaggcctagatctgtaactctgaaattggtcaaattccattaaaaatttttgttacaataagctgtttgtaagatctgactagtggcttatttttaatagaattttgcattaaaattttatcaatacaatttgcaacaaatttgtctaaatatgtgaaaagatttcattgcctttttgtgggcttagattattttttaatgttgattttgaaatatatttggaattgttatctaaattctaaaagctacaagtgaaaataataatgaaagtaagtagttaatattagtggcaagatcattgccagtatcatttctatcgatttatttgaataatgtgattttcataaaagttaagtactactgttaacaggcttattacttgtatgtttctgagttttagatagcaaaatcattttttaaagttttaaaaatattttatttttgataatctatatttatattgtctgatttttaaactgttttctatggtaatctttaaatcgtattcctgctttccggaataggtaacagtgagcatgatgaaaagtgacaagctcacttttacacactcgggcagttgccctattatcaggcagccgttcctgggggctgccagctgcctgccctggcttttccatctccttccttgctgtcttctgcggctccttctgagggctgctgtcactggattagcctataacgcctttcccctcttctaattaatttgctgctctcaggtgaggttttggaaagcaataaagctgagctaggtcaagttccaggagtctcttggcatgaggacctgaaaaactcatctgttggaagacctcggctttgggcagctggtgcactgttggggcgttattggctgcgttctggctctcatcagtcttccagatactctgcattcctcagagaggaacatatctccatgggttgagttcagctcccagggagatgggtttccctgccttaagtcggcaagtacctttttttttctttttttgagacagagtctcgctctgtcaccaggctggagtgcagtggtgcgatcttggctcactgcaacctctgcctcccagggtcaagcagttctcctgcctcagcctcccgagtagctgggactacaggagcgcaccaccatgcccagctaatttttgtatttttttagtagagacggggtttcaccatgttggccaggatggtctggatctcttgatttcctgatccgcctgccttggcctcccaaagtgctgggattacaggcgtgagccatcatgaccagcctttatgtttctttgtttgttttgtttttctgagatggagtctcgctctgttgcccaggctggagtgcagtgttgccatctcgacttactgcaacctctgccttccaggttcaagtgattccttgcctcagcctcccgtgtagctgggatcacaggtgcctgccaccatgcccggctaatttttgtattgttagtagacacagggtttcgccatgttggccaggctagtctcgaactcctgacctcaagtgatctgccttcctcagcctcctaaagtgctggggttacaggagtgaaccaccatgcccagccttcaattaccttttatttattttatttatttatttatttttgagacggagtctttctgtgttgcccaggctggagtgcggtggcgcaatcttagctcactgcaacctcctcctcccaggctcaagtgattctcatgcatcagcttcccgagtagctgggacttcaggtgcccgccaccacacttggctaatttttgtgtttttagtagagacggggtttcaccatgttggccaggctggtcttgaatttctgacctcaaatgatcctcctgcttcagcctcccaaagtgctgggattacaggcgtgagccactgcccccaacagcaagtaccttttaaacattagagacatttagttgccatcctcaaacccgtttgggtgtgtggagagaatgttgggtcgtgacatggttgttagttatctaaagatgtcagccatcaatcatcactgtgtgatgtgcacactgaagctgtaatccttcatctaggatgatattttttaagatggaaaattctacaaccctgagaataaggatttcagatccaaatttgagactcagccctacgagtaactctttaacttcagagagttaaaagaagatgcacagttgatgaagatttaaaggagaaaatggaaatcaaatgtcatttagcactcaaaggcctacatgtcatttctgacatttttctgtttgtgtgaaattttttttttcctataaaatgattgtgaagttttctggtagaattattgtttgcctttctaatgtaatagcatattagggtttttttttttttctttttctttttttgagacagagtctcactctgtcgcccaggctggagtgcagtggcacgatctcgggtcactgcaatcttccgcctcctgggttcctgcctcagcctcccgagtagctgggactacaggcgcacgtcaccacacccggctaattttttgtatttttagtagtgacagggattcaccgtcttagccagggtggtcttgatctcctgacctcatgatctacccgcctcggcttcccaaagtgctgggattacaggcatgagccgctgtgcctggctattagagattttttattataatttatctccaagataaaagcagtgacattatattgccacataattgaaaaatacaagagaaataaaaatcatccatgcttttgttagcctatcactgtcattgaaatattatgttacatggcagtttgcttgctggttgctctgttaggcaacgctctggtgacattcctttagctattaattgaggaatgtagaatgacagaacagtgtttctcctcaatgatacttgaaggatatttattaactttcatattgaattacattttattaaatttataatgagttaatgctgggaaataaaacactgatttaagtcattttggcttttagtactaaagcatttgacaataaatgacttcttcagaatatggtataccttctgaaagcaataaacgcattttaatgaattgtaaggaaacaacatcattttattttttatttttttttttgagacagactttcgcttttgttgcctaggctggagtgcaatggcgcgatctcggctcactgcaacatccgcctctgggttcaagcgattctcctgcctcagcttcctgagttgctgggattacaggcacgtgccaccacgcctggccaattttgtatttttagtagagacggggtttctccacgttggtcaggctggtctcaaactcctgacctcaggtgatctgcccgcctcagcctccgaaagtactggaattacaggcgtgagccaccgtgcctggccaacattattatttttttttaatctagaaaaatacacttctaagaaaattgattaaaaccaaccttcttcattagcccctaagatcacatctatgttctctttgttgcagcttcacttaaagagaggaaacttcttggtgctcaaagcaaaggagatgggcctcccagtgtgagtgtggggggtaaggcttctggggactcactgggtacacctgtccacttaaggaaatcacatttcacagaggccttgcctcttcatttcagtgggacagctgccatcgctcccatcattgctgctgtcaaggacgggaaaagcatcactcatgaaggaagagaggtgagatgcctggttttcttgattcagcagttacaggtagggtctgaaatgctgggcagagtctgtcttcttcaggccctacagacaccacttttgaaggacgtggaacagtttggacatcactcagctaagtgataaaatggcctcttttatctgtgtttgtcccgcatgtcaacacggctgcattcgagcatttttgtagattgtccatttaggatctagtcaccgtcctccttaaagggtgcatgctttccttggtacttgagctcaggacagtgtctaacaacagaccccatatggatgggcctggggtttatggtccagaggaatgccacagtattctatgtcaagatatttcctctgacttctgaggacattaggaccagtggccacagactgaagaaaaccttaatgccaagcctcctttcctggccagtgtaggcctgaagtgcctcaacctgacagttacctgtttaggtatccacaaagagaccagaagggtgttgatggtgatgtgtaaagttggttttgtgctttgtttacctctcagctcactggataggatatgtcatgttagcagttgccttgaaggcagttcagtttggtggctgagctgtgacccccagtgggcgggcttatttggttttgcagattttggctgaagagctgtgtactcctccagatcctggtgctgcttttgtggtggtagaatgtccagatgaaagcttcattcaacccatctgtgagaatgccacctttcagaggtaatgaggggtctctagggtgggagaagtgagagctgaaacccagcccagcatcgacatgggcatcttgtggcaagagctgtgtttctgggaagaccactatctgggtttacagttcagaggccggcactcctgccttaagtcactgttggtagttggtgggctccggtgtacacagcctcaaagtgaaattagaaaagattgaaaactagaaacaactgaggactagaaattcaactagaactcttacagctcttataccagaagaaattctagaacttttttgaattctaactaatgccccagattatcatttggattattttgaactgaattaattttcttccattacctgcattgaaacaaatgaggtgggtcagagtgtgtgagactgtcgtggtcaagagtccgtgttatgggatggactcacagctggggaatgtcttttgggctaactgccactctgttgttgtcctctatcgaagttaaccagttttgcggttcagctttcattccagatggaatcatctttgacccacctatctgagtttgaatcttttcccccactcttaatggtttacctgtatttttcctgttcctagtttgtatctatctgtattttttcacttgtttttttctacttaccacaacaaatccttttgggctgctgtaccccttccgagtcagagcgttaggagttgtttcatggtctgctttattctctgtgggtgaatttggatgcgctggtagccccggctttgtattttaatccagttttgggcagcaaaacctcttcaatgaatcaggtgtcatttgagagccatgtgtggatgtgtgatgatgctgggatagataaaaatagctactgtgtatatttctttttaaagggaactggagggaaacacatcagcatgttagtaagtggtctgttgtccaggtggtgaaatttcagatgattttcatttctcgtgcctgtgtctcaggtcctctggaaggcagacaccagggtggcattggaggtgcaggaggtttattcgaggaaatttgactgtgagagaggaaggagagagggagcaggaggaggcagggagagcctgggtctggctttgcaggttggacccgtatgagtggagagggtaggaaggaagtgcagtgctgagaaaggatcagccaggcctactggaaagcccagagcagagcttgccagatacaggaatcccacgtccattggaaatggcccagcaccggggtctgccgtgagcagcctgctgtgagagcatggcctgggcgtggaggctgtcagctcactgcagtgctgcagagggccgcacgatacccctccctggctgcgtggtccctgtcttggtgtgtcctgagtctgcatcactttgtaaagccccactcttctgcccaggtaccaaggaaaggcagatgcccccgtggccttggtggttcacatggccccagcatctgtgcttgtggacagcaggtaccagcagtggatggagaggtatggagcccagcccagcggcacttggggtaactcttctgggcagtggtggattcccctttcctcccctcgtgctctttccagcgctacctacccttctgcacctgcctaaactttctgtgggattcctgccttcccagaattctaggcttcccagatctgtgctacactcgtgaagaaaatgcaccgctaggtggcgcagtgtccacacgattccatttattttacaccctccacactcttcagggtgtctgaacaaatactgccgtttggttgaggattccataagtgaattccaaagaagagattgcagctataaaatgatagcttccatttactgaatgcccactttgtgggaggcagtgtgtgaaatacccttcatttcacttcatttcctctagggtcgtcgccagcagccctgggaggtagatgtttagtcactggaaggcatctttttcctcggggcatcgctggccagggccaggtggaggagtatgagttgagctcgggtgcggggtgaccttgggctgctttttggcccctgcccgtatctccccacatggcccgtttacctgcccctcactccatggcctgctctcctgctgtctctttcattcctcagggtttgggtcccctatttgtatgccctggacatcttctttttcttgtttttcctctcactcttcccagcacacctgaaaggcagctgagctagggaacaccgggctttgagacagcaggagtgggaccatgtttggccatgtagtaacactgcttggggcaagtcactgaactgtttgaacacctcatcctcattaccactcctgagctcagcaccactcctcagggggagctgcctcctaacagacgctgcaaatgccgggtctgtttcttcacaggtttgggcctgacacccagcacttggtcctgaatgagaactgtgcctcagttcacaaccttcgcagccacaagattcaaacccagctcaacctcatccacccggacatcttccccctgctcaccagtttccgctgtaaggtagtgtctcagaccggccccttgtcggcccagctctcgtcccctctctttctctccatgaatgtgttttgtctctttcagaaggagggccccaccctcagtgtgcccatggttcagggtgaatgcctcctcaagtaccagctccgtcccaggagggagtggcagaggtctgtgccatcttgaactaatggaatcgtctcagtcgagttgggaaacatttctgtaaatagccacatagtaaatgttccaggaggctctccagaccatatggtctctgttgtaactattcaactccgctttgagcacaaaagaaacacggacaataagctaatgaatgggcttggctgtgtgccagcgtgaatttatttagaaaagcagcctactccaggctgggttgaggtgggcggattggggccagtagttctccttttccaaaattgccttgcatgggaatagcagtgatagagctcgtgtgtttcacagtatagaaaataggaaatgtgtgatgaacaaagtcacccataatcctgttgcccagagataatgattgataacattttgtgtttcttgatttgtgtatgtgggtttatattgtcagtcttttcctgtatcactaaacagtcttaagtaacaagatttttattggtattccaaatagggatgtttactcatttgggatgtttccaattttttgttgtttttaatgaatgaaacaataaatgtcttatatataaatctttgatgggaactctgttcccttcaagtcattcctaaatgtgggattactggcccagagtgtgagacttgttaaggtacttgataaatgtaagatgccatcttgaaagcctcttccagtacaatccaaccaggaaagtgaacagccttactgccccacatctttattttaattaattaatttatttattttatttatttatttatttttttgagacggagtttcactcttgttgcccaggctggagtgcaatggcgtgatctcagctcactgcaacctccgcctcccgggttcaagcatttctcctgccccagcctcccgaatagctggaattacaggcgcctgctaccacgcccggctaattttttgtaattttagcagagacgggtttcaccatgttggcaggctggtctcgaactcctgacctcaggtgatccacccacctcagcctcccaaagtgttgggattacaggcgtgagccgtgcccggcctgttttaatttttaaggatctgaaccttgattttaagtttcctgcccactccacagtatttgtattagaatagagcatgtgctggattatgactggatgctgtgtgctgttgaggttgggtagttggggccctttaagagactatactagcaagactcgggcccacaggcaacatcacggggttgaagaacctggtgtccctttgttggcatctgcgcaggctcttaacacacagcagcgatacacagccctagccgacattcagatttaccttgtgcttgtgaaaaatattgcacagggcctgccctagacctagtgaattagaatcttgagagttaggcttgggactcacaagctcccagatgattttaatgctcagcgaggttgaagagccgcctgtccaaggagttgccactccgtgtgatctggggcttgctaggaaagtgggatctcaggcctcactgcagagctgccgaactggcttctgcgttttgccaaggttcctgggtgtgaacatgagtttcagagtcactcctctagggcccctgcttctcagctcggaccattgacccctcagaggacatttggcaacatctggaaacgttcttggttgtcacagcctaggaggtgggtagtggtgctgctagtgggtagaggtcaggggtactgcaccaggacagcagcactggccacagaaaaaaactgtcttgccctgagcatcagtagttccccgttgactggccctgaggcagagcgatgcagcatccaaaaggcggtggagcagacctgccccagatcctagtcacttaaccttcagtgttgatctgaaggaacttcctgcagattgtccccctgaatttattctggacatccccaatggggtctgctgaggccatataccctgtccgtcacctgagatgcttctctctcttcctgcagggatgccattattacttgcaatcctgaggaattcatagttgaggcgctgcagcttcccaacttccagcagagcgtgcaggagtacaggaggagtgcgcaggacggcccagccccagcaggtgagtgggagcccacagagcagcctttctttcctgggctctgcccctgctgctgttttcctagcattaagtggagtgctggtggggcgcattctaacctggcttttcagtctaatccagggcttctctactcagctctacattagaattatagtcattggaggagggggctttggggagtttaagaatcccaattcctggctgggcgcggtggctcacacctgtaatcccagcacttcgggaggccgaggcaggtggatcgcgaggtcgggagatcgagaccatcctggctaacatgatgaaaccccgtctctactaaaaatacaaaaattagctgggcgtggcggcgggcgcctgtagtcccagctactcgggagactgaggcaggagaatggcgagaacccgggaggcggagcttgcagtgagccaaggtcgtgccactgcgctccagcctggacgacagagtgagactccgtctcaaaaaaaaaaatcccaattcctgtgccccatcccacccaatcagagcatttggcgatggcacccaggcattcttggcaaggcacgcactgagtgaaacgttttagtgaacacctgtggaaagagctctgagcagggacttggctggcagagatctagtcctggctttgcggatgcaaatccatggaggatcttggccacgtcactcaactgaggctgagggccgggcacaggctttggaaccatcgggtctccctggatttgaatcctgaccctgcctcttaccatcttcactggagacctgggcgtctgagcctgtttcccccttgggaagcagagcatttcctacctggtagggctgggaggatgcgaccgaagtgcatggtcttgcagtgagagctggatgcaaggcacacactgttctcttgaaataaatgacagttcccagcataaagaaatgtcattttttaaatgtaaaagaattacagcaattcttttgaagaaaggactggagaatttatttgttcttcttagccttttggtgacagatagcctgtgggtcccacactggtgcgaagtcctttgtttcagagcggttgccaggggcctgccagtccccctcctgggaagctggatagaactatgttgcttacccatctgtcttagtctgtgttttgttattataaaagaatatgtgagactgggtaatttatcaagaaaagaggtgtatttagttcacggttctgcgggctgagaattgaaggtcacggccctagcttccagtgaaggcttccatgctgcatcataacgtggcagaggagcgcaagtaggaagtggacgcttgtgaagacgggataacctgagctgcactctggctttataacaacccccctctcctgggaacaaatccattcccttgagaagtaatgcagtctcctgagagccagtacttactactgcagctccaagccactcaggagggtccgtccctgtagcccaaacgccttccactaggccccgcctcccaaaaccgccatactagggagcacgtttccacatgaggtctggggacaaaccaatgacactcaaaccattgcaccttctcatggctgcatgctggctcacttttgacccaaaggaatggattgtttcacatggattttttcacagagaaaagaagtcagtacccagaaatcatcttccttggaacagggtctgccatcccgatgaagattcgaaatgtcagtgccacacttgtcaacataaggtatgctgctttcccaggaagcatccttccatcaagggcacgtttactttttaaacaaaagtcctgctgtactcaccagtcgatttgaaatgcggtatcaagccctgtcacttgtcatgtcgactggagtgtccaggagaggagcgtggccttactgcattttatagcctcagtagcaaactttaccctgggaatcaccaaaattcatcccatgatgtcttttaataaacagctgattttactgtgggcagtacacctagctaagaaattagctcctttaatttttacattaatcctatgaagtggtgaataactacccattttgttgatgagtgacctgatattcagagaggtgacttgctatggttcctacagctggtaagtggggcatctgaagtttgagcggggacttggggtcttgattgctacatggtattgtcccccagccatttgttggtagtatgttaaaaagctttagggttttgcacatttgtgttcagaacctttattggattccccttgacatgttttttagttgattctcttgggtttgcctggggtcatcagcagagagattagtcaaatgcgttgtgacatgtacacgttatctctacagatagtatgtgaagaaaataagattgtgaattaccaggtttgttttaaattttgctctgccatcttacatgctagtggtggatgataaacaaccaaatagtgcattaaatatatacagcagtgacgagatgtgccctgacatcagaaatatacaatctggggtgtgtttctctgtggatgaggacatgcaataaagcagcttggagtgagccggcctctcccgggggctgagatcctgggggaagaagggctttttgagtttgacctgacaccctgcgagcagcttttgaaccagctgaagctaatgggaaggtgctattgccaccttgcctccgcctcccgactcctttttcccccagaaggtaatgtcttagcaccggggcttctctctgcaaaatgggtgcagccctctcagtgttcgtggctcctcccagagaatgaaggaggccagagcgggtcagcactctctctgccttggagcagagcttctgaaatggactgcacagcagaatagcccaagaagtttgtcagaatccagacttccagagccctgcctaaaaccaagtcagaaaccccgagtgacacctgggagtctgcgttaactggctccctgaatgaagcacctgcagcccgccctgcaccaggtgtctttgaggacatgagctgaggaaaccccgaccacttgcaaagggggaaaagtccgatggcagctggacctagaaagagtctcatatggcccagtgcctgtcctggtattttcaacagaggctgtggccacagtcaatctgcatggtcagattcattgttaggactaaatgctttaagcctcctataaactttttttttttttttttgatgcccagcctttgtgtaagtctacttgaaagggtttcagggttccatggatacttctttgctataaagaggatgacacatgtaaaatcacctttatggttaaattaattggcttttatattagctcctcaaagcaaagcaggagagacagaaatttctgcagttgcttcttggtcctgtccaaagcagacatcagcctctgaaccatcagcagtcttcctagtggcagtgactctcttcctcttctcttctgcagccccgacacgtctctgctactggactgtggtgagggcacatttgggcagctgtgccgtcattacggagaccaggtggacagggtcctgggcaccctggctgctgtgtttgtgtcccacctgcacgcagatcaccacacggtgagtgttgggctggaccacaaagctggagcctggaggaggcactgccacgttgagttggccctttggctgcgtcttttcctccgcttccaaacttgcccagagcttttgttactcatctctggctaggaaatggttttttgcaaaactcaacatagtccttctgcgccacaagaatgtcttctcttcctgttcagttcctttcctgcagcaggacaggtttgagtttacccagccttccttgagtcttgaatctcacacggcctgctcagcggaagctttgaccggatgcaggaggtgtggctatgagaccctcaccttggtctcctggggtgccgggccctgggccgttgccctcttcccagcacgggtcgtgtcgctttctgcctgtgacatttcagggccatggcgcagggggctcggcctgtgccacccccactgcggctgtgttagaggctggtgggtgacgtcgggctggcaactcctgcaagagagagggctgcagaccctaacccggaggggatggccctggggcctggctgacgcatgtctcctgtttccttgccagggcttgccaagtatcttgctgcagagagaacgcgccttggtaagtgtggcacttgatgggcgttctgagtttcagcggtttacacatcatccgccatgcctcttggcactccagtttttattgagatgttctgtcgtcgagtcggcacttgcattttttgttccaggcatctttgggaaagccgcttcaccctttgctggtggttgcccccaaccagctcaaagcctggctccagcagtaccacaaccagtgccaggaggtcctgcaccacatcaggtgagcatccagggcagcctggcccgctgggctgttgcttgctgccgtctccttcagaagctcaaggtggacactggggtagttaccaatatcccccagcagccttgcccttgacatggtcccagatggcagaagcaggggagaagtgcattggctgaaggacagaaaccattagatagttcccatgtaatgcttattttcttagaagcatttcttcccagtcctcatttgagttctgagctgctttctaaacttcgagcagcttttcttgatgagacagttccagagccaagcacccaaatagtggctagcacagagaatgtccatagcaggtgtgtggctagctggcaggtggcaccatcctcaccccaaggggaaggagtcccctctgctggagccatccgtggcccgtgctgcctgagccggaggcagcattcacctgctgggtttctcccagtggcctagaggctttggtttggctctttatatttgactgctgtttcctcatcatagtgactatgatttaactcatgttttctcctaagaatgattttggggttctccagccaaagacttaaactttggttccagatgtccaagaaacgtttattatcattttaaatgttttgtctttttacagtatgattcctgccaaatgccttcaggaaggggctgagatctccagtcctgcagtggaaagattgatcagttcgctgttgcgaacatgtgatttggaagaggtaaggggcacagccgcaggcatcatgggggcgaggtggggagcagagctgcagagccctccagccccaccctttcagtttcagacctgtctggtgcggcactgcaagcatgcgtttggctgtgcgctggtgcacacctctggctggaaagtggtctattccggggacaccatgccctgcgaggctctggtccggatgggtgagtagaggaagaagcaagccaccctgaggttgctctggggtttgtgtagctggaggtgaatgcaggtgggcttgcagggaaacgtcagcagaggcaggagactcaggtccccaccctcagagtctctggttgtcatcctagtaggcagacccagggccaggggagctgagtgttgagaccaggaaacagcacgtgactgaggcctgtgtgccgctctcgcagagaactctgccctgatccttgtgctgcttctccagggaaagatgccaccctcctgatacatgaagccaccctggaagatggtttggaagaggaagcagtggaaaagacacacaggtagcaaaggccggtcagtccttgtcgcccacatcctctccctcccccactacgtgacactgagcagccgtcgtttgtctccactgatgtggggctgccctgcttcctatcaagggctatgggggcttccttgacctgtggcagtgctcacaggctcttggcctttatttttgcagaattttctaagcaagattctagagtgaggcacagttttttgaaagcatctagaaatcggctgaataaactataagccatgtcagggaattgccaggggaaggcgggggctgggggactgaatttttggctgctaatttcaacgaaagagtgcattaccccaggtgggccctgtggtttctcttgggtgccctcatggacagatttggcagccagcacagagggtgggcttcatccaggggtgtgtgcgaaggctctggccctcaggggagattgtgctggctacggaggtgcccgttaagaaaacccaccagcttccccgggtgccctggcagttgatggccagggtctgtgccactgtctgctttgcagtcttgcagttgagttcagcttcagtctgctctgtccttcacctgcagcacaacgtcccaagccatcagcgtggggatgcggatgaacgcggagttcattatgctgaaccacttcagccagcgctatgccaaggtccccctcttcagccccaacttcagcgagaaagtgggagttgcctttgaccacatgaaggtctgtatgtcacacggacagcacagggcggggacggggcagggagacaggactctacacactgagtaggacggtcagctggagtttgctttcttatttggggccaccgtgggaaaaggttatctacccatcactaaccaggtcgaaccaccctgggtttgctggtgagacccacctcctgcaggggccaactagtcttcagtctcagttcactggaaatttctgagaatccttttaggcctggactgctcacacagtcatggcatttgagcctcagcacagacctgtgagacaggtggttgcctcttgtgagtgggaaagccaggcctgacccttggccttccggaatgaaggggcagagccggagccaggcctcgtttttcaggagcttgattttgagagcatctggactgctctcccttccctctccggaggcccttagccaggcctggggagcctctgcccctttagagggttccctccatgccattcttttttccatttcagctgtggcctgttggcttgtgccaaggaaggggcgttggcgctgctgtgtgagcacatgactgcatcccttccagctcctgtcccccacccctgcccctctgagacatgtccttgtcttctattgtgtcttctaggtctgctttggagactttccaacaatgcccaagctgattcccccactgaaagccctgtttgctggcgacatcgaggagatggaggagcgcagggagaagcgggagctgcggcaggtgcgggcggccctcctgtccagggagctggcaggcggcctggaggatggggagcctcagcagaagcgggcccacacagaggagccacaggccaagaaggtcagagcccagtgaagatctgggagaccctgaactcagaaggctgtgtgtcttctgccccacgcacgcacccgtatctgccctccttgctggtagaagctgaagagcacggtcccccaggaggcagctcaggataggtggtatggagctgtgccgaggcttgggctcccacataagcactagtctatagatgcctcttaggactggtgcctggcacagccgcgggccaggaggctgccacacggaagcaagcagatgaactaatttcatttcaaggcagtttttaaagaagtcttggaaacagacggcggcacctttcctctaatccagcaaagtgattccctgcacaccagagacaagcagagtaacaggatcagtgggtctaagtgtccgagacttaacgaaaatagtatttcagctgcaataaagattgagtttgca

SEQ ID NO: 11807 - DNA, 2924 bp, Homo sapiens
agcggctaggtggtgcacgggaaacgcgggcgtaggtgaccggcggctttctcagttttggtggagacgggcgcatgtgggcgctttgctcgctgctgcggtccgcggccggacgcaccatgtcgcagggacgcaccatatcgcaggcacccgcccgccgcgagcggccgcgcaaggacccgctgcggcacctgcgcacgcgagagaagcgcggaccgtcggggtgctccggcggcccaaacaccgtgtacctgcaggtggtggcagcgggtagccgggactcgggcgttcagagactcatgcaggagcacaagttaaaggttgctcgcctggacaacatattcctgacacgaatgcactggtctaatgttgggggcttaagtggaatgattcttactttaaaggaaaccgggcttccaaagtgtgtactttctggacctccacaactggaaaaatacctcgaagcaatcaaaatattttctggtccattgaaaggaatagaactggctgtgcggccccactctgccccagaatacgaggatgaaaccatgacagtttaccagatccccatacacagtgaacagaggaggggaaagcaccaaccatggcagagtccagaaaggcctctcagcaggctcagtccagagcgatcttcagactccgagtcgaatgaaaatgagccacaccttccacatggtgttagccagagaagaggggtcagggactcttccctggtcgtagctttcatctgtaagcttcacttaaagagaggaaacttcttggtgctcaaagcaaaggagatgggcctcccagttgggacagctgccatcgctcccatcattgctgctgtcaaggacgggaaaagcatcactcatgaaggaagagagattttggctgaagagctgtgtactcctccagatcctggtgctgcttttgtggtggtagaatgtccagatgaaagcttcattcaacccatctgtgagaatgccacctttcagaggtaccaaggaaaggcagatgcccccgtggccttggtggttcacatggccccagcatctgtgcttgtggacagcaggtaccagcagtggatggagaggtttgggcctgacacccagcacttggtcctgaatgagaactgtgcctcagttcacaaccttcgcagccacaagattcaaacccagctcaacctcatccacccggacatcttccccctgctcaccagtttccgctgtaagaaggagggccccaccctcagtgtgcccatggttcagggtgaatgcctcctcaagtaccagctccgtcccaggagggagtggcagagggatgccattattacttgcaatcctgaggaattcatagttgaggcgctgcagcttcccaacttccagcagagcgtgcaggagtacaggaggagtgcgcaggacggcccagccccagcagagaaaagaagtcagtacccagaaatcatcttccttggaacagggtctgccatcccgatgaagattcgaaatgtcagtgccacacttgtcaacataagccccgacacgtctctgctactggactgtggtgagggcacatttgggcagctgtgccgtcattacggagaccaggtggacagggtcctgggcaccctggctgctgtgtttgtgtcccacctgcacgcagatcaccacacgggcttgccaagtatcttgctgcagagagaacgcgccttggcatctttgggaaagccgcttcaccctttgctggtggttgcccccaaccagctcaaagcctggctccagcagtaccacaaccagtgccaggaggtcctgcaccacatcagtatgattcctgccaaatgccttcaggaaggggctgagatctccagtcctgcagtggaaagattgatcagttcgctgttgcgaacatgtgatttggaagagtttcagacctgtctggtgcggcactgcaagcatgcgtttggctgtgcgctggtgcacacctctggctggaaagtggtctattccggggacaccatgccctgcgaggctctggtccggatggggaaagatgccaccctcctgatacatgaagccaccctggaagatggtttggaagaggaagcagtggaaaagacacacagcacaacgtcccaagccatcagcgtggggatgcggatgaacgcggagttcattatgctgaaccacttcagccagcgctatgccaaggtccccctcttcagccccaacttcagcgagaaagtgggagttgcctttgaccacatgaaggtctgctttggagactttccaacaatgcccaagctgattcccccactgaaagccctgtttgctggcgacatcgaggagatggaggagcgcagggagaagcgggagctgcggcaggtgcgggcggccctcctgtccagggagctggcaggcggcctggaggatggggagcctcagcagaagcgggcccacacagaggagccacaggccaagaaggtcagagcccagtgaagatctgggagaccctgaactcagaaggctgtgtgtcttctgccccacgcacgcacccgtatctgccctccttgctggtagaagctgaagagcacggtcccccaggaggcagctcaggataggtggtatggagctgtgccgaggcttgggctcccacataagcactagtctatagatgcctcttaggactggtgcctggcacagccgcgggccaggaggctgccacacggaagcaagcagatgaactaatttcatttcaaggcagtttttaaagaagtcttggaaacagacggcggcacctttcctctaatccagcaaagtgattccctgcacaccagagacaagcagagtaacaggatcagtgggtctaagtgtccgagacttaacgaaaatagtatttcagctgcaataaagattgagtttgca

SEQ ID NO: 11808 - DNA, 25440 bp, Homo sapiens
aacgcgggcgtaggtgaccggcggctttctcagttttggtggagacgggcgcatgtgggcgctttgctcgctgctgcggtccgcggccggacgcaccatgtcgcagggacgcaccatatcgcaggcacccgcccgccgcgagcggccgcgcaaggacccgctgcggcacctgcgcacgcgagagaagcgcggaccgtcggggtgctccggcggcccaaacaccgtgtacctgcaggtggtggcagcgggtagccgggactcgggcgccgcgctctacgtcttctccgagttcaaccggtcagtcaacgagccacgccccgtcccgctgggccctcagtgcggcgcagcctctgagcatcggggcacctcccagggcttcggcttccctgcttcacacatgtggttcactgttgcgggggttcgtggagttatggtgggtgggaaatccgagattctttgcatccatgtgatttctgcggatctgtgaagaacttcaggcctgggtctgagcgtccttttcccaacccttgggccccggcctggctgtcagcactttcggagctccaccctcttccgtgcaccccaaggccagtgtgtcgttgttagcgtgtggggtggacagatctggtgtgtagccggtggtggagaaaggactcattttgtcctagcacccacacacacaggcccccactcctctccacctctgctaaggagggctcaaaacccaccagcataaatgtggctcggtagtccaacgtggacttttaatttttttttcttttttttttttccagagtctacaataaaacatctaattggtgtcagagagtttacagaataaaaccttctgaatgtcttgtgtaatgtttgtcttgtaggtatctcttcaactgtggagaaggcgttcagagactcatgcaggagcacaagtgagtcagtctcttgctttcggagggggagttgattacggggcttgaaagccgaaatgagaggccagttgttttttatagcaaaagtggtccttgttctgttcatgttatcctgtttaaatgttttttcattcttaggttaaaggttgctcgcctggacaacatattcctgacacgaatgcactggtctaatgttgggggcttaagtggtgagtatattctttgcagtgtcagaggctggtgggaagtctctgggattttaaccggctttaccatttttccaagtctggggtgggcagctacttttttttttttttttttttttgtcagtggcgtgatcttggctcactgcaacctttgccttctgggctcaggtgatcccctcacctcagcctcccaaatagctgggaccacacgtgtgccccatcacacctggctaattttttttgtatgttttgtagcgacggggttttgctatgttgcccaggctggtctcaaacttctgcgatcctcctgtctcggcctcccagagtgctgggattacaggcatgagccaccgcacctggcctggaattctttttataccagcccagtcagcagcagcacagagcattaaaagctgtgactcaggagaacagattttaatatggataccacctcttaagtgttaccatccacttagtttcttgcgttgcggggacagagatttgtggcagtaaactggagagtctagcagtggtgattacagttaatatgtttaccgcagacgccattggcacattggcagccacacacatacccactgtccagattaccctgtcatttatgtctatcaaccggaaggtcaggattgtgttgcagccaaattgtgtgggcttggtggcatggaccggaaggagtgaagtgttagaccagtctcccttctcagggctgagactagggtgaggcacttagggtgccagcccttcacttgcatgattccttacattttgcacactgggtgccttgctgcttcaccctagtgacagctcagcccattctagaggcatttaaagaatatttggtgtctgttacacctctagctggcatcacttctgctctgtacatcttccctggttgtacttccaaagctggaaggtggagatgtagataaatagttggattagtacggggtgctcctcctgttagtgacgacaggtcaaattgatgagagatctgattttatgcatcctttttaggaatgattcttactttaaaggaaaccgggcttccaaagtgtgtactttctggacctccacaactggtgagtctttcctgacacatctttcaaaagcaatctttccttttgtaatatcagtaacaagaattttcctttttgcaaatcagtcttctgccctccagagatacctggtcgttgaaacgcttcccctttcaagttaaaaagacttgagttctgattaactatgtgaccttgatcaagttactttacctttctgagctttagtttattcatctataagatgactatcacgtttcatagagttgttaaagattaaatgacgtagcagcacatataaagcactaaatcactttattagatatatgtttggcaccaagtaggcacacaagaaagggcagcttttgtttttattcaataaatttctgacatcttcttacctttcagtccagcttattacactcttgagaaggcgtgtgtgtgttgttgaatataacagttcattttccagtccttaagaagaaagtcaccaagacctgttaagtctttccccaaaataacgtttgaaatccatccatttgtctcttattgaggccttccttatttctgttttctatgcctgtaaactacaatagcctcccatattcattctcgccttcctgtaatccatctgccacacagcagccagagaggtcacttcaagacagaaaagtagtgtgtcacttgccaccctaaagcccttcatgggctccccattgcaatacaatcaaaacaccttgatatggcctacaagtcctgtaggccccggccgctacccacacttccatctgtacccatcgctgaactgcagctgcatgggctgactcttatgtccctctaactccctggccacttcaggactttcgcccttccgcgggttccctctgcctcttctaattgctgcctatattgttactgaaccttcagggctcagctagagggtcatttactccagaactgcctcttcttctctagacaagttggatcccagccttctgtatttttcattttccttgcagagcacttagcataatgccactaagctgtttctgttatcgtgtttccttttgtctcctccactggcctgattagagcaaggcctccatctctttttcctgctatatccttggcatctgatataatggatactcagtaaatatttgtaataaatgatgttcaaaatatttactaagctttgttttatgttgatacctattggtaaccttttaaatacttgaatagttgctgtgttctacatttgttcaaccataactgctcatttctttgtttttcattaggaaaaatacctcgaagcaatcaaaatattttctggtccattgaaaggaatagaactgggtacgtctttgtctgtgactcatcctctgctatttctaacttatatatgccctgacctctcaaattagaatccattaaaaacatcaacatcaaacctcaaaatcaaatgcttcatcaccacgagatttttttttttttttttttttttggatagagtcttgctttcttaccaggctggagtgcagtggcatgatctcggctcactgcaacctccacctcctgggttcaagccattctcccacctcagcctcctgagtagctaggactacaggcgcatgccatcacgctcagctaattttttgtatttttagtagagacggggtttcaccatgttggccaggatagtctcgatctcttgaccttgtgatctgcccgcctcagcctcccaaaatgagctaccatgtggctggagatgggatttctaaatagtgacattttctgtgttcccacctcatgctgtaaaaataggggccaggtcggcaggagtgattgaacagctgatgcctgcctgtgtacatgctgtgtggcattctccatccagacggcagggctcctgcctcagttccagaggtgcttctcgtcgttgagttgctttgagttgggggcgggggtgacaagggttccctagaggttttgtggccaactttgtacattgaaacgcagctccagctgcgcaggggggcttacagcctcttgatgggaagaggcctcactgaggatgctagtagggctcttgtcctggcactggtgtgtatctgtggcttgttaatactcctcttttatagaaacactaatactttgtttcaaaatatacatcagctcttctggtttgcgatgataggttccctggcttcactattctgtttgttaacttgggtctctgaaagttgagtactagtttcttgtttttcaatttttaacggatagtcaccaaagattataatgtcttttcatctggctgtagtaaatataaatggctgaccaaaatacacttttatttatttcctaaaaatggtaatctccttagaaagtctggttttcgtgtcagattcccaccataattctgaggcaattcagttgctcgtggttggtgatcctgaagttactcttcccacacatcttcactaatgcaatcactttgctgttgtgtggttttcttgtagctgtgcggccccactctgccccagaatacgaggatgaaaccatgacagtttaccagatccccatacacagtgagtatgaaagccaggtttcccaggaggagggtgtacgtcctgagtaaagaaaacatggatgaaaatagaaactgaacacttgctgtgggcaccctgttttgtgttctgagcatgattagaaaatttagttgaggaatgaagatatggctcctgccctggcttataaacttacggatgtctgacttatgcctaatgatagtgattatgctttggaatattagataatcaagcactgttggtaaatagattgcattcaagtttgcacattcattgcttggaggttttttcccacaggcgtaataccctcttttgatcagacgatcatgaagaggtttgcacagatagatttttttaaataaataatgattacagcaacctaaaagaagtgttgttgggggttagaagctcctgcaaattccgaagtatcagggccagatgatgtggtcttagcttaggaaaagagttagtcttgtccttgaacttggctaaagacattcatgtctggttttacttacatgtgaagagagtaccaagcagtaggggtatttccttgttagtactaactaatgtgatgcttactaagtagtgctgatgggtgacagaccagagcacccagcaaaggccagagaagtccagaacctggcgaggagatgaggcttacactgactgaaggcagaaggcagcagggaggagaggaatgtgccggagcaatggcacaagtgctcctaggccagtgctgtgatgagctgatcagcactcccattgcctggcttgctcctcctgctcagatgccttctctcacctgacccctgctgtagccacccccagcctgagttgcatccacctgtttgttgtccatttccagcaccctgttcttcgctccatggcatgtgacagttaactttcatatgtgatttgcgtgatcgatgttaacatgctcagttttgccgatcactgttttttcagtgtccagcggccctcagtgagtgaacttacgttcattctcgttgcagctgtgctttagcttcttagagcagcgaatttttttcccttgatcttgagccttaactaaatgtaaaatgaggctccttcttgagataggtaccctttgggtctatgtgttttagcgggagtgatgataataaataagcatgtctacaacccacatgctgtttagataacacgttgttgagttggtactgtggccgaggctgtgagctaagcagaaacataaacattaataggacataggtgcagcccagaaaccaggtaggaagttaactaactagttatttcctactgtatagtaaaaggtgtgctgatttaattggcgttctggcattcccatgtatgaacgtctgggccttggctgtcagctcaccttgtgcagtgtgtaatttggtggtatctgtactgaccaggtgaacagaggaggggaaagcaccaaccatggcagagtccagaaaggcctctcagcaggctcagtccagagcgatcttcagactccgagtcgaatgaaaatgagccacaccttccacatggtaatagtataaacaaaacagagcagcagaaaggcttgcgttttcttaattctctgccttgtaatgcttgtagagagtcattattgtaagaaagccaggtgtgtaaacagatccttcttcctgggcttactataacttggcccgttgggggaatgagaagggttgttgtaaaggtggcagcctgcaactttaataatgaccagtccacagttttggccacccagggtctgggtaggcccaaaactgtgttctgttttcccagaggagaacagggcctgacaaacggattcattttgtatttttcattaatgtaacatttatgcaaattttccattaatgtggaaactataactgctaagccaatgagacagtcaaatcagtgagaggctctgcacgtcttccagaatgacagcccactgggaaacggagttaaaagtccaagatgagatgtagctcaggagtcaggccgcttcgggagtttgttgtccttaacagaaggtcagcgttggcaaagctcggcagctcctctttctgtcctgaggtcttgtctagtgactgagaacaggctgacccctatgtgctgtccttgtttggatggcaccgggtaaagactgacaccagcattttctctgcaggcctttgaacttttgtgttatttcatatattatatgtgttataaagcacattacaatatatttttctctgtcttctccagtcctaggtgaaatgtgtcatttaaaaaaaatttcacttgccattctaaagtttttctggtgagagttttgtgtttttcatttacgcaaacacatctccacataagtagggaaaaaaagtcttcttgagtatattagtgtcttcagcctttgtattgggacagtagcgtccattaatttttatgtgaagtgaaattaggtatcgggtcataatcagtctgtgatgtcttcacagctttcacatttaccttgtgataatcaagtgtgtttttcctcaggtgttagccagagaagaggggtcagggactcttccctggtcgtagctttcatctgtaaggtaaggaagactttccggagggctgtacatgactggggtcttggtcagcgacctctggtttgcactttttcattaatttgagggtaggcactcctgttacctgagacaagaagagatagcagatcttcagaaaagctgatggaaggccgggtgcagtggctcacgcctgtaatcccagcactttgggagtccaaggcaggtggatcacgaggtcaggagtttgagaacagcctgaccaacgtggtgaaaccctgtctgtactaaaaatacaaaaattagctgggtgtggtggcgcatgcctgtaatcccagctacttgagaggccaaggcaagagaatcgcttgaacacaggaggcggaggttgcagtgagttgagattgcaccattgcactccagcctgggtgacagagcaagactctctcaaagaaaaaaaaaattcgatagaaatgacactggcaatgagcctgcaacaagtattactactgacctttcataattgtcatcacttgtaggtttcagagtttagatgctctgtttctcaaaataaccccatacttttatttccttttaaatttttttccagtgccctgtcagcctccgtacattttttttttttttttttgagaccatgtctgtctccatcgcctaggctggagtgtgcagtggcacaatctcggctcactgcagcctccacctcccaggttcaagtgattctcctgcctcagcctcccaagtagctaggattataggtgcgcgccaccacacccagttaatttttgtatttttagtagagatggggtttcaccatgttggccaggctggtttcactcctgacctcaggtgatccacccaccttggcctcccaaaatgctgggattacaggcgtgaagcactgtgcctggtccatattcttttatatttgccaatgattggtccttttagaattcagaaattattgaaggcagctgtgtttgttttccttcaactccatcaggcctttattcaaagtcttttaactctgttttactttatttcattcccctgcaatagctaaggtctaacaccagattaattggaatattagctagcattcacaaaggcctagatctgtaactctgaaattggtcaaattccattaaaaatttttgttacaataagctgtttgtaagatctgactagtggcttatttttaatagaattttgcattaaaattttatcaatacaatttgcaacaaatttgtctaaatatgtgaaaagatttcattgcctttttgtgggcttagattattttttaatgttgattttgaaatatatttggaattgttatctaaattctaaaagctacaagtgaaaataataatgaaagtaagtagttaatattagtggcaagatcattgccagtatcatttctatcgatttatttgaataatgtgattttcataaaagttaagtactactgttaacaggcttattacttgtatgtttctgagttttagatagcaaaatcattttttaaagttttaaaaatattttatttttgataatctatatttatattgtctgatttttaaactgttttctatggtaatctttaaatcgtattcctgctttccggaataggtaacagtgagcatgatgaaaagtgacaagctcacttttacacactcgggcagttgccctattatcaggcagccgttcctgggggctgccagctgcctgccctggcttttccatctccttccttgctgtcttctgcggctccttctgagggctgctgtcactggattagcctataacgcctttcccctcttctaattaatttgctgctctcaggtgaggttttggaaagcaataaagctgagctaggtcaagttccaggagtctcttggcatgaggacctgaaaaactcatctgttggaagacctcggctttgggcagctggtgcactgttggggcgttattggctgcgttctggctctcatcagtcttccagatactctgcattcctcagagaggaacatatctccatgggttgagttcagctcccagggagatgggtttccctgccttaagtcggcaagtacctttttttttctttttttgagacagagtctcgctctgtcaccaggctggagtgcagtggtgcgatcttggctcactgcaacctctgcctcccagggtcaagcagttctcctgcctcagcctcccgagtagctgggactacaggagcgcaccaccatgcccagctaatttttgtatttttttagtagagacggggtttcaccatgttggccaggatggtctggatctcttgatttcctgatccgcctgccttggcctcccaaagtgctgggattacaggcgtgagccatcatgaccagcctttatgtttctttgtttgttttgtttttctgagatggagtctcgctctgttgcccaggctggagtgcagtgttgccatctcgacttactgcaacctctgccttccaggttcaagtgattccttgcctcagcctcccgtgtagctgggatcacaggtgcctgccaccatgcccggctaatttttgtattgttagtagacacagggtttcgccatgttggccaggctagtctcgaactcctgacctcaagtgatctgccttcctcagcctcctaaagtgctggggttacaggagtgaaccaccatgcccagccttcaattaccttttatttattttatttatttatttatttttgagacggagtctttctgtgttgcccaggctggagtgcggtggcgcaatcttagctcactgcaacctcctcctcccaggctcaagtgattctcatgcatcagcttcccgagtagctgggacttcaggtgcccgccaccacacttggctaatttttgtgtttttagtagagacggggtttcaccatgttggccaggctggtcttgaatttctgacctcaaatgatcctcctgcttcagcctcccaaagtgctgggattacaggcgtgagccactgcccccaacagcaagtaccttttaaacattagagacatttagttgccatcctcaaacccgtttgggtgtgtggagagaatgttgggtcgtgacatggttgttagttatctaaagatgtcagccatcaatcatcactgtgtgatgtgcacactgaagctgtaatccttcatctaggatgatattttttaagatggaaaattctacaaccctgagaataaggatttcagatccaaatttgagactcagccctacgagtaactctttaacttcagagagttaaaagaagatgcacagttgatgaagatttaaaggagaaaatggaaatcaaatgtcatttagcactcaaaggcctacatgtcatttctgacatttttctgtttgtgtgaaattttttttttcctataaaatgattgtgaagttttctggtagaattattgtttgcctttctaatgtaatagcatattagggtttttttttttttctttttctttttttgagacagagtctcactctgtcgcccaggctggagtgcagtggcacgatctcgggtcactgcaatcttccgcctcctgggttcctgcctcagcctcccgagtagctgggactacaggcgcacgtcaccacacccggctaattttttgtatttttagtagtgacagggattcaccgtcttagccagggtggtcttgatctcctgacctcatgatctacccgcctcggcttcccaaagtgctgggattacaggcatgagccgctgtgcctggctattagagattttttattataatttatctccaagataaaagcagtgacattatattgccacataattgaaaaatacaagagaaataaaaatcatccatgcttttgttagcctatcactgtcattgaaatattatgttacatggcagtttgcttgctggttgctctgttaggcaacgctctggtgacattcctttagctattaattgaggaatgtagaatgacagaacagtgtttctcctcaatgatacttgaaggatatttattaactttcatattgaattacattttattaaatttataatgagttaatgctgggaaataaaacactgatttaagtcattttggcttttagtactaaagcatttgacaataaatgacttcttcagaatatggtataccttctgaaagcaataaacgcattttaatgaattgtaaggaaacaacatcattttattttttatttttttttttgagacagactttcgcttttgttgcctaggctggagtgcaatggcgcgatctcggctcactgcaacatccgcctctgggttcaagcgattctcctgcctcagcttcctgagttgctgggattacaggcacgtgccaccacgcctggccaattttgtatttttagtagagacggggtttctccacgttggtcaggctggtctcaaactcctgacctcaggtgatctgcccgcctcagcctccgaaagtactggaattacaggcgtgagccaccgtgcctggccaacattattatttttttttaatctagaaaaatacacttctaagaaaattgattaaaaccaaccttcttcattagcccctaagatcacatctatgttctctttgttgcagcttcacttaaagagaggaaacttcttggtgctcaaagcaaaggagatgggcctcccagtgtgagtgtggggggtaaggcttctggggactcactgggtacacctgtccacttaaggaaatcacatttcacagaggccttgcctcttcatttcagtgggacagctgccatcgctcccatcattgctgctgtcaaggacgggaaaagcatcactcatgaaggaagagaggtgagatgcctggttttcttgattcagcagttacaggtagggtctgaaatgctgggcagagtctgtcttcttcaggccctacagacaccacttttgaaggacgtggaacagtttggacatcactcagctaagtgataaaatggcctcttttatctgtgtttgtcccgcatgtcaacacggctgcattcgagcatttttgtagattgtccatttaggatctagtcaccgtcctccttaaagggtgcatgctttccttggtacttgagctcaggacagtgtctaacaacagaccccatatggatgggcctggggtttatggtccagaggaatgccacagtattctatgtcaagatatttcctctgacttctgaggacattaggaccagtggccacagactgaagaaaaccttaatgccaagcctcctttcctggccagtgtaggcctgaagtgcctcaacctgacagttacctgtttaggtatccacaaagagaccagaagggtgttgatggtgatgtgtaaagttggttttgtgctttgtttacctctcagctcactggataggatatgtcatgttagcagttgccttgaaggcagttcagtttggtggctgagctgtgacccccagtgggcgggcttatttggttttgcagattttggctgaagagctgtgtactcctccagatcctggtgctgcttttgtggtggtagaatgtccagatgaaagcttcattcaacccatctgtgagaatgccacctttcagaggtaatgaggggtctctagggtgggagaagtgagagctgaaacccagcccagcatcgacatgggcatcttgtggcaagagctgtgtttctgggaagaccactatctgggtttacagttcagaggccggcactcctgccttaagtcactgttggtagttggtgggctccggtgtacacagcctcaaagtgaaattagaaaagattgaaaactagaaacaactgaggactagaaattcaactagaactcttacagctcttataccagaagaaattctagaacttttttgaattctaactaatgccccagattatcatttggattattttgaactgaattaattttcttccattacctgcattgaaacaaatgaggtgggtcagagtgtgtgagactgtcgtggtcaagagtccgtgttatgggatggactcacagctggggaatgtcttttgggctaactgccactctgttgttgtcctctatcgaagttaaccagttttgcggttcagctttcattccagatggaatcatctttgacccacctatctgagtttgaatcttttcccccactcttaatggtttacctgtatttttcctgttcctagtttgtatctatctgtattttttcacttgtttttttctacttaccacaacaaatccttttgggctgctgtaccccttccgagtcagagcgttaggagttgtttcatggtctgctttattctctgtgggtgaatttggatgcgctggtagccccggctttgtattttaatccagttttgggcagcaaaacctcttcaatgaatcaggtgtcatttgagagccatgtgtggatgtgtgatgatgctgggatagataaaaatagctactgtgtatatttctttttaaagggaactggagggaaacacatcagcatgttagtaagtggtctgttgtccaggtggtgaaatttcagatgattttcatttctcgtgcctgtgtctcaggtcctctggaaggcagacaccagggtggcattggaggtgcaggaggtttattcgaggaaatttgactgtgagagaggaaggagagagggagcaggaggaggcagggagagcctgggtctggctttgcaggttggacccgtatgagtggagagggtaggaaggaagtgcagtgctgagaaaggatcagccaggcctactggaaagcccagagcagagcttgccagatacaggaatcccacgtccattggaaatggcccagcaccggggtctgccgtgagcagcctgctgtgagagcatggcctgggcgtggaggctgtcagctcactgcagtgctgcagagggccgcacgatacccctccctggctgcgtggtccctgtcttggtgtgtcctgagtctgcatcactttgtaaagccccactcttctgcccaggtaccaaggaaaggcagatgcccccgtggccttggtggttcacatggccccagcatctgtgcttgtggacagcaggtaccagcagtggatggagaggtatggagcccagcccagcggcacttggggtaactcttctgggcagtggtggattcccctttcctcccctcgtgctctttccagcgctacctacccttctgcacctgcctaaactttctgtgggattcctgccttcccagaattctaggcttcccagatctgtgctacactcgtgaagaaaatgcaccgctaggtggcgcagtgtccacacgattccatttattttacaccctccacactcttcagggtgtctgaacaaatactgccgtttggttgaggattccataagtgaattccaaagaagagattgcagctataaaatgatagcttccatttactgaatgcccactttgtgggaggcagtgtgtgaaatacccttcatttcacttcatttcctctagggtcgtcgccagcagccctgggaggtagatgtttagtcactggaaggcatctttttcctcggggcatcgctggccagggccaggtggaggagtatgagttgagctcgggtgcggggtgaccttgggctgctttttggcccctgcccgtatctccccacatggcccgtttacctgcccctcactccatggcctgctctcctgctgtctctttcattcctcagggtttgggtcccctatttgtatgccctggacatcttctttttcttgtttttcctctcactcttcccagcacacctgaaaggcagctgagctagggaacaccgggctttgagacagcaggagtgggaccatgtttggccatgtagtaacactgcttggggcaagtcactgaactgtttgaacacctcatcctcattaccactcctgagctcagcaccactcctcagggggagctgcctcctaacagacgctgcaaatgccgggtctgtttcttcacaggtttgggcctgacacccagcacttggtcctgaatgagaactgtgcctcagttcacaaccttcgcagccacaagattcaaacccagctcaacctcatccacccggacatcttccccctgctcaccagtttccgctgtaaggtagtgtctcagaccggccccttgtcggcccagctctcgtcccctctctttctctccatgaatgtgttttgtctctttcagaaggagggccccaccctcagtgtgcccatggttcagggtgaatgcctcctcaagtaccagctccgtcccaggagggagtggcagaggtctgtgccatcttgaactaatggaatcgtctcagtcgagttgggaaacatttctgtaaatagccacatagtaaatgttccaggaggctctccagaccatatggtctctgttgtaactattcaactccgctttgagcacaaaagaaacacggacaataagctaatgaatgggcttggctgtgtgccagcgtgaatttatttagaaaagcagcctactccaggctgggttgaggtgggcggattggggccagtagttctccttttccaaaattgccttgcatgggaatagcagtgatagagctcgtgtgtttcacagtatagaaaataggaaatgtgtgatgaacaaagtcacccataatcctgttgcccagagataatgattgataacattttgtgtttcttgatttgtgtatgtgggtttatattgtcagtcttttcctgtatcactaaacagtcttaagtaacaagatttttattggtattccaaatagggatgtttactcatttgggatgtttccaattttttgttgtttttaatgaatgaaacaataaatgtcttatatataaatctttgatgggaactctgttcccttcaagtcattcctaaatgtgggattactggcccagagtgtgagacttgttaaggtacttgataaatgtaagatgccatcttgaaagcctcttccagtacaatccaaccaggaaagtgaacagccttactgccccacatctttattttaattaattaatttatttattttatttatttatttatttttttgagacggagtttcactcttgttgcccaggctggagtgcaatggcgtgatctcagctcactgcaacctccgcctcccgggttcaagcatttctcctgccccagcctcccgaatagctggaattacaggcgcctgctaccacgcccggctaattttttgtaattttagcagagacgggtttcaccatgttggcaggctggtctcgaactcctgacctcaggtgatccacccacctcagcctcccaaagtgttgggattacaggcgtgagccgtgcccggcctgttttaatttttaaggatctgaaccttgattttaagtttcctgcccactccacagtatttgtattagaatagagcatgtgctggattatgactggatgctgtgtgctgttgaggttgggtagttggggccctttaagagactatactagcaagactcgggcccacaggcaacatcacggggttgaagaacctggtgtccctttgttggcatctgcgcaggctcttaacacacagcagcgatacacagccctagccgacattcagatttaccttgtgcttgtgaaaaatattgcacagggcctgccctagacctagtgaattagaatcttgagagttaggcttgggactcacaagctcccagatgattttaatgctcagcgaggttgaagagccgcctgtccaaggagttgccactccgtgtgatctggggcttgctaggaaagtgggatctcaggcctcactgcagagctgccgaactggcttctgcgttttgccaaggttcctgggtgtgaacatgagtttcagagtcactcctctagggcccctgcttctcagctcggaccattgacccctcagaggacatttggcaacatctggaaacgttcttggttgtcacagcctaggaggtgggtagtggtgctgctagtgggtagaggtcaggggtactgcaccaggacagcagcactggccacagaaaaaaactgtcttgccctgagcatcagtagttccccgttgactggccctgaggcagagcgatgcagcatccaaaaggcggtggagcagacctgccccagatcctagtcacttaaccttcagtgttgatctgaaggaacttcctgcagattgtccccctgaatttattctggacatccccaatggggtctgctgaggccatataccctgtccgtcacctgagatgcttctctctcttcctgcagggatgccattattacttgcaatcctgaggaattcatagttgaggcgctgcagcttcccaacttccagcagagcgtgcaggagtacaggaggagtgcgcaggacggcccagccccagcaggtgagtgggagcccacagagcagcctttctttcctgggctctgcccctgctgctgttttcctagcattaagtggagtgctggtggggcgcattctaacctggcttttcagtctaatccagggcttctctactcagctctacattagaattatagtcattggaggagggggctttggggagtttaagaatcccaattcctggctgggcgcggtggctcacacctgtaatcccagcacttcgggaggccgaggcaggtggatcgcgaggtcgggagatcgagaccatcctggctaacatgatgaaaccccgtctctactaaaaatacaaaaattagctgggcgtggcggcgggcgcctgtagtcccagctactcgggagactgaggcaggagaatggcgagaacccgggaggcggagcttgcagtgagccaaggtcgtgccactgcgctccagcctggacgacagagtgagactccgtctcaaaaaaaaaaatcccaattcctgtgccccatcccacccaatcagagcatttggcgatggcacccaggcattcttggcaaggcacgcactgagtgaaacgttttagtgaacacctgtggaaagagctctgagcagggacttggctggcagagatctagtcctggctttgcggatgcaaatccatggaggatcttggccacgtcactcaactgaggctgagggccgggcacaggctttggaaccatcgggtctccctggatttgaatcctgaccctgcctcttaccatcttcactggagacctgggcgtctgagcctgtttcccccttgggaagcagagcatttcctacctggtagggctgggaggatgcgaccgaagtgcatggtcttgcagtgagagctggatgcaaggcacacactgttctcttgaaataaatgacagttcccagcataaagaaatgtcattttttaaatgtaaaagaattacagcaattcttttgaagaaaggactggagaatttatttgttcttcttagccttttggtgacagatagcctgtgggtcccacactggtgcgaagtcctttgtttcagagcggttgccaggggcctgccagtccccctcctgggaagctggatagaactatgttgcttacccatctgtcttagtctgtgttttgttattataaaagaatatgtgagactgggtaatttatcaagaaaagaggtgtatttagttcacggttctgcgggctgagaattgaaggtcacggccctagcttccagtgaaggcttccatgctgcatcataacgtggcagaggagcgcaagtaggaagtggacgcttgtgaagacgggataacctgagctgcactctggctttataacaacccccctctcctgggaacaaatccattcccttgagaagtaatgcagtctcctgagagccagtacttactactgcagctccaagccactcaggagggtccgtccctgtagcccaaacgccttccactaggccccgcctcccaaaaccgccatactagggagcacgtttccacatgaggtctggggacaaaccaatgacactcaaaccattgcaccttctcatggctgcatgctggctcacttttgacccaaaggaatggattgtttcacatggattttttcacagagaaaagaagtcagtacccagaaatcatcttccttggaacagggtctgccatcccgatgaagattcgaaatgtcagtgccacacttgtcaacataaggtatgctgctttcccaggaagcatccttccatcaagggcacgtttactttttaaacaaaagtcctgctgtactcaccagtcgatttgaaatgcggtatcaagccctgtcacttgtcatgtcgactggagtgtccaggagaggagcgtggccttactgcattttatagcctcagtagcaaactttaccctgggaatcaccaaaattcatcccatgatgtcttttaataaacagctgattttactgtgggcagtacacctagctaagaaattagctcctttaatttttacattaatcctatgaagtggtgaataactacccattttgttgatgagtgacctgatattcagagaggtgacttgctatggttcctacagctggtaagtggggcatctgaagtttgagcggggacttggggtcttgattgctacatggtattgtcccccagccatttgttggtagtatgttaaaaagctttagggttttgcacatttgtgttcagaacctttattggattccccttgacatgttttttagttgattctcttgggtttgcctggggtcatcagcagagagattagtcaaatgcgttgtgacatgtacacgttatctctacagatagtatgtgaagaaaataagattgtgaattaccaggtttgttttaaattttgctctgccatcttacatgctagtggtggatgataaacaaccaaatagtgcattaaatatatacagcagtgacgagatgtgccctgacatcagaaatatacaatctggggtgtgtttctctgtggatgaggacatgcaataaagcagcttggagtgagccggcctctcccgggggctgagatcctgggggaagaagggctttttgagtttgacctgacaccctgcgagcagcttttgaaccagctgaagctaatgggaaggtgctattgccaccttgcctccgcctcccgactcctttttcccccagaaggtaatgtcttagcaccggggcttctctctgcaaaatgggtgcagccctctcagtgttcgtggctcctcccagagaatgaaggaggccagagcgggtcagcactctctctgccttggagcagagcttctgaaatggactgcacagcagaatagcccaagaagtttgtcagaatccagacttccagagccctgcctaaaaccaagtcagaaaccccgagtgacacctgggagtctgcgttaactggctccctgaatgaagcacctgcagcccgccctgcaccaggtgtctttgaggacatgagctgaggaaaccccgaccacttgcaaagggggaaaagtccgatggcagctggacctagaaagagtctcatatggcccagtgcctgtcctggtattttcaacagaggctgtggccacagtcaatctgcatggtcagattcattgttaggactaaatgctttaagcctcctataaactttttttttttttttttgatgcccagcctttgtgtaagtctacttgaaagggtttcagggttccatggatacttctttgctataaagaggatgacacatgtaaaatcacctttatggttaaattaattggcttttatattagctcctcaaagcaaagcaggagagacagaaatttctgcagttgcttcttggtcctgtccaaagcagacatcagcctctgaaccatcagcagtcttcctagtggcagtgactctcttcctcttctcttctgcagccccgacacgtctctgctactggactgtggtgagggcacatttgggcagctgtgccgtcattacggagaccaggtggacagggtcctgggcaccctggctgctgtgtttgtgtcccacctgcacgcagatcaccacacggtgagtgttgggctggaccacaaagctggagcctggaggaggcactgccacgttgagttggccctttggctgcgtcttttcctccgcttccaaacttgcccagagcttttgttactcatctctggctaggaaatggttttttgcaaaactcaacatagtccttctgcgccacaagaatgtcttctcttcctgttcagttcctttcctgcagcaggacaggtttgagtttacccagccttccttgagtcttgaatctcacacggcctgctcagcggaagctttgaccggatgcaggaggtgtggctatgagaccctcaccttggtctcctggggtgccgggccctgggccgttgccctcttcccagcacgggtcgtgtcgctttctgcctgtgacatttcagggccatggcgcagggggctcggcctgtgccacccccactgcggctgtgttagaggctggtgggtgacgtcgggctggcaactcctgcaagagagagggctgcagaccctaacccggaggggatggccctggggcctggctgacgcatgtctcctgtttccttgccagggcttgccaagtatcttgctgcagagagaacgcgccttggtaagtgtggcacttgatgggcgttctgagtttcagcggtttacacatcatccgccatgcctcttggcactccagtttttattgagatgttctgtcgtcgagtcggcacttgcattttttgttccaggcatctttgggaaagccgcttcaccctttgctggtggttgcccccaaccagctcaaagcctggctccagcagtaccacaaccagtgccaggaggtcctgcaccacatcaggtgagcatccagggcagcctggcccgctgggctgttgcttgctgccgtctccttcagaagctcaaggtggacactggggtagttaccaatatcccccagcagccttgcccttgacatggtcccagatggcagaagcaggggagaagtgcattggctgaaggacagaaaccattagatagttcccatgtaatgcttattttcttagaagcatttcttcccagtcctcatttgagttctgagctgctttctaaacttcgagcagcttttcttgatgagacagttccagagccaagcacccaaatagtggctagcacagagaatgtccatagcaggtgtgtggctagctggcaggtggcaccatcctcaccccaaggggaaggagtcccctctgctggagccatccgtggcccgtgctgcctgagccggaggcagcattcacctgctgggtttctcccagtggcctagaggctttggtttggctctttatatttgactgctgtttcctcatcatagtgactatgatttaactcatgttttctcctaagaatgattttggggttctccagccaaagacttaaactttggttccagatgtccaagaaacgtttattatcattttaaatgttttgtctttttacagtatgattcctgccaaatgccttcaggaaggggctgagatctccagtcctgcagtggaaagattgatcagttcgctgttgcgaacatgtgatttggaagaggtaaggggcacagccgcaggcatcatgggggcgaggtggggagcagagctgcagagccctccagccccaccctttcagtttcagacctgtctggtgcggcactgcaagcatgcgtttggctgtgcgctggtgcacacctctggctggaaagtggtctattccggggacaccatgccctgcgaggctctggtccggatgggtgagtagaggaagaagcaagccaccctgaggttgctctggggtttgtgtagctggaggtgaatgcaggtgggcttgcagggaaacgtcagcagaggcaggagactcaggtccccaccctcagagtctctggttgtcatcctagtaggcagacccagggccaggggagctgagtgttgagaccaggaaacagcacgtgactgaggcctgtgtgccgctctcgcagagaactctgccctgatccttgtgctgcttctccagggaaagatgccaccctcctgatacatgaagccaccctggaagatggtttggaagaggaagcagtggaaaagacacacaggtagcaaaggccggtcagtccttgtcgcccacatcctctccctcccccactacgtgacactgagcagccgtcgtttgtctccactgatgtggggctgccctgcttcctatcaagggctatgggggcttccttgacctgtggcagtgctcacaggctcttggcctttatttttgcagaattttctaagcaagattctagagtgaggcacagttttttgaaagcatctagaaatcggctgaataaactataagccatgtcagggaattgccaggggaaggcgggggctgggggactgaatttttggctgctaatttcaacgaaagagtgcattaccccaggtgggccctgtggtttctcttgggtgccctcatggacagatttggcagccagcacagagggtgggcttcatccaggggtgtgtgcgaaggctctggccctcaggggagattgtgctggctacggaggtgcccgttaagaaaacccaccagcttccccgggtgccctggcagttgatggccagggtctgtgccactgtctgctttgcagtcttgcagttgagttcagcttcagtctgctctgtccttcacctgcagcacaacgtcccaagccatcagcgtggggatgcggatgaacgcggagttcattatgctgaaccacttcagccagcgctatgccaaggtccccctcttcagccccaacttcagcgagaaagtgggagttgcctttgaccacatgaaggtctgtatgtcacacggacagcacagggcggggacggggcagggagacaggactctacacactgagtaggacggtcagctggagtttgctttcttatttggggccaccgtgggaaaaggttatctacccatcactaaccaggtcgaaccaccctgggtttgctggtgagacccacctcctgcaggggccaactagtcttcagtctcagttcactggaaatttctgagaatccttttaggcctggactgctcacacagtcatggcatttgagcctcagcacagacctgtgagacaggtggttgcctcttgtgagtgggaaagccaggcctgacccttggccttccggaatgaaggggcagagccggagccaggcctcgtttttcaggagcttgattttgagagcatctggactgctctcccttccctctccggaggcccttagccaggcctggggagcctctgcccctttagagggttccctccatgccattcttttttccatttcagctgtggcctgttggcttgtgccaaggaaggggcgttggcgctgctgtgtgagcacatgactgcatcccttccagctcctgtcccccacccctgcccctctgagacatgtccttgtcttctattgtgtcttctaggtctgctttggagactttccaacaatgcccaagctgattcccccactgaaagccctgtttgctggcgacatcgaggagatggaggagcgcagggagaagcgggagctgcggcaggtgcgggcggccctcctgtccagggagctggcaggcggcctggaggatggggagcctcagcagaagcgggcccacacagaggagccacaggccaagaaggtcagagcccagtgaagatctgggagaccctgaactcagaaggctgtgtgtcttctgccccacgcacgcacccgtatctgccctccttgctggtagaagctgaagagcacggtcccccaggaggcagctcaggataggtggtatggagctgtgccgaggcttgggctcccacataagcactagtctatagatgcctcttaggactggtgcctggcacagccgcgggccaggaggctgccacacggaagcaagcagatgaactaatttcatttc

SEQ ID NO: 11809 - DNA, 2671 bp, Homo sapiens
aacgcgggcgtaggtgaccggcggctttctcagttttggtggagacgggcgcatgtgggcgctttgctcgctgctgcggtccgcggccggacgcaccatgtcgcagggacgcaccatatcgcaggcacccgcccgccgcgagcggccgcgcaaggacccgctgcggcacctgcgcacgcgagagaagcgcggaccgtcggggtgctccggcggcccaaacaccgtgtacctgcaggtggtggcagcgggtagccgggactcgggcgccgcgctctacgtcttctccgagttcaaccggtatctcttcaactgtggagaaggcgttcagagactcatgcaggagcacaagttaaaggttgctcgcctggacaacatattcctgacacgaatgcactggtctaatgttgggggcttaagtggaatgattcttactttaaaggaaaccgggcttccaaagtgtgtactttctggacctccacaactggaaaaatacctcgaagcaatcaaaatattttctggtccattgaaaggaatagaactggctgtgcggccccactctgccccagaatacgaggatgaaaccatgacagtttaccagatccccatacacagtgttagccagagaagaggggtcagggactcttccctggtcgtagctttcatctgtaagcttcacttaaagagaggaaacttcttggtgctcaaagcaaaggagatgggcctcccagttgggacagctgccatcgctcccatcattgctgctgtcaaggacgggaaaagcatcactcatgaaggaagagagattttggctgaagagctgtgtactcctccagatcctggtgctgcttttgtggtggtagaatgtccagatgaaagcttcattcaacccatctgtgagaatgccacctttcagaggtaccaaggaaaggcagatgcccccgtggccttggtggttcacatggccccagcatctgtgcttgtggacagcaggtaccagcagtggatggagaggtttgggcctgacacccagcacttggtcctgaatgagaactgtgcctcagttcacaaccttcgcagccacaagattcaaacccagctcaacctcatccacccggacatcttccccctgctcaccagtttccgctgtaagaaggagggccccaccctcagtgtgcccatggttcagggtgaatgcctcctcaagtaccagctccgtcccaggagggagtggcagagggatgccattattacttgcaatcctgaggaattcatagttgaggcgctgcagcttcccaacttccagcagagcgtgcaggagtacaggaggagtgcgcaggacggcccagccccagcagagaaaagaagtcagtacccagaaatcatcttccttggaacagggtctgccatcccgatgaagattcgaaatgtcagtgccacacttgtcaacataagccccgacacgtctctgctactggactgtggtgagggcacatttgggcagctgtgccgtcattacggagaccaggtggacagggtcctgggcaccctggctgctgtgtttgtgtcccacctgcacgcagatcaccacacgggcttgccaagtatcttgctgcagagagaacgcgccttggcatctttgggaaagccgcttcaccctttgctggtggttgcccccaaccagctcaaagcctggctccagcagtaccacaaccagtgccaggaggtcctgcaccacatcagtatgattcctgccaaatgccttcaggaaggggctgagatctccagtcctgcagtggaaagattgatcagttcgctgttgcgaacatgtgatttggaagagtttcagacctgtctggtgcggcactgcaagcatgcgtttggctgtgcgctggtgcacacctctggctggaaagtggtctattccggggacaccatgccctgcgaggctctggtccggatggggaaagatgccaccctcctgatacatgaagccaccctggaagatggtttggaagaggaagcagtggaaaagacacacagcacaacgtcccaagccatcagcgtggggatgcggatgaacgcggagttcattatgctgaaccacttcagccagcgctatgccaaggtccccctcttcagccccaacttcagcgagaaagtgggagttgcctttgaccacatgaaggtctgctttggagactttccaacaatgcccaagctgattcccccactgaaagccctgtttgctggcgacatcgaggagatggaggagcgcagggagaagcgggagctgcggcaggtgcgggcggccctcctgtccagggagctggcaggcggcctggaggatggggagcctcagcagaagcgggcccacacagaggagccacaggccaagaaggtcagagcccagtgaagatctgggagaccctgaactcagaaggctgtgtgtcttctgccccacgcacgcacccgtatctgccctccttgctggtagaagctgaagagcacggtcccccaggaggcagctcaggataggtggtatggagctgtgccgaggcttgggctcccacataagcactagtctatagatgcctcttaggactggtgcctggcacagccgcgggccaggaggctgccacacggaagcaagcagatgaactaatttcatttc

SEQ ID NO: 11810 - DNA, 13259 bp, Homo sapiens
tccacatggtaatagtataaacaaaacagagcagcagaaaggcttgcgttttcttaattctctgccttgtaatgcttgtagagagtcattattgtaagaaagccaggtgtgtaaacagatccttcttcctgggcttactataacttggcccgttgggggaatgagaagggttgttgtaaaggtggcagcctgcaactttaataatgaccagtccacagttttggccacccagggtctgggtaggcccaaaactgtgttctgttttcccagaggagaacagggcctgacaaacggattcattttgtatttttcattaatgtaacatttatgcaaattttccattaatgtggaaactataactgctaagccaatgagacagtcaaatcagtgagaggctctgcacgtcttccagaatgacagcccactgggaaacggagttaaaagtccaagatgagatgtagctcaggagtcaggccgcttcgggagtttgttgtccttaacagaaggtcagcgttggcaaagctcggcagctcctctttctgtcctgaggtcttgtctagtgactgagaacaggctgacccctatgtgctgtccttgtttggatggcaccgggtaaagactgacaccagcattttctctgcaggcctttgaacttttgtgttatttcatatattatatgtgttataaagcacattacaatatatttttctctgtcttctccagtcctaggtgaaatgtgtcatttaaaaaaaatttcacttgccattctaaagtttttctggtgagagttttgtgtttttcatttacgcaaacacatctccacataagtagggaaaaaaagtcttcttgagtatattagtgtcttcagcctttgtattgggacagtagcgtccattaatttttatgtgaagtgaaattaggtatcgggtcataatcagtctgtgatgtcttcacagctttcacatttaccttgtgataatcaagtgtgtttttcctcaggtgttagccagagaagaggggtcagggactcttccctggtcgtagctttcatctgtaaggtaaggaagactttccggagggctgtacatgactggggtcttggtcagcgacctctggtttgcactttttcattaatttgagggtaggcactcctgttacctgagacaagaagagatagcagatcttcagaaaagctgatggaaggccgggtgcagtggctcacgcctgtaatcccagcactttgggagtccaaggcaggtggatcacgaggtcaggagtttgagaacagcctgaccaacgtggtgaaaccctgtctgtactaaaaatacaaaaattagctgggtgtggtggcgcatgcctgtaatcccagctacttgagaggccaaggcaagagaatcgcttgaacacaggaggcggaggttgcagtgagttgagattgcaccattgcactccagcctgggtgacagagcaagactctctcaaagaaaaaaaaaattcgatagaaatgacactggcaatgagcctgcaacaagtattactactgacctttcataattgtcatcacttgtaggtttcagagtttagatgctctgtttctcaaaataaccccatacttttatttccttttaaatttttttccagtgccctgtcagcctccgtacattttttttttttttttttgagaccatgtctgtctccatcgcctaggctggagtgtgcagtggcacaatctcggctcactgcagcctccacctcccaggttcaagtgattctcctgcctcagcctcccaagtagctaggattataggtgcgcgccaccacacccagttaatttttgtatttttagtagagatggggtttcaccatgttggccaggctggtttcactcctgacctcaggtgatccacccaccttggcctcccaaaatgctgggattacaggcgtgaagcactgtgcctggtccatattcttttatatttgccaatgattggtccttttagaattcagaaattattgaaggcagctgtgtttgttttccttcaactccatcaggcctttattcaaagtcttttaactctgttttactttatttcattcccctgcaatagctaaggtctaacaccagattaattggaatattagctagcattcacaaaggcctagatctgtaactctgaaattggtcaaattccattaaaaatttttgttacaataagctgtttgtaagatctgactagtggcttatttttaatagaattttgcattaaaattttatcaatacaatttgcaacaaatttgtctaaatatgtgaaaagatttcattgcctttttgtgggcttagattattttttaatgttgattttgaaatatatttggaattgttatctaaattctaaaagctacaagtgaaaataataatgaaagtaagtagttaatattagtggcaagatcattgccagtatcatttctatcgatttatttgaataatgtgattttcataaaagttaagtactactgttaacaggcttattacttgtatgtttctgagttttagatagcaaaatcattttttaaagttttaaaaatattttatttttgataatctatatttatattgtctgatttttaaactgttttctatggtaatctttaaatcgtattcctgctttccggaataggtaacagtgagcatgatgaaaagtgacaagctcacttttacacactcgggcagttgccctattatcaggcagccgttcctgggggctgccagctgcctgccctggcttttccatctccttccttgctgtcttctgcggctccttctgagggctgctgtcactggattagcctataacgcctttcccctcttctaattaatttgctgctctcaggtgaggttttggaaagcaataaagctgagctaggtcaagttccaggagtctcttggcatgaggacctgaaaaactcatctgttggaagacctcggctttgggcagctggtgcactgttggggcgttattggctgcgttctggctctcatcagtcttccagatactctgcattcctcagagaggaacatatctccatgggttgagttcagctcccagggagatgggtttccctgccttaagtcggcaagtacctttttttttctttttttgagacagagtctcgctctgtcaccaggctggagtgcagtggtgcgatcttggctcactgcaacctctgcctcccagggtcaagcagttctcctgcctcagcctcccgagtagctgggactacaggagcgcaccaccatgcccagctaatttttgtatttttttagtagagacggggtttcaccatgttggccaggatggtctggatctcttgatttcctgatccgcctgccttggcctcccaaagtgctgggattacaggcgtgagccatcatgaccagcctttatgtttctttgtttgttttgtttttctgagatggagtctcgctctgttgcccaggctggagtgcagtgttgccatctcgacttactgcaacctctgccttccaggttcaagtgattccttgcctcagcctcccgtgtagctgggatcacaggtgcctgccaccatgcccggctaatttttgtattgttagtagacacagggtttcgccatgttggccaggctagtctcgaactcctgacctcaagtgatctgccttcctcagcctcctaaagtgctggggttacaggagtgaaccaccatgcccagccttcaattaccttttatttattttatttatttatttatttttgagacggagtctttctgtgttgcccaggctggagtgcggtggcgcaatcttagctcactgcaacctcctcctcccaggctcaagtgattctcatgcatcagcttcccgagtagctgggacttcaggtgcccgccaccacacttggctaatttttgtgtttttagtagagacggggtttcaccatgttggccaggctggtcttgaatttctgacctcaaatgatcctcctgcttcagcctcccaaagtgctgggattacaggcgtgagccactgcccccaacagcaagtaccttttaaacattagagacatttagttgccatcctcaaacccgtttgggtgtgtggagagaatgttgggtcgtgacatggttgttagttatctaaagatgtcagccatcaatcatcactgtgtgatgtgcacactgaagctgtaatccttcatctaggatgatattttttaagatggaaaattctacaaccctgagaataaggatttcagatccaaatttgagactcagccctacgagtaactctttaacttcagagagttaaaagaagatgcacagttgatgaagatttaaaggagaaaatggaaatcaaatgtcatttagcactcaaaggcctacatgtcatttctgacatttttctgtttgtgtgaaattttttttttcctataaaatgattgtgaagttttctggtagaattattgtttgcctttctaatgtaatagcatattagggtttttttttttttctttttctttttttgagacagagtctcactctgtcgcccaggctggagtgcagtggcacgatctcgggtcactgcaatcttccgcctcctgggttcctgcctcagcctcccgagtagctgggactacaggcgcacgtcaccacacccggctaattttttgtatttttagtagtgacagggattcaccgtcttagccagggtggtcttgatctcctgacctcatgatctacccgcctcggcttcccaaagtgctgggattacaggcatgagccgctgtgcctggctattagagattttttattataatttatctccaagataaaagcagtgacattatattgccacataattgaaaaatacaagagaaataaaaatcatccatgcttttgttagcctatcactgtcattgaaatattatgttacatggcagtttgcttgctggttgctctgttaggcaacgctctggtgacattcctttagctattaattgaggaatgtagaatgacagaacagtgtttctcctcaatgatacttgaaggatatttattaactttcatattgaattacattttattaaatttataatgagttaatgctgggaaataaaacactgatttaagtcattttggcttttagtactaaagcatttgacaataaatgacttcttcagaatatggtataccttctgaaagcaataaacgcattttaatgaattgtaaggaaacaacatcattttattttttatttttttttttgagacagactttcgcttttgttgcctaggctggagtgcaatggcgcgatctcggctcactgcaacatccgcctctgggttcaagcgattctcctgcctcagcttcctgagttgctgggattacaggcacgtgccaccacgcctggccaattttgtatttttagtagagacggggtttctccacgttggtcaggctggtctcaaactcctgacctcaggtgatctgcccgcctcagcctccgaaagtactggaattacaggcgtgagccaccgtgcctggccaacattattatttttttttaatctagaaaaatacacttctaagaaaattgattaaaaccaaccttcttcattagcccctaagatcacatctatgttctctttgttgcagcttcacttaaagagaggaaacttcttggtgctcaaagcaaaggagatgggcctcccagtgtgagtgtggggggtaaggcttctggggactcactgggtacacctgtccacttaaggaaatcacatttcacagaggccttgcctcttcatttcagtgggacagctgccatcgctcccatcattgctgctgtcaaggacgggaaaagcatcactcatgaaggaagagaggtgagatgcctggttttcttgattcagcagttacaggtagggtctgaaatgctgggcagagtctgtcttcttcaggccctacagacaccacttttgaaggacgtggaacagtttggacatcactcagctaagtgataaaatggcctcttttatctgtgtttgtcccgcatgtcaacacggctgcattcgagcatttttgtagattgtccatttaggatctagtcaccgtcctccttaaagggtgcatgctttccttggtacttgagctcaggacagtgtctaacaacagaccccatatggatgggcctggggtttatggtccagaggaatgccacagtattctatgtcaagatatttcctctgacttctgaggacattaggaccagtggccacagactgaagaaaaccttaatgccaagcctcctttcctggccagtgtaggcctgaagtgcctcaacctgacagttacctgtttaggtatccacaaagagaccagaagggtgttgatggtgatgtgtaaagttggttttgtgctttgtttacctctcagctcactggataggatatgtcatgttagcagttgccttgaaggcagttcagtttggtggctgagctgtgacccccagtgggcgggcttatttggttttgcagattttggctgaagagctgtgtactcctccagatcctggtgctgcttttgtggtggtagaatgtccagatgaaagcttcattcaacccatctgtgagaatgccacctttcagaggtaatgaggggtctctagggtgggagaagtgagagctgaaacccagcccagcatcgacatgggcatcttgtggcaagagctgtgtttctgggaagaccactatctgggtttacagttcagaggccggcactcctgccttaagtcactgttggtagttggtgggctccggtgtacacagcctcaaagtgaaattagaaaagattgaaaactagaaacaactgaggactagaaattcaactagaactcttacagctcttataccagaagaaattctagaacttttttgaattctaactaatgccccagattatcatttggattattttgaactgaattaattttcttccattacctgcattgaaacaaatgaggtgggtcagagtgtgtgagactgtcgtggtcaagagtccgtgttatgggatggactcacagctggggaatgtcttttgggctaactgccactctgttgttgtcctctatcgaagttaaccagttttgcggttcagctttcattccagatggaatcatctttgacccacctatctgagtttgaatcttttcccccactcttaatggtttacctgtatttttcctgttcctagtttgtatctatctgtattttttcacttgtttttttctacttaccacaacaaatccttttgggctgctgtaccccttccgagtcagagcgttaggagttgtttcatggtctgctttattctctgtgggtgaatttggatgcgctggtagccccggctttgtattttaatccagttttgggcagcaaaacctcttcaatgaatcaggtgtcatttgagagccatgtgtggatgtgtgatgatgctgggatagataaaaatagctactgtgtatatttctttttaaagggaactggagggaaacacatcagcatgttagtaagtggtctgttgtccaggtggtgaaatttcagatgattttcatttctcgtgcctgtgtctcaggtcctctggaaggcagacaccagggtggcattggaggtgcaggaggtttattcgaggaaatttgactgtgagagaggaaggagagagggagcaggaggaggcagggagagcctgggtctggctttgcaggttggacccgtatgagtggagagggtaggaaggaagtgcagtgctgagaaaggatcagccaggcctactggaaagcccagagcagagcttgccagatacaggaatcccacgtccattggaaatggcccagcaccggggtctgccgtgagcagcctgctgtgagagcatggcctgggcgtggaggctgtcagctcactgcagtgctgcagagggccgcacgatacccctccctggctgcgtggtccctgtcttggtgtgtcctgagtctgcatcactttgtaaagccccactcttctgcccaggtaccaaggaaaggcagatgcccccgtggccttggtggttcacatggccccagcatctgtgcttgtggacagcaggtaccagcagtggatggagaggtatggagcccagcccagcggcacttggggtaactcttctgggcagtggtggattcccctttcctcccctcgtgctctttccagcgctacctacccttctgcacctgcctaaactttctgtgggattcctgccttcccagaattctaggcttcccagatctgtgctacactcgtgaagaaaatgcaccgctaggtggcgcagtgtccacacgattccatttattttacaccctccacactcttcagggtgtctgaacaaatactgccgtttggttgaggattccataagtgaattccaaagaagagattgcagctataaaatgatagcttccatttactgaatgcccactttgtgggaggcagtgtgtgaaatacccttcatttcacttcatttcctctagggtcgtcgccagcagccctgggaggtagatgtttagtcactggaaggcatctttttcctcggggcatcgctggccagggccaggtggaggagtatgagttgagctcgggtgcggggtgaccttgggctgctttttggcccctgcccgtatctccccacatggcccgtttacctgcccctcactccatggcctgctctcctgctgtctctttcattcctcagggtttgggtcccctatttgtatgccctggacatcttctttttcttgtttttcctctcactcttcccagcacacctgaaaggcagctgagctagggaacaccgggctttgagacagcaggagtgggaccatgtttggccatgtagtaacactgcttggggcaagtcactgaactgtttgaacacctcatcctcattaccactcctgagctcagcaccactcctcagggggagctgcctcctaacagacgctgcaaatgccgggtctgtttcttcacaggtttgggcctgacacccagcacttggtcctgaatgagaactgtgcctcagttcacaaccttcgcagccacaagattcaaacccagctcaacctcatccacccggacatcttccccctgctcaccagtttccgctgtaaggtagtgtctcagaccggccccttgtcggcccagctctcgtcccctctctttctctccatgaatgtgttttgtctctttcagaaggagggccccaccctcagtgtgcccatggttcagggtgaatgcctcctcaagtaccagctccgtcccaggagggagtggcagaggtctgtgccatcttgaactaatggaatcgtctcagtcgagttgggaaacatttctgtaaatagccacatagtaaatgttccaggaggctctccagaccatatggtctctgttgtaactattcaactccgctttgagcacaaaagaaacacggacaataagctaatgaatgggcttggctgtgtgccagcgtgaatttatttagaaaagcagcctactccaggctgggttgaggtgggcggattggggccagtagttctccttttccaaaattgccttgcatgggaatagcagtgatagagctcgtgtgtttcacagtatagaaaataggaaatgtgtgatgaacaaagtcacccataatcctgttgcccagagataatgattgataacattttgtgtttcttgatttgtgtatgtgggtttatattgtcagtcttttcctgtatcactaaacagtcttaagtaacaagatttttattggtattccaaatagggatgtttactcatttgggatgtttccaattttttgttgtttttaatgaatgaaacaataaatgtcttatatataaatctttgatgggaactctgttcccttcaagtcattcctaaatgtgggattactggcccagagtgtgagacttgttaaggtacttgataaatgtaagatgccatcttgaaagcctcttccagtacaatccaaccaggaaagtgaacagccttactgccccacatctttattttaattaattaatttatttattttatttatttatttatttttttgagacggagtttcactcttgttgcccaggctggagtgcaatggcgtgatctcagctcactgcaacctccgcctcccgggttcaagcatttctcctgccccagcctcccgaatagctggaattacaggcgcctgctaccacgcccggctaattttttgtaattttagcagagacgggtttcaccatgttggcaggctggtctcgaactcctgacctcaggtgatccacccacctcagcctcccaaagtgttgggattacaggcgtgagccgtgcccggcctgttttaatttttaaggatctgaaccttgattttaagtttcctgcccactccacagtatttgtattagaatagagcatgtgctggattatgactggatgctgtgtgctgttgaggttgggtagttggggccctttaagagactatactagcaagactcgggcccacaggcaacatcacggggttgaagaacctggtgtccctttgttggcatctgcgcaggctcttaacacacagcagcgatacacagccctagccgacattcagatttaccttgtgcttgtgaaaaatattgcacagggcctgccctagacctagtgaattagaatcttgagagttaggcttgggactcacaagctcccagatgattttaatgctcagcgaggttgaagagccgcctgtccaaggagttgccactccgtgtgatctggggcttgctaggaaagtgggatctcaggcctcactgcagagctgccgaactggcttctgcgttttgccaaggttcctgggtgtgaacatgagtttcagagtcactcctctagggcccctgcttctcagctcggaccattgacccctcagaggacatttggcaacatctggaaacgttcttggttgtcacagcctaggaggtgggtagtggtgctgctagtgggtagaggtcaggggtactgcaccaggacagcagcactggccacagaaaaaaactgtcttgccctgagcatcagtagttccccgttgactggccctgaggcagagcgatgcagcatccaaaaggcggtggagcagacctgccccagatcctagtcacttaaccttcagtgttgatctgaaggaacttcctgcagattgtccccctgaatttattctggacatccccaatggggtctgctgaggccatataccctgtccgtcacctgagatgcttctctctcttcctgcagggatgccattattacttgcaatcctgaggaattcatagttgaggcgctgcagcttcccaacttccagcagagcgtgcaggagtacaggaggagtgcgcaggacggcccagccccagcaggtgagtgggagcccacagagcagcctttctttcctgggctctgcccctgctgctgttttcctagcattaagtggagtgctggtggggcgcattctaacctggcttttcagtctaatccagggcttctctactcagctctacattagaattatagtcattggaggagggggctttggggagtttaagaatcccaattcctggctgggcgcggtggctcacacctgtaatcccagcacttcgggaggccgaggcaggtggatcgcgaggtcgggagatcgagaccatcctggctaacatgatgaaaccccgtctctactaaaaatacaaaaattagctgggcgtggcggcgggcgcctgtagtcccagctactcgggagactgaggcaggagaatggcgagaacccgggaggcggagcttgcagtgagccaaggtcgtgccactgcgctccagcctggacgacagagtgagactccgtctcaaaaaaaaaaatcccaattcctgtgccccatcccacccaatcagagcatttggcgatggcacccaggcattcttggcaaggcacgcactgagtgaaacgttttagtgaacacctgtggaaagagctctgagcagggacttggctggcagagatctagtcctggctttgcggatgcaaatccatggaggatcttggccacgtcactcaactgaggctgagggccgggcacaggctttggaaccatcgggtctccctggatttgaatcctgaccctgcctcttaccatcttcactggagacctgggcgtctgagcctgtttcccccttgggaagcagagcatttcctacctggtagggctgggaggatgcgaccgaagtgcatggtcttgcagtgagagctggatgcaaggcacacactgttctcttgaaataaatgacagttcccagcataaagaaatgtcattttttaaatgtaaaagaattacagcaattcttttgaagaaaggactggagaatttatttgttcttcttagccttttggtgacagatagcctgtgggtcccacactggtgcgaagtcctttgtttcagagcggttgccaggggcctgccagtccccctcctgggaagctggatagaactatgttgcttacccatctgtcttagtctgtgttttgttattataaaagaatatgtgagactgggtaatttatcaagaaaagaggtgtatttagttcacggttctgcgggctgagaattgaaggtcacggccctagcttccagtgaaggcttccatgctgcatcataacgtggcagaggagcgcaagtaggaagtggacgcttgtgaagacgggataacctgagctgcactctggctttataacaacccccctctcctgggaacaaatccattcccttgagaagtaatgcagtctcctgagagccagtacttactactgcagctccaagccactcaggagggtccgtccctgtagcccaaacgccttccactaggccccgcctcccaaaaccgccatactagggagcacgtttccacatgaggtctggggacaaaccaatgacactcaaaccattgcaccttctcatggctgcatgctggctcacttttgacccaaaggaatggattgtttcacatggattttttcacagagaaaagaagtcagtacccagaaatcatcttccttggaacagggtctgccatcccgatgaagattcgaaatgtcagtgccacacttgtcaacataag

SEQ ID NO: 11811 - DNA, 858 bp, Homo sapiens
tccacatggtgttagccagagaagaggggtcagggactcttccctggtcgtagctttcatctgtaagcttcacttaaagagaggaaacttcttggtgctcaaagcaaaggagatgggcctcccagttgggacagctgccatcgctcccatcattgctgctgtcaaggacgggaaaagcatcactcatgaaggaagagaggttttgcagattttggctgaagagctgtgtactcctccagatcctggtgctgcttttgtggtggtagaatgtccagatgaaagcttcattcaacccatctgtgagaatgccacctttcagaggtaccaaggaaaggcagatgcccccgtggccttggtggttcacatggccccagcatctgtgcttgtggacagcaggtaccagcagtggatggagaggtttgggcctgacacccagcacttggtcctgaatgagaactgtgcctcagttcacaaccttcgcagccacaagattcaaacccagctcaacctcatccacccggacatcttccccctgctcaccagtttccgctgtaagaaggagggccccaccctcagtgtgcccatggttcagggtgaatgcctcctcaagtaccagctccgtcccaggagggagtggcagagggatgccattattacttgcaatcctgaggaattcatagttgaggcgctgcagcttcccaacttccagcagagcgtgcaggagtacaggaggagtgcgcaggacggcccagccccagcagagaaaagaagtcagtacccagaaatcatcttccttggaacagggtctgccatcccgatgaagattcgaaatgtcagtgccacacttgtcaacataag

SEQ ID NO: 11812 - DNA, 8505 bp, Homo sapiens
tgaattagaatcttgagagttaggcttgggactcacaagctcccagatgattttaatgctcagcgaggttgaagagccgcctgtccaaggagttgccactccgtgtgatctggggcttgctaggaaagtgggatctcaggcctcactgcagagctgccgaactggcttctgcgttttgccaaggttcctgggtgtgaacatgagtttcagagtcactcctctagggcccctgcttctcagctcggaccattgacccctcagaggacatttggcaacatctggaaacgttcttggttgtcacagcctaggaggtgggtagtggtgctgctagtgggtagaggtcaggggtactgcaccaggacagcagcactggccacagaaaaaaactgtcttgccctgagcatcagtagttccccgttgactggccctgaggcagagcgatgcagcatccaaaaggcggtggagcagacctgccccagatcctagtcacttaaccttcagtgttgatctgaaggaacttcctgcagattgtccccctgaatttattctggacatccccaatggggtctgctgaggccatataccctgtccgtcacctgagatgcttctctctcttcctgcagggatgccattattacttgcaatcctgaggaattcatagttgaggcgctgcagcttcccaacttccagcagagcgtgcaggagtacaggaggagtgcgcaggacggcccagccccagcaggtgagtgggagcccacagagcagcctttctttcctgggctctgcccctgctgctgttttcctagcattaagtggagtgctggtggggcgcattctaacctggcttttcagtctaatccagggcttctctactcagctctacattagaattatagtcattggaggagggggctttggggagtttaagaatcccaattcctggctgggcgcggtggctcacacctgtaatcccagcacttcgggaggccgaggcaggtggatcgcgaggtcgggagatcgagaccatcctggctaacatgatgaaaccccgtctctactaaaaatacaaaaattagctgggcgtggcggcgggcgcctgtagtcccagctactcgggagactgaggcaggagaatggcgagaacccgggaggcggagcttgcagtgagccaaggtcgtgccactgcgctccagcctggacgacagagtgagactccgtctcaaaaaaaaaaatcccaattcctgtgccccatcccacccaatcagagcatttggcgatggcacccaggcattcttggcaaggcacgcactgagtgaaacgttttagtgaacacctgtggaaagagctctgagcagggacttggctggcagagatctagtcctggctttgcggatgcaaatccatggaggatcttggccacgtcactcaactgaggctgagggccgggcacaggctttggaaccatcgggtctccctggatttgaatcctgaccctgcctcttaccatcttcactggagacctgggcgtctgagcctgtttcccccttgggaagcagagcatttcctacctggtagggctgggaggatgcgaccgaagtgcatggtcttgcagtgagagctggatgcaaggcacacactgttctcttgaaataaatgacagttcccagcataaagaaatgtcattttttaaatgtaaaagaattacagcaattcttttgaagaaaggactggagaatttatttgttcttcttagccttttggtgacagatagcctgtgggtcccacactggtgcgaagtcctttgtttcagagcggttgccaggggcctgccagtccccctcctgggaagctggatagaactatgttgcttacccatctgtcttagtctgtgttttgttattataaaagaatatgtgagactgggtaatttatcaagaaaagaggtgtatttagttcacggttctgcgggctgagaattgaaggtcacggccctagcttccagtgaaggcttccatgctgcatcataacgtggcagaggagcgcaagtaggaagtggacgcttgtgaagacgggataacctgagctgcactctggctttataacaacccccctctcctgggaacaaatccattcccttgagaagtaatgcagtctcctgagagccagtacttactactgcagctccaagccactcaggagggtccgtccctgtagcccaaacgccttccactaggccccgcctcccaaaaccgccatactagggagcacgtttccacatgaggtctggggacaaaccaatgacactcaaaccattgcaccttctcatggctgcatgctggctcacttttgacccaaaggaatggattgtttcacatggattttttcacagagaaaagaagtcagtacccagaaatcatcttccttggaacagggtctgccatcccgatgaagattcgaaatgtcagtgccacacttgtcaacataaggtatgctgctttcccaggaagcatccttccatcaagggcacgtttactttttaaacaaaagtcctgctgtactcaccagtcgatttgaaatgcggtatcaagccctgtcacttgtcatgtcgactggagtgtccaggagaggagcgtggccttactgcattttatagcctcagtagcaaactttaccctgggaatcaccaaaattcatcccatgatgtcttttaataaacagctgattttactgtgggcagtacacctagctaagaaattagctcctttaatttttacattaatcctatgaagtggtgaataactacccattttgttgatgagtgacctgatattcagagaggtgacttgctatggttcctacagctggtaagtggggcatctgaagtttgagcggggacttggggtcttgattgctacatggtattgtcccccagccatttgttggtagtatgttaaaaagctttagggttttgcacatttgtgttcagaacctttattggattccccttgacatgttttttagttgattctcttgggtttgcctggggtcatcagcagagagattagtcaaatgcgttgtgacatgtacacgttatctctacagatagtatgtgaagaaaataagattgtgaattaccaggtttgttttaaattttgctctgccatcttacatgctagtggtggatgataaacaaccaaatagtgcattaaatatatacagcagtgacgagatgtgccctgacatcagaaatatacaatctggggtgtgtttctctgtggatgaggacatgcaataaagcagcttggagtgagccggcctctcccgggggctgagatcctgggggaagaagggctttttgagtttgacctgacaccctgcgagcagcttttgaaccagctgaagctaatgggaaggtgctattgccaccttgcctccgcctcccgactcctttttcccccagaaggtaatgtcttagcaccggggcttctctctgcaaaatgggtgcagccctctcagtgttcgtggctcctcccagagaatgaaggaggccagagcgggtcagcactctctctgccttggagcagagcttctgaaatggactgcacagcagaatagcccaagaagtttgtcagaatccagacttccagagccctgcctaaaaccaagtcagaaaccccgagtgacacctgggagtctgcgttaactggctccctgaatgaagcacctgcagcccgccctgcaccaggtgtctttgaggacatgagctgaggaaaccccgaccacttgcaaagggggaaaagtccgatggcagctggacctagaaagagtctcatatggcccagtgcctgtcctggtattttcaacagaggctgtggccacagtcaatctgcatggtcagattcattgttaggactaaatgctttaagcctcctataaactttttttttttttttttgatgcccagcctttgtgtaagtctacttgaaagggtttcagggttccatggatacttctttgctataaagaggatgacacatgtaaaatcacctttatggttaaattaattggcttttatattagctcctcaaagcaaagcaggagagacagaaatttctgcagttgcttcttggtcctgtccaaagcagacatcagcctctgaaccatcagcagtcttcctagtggcagtgactctcttcctcttctcttctgcagccccgacacgtctctgctactggactgtggtgagggcacatttgggcagctgtgccgtcattacggagaccaggtggacagggtcctgggcaccctggctgctgtgtttgtgtcccacctgcacgcagatcaccacacggtgagtgttgggctggaccacaaagctggagcctggaggaggcactgccacgttgagttggccctttggctgcgtcttttcctccgcttccaaacttgcccagagcttttgttactcatctctggctaggaaatggttttttgcaaaactcaacatagtccttctgcgccacaagaatgtcttctcttcctgttcagttcctttcctgcagcaggacaggtttgagtttacccagccttccttgagtcttgaatctcacacggcctgctcagcggaagctttgaccggatgcaggaggtgtggctatgagaccctcaccttggtctcctggggtgccgggccctgggccgttgccctcttcccagcacgggtcgtgtcgctttctgcctgtgacatttcagggccatggcgcagggggctcggcctgtgccacccccactgcggctgtgttagaggctggtgggtgacgtcgggctggcaactcctgcaagagagagggctgcagaccctaacccggaggggatggccctggggcctggctgacgcatgtctcctgtttccttgccagggcttgccaagtatcttgctgcagagagaacgcgccttggtaagtgtggcacttgatgggcgttctgagtttcagcggtttacacatcatccgccatgcctcttggcactccagtttttattgagatgttctgtcgtcgagtcggcacttgcattttttgttccaggcatctttgggaaagccgcttcaccctttgctggtggttgcccccaaccagctcaaagcctggctccagcagtaccacaaccagtgccaggaggtcctgcaccacatcaggtgagcatccagggcagcctggcccgctgggctgttgcttgctgccgtctccttcagaagctcaaggtggacactggggtagttaccaatatcccccagcagccttgcccttgacatggtcccagatggcagaagcaggggagaagtgcattggctgaaggacagaaaccattagatagttcccatgtaatgcttattttcttagaagcatttcttcccagtcctcatttgagttctgagctgctttctaaacttcgagcagcttttcttgatgagacagttccagagccaagcacccaaatagtggctagcacagagaatgtccatagcaggtgtgtggctagctggcaggtggcaccatcctcaccccaaggggaaggagtcccctctgctggagccatccgtggcccgtgctgcctgagccggaggcagcattcacctgctgggtttctcccagtggcctagaggctttggtttggctctttatatttgactgctgtttcctcatcatagtgactatgatttaactcatgttttctcctaagaatgattttggggttctccagccaaagacttaaactttggttccagatgtccaagaaacgtttattatcattttaaatgttttgtctttttacagtatgattcctgccaaatgccttcaggaaggggctgagatctccagtcctgcagtggaaagattgatcagttcgctgttgcgaacatgtgatttggaagaggtaaggggcacagccgcaggcatcatgggggcgaggtggggagcagagctgcagagccctccagccccaccctttcagtttcagacctgtctggtgcggcactgcaagcatgcgtttggctgtgcgctggtgcacacctctggctggaaagtggtctattccggggacaccatgccctgcgaggctctggtccggatgggtgagtagaggaagaagcaagccaccctgaggttgctctggggtttgtgtagctggaggtgaatgcaggtgggcttgcagggaaacgtcagcagaggcaggagactcaggtccccaccctcagagtctctggttgtcatcctagtaggcagacccagggccaggggagctgagtgttgagaccaggaaacagcacgtgactgaggcctgtgtgccgctctcgcagagaactctgccctgatccttgtgctgcttctccagggaaagatgccaccctcctgatacatgaagccaccctggaagatggtttggaagaggaagcagtggaaaagacacacaggtagcaaaggccggtcagtccttgtcgcccacatcctctccctcccccactacgtgacactgagcagccgtcgtttgtctccactgatgtggggctgccctgcttcctatcaagggctatgggggcttccttgacctgtggcagtgctcacaggctcttggcctttatttttgcagaattttctaagcaagattctagagtgaggcacagttttttgaaagcatctagaaatcggctgaataaactataagccatgtcagggaattgccaggggaaggcgggggctgggggactgaatttttggctgctaatttcaacgaaagagtgcattaccccaggtgggccctgtggtttctcttgggtgccctcatggacagatttggcagccagcacagagggtgggcttcatccaggggtgtgtgcgaaggctctggccctcaggggagattgtgctggctacggaggtgcccgttaagaaaacccaccagcttccccgggtgccctggcagttgatggccagggtctgtgccactgtctgctttgcagtcttgcagttgagttcagcttcagtctgctctgtccttcacctgcagcacaacgtcccaagccatcagcgtggggatgcggatgaacgcggagttcattatgctgaaccacttcagccagcgctatgccaaggtccccctcttcagccccaacttcagcgagaaagtgggagttgcctttgaccacatgaaggtctgtatgtcacacggacagcacagggcggggacggggcagggagacaggactctacacactgagtaggacggtcagctggagtttgctttcttatttggggccaccgtgggaaaaggttatctacccatcactaaccaggtcgaaccaccctgggtttgctggtgagacccacctcctgcaggggccaactagtcttcagtctcagttcactggaaatttctgagaatccttttaggcctggactgctcacacagtcatggcatttgagcctcagcacagacctgtgagacaggtggttgcctcttgtgagtgggaaagccaggcctgacccttggccttccggaatgaaggggcagagccggagccaggcctcgtttttcaggagcttgattttgagagcatctggactgctctcccttccctctccggaggcccttagccaggcctggggagcctctgcccctttagagggttccctccatgccattcttttttccatttcagctgtggcctgttggcttgtgccaaggaaggggcgttggcgctgctgtgtgagcacatgactgcatcccttccagctcctgtcccccacccctgcccctctgagacatgtccttgtcttctattgtgtcttctaggtctgctttggagactttccaacaatgcccaagctgattcccccactgaaagccctgtttgctggcgacatcgaggagatggaggagcgcagggagaagcgggagctgcggcaggtgcgggcggccctcctgtccagggagctggcaggcggcctggaggatggggagcctcagcagaagcgggcccacacagaggagccacaggccaagaaggtcagagcccagtgaagatctgggagaccctgaactcagaaggctgtgtgtcttctgccccacgcacgcacccgtatctgccctccttgctggtagaagctgaagagcacggtcccccaggaggcagctcaggataggtggtatggagctgtgccgaggcttgggctcccacataagcactagtctatagatgcctcttaggactggtgcctggcacagccgcgggccaggaggctgccacacggaagcaagcagatgaactaatttcatttcaaggcagtttttaaagaagtcttggaaacagacggcggcacctttcctctaatccagcaaagtgattccctgcacaccagagacaagcagagtaacaggatcagtgggtctaagtgtccgagacttaacgaaaatagtatttcagctgcaataaagattgagtttgc

SEQ ID NO: 11813 - DNA, 2793 bp, Homo sapiens
tgaattagaatcttgagagttaggcttgggactcacaagctcccagatgattttaatgctcagcgaggttgaagagccgcctgtccaaggagttgccactccgtgtgatctggggcttgctaggaaagtgggatctcaggcctcactgcagagctgccgaactggcttctgcgttttgccaaggttcctgggtgtgaacatgagtttcagagtcactcctctagggcccctgcttctcagctcggaccattgacccctcagaggacatttggcaacatctggaaacgttcttggttgtcacagcctaggaggtgggtagtggtgctgctagtgggtagaggtcaggggtactgcaccaggacagcagcactggccacagaaaaaaactgtcttgccctgagcatcagtagttccccgttgactggccctgaggcagagcgatgcagcatccaaaaggcggtggagcagacctgccccagatcctagtcacttaaccttcagtgttgatctgaaggaacttcctgcagattgtccccctgaatttattctggacatccccaatggggtctgctgaggccatataccctgtccgtcacctgagatgcttctctctcttcctgcagggatgccattattacttgcaatcctgaggaattcatagttgaggcgctgcagcttcccaacttccagcagagcgtgcaggagtacaggaggagtgcgcaggacggcccagccccagcagagaaaagaagtcagtacccagaaatcatcttccttggaacagggtctgccatcccgatgaagattcgaaatgtcagtgccacacttgtcaacataagccccgacacgtctctgctactggactgtggtgagggcacatttgggcagctgtgccgtcattacggagaccaggtggacagggtcctgggcaccctggctgctgtgtttgtgtcccacctgcacgcagatcaccacacggtgagtgttgggctggaccacaaagctggagcctggaggaggcactgccacgttgagttggccctttggctgcgtcttttcctccgcttccaaacttgcccagagcttttgttactcatctctggctaggaaatggttttttgcaaaactcaacatagtccttctgcgccacaagaatgtcttctcttcctgttcagttcctttcctgcagcaggacaggtttgagtttacccagccttccttgagtcttgaatctcacacggcctgctcagcggaagctttgaccggatgcaggaggtgtggctatgagaccctcaccttggtctcctggggtgccgggccctgggccgttgccctcttcccagcacgggtcgtgtcgctttctgcctgtgacatttcagggccatggcgcagggggctcggcctgtgccacccccactgcggctgtgttagaggctggtgggtgacgtcgggctggcaactcctgcaagagagagggctgcagaccctaacccggaggggatggccctggggcctggctgacgcatgtctcctgtttccttgccagggcttgccaagtatcttgctgcagagagaacgcgccttggcatctttgggaaagccgcttcaccctttgctggtggttgcccccaaccagctcaaagcctggctccagcagtaccacaaccagtgccaggaggtcctgcaccacatcagtatgattcctgccaaatgccttcaggaaggggctgagatctccagtcctgcagtggaaagattgatcagttcgctgttgcgaacatgtgatttggaagagtttcagacctgtctggtgcggcactgcaagcatgcgtttggctgtgcgctggtgcacacctctggctggaaagtggtctattccggggacaccatgccctgcgaggctctggtccggatggggaaagatgccaccctcctgatacatgaagccaccctggaagatggtttggaagaggaagcagtggaaaagacacacagcacaacgtcccaagccatcagcgtggggatgcggatgaacgcggagttcattatgctgaaccacttcagccagcgctatgccaaggtccccctcttcagccccaacttcagcgagaaagtgggagttgcctttgaccacatgaaggtctgctttggagactttccaacaatgcccaagctgattcccccactgaaagccctgtttgctggcgacatcgaggagatggaggagcgcagggagaagcgggagctgcggcaggtgcgggcggccctcctgtccagggagctggcaggcggcctggaggatggggagcctcagcagaagcgggcccacacagaggagccacaggccaagaaggtcagagcccagtgaagatctgggagaccctgaactcagaaggctgtgtgtcttctgccccacgcacgcacccgtatctgccctccttgctggtagaagctgaagagcacggtcccccaggaggcagctcaggataggtggtatggagctgtgccgaggcttgggctcccacataagcactagtctatagatgcctcttaggactggtgcctggcacagccgcgggccaggaggctgccacacggaagcaagcagatgaactaatttcatttcaaggcagtttttaaagaagtcttggaaacagacggcggcacctttcctctaatccagcaaagtgattccctgcacaccagagacaagcagagtaacaggatcagtgggtctaagtgtccgagacttaacgaaaatagtatttcagctgcaataaagattgagtttgc

SEQ ID NO: 11814 - DNA, 3378 bp, Homo sapiens
cccccgtggccttggtggttcacatggccccagcatctgtgcttgtggacagcaggtaccagcagtggatggagaggtatggagcccagcccagcggcacttggggtaactcttctgggcagtggtggattcccctttcctcccctcgtgctctttccagcgctacctacccttctgcacctgcctaaactttctgtgggattcctgccttcccagaattctaggcttcccagatctgtgctacactcgtgaagaaaatgcaccgctaggtggcgcagtgtccacacgattccatttattttacaccctccacactcttcagggtgtctgaacaaatactgccgtttggttgaggattccataagtgaattccaaagaagagattgcagctataaaatgatagcttccatttactgaatgcccactttgtgggaggcagtgtgtgaaatacccttcatttcacttcatttcctctagggtcgtcgccagcagccctgggaggtagatgtttagtcactggaaggcatctttttcctcggggcatcgctggccagggccaggtggaggagtatgagttgagctcgggtgcggggtgaccttgggctgctttttggcccctgcccgtatctccccacatggcccgtttacctgcccctcactccatggcctgctctcctgctgtctctttcattcctcagggtttgggtcccctatttgtatgccctggacatcttctttttcttgtttttcctctcactcttcccagcacacctgaaaggcagctgagctagggaacaccgggctttgagacagcaggagtgggaccatgtttggccatgtagtaacactgcttggggcaagtcactgaactgtttgaacacctcatcctcattaccactcctgagctcagcaccactcctcagggggagctgcctcctaacagacgctgcaaatgccgggtctgtttcttcacaggtttgggcctgacacccagcacttggtcctgaatgagaactgtgcctcagttcacaaccttcgcagccacaagattcaaacccagctcaacctcatccacccggacatcttccccctgctcaccagtttccgctgtaaggtagtgtctcagaccggccccttgtcggcccagctctcgtcccctctctttctctccatgaatgtgttttgtctctttcagaaggagggccccaccctcagtgtgcccatggttcagggtgaatgcctcctcaagtaccagctccgtcccaggagggagtggcagaggtctgtgccatcttgaactaatggaatcgtctcagtcgagttgggaaacatttctgtaaatagccacatagtaaatgttccaggaggctctccagaccatatggtctctgttgtaactattcaactccgctttgagcacaaaagaaacacggacaataagctaatgaatgggcttggctgtgtgccagcgtgaatttatttagaaaagcagcctactccaggctgggttgaggtgggcggattggggccagtagttctccttttccaaaattgccttgcatgggaatagcagtgatagagctcgtgtgtttcacagtatagaaaataggaaatgtgtgatgaacaaagtcacccataatcctgttgcccagagataatgattgataacattttgtgtttcttgatttgtgtatgtgggtttatattgtcagtcttttcctgtatcactaaacagtcttaagtaacaagatttttattggtattccaaatagggatgtttactcatttgggatgtttccaattttttgttgtttttaatgaatgaaacaataaatgtcttatatataaatctttgatgggaactctgttcccttcaagtcattcctaaatgtgggattactggcccagagtgtgagacttgttaaggtacttgataaatgtaagatgccatcttgaaagcctcttccagtacaatccaaccaggaaagtgaacagccttactgccccacatctttattttaattaattaatttatttattttatttatttatttatttttttgagacggagtttcactcttgttgcccaggctggagtgcaatggcgtgatctcagctcactgcaacctccgcctcccgggttcaagcatttctcctgccccagcctcccgaatagctggaattacaggcgcctgctaccacgcccggctaattttttgtaattttagcagagacgggtttcaccatgttggcaggctggtctcgaactcctgacctcaggtgatccacccacctcagcctcccaaagtgttgggattacaggcgtgagccgtgcccggcctgttttaatttttaaggatctgaaccttgattttaagtttcctgcccactccacagtatttgtattagaatagagcatgtgctggattatgactggatgctgtgtgctgttgaggttgggtagttggggccctttaagagactatactagcaagactcgggcccacaggcaacatcacggggttgaagaacctggtgtccctttgttggcatctgcgcaggctcttaacacacagcagcgatacacagccctagccgacattcagatttaccttgtgcttgtgaaaaatattgcacagggcctgccctagacctagtgaattagaatcttgagagttaggcttgggactcacaagctcccagatgattttaatgctcagcgaggttgaagagccgcctgtccaaggagttgccactccgtgtgatctggggcttgctaggaaagtgggatctcaggcctcactgcagagctgccgaactggcttctgcgttttgccaaggttcctgggtgtgaacatgagtttcagagtcactcctctagggcccctgcttctcagctcggaccattgacccctcagaggacatttggcaacatctggaaacgttcttggttgtcacagcctaggaggtgggtagtggtgctgctagtgggtagaggtcaggggtactgcaccaggacagcagcactggccacagaaaaaaactgtcttgccctgagcatcagtagttccccgttgactggccctgaggcagagcgatgcagcatccaaaaggcggtggagcagacctgccccagatcctagtcacttaaccttcagtgttgatctgaaggaacttcctgcagattgtccccctgaatttattctggacatccccaatggggtctgctgaggccatataccctgtccgtcacctgagatgcttctctctcttcctgcagggatgccattattacttgcaatcctgaggaattcatagttgaggcgctgcagcttcccaacttccagcagagcgtgcaggagtacaggaggagtgcgc

SEQ ID NO: 11815 - DNA, 428 bp, Homo sapiens
cccccgtggccttggtggttcacatggccccagcatctgtgcttgtggacagcaggtaccagcagtggatggagaggtatggagcccagcccagcggcacttggggtttgggcctgacacccagcacttggtcctgaatgagaactgtgcctcagttcacaaccttcgcagccacaagattcaaacccagctcaacctcatccacccggacatcttccccctgctcaccagtttccgctgtaagaaggagggccccaccctcagtgtgcccatggttcagggtgaatgcctcctcaagtaccagctccgtcccaggagggagtggcagagggatgccattattacttgcaatcctgaggaattcatagttgaggcgctgcagcttcccaacttccagcagagcgtgcaggagtacaggaggagtgcgc

SEQ ID NO: 11816 - DNA, 14156 bp, Homo sapiens
tttataatgagttaatgctgggaaataaaacactgatttaagtcattttggcttttagtactaaagcatttgacaataaatgacttcttcagaatatggtataccttctgaaagcaataaacgcattttaatgaattgtaaggaaacaacatcattttattttttatttttttttttgagacagactttcgcttttgttgcctaggctggagtgcaatggcgcgatctcggctcactgcaacatccgcctctgggttcaagcgattctcctgcctcagcttcctgagttgctgggattacaggcacgtgccaccacgcctggccaattttgtatttttagtagagacggggtttctccacgttggtcaggctggtctcaaactcctgacctcaggtgatctgcccgcctcagcctccgaaagtactggaattacaggcgtgagccaccgtgcctggccaacattattatttttttttaatctagaaaaatacacttctaagaaaattgattaaaaccaaccttcttcattagcccctaagatcacatctatgttctctttgttgcagcttcacttaaagagaggaaacttcttggtgctcaaagcaaaggagatgggcctcccagtgtgagtgtggggggtaaggcttctggggactcactgggtacacctgtccacttaaggaaatcacatttcacagaggccttgcctcttcatttcagtgggacagctgccatcgctcccatcattgctgctgtcaaggacgggaaaagcatcactcatgaaggaagagaggtgagatgcctggttttcttgattcagcagttacaggtagggtctgaaatgctgggcagagtctgtcttcttcaggccctacagacaccacttttgaaggacgtggaacagtttggacatcactcagctaagtgataaaatggcctcttttatctgtgtttgtcccgcatgtcaacacggctgcattcgagcatttttgtagattgtccatttaggatctagtcaccgtcctccttaaagggtgcatgctttccttggtacttgagctcaggacagtgtctaacaacagaccccatatggatgggcctggggtttatggtccagaggaatgccacagtattctatgtcaagatatttcctctgacttctgaggacattaggaccagtggccacagactgaagaaaaccttaatgccaagcctcctttcctggccagtgtaggcctgaagtgcctcaacctgacagttacctgtttaggtatccacaaagagaccagaagggtgttgatggtgatgtgtaaagttggttttgtgctttgtttacctctcagctcactggataggatatgtcatgttagcagttgccttgaaggcagttcagtttggtggctgagctgtgacccccagtgggcgggcttatttggttttgcagattttggctgaagagctgtgtactcctccagatcctggtgctgcttttgtggtggtagaatgtccagatgaaagcttcattcaacccatctgtgagaatgccacctttcagaggtaatgaggggtctctagggtgggagaagtgagagctgaaacccagcccagcatcgacatgggcatcttgtggcaagagctgtgtttctgggaagaccactatctgggtttacagttcagaggccggcactcctgccttaagtcactgttggtagttggtgggctccggtgtacacagcctcaaagtgaaattagaaaagattgaaaactagaaacaactgaggactagaaattcaactagaactcttacagctcttataccagaagaaattctagaacttttttgaattctaactaatgccccagattatcatttggattattttgaactgaattaattttcttccattacctgcattgaaacaaatgaggtgggtcagagtgtgtgagactgtcgtggtcaagagtccgtgttatgggatggactcacagctggggaatgtcttttgggctaactgccactctgttgttgtcctctatcgaagttaaccagttttgcggttcagctttcattccagatggaatcatctttgacccacctatctgagtttgaatcttttcccccactcttaatggtttacctgtatttttcctgttcctagtttgtatctatctgtattttttcacttgtttttttctacttaccacaacaaatccttttgggctgctgtaccccttccgagtcagagcgttaggagttgtttcatggtctgctttattctctgtgggtgaatttggatgcgctggtagccccggctttgtattttaatccagttttgggcagcaaaacctcttcaatgaatcaggtgtcatttgagagccatgtgtggatgtgtgatgatgctgggatagataaaaatagctactgtgtatatttctttttaaagggaactggagggaaacacatcagcatgttagtaagtggtctgttgtccaggtggtgaaatttcagatgattttcatttctcgtgcctgtgtctcaggtcctctggaaggcagacaccagggtggcattggaggtgcaggaggtttattcgaggaaatttgactgtgagagaggaaggagagagggagcaggaggaggcagggagagcctgggtctggctttgcaggttggacccgtatgagtggagagggtaggaaggaagtgcagtgctgagaaaggatcagccaggcctactggaaagcccagagcagagcttgccagatacaggaatcccacgtccattggaaatggcccagcaccggggtctgccgtgagcagcctgctgtgagagcatggcctgggcgtggaggctgtcagctcactgcagtgctgcagagggccgcacgatacccctccctggctgcgtggtccctgtcttggtgtgtcctgagtctgcatcactttgtaaagccccactcttctgcccaggtaccaaggaaaggcagatgcccccgtggccttggtggttcacatggccccagcatctgtgcttgtggacagcaggtaccagcagtggatggagaggtatggagcccagcccagcggcacttggggtaactcttctgggcagtggtggattcccctttcctcccctcgtgctctttccagcgctacctacccttctgcacctgcctaaactttctgtgggattcctgccttcccagaattctaggcttcccagatctgtgctacactcgtgaagaaaatgcaccgctaggtggcgcagtgtccacacgattccatttattttacaccctccacactcttcagggtgtctgaacaaatactgccgtttggttgaggattccataagtgaattccaaagaagagattgcagctataaaatgatagcttccatttactgaatgcccactttgtgggaggcagtgtgtgaaatacccttcatttcacttcatttcctctagggtcgtcgccagcagccctgggaggtagatgtttagtcactggaaggcatctttttcctcggggcatcgctggccagggccaggtggaggagtatgagttgagctcgggtgcggggtgaccttgggctgctttttggcccctgcccgtatctccccacatggcccgtttacctgcccctcactccatggcctgctctcctgctgtctctttcattcctcagggtttgggtcccctatttgtatgccctggacatcttctttttcttgtttttcctctcactcttcccagcacacctgaaaggcagctgagctagggaacaccgggctttgagacagcaggagtgggaccatgtttggccatgtagtaacactgcttggggcaagtcactgaactgtttgaacacctcatcctcattaccactcctgagctcagcaccactcctcagggggagctgcctcctaacagacgctgcaaatgccgggtctgtttcttcacaggtttgggcctgacacccagcacttggtcctgaatgagaactgtgcctcagttcacaaccttcgcagccacaagattcaaacccagctcaacctcatccacccggacatcttccccctgctcaccagtttccgctgtaaggtagtgtctcagaccggccccttgtcggcccagctctcgtcccctctctttctctccatgaatgtgttttgtctctttcagaaggagggccccaccctcagtgtgcccatggttcagggtgaatgcctcctcaagtaccagctccgtcccaggagggagtggcagaggtctgtgccatcttgaactaatggaatcgtctcagtcgagttgggaaacatttctgtaaatagccacatagtaaatgttccaggaggctctccagaccatatggtctctgttgtaactattcaactccgctttgagcacaaaagaaacacggacaataagctaatgaatgggcttggctgtgtgccagcgtgaatttatttagaaaagcagcctactccaggctgggttgaggtgggcggattggggccagtagttctccttttccaaaattgccttgcatgggaatagcagtgatagagctcgtgtgtttcacagtatagaaaataggaaatgtgtgatgaacaaagtcacccataatcctgttgcccagagataatgattgataacattttgtgtttcttgatttgtgtatgtgggtttatattgtcagtcttttcctgtatcactaaacagtcttaagtaacaagatttttattggtattccaaatagggatgtttactcatttgggatgtttccaattttttgttgtttttaatgaatgaaacaataaatgtcttatatataaatctttgatgggaactctgttcccttcaagtcattcctaaatgtgggattactggcccagagtgtgagacttgttaaggtacttgataaatgtaagatgccatcttgaaagcctcttccagtacaatccaaccaggaaagtgaacagccttactgccccacatctttattttaattaattaatttatttattttatttatttatttatttttttgagacggagtttcactcttgttgcccaggctggagtgcaatggcgtgatctcagctcactgcaacctccgcctcccgggttcaagcatttctcctgccccagcctcccgaatagctggaattacaggcgcctgctaccacgcccggctaattttttgtaattttagcagagacgggtttcaccatgttggcaggctggtctcgaactcctgacctcaggtgatccacccacctcagcctcccaaagtgttgggattacaggcgtgagccgtgcccggcctgttttaatttttaaggatctgaaccttgattttaagtttcctgcccactccacagtatttgtattagaatagagcatgtgctggattatgactggatgctgtgtgctgttgaggttgggtagttggggccctttaagagactatactagcaagactcgggcccacaggcaacatcacggggttgaagaacctggtgtccctttgttggcatctgcgcaggctcttaacacacagcagcgatacacagccctagccgacattcagatttaccttgtgcttgtgaaaaatattgcacagggcctgccctagacctagtgaattagaatcttgagagttaggcttgggactcacaagctcccagatgattttaatgctcagcgaggttgaagagccgcctgtccaaggagttgccactccgtgtgatctggggcttgctaggaaagtgggatctcaggcctcactgcagagctgccgaactggcttctgcgttttgccaaggttcctgggtgtgaacatgagtttcagagtcactcctctagggcccctgcttctcagctcggaccattgacccctcagaggacatttggcaacatctggaaacgttcttggttgtcacagcctaggaggtgggtagtggtgctgctagtgggtagaggtcaggggtactgcaccaggacagcagcactggccacagaaaaaaactgtcttgccctgagcatcagtagttccccgttgactggccctgaggcagagcgatgcagcatccaaaaggcggtggagcagacctgccccagatcctagtcacttaaccttcagtgttgatctgaaggaacttcctgcagattgtccccctgaatttattctggacatccccaatggggtctgctgaggccatataccctgtccgtcacctgagatgcttctctctcttcctgcagggatgccattattacttgcaatcctgaggaattcatagttgaggcgctgcagcttcccaacttccagcagagcgtgcaggagtacaggaggagtgcgcaggacggcccagccccagcaggtgagtgggagcccacagagcagcctttctttcctgggctctgcccctgctgctgttttcctagcattaagtggagtgctggtggggcgcattctaacctggcttttcagtctaatccagggcttctctactcagctctacattagaattatagtcattggaggagggggctttggggagtttaagaatcccaattcctggctgggcgcggtggctcacacctgtaatcccagcacttcgggaggccgaggcaggtggatcgcgaggtcgggagatcgagaccatcctggctaacatgatgaaaccccgtctctactaaaaatacaaaaattagctgggcgtggcggcgggcgcctgtagtcccagctactcgggagactgaggcaggagaatggcgagaacccgggaggcggagcttgcagtgagccaaggtcgtgccactgcgctccagcctggacgacagagtgagactccgtctcaaaaaaaaaaatcccaattcctgtgccccatcccacccaatcagagcatttggcgatggcacccaggcattcttggcaaggcacgcactgagtgaaacgttttagtgaacacctgtggaaagagctctgagcagggacttggctggcagagatctagtcctggctttgcggatgcaaatccatggaggatcttggccacgtcactcaactgaggctgagggccgggcacaggctttggaaccatcgggtctccctggatttgaatcctgaccctgcctcttaccatcttcactggagacctgggcgtctgagcctgtttcccccttgggaagcagagcatttcctacctggtagggctgggaggatgcgaccgaagtgcatggtcttgcagtgagagctggatgcaaggcacacactgttctcttgaaataaatgacagttcccagcataaagaaatgtcattttttaaatgtaaaagaattacagcaattcttttgaagaaaggactggagaatttatttgttcttcttagccttttggtgacagatagcctgtgggtcccacactggtgcgaagtcctttgtttcagagcggttgccaggggcctgccagtccccctcctgggaagctggatagaactatgttgcttacccatctgtcttagtctgtgttttgttattataaaagaatatgtgagactgggtaatttatcaagaaaagaggtgtatttagttcacggttctgcgggctgagaattgaaggtcacggccctagcttccagtgaaggcttccatgctgcatcataacgtggcagaggagcgcaagtaggaagtggacgcttgtgaagacgggataacctgagctgcactctggctttataacaacccccctctcctgggaacaaatccattcccttgagaagtaatgcagtctcctgagagccagtacttactactgcagctccaagccactcaggagggtccgtccctgtagcccaaacgccttccactaggccccgcctcccaaaaccgccatactagggagcacgtttccacatgaggtctggggacaaaccaatgacactcaaaccattgcaccttctcatggctgcatgctggctcacttttgacccaaaggaatggattgtttcacatggattttttcacagagaaaagaagtcagtacccagaaatcatcttccttggaacagggtctgccatcccgatgaagattcgaaatgtcagtgccacacttgtcaacataaggtatgctgctttcccaggaagcatccttccatcaagggcacgtttactttttaaacaaaagtcctgctgtactcaccagtcgatttgaaatgcggtatcaagccctgtcacttgtcatgtcgactggagtgtccaggagaggagcgtggccttactgcattttatagcctcagtagcaaactttaccctgggaatcaccaaaattcatcccatgatgtcttttaataaacagctgattttactgtgggcagtacacctagctaagaaattagctcctttaatttttacattaatcctatgaagtggtgaataactacccattttgttgatgagtgacctgatattcagagaggtgacttgctatggttcctacagctggtaagtggggcatctgaagtttgagcggggacttggggtcttgattgctacatggtattgtcccccagccatttgttggtagtatgttaaaaagctttagggttttgcacatttgtgttcagaacctttattggattccccttgacatgttttttagttgattctcttgggtttgcctggggtcatcagcagagagattagtcaaatgcgttgtgacatgtacacgttatctctacagatagtatgtgaagaaaataagattgtgaattaccaggtttgttttaaattttgctctgccatcttacatgctagtggtggatgataaacaaccaaatagtgcattaaatatatacagcagtgacgagatgtgccctgacatcagaaatatacaatctggggtgtgtttctctgtggatgaggacatgcaataaagcagcttggagtgagccggcctctcccgggggctgagatcctgggggaagaagggctttttgagtttgacctgacaccctgcgagcagcttttgaaccagctgaagctaatgggaaggtgctattgccaccttgcctccgcctcccgactcctttttcccccagaaggtaatgtcttagcaccggggcttctctctgcaaaatgggtgcagccctctcagtgttcgtggctcctcccagagaatgaaggaggccagagcgggtcagcactctctctgccttggagcagagcttctgaaatggactgcacagcagaatagcccaagaagtttgtcagaatccagacttccagagccctgcctaaaaccaagtcagaaaccccgagtgacacctgggagtctgcgttaactggctccctgaatgaagcacctgcagcccgccctgcaccaggtgtctttgaggacatgagctgaggaaaccccgaccacttgcaaagggggaaaagtccgatggcagctggacctagaaagagtctcatatggcccagtgcctgtcctggtattttcaacagaggctgtggccacagtcaatctgcatggtcagattcattgttaggactaaatgctttaagcctcctataaactttttttttttttttttgatgcccagcctttgtgtaagtctacttgaaagggtttcagggttccatggatacttctttgctataaagaggatgacacatgtaaaatcacctttatggttaaattaattggcttttatattagctcctcaaagcaaagcaggagagacagaaatttctgcagttgcttcttggtcctgtccaaagcagacatcagcctctgaaccatcagcagtcttcctagtggcagtgactctcttcctcttctcttctgcagccccgacacgtctctgctactggactgtggtgagggcacatttgggcagctgtgccgtcattacggagaccaggtggacagggtcctgggcaccctggctgctgtgtttgtgtcccacctgcacgcagatcaccacacggtgagtgttgggctggaccacaaagctggagcctggaggaggcactgccacgttgagttggccctttggctgcgtcttttcctccgcttccaaacttgcccagagcttttgttactcatctctggctaggaaatggttttttgcaaaactcaacatagtccttctgcgccacaagaatgtcttctcttcctgttcagttcctttcctgcagcaggacaggtttgagtttacccagccttccttgagtcttgaatctcacacggcctgctcagcggaagctttgaccggatgcaggaggtgtggctatgagaccctcaccttggtctcctggggtgccgggccctgggccgttgccctcttcccagcacgggtcgtgtcgctttctgcctgtgacatttcagggccatggcgcagggggctcggcctgtgccacccccactgcggctgtgttagaggctggtgggtgacgtcgggctggcaactcctgcaagagagagggctgcagaccctaacccggaggggatggccctggggcctggctgacgcatgtctcctgtttccttgccagggcttgccaagtatcttgctgcagagagaacgcgccttggtaagtgtggcacttgatgggcgttctgagtttcagcggtttacacatcatccgccatgcctcttggcactccagtttttattgagatgttctgtcgtcgagtcggcacttgcattttttgttccaggcatctttgggaaagccgcttcaccctttgctggtggttgcccccaaccagctcaaagcctggctccagcagtaccacaaccagtgccaggaggtcctgcaccacatcaggtgagcatccagggcagcctggcccgctgggctgttgcttgctgccgtctccttcagaagctcaaggtggacactggggtagttaccaatatcccccagcagccttgcccttgacatggtcccagatggcagaagcaggggagaagtgcattggctgaaggacagaaaccattagatagttcccatgtaatgcttattttcttagaagcatttcttcccagtcctcatttgagttctgagctgctttctaaacttcgagcagcttttcttgatgagacagttccagagccaagcacccaaatagtggctagcacagagaatgtccatagcaggtgtgtggctagctggcaggtggcaccatcctcaccccaaggggaaggagtcccctctgctggagccatccgtggcccgtgctgcctgagccggaggcagcattcacctgctgggtttctcccagtggcctagaggctttggtttggctctttatatttgactgctgtttcctcatcatagtgactatgatttaactcatgttttctcctaagaatgattttggggttctccagccaaagacttaaactttggttccagatgtccaagaaacgtttattatcattttaaatgttttgtctttttacagtatgattcctgccaaatgccttcaggaaggggctgagatctccagtcctgcagtggaaagattgatcagttcgctgttgcgaacatgtgatttggaagaggtaaggggcacagccgcaggcatcatgggggcgaggtggggagcagagctgcagagccctccagccccaccctttcagtttcagacctgtctggtgcggcactgcaagcatgcgtttggctgtgcgctggtgcacacctctggctggaaagtggtctattccggggacaccatgccctgcgaggctctggtccggatgggtgagtagaggaagaagcaagccaccctgaggttgctctggggtttgtgtagctggaggtgaatgcaggtgggcttgcagggaaacgtcagcagaggcaggagactcaggtccccaccctcagagtctctggttgtcatcctagtaggcagacccagggccaggggagctgagtgttgagaccaggaaacagcacgtgactgaggcctgtgtgccgctctcgcagagaactctgccctgatccttgtgctgcttctccagggaaagatgccaccctcctgatacatgaagccaccctggaagatggtttggaagaggaagcagtggaaaagacacacaggtagcaaaggccggtcagtccttgtcgcccacatcctctccctcccccactacgtgacactgagcagccgtcgtttgtctccactgatgtggggctgccctgcttcctatcaagggctatgggggcttccttgacctgtggcagtgctcacaggctcttggcctttatttttgcagaattttctaagcaagattctagagtgaggcacagttttttgaaagcatctagaaatcggctgaataaactataagccatgtcagggaattgccaggggaaggcgggggctgggggactgaatttttggctgctaatttcaacgaaagagtgcattaccccaggtgggccctgtggtttctcttgggtgccctcatggacagatttggcagccagcacagagggtgggcttcatccaggggtgtgtgcgaaggctctggccctcaggggagattgtgctggctacggaggtgcccgttaagaaaacccaccagcttccccgggtgccctggcagttgatggccagggtctgtgccactgtctgctttgcagtcttgcagttgagttcagcttcagtctgctctgtccttcacctgcagcacaacgtcccaagccatcagcgtggggatgcggatgaacgcggagttcattatgctgaaccacttcagccagcgctatgccaaggtccccctcttcagccccaacttcagcgagaaagtgggagttgcctttgaccacatgaaggtctgtatgtcacacggacagcacagggcggggacggggcagggagacaggactctacacactgagtaggacggtcagctggagtttgctttcttatttggggccaccgtgggaaaaggttatctacccatcactaaccaggtcgaaccaccctgggtttgctggtgagacccacctcctgcaggggccaactagtcttcagtctcagttcactggaaatttctgagaatccttttaggcctggactgctcacacagtcatggcatttgagcctcagcacagacctgtgagacaggtggttgcctcttgtgagtgggaaagccaggcctgacccttggccttccggaatgaaggggcagagccggagccaggcctcgtttttcaggagcttgattttgagagcatctggactgctctcccttccctctccggaggcccttagccaggcctggggagcctctgcccctttagagggttccctccatgccattcttttttccatttcagctgtggcctgttggcttgtgccaaggaaggggcgttggcgctgctgtgtgagcacatgactgcatcccttccagctcctgtcccccacccctgcccctctgagacatgtccttgtcttctattgtgtcttctaggtctgctttggagactttccaacaatgcccaagctgattcccccactgaaagccctgtttgctggcgacatcgaggagatggaggagcgcagggagaagcgggagctgcggcaggtgcgggcggccctcctgtccagggagctggcaggcggcctggaggatggggagcctcagcagaagcgggcccacacagaggagccacaggccaagaaggtcagagcccagtgaagatctgggagaccctgaactcagaaggctgtgtgtcttctgccccacgcacgcacccgtatctgccctccttgctggtagaagctgaagagcacggtcccccaggaggcagctcaggataggtggtatggagctgtgccgaggcttgggctcccacataagcactagtctatagatgcctcttaggactggtgcctggcacagccgcgggccaggaggctgccacacggaagcaagcagatgaactaatttcatttcaaggcagtttttaaagaagtcttggaaacagacggcggcacctttcctctaatccagcaaagtgattccctgcacaccagagacaagcagagtaacaggatcagtgggtctaagtgtccgagacttaacgaaaatagtatttcagctgcaataaagattgagtttgcaa

SEQ ID NO: 11817 - DNA, 2737 bp, Homo sapiens
tttataatgagttaatgctgggaaataaaacactgatttaagtcattttggcttttagtactaaagcatttgacaataaatgacttcttcagaatatggtataccttctgaaagcaataaacgcattttaatgaattgtaaggaaacaacatcattttattttttatttttttttttgagacagactttcgcttttgttgcctaggctggagtgcaatggcgcgatctcggctcactgcaacatccgcctctgggttcaagcgattctcctgcctcagcttcctgagttgctgggattacaggcacgtgccaccacgcctggccaattttgtatttttagtagagacggggtttctccacgttggtcaggctggtctcaaactcctgacctcaggtgatctgcccgcctcagcctccgaaagtactggaattacaggcgtgagccaccgtgcctggccaacattattatttttttttaatctagaaaaatacacttctaagaaaattgattaaaaccaaccttcttcattagcccctaagatcacatctatgttctctttgttgcagcttcacttaaagagaggaaacttcttggtgctcaaagcaaaggagatgggcctcccagttgggacagctgccatcgctcccatcattgctgctgtcaaggacgggaaaagcatcactcatgaaggaagagagattttggctgaagagctgtgtactcctccagatcctggtgctgcttttgtggtggtagaatgtccagatgaaagcttcattcaacccatctgtgagaatgccacctttcagaggtaccaaggaaaggcagatgcccccgtggccttggtggttcacatggccccagcatctgtgcttgtggacagcaggtaccagcagtggatggagaggtttgggcctgacacccagcacttggtcctgaatgagaactgtgcctcagttcacaaccttcgcagccacaagattcaaacccagctcaacctcatccacccggacatcttccccctgctcaccagtttccgctgtaagaaggagggccccaccctcagtgtgcccatggttcagggtgaatgcctcctcaagtaccagctccgtcccaggagggagtggcagagggatgccattattacttgcaatcctgaggaattcatagttgaggcgctgcagcttcccaacttccagcagagcgtgcaggagtacaggaggagtgcgcaggacggcccagccccagcagagaaaagaagtcagtacccagaaatcatcttccttggaacagggtctgccatcccgatgaagattcgaaatgtcagtgccacacttgtcaacataagccccgacacgtctctgctactggactgtggtgagggcacatttgggcagctgtgccgtcattacggagaccaggtggacagggtcctgggcaccctggctgctgtgtttgtgtcccacctgcacgcagatcaccacacgggcttgccaagtatcttgctgcagagagaacgcgccttggcatctttgggaaagccgcttcaccctttgctggtggttgcccccaaccagctcaaagcctggctccagcagtaccacaaccagtgccaggaggtcctgcaccacatcagtatgattcctgccaaatgccttcaggaaggggctgagatctccagtcctgcagtggaaagattgatcagttcgctgttgcgaacatgtgatttggaagagtttcagacctgtctggtgcggcactgcaagcatgcgtttggctgtgcgctggtgcacacctctggctggaaagtggtctattccggggacaccatgccctgcgaggctctggtccggatggggaaagatgccaccctcctgatacatgaagccaccctggaagatggtttggaagaggaagcagtggaaaagacacacagcacaacgtcccaagccatcagcgtggggatgcggatgaacgcggagttcattatgctgaaccacttcagccagcgctatgccaaggtccccctcttcagccccaacttcagcgagaaagtgggagttgcctttgaccacatgaaggtctgctttggagactttccaacaatgcccaagctgattcccccactgaaagccctgtttgctggcgacatcgaggagatggaggagcgcagggagaagcgggagctgcggcaggtgcgggcggccctcctgtccagggagctggcaggcggcctggaggatggggagcctcagcagaagcgggcccacacagaggagccacaggccaagaaggtcagagcccagtgaagatctgggagaccctgaactcagaaggctgtgtgtcttctgccccacgcacgcacccgtatctgccctccttgctggtagaagctgaagagcacggtcccccaggaggcagctcaggataggtggtatggagctgtgccgaggcttgggctcccacataagcactagtctatagatgcctcttaggactggtgcctggcacagccgcgggccaggaggctgccacacggaagcaagcagatgaactaatttcatttcaaggcagtttttaaagaagtcttggaaacagacggcggcacctttcctctaatccagcaaagtgattccctgcacaccagagacaagcagagtaacaggatcagtgggtctaagtgtccgagacttaacgaaaatagtatttcagctgcaataaagattgagtttgcaa

SEQ ID NO: 11818 - DNA, 25238 bp, Homo sapiens
agggcttcggcttccctgcttcacacatgtggttcactgttgcgggggttcgtggagttatggtgggtgggaaatccgagattctttgcatccatgtgatttctgcggatctgtgaagaacttcaggcctgggtctgagcgtccttttcccaacccttgggccccggcctggctgtcagcactttcggagctccaccctcttccgtgcaccccaaggccagtgtgtcgttgttagcgtgtggggtggacagatctggtgtgtagccggtggtggagaaaggactcattttgtcctagcacccacacacacaggcccccactcctctccacctctgctaaggagggctcaaaacccaccagcataaatgtggctcggtagtccaacgtggacttttaatttttttttcttttttttttttccagagtctacaataaaacatctaattggtgtcagagagtttacagaataaaaccttctgaatgtcttgtgtaatgtttgtcttgtaggtatctcttcaactgtggagaaggcgttcagagactcatgcaggagcacaagtgagtcagtctcttgctttcggagggggagttgattacggggcttgaaagccgaaatgagaggccagttgttttttatagcaaaagtggtccttgttctgttcatgttatcctgtttaaatgttttttcattcttaggttaaaggttgctcgcctggacaacatattcctgacacgaatgcactggtctaatgttgggggcttaagtggtgagtatattctttgcagtgtcagaggctggtgggaagtctctgggattttaaccggctttaccatttttccaagtctggggtgggcagctacttttttttttttttttttttttgtcagtggcgtgatcttggctcactgcaacctttgccttctgggctcaggtgatcccctcacctcagcctcccaaatagctgggaccacacgtgtgccccatcacacctggctaattttttttgtatgttttgtagcgacggggttttgctatgttgcccaggctggtctcaaacttctgcgatcctcctgtctcggcctcccagagtgctgggattacaggcatgagccaccgcacctggcctggaattctttttataccagcccagtcagcagcagcacagagcattaaaagctgtgactcaggagaacagattttaatatggataccacctcttaagtgttaccatccacttagtttcttgcgttgcggggacagagatttgtggcagtaaactggagagtctagcagtggtgattacagttaatatgtttaccgcagacgccattggcacattggcagccacacacatacccactgtccagattaccctgtcatttatgtctatcaaccggaaggtcaggattgtgttgcagccaaattgtgtgggcttggtggcatggaccggaaggagtgaagtgttagaccagtctcccttctcagggctgagactagggtgaggcacttagggtgccagcccttcacttgcatgattccttacattttgcacactgggtgccttgctgcttcaccctagtgacagctcagcccattctagaggcatttaaagaatatttggtgtctgttacacctctagctggcatcacttctgctctgtacatcttccctggttgtacttccaaagctggaaggtggagatgtagataaatagttggattagtacggggtgctcctcctgttagtgacgacaggtcaaattgatgagagatctgattttatgcatcctttttaggaatgattcttactttaaaggaaaccgggcttccaaagtgtgtactttctggacctccacaactggtgagtctttcctgacacatctttcaaaagcaatctttccttttgtaatatcagtaacaagaattttcctttttgcaaatcagtcttctgccctccagagatacctggtcgttgaaacgcttcccctttcaagttaaaaagacttgagttctgattaactatgtgaccttgatcaagttactttacctttctgagctttagtttattcatctataagatgactatcacgtttcatagagttgttaaagattaaatgacgtagcagcacatataaagcactaaatcactttattagatatatgtttggcaccaagtaggcacacaagaaagggcagcttttgtttttattcaataaatttctgacatcttcttacctttcagtccagcttattacactcttgagaaggcgtgtgtgtgttgttgaatataacagttcattttccagtccttaagaagaaagtcaccaagacctgttaagtctttccccaaaataacgtttgaaatccatccatttgtctcttattgaggccttccttatttctgttttctatgcctgtaaactacaatagcctcccatattcattctcgccttcctgtaatccatctgccacacagcagccagagaggtcacttcaagacagaaaagtagtgtgtcacttgccaccctaaagcccttcatgggctccccattgcaatacaatcaaaacaccttgatatggcctacaagtcctgtaggccccggccgctacccacacttccatctgtacccatcgctgaactgcagctgcatgggctgactcttatgtccctctaactccctggccacttcaggactttcgcccttccgcgggttccctctgcctcttctaattgctgcctatattgttactgaaccttcagggctcagctagagggtcatttactccagaactgcctcttcttctctagacaagttggatcccagccttctgtatttttcattttccttgcagagcacttagcataatgccactaagctgtttctgttatcgtgtttccttttgtctcctccactggcctgattagagcaaggcctccatctctttttcctgctatatccttggcatctgatataatggatactcagtaaatatttgtaataaatgatgttcaaaatatttactaagctttgttttatgttgatacctattggtaaccttttaaatacttgaatagttgctgtgttctacatttgttcaaccataactgctcatttctttgtttttcattaggaaaaatacctcgaagcaatcaaaatattttctggtccattgaaaggaatagaactgggtacgtctttgtctgtgactcatcctctgctatttctaacttatatatgccctgacctctcaaattagaatccattaaaaacatcaacatcaaacctcaaaatcaaatgcttcatcaccacgagatttttttttttttttttttttttggatagagtcttgctttcttaccaggctggagtgcagtggcatgatctcggctcactgcaacctccacctcctgggttcaagccattctcccacctcagcctcctgagtagctaggactacaggcgcatgccatcacgctcagctaattttttgtatttttagtagagacggggtttcaccatgttggccaggatagtctcgatctcttgaccttgtgatctgcccgcctcagcctcccaaaatgagctaccatgtggctggagatgggatttctaaatagtgacattttctgtgttcccacctcatgctgtaaaaataggggccaggtcggcaggagtgattgaacagctgatgcctgcctgtgtacatgctgtgtggcattctccatccagacggcagggctcctgcctcagttccagaggtgcttctcgtcgttgagttgctttgagttgggggcgggggtgacaagggttccctagaggttttgtggccaactttgtacattgaaacgcagctccagctgcgcaggggggcttacagcctcttgatgggaagaggcctcactgaggatgctagtagggctcttgtcctggcactggtgtgtatctgtggcttgttaatactcctcttttatagaaacactaatactttgtttcaaaatatacatcagctcttctggtttgcgatgataggttccctggcttcactattctgtttgttaacttgggtctctgaaagttgagtactagtttcttgtttttcaatttttaacggatagtcaccaaagattataatgtcttttcatctggctgtagtaaatataaatggctgaccaaaatacacttttatttatttcctaaaaatggtaatctccttagaaagtctggttttcgtgtcagattcccaccataattctgaggcaattcagttgctcgtggttggtgatcctgaagttactcttcccacacatcttcactaatgcaatcactttgctgttgtgtggttttcttgtagctgtgcggccccactctgccccagaatacgaggatgaaaccatgacagtttaccagatccccatacacagtgagtatgaaagccaggtttcccaggaggagggtgtacgtcctgagtaaagaaaacatggatgaaaatagaaactgaacacttgctgtgggcaccctgttttgtgttctgagcatgattagaaaatttagttgaggaatgaagatatggctcctgccctggcttataaacttacggatgtctgacttatgcctaatgatagtgattatgctttggaatattagataatcaagcactgttggtaaatagattgcattcaagtttgcacattcattgcttggaggttttttcccacaggcgtaataccctcttttgatcagacgatcatgaagaggtttgcacagatagatttttttaaataaataatgattacagcaacctaaaagaagtgttgttgggggttagaagctcctgcaaattccgaagtatcagggccagatgatgtggtcttagcttaggaaaagagttagtcttgtccttgaacttggctaaagacattcatgtctggttttacttacatgtgaagagagtaccaagcagtaggggtatttccttgttagtactaactaatgtgatgcttactaagtagtgctgatgggtgacagaccagagcacccagcaaaggccagagaagtccagaacctggcgaggagatgaggcttacactgactgaaggcagaaggcagcagggaggagaggaatgtgccggagcaatggcacaagtgctcctaggccagtgctgtgatgagctgatcagcactcccattgcctggcttgctcctcctgctcagatgccttctctcacctgacccctgctgtagccacccccagcctgagttgcatccacctgtttgttgtccatttccagcaccctgttcttcgctccatggcatgtgacagttaactttcatatgtgatttgcgtgatcgatgttaacatgctcagttttgccgatcactgttttttcagtgtccagcggccctcagtgagtgaacttacgttcattctcgttgcagctgtgctttagcttcttagagcagcgaatttttttcccttgatcttgagccttaactaaatgtaaaatgaggctccttcttgagataggtaccctttgggtctatgtgttttagcgggagtgatgataataaataagcatgtctacaacccacatgctgtttagataacacgttgttgagttggtactgtggccgaggctgtgagctaagcagaaacataaacattaataggacataggtgcagcccagaaaccaggtaggaagttaactaactagttatttcctactgtatagtaaaaggtgtgctgatttaattggcgttctggcattcccatgtatgaacgtctgggccttggctgtcagctcaccttgtgcagtgtgtaatttggtggtatctgtactgaccaggtgaacagaggaggggaaagcaccaaccatggcagagtccagaaaggcctctcagcaggctcagtccagagcgatcttcagactccgagtcgaatgaaaatgagccacaccttccacatggtaatagtataaacaaaacagagcagcagaaaggcttgcgttttcttaattctctgccttgtaatgcttgtagagagtcattattgtaagaaagccaggtgtgtaaacagatccttcttcctgggcttactataacttggcccgttgggggaatgagaagggttgttgtaaaggtggcagcctgcaactttaataatgaccagtccacagttttggccacccagggtctgggtaggcccaaaactgtgttctgttttcccagaggagaacagggcctgacaaacggattcattttgtatttttcattaatgtaacatttatgcaaattttccattaatgtggaaactataactgctaagccaatgagacagtcaaatcagtgagaggctctgcacgtcttccagaatgacagcccactgggaaacggagttaaaagtccaagatgagatgtagctcaggagtcaggccgcttcgggagtttgttgtccttaacagaaggtcagcgttggcaaagctcggcagctcctctttctgtcctgaggtcttgtctagtgactgagaacaggctgacccctatgtgctgtccttgtttggatggcaccgggtaaagactgacaccagcattttctctgcaggcctttgaacttttgtgttatttcatatattatatgtgttataaagcacattacaatatatttttctctgtcttctccagtcctaggtgaaatgtgtcatttaaaaaaaatttcacttgccattctaaagtttttctggtgagagttttgtgtttttcatttacgcaaacacatctccacataagtagggaaaaaaagtcttcttgagtatattagtgtcttcagcctttgtattgggacagtagcgtccattaatttttatgtgaagtgaaattaggtatcgggtcataatcagtctgtgatgtcttcacagctttcacatttaccttgtgataatcaagtgtgtttttcctcaggtgttagccagagaagaggggtcagggactcttccctggtcgtagctttcatctgtaaggtaaggaagactttccggagggctgtacatgactggggtcttggtcagcgacctctggtttgcactttttcattaatttgagggtaggcactcctgttacctgagacaagaagagatagcagatcttcagaaaagctgatggaaggccgggtgcagtggctcacgcctgtaatcccagcactttgggagtccaaggcaggtggatcacgaggtcaggagtttgagaacagcctgaccaacgtggtgaaaccctgtctgtactaaaaatacaaaaattagctgggtgtggtggcgcatgcctgtaatcccagctacttgagaggccaaggcaagagaatcgcttgaacacaggaggcggaggttgcagtgagttgagattgcaccattgcactccagcctgggtgacagagcaagactctctcaaagaaaaaaaaaattcgatagaaatgacactggcaatgagcctgcaacaagtattactactgacctttcataattgtcatcacttgtaggtttcagagtttagatgctctgtttctcaaaataaccccatacttttatttccttttaaatttttttccagtgccctgtcagcctccgtacattttttttttttttttttgagaccatgtctgtctccatcgcctaggctggagtgtgcagtggcacaatctcggctcactgcagcctccacctcccaggttcaagtgattctcctgcctcagcctcccaagtagctaggattataggtgcgcgccaccacacccagttaatttttgtatttttagtagagatggggtttcaccatgttggccaggctggtttcactcctgacctcaggtgatccacccaccttggcctcccaaaatgctgggattacaggcgtgaagcactgtgcctggtccatattcttttatatttgccaatgattggtccttttagaattcagaaattattgaaggcagctgtgtttgttttccttcaactccatcaggcctttattcaaagtcttttaactctgttttactttatttcattcccctgcaatagctaaggtctaacaccagattaattggaatattagctagcattcacaaaggcctagatctgtaactctgaaattggtcaaattccattaaaaatttttgttacaataagctgtttgtaagatctgactagtggcttatttttaatagaattttgcattaaaattttatcaatacaatttgcaacaaatttgtctaaatatgtgaaaagatttcattgcctttttgtgggcttagattattttttaatgttgattttgaaatatatttggaattgttatctaaattctaaaagctacaagtgaaaataataatgaaagtaagtagttaatattagtggcaagatcattgccagtatcatttctatcgatttatttgaataatgtgattttcataaaagttaagtactactgttaacaggcttattacttgtatgtttctgagttttagatagcaaaatcattttttaaagttttaaaaatattttatttttgataatctatatttatattgtctgatttttaaactgttttctatggtaatctttaaatcgtattcctgctttccggaataggtaacagtgagcatgatgaaaagtgacaagctcacttttacacactcgggcagttgccctattatcaggcagccgttcctgggggctgccagctgcctgccctggcttttccatctccttccttgctgtcttctgcggctccttctgagggctgctgtcactggattagcctataacgcctttcccctcttctaattaatttgctgctctcaggtgaggttttggaaagcaataaagctgagctaggtcaagttccaggagtctcttggcatgaggacctgaaaaactcatctgttggaagacctcggctttgggcagctggtgcactgttggggcgttattggctgcgttctggctctcatcagtcttccagatactctgcattcctcagagaggaacatatctccatgggttgagttcagctcccagggagatgggtttccctgccttaagtcggcaagtacctttttttttctttttttgagacagagtctcgctctgtcaccaggctggagtgcagtggtgcgatcttggctcactgcaacctctgcctcccagggtcaagcagttctcctgcctcagcctcccgagtagctgggactacaggagcgcaccaccatgcccagctaatttttgtatttttttagtagagacggggtttcaccatgttggccaggatggtctggatctcttgatttcctgatccgcctgccttggcctcccaaagtgctgggattacaggcgtgagccatcatgaccagcctttatgtttctttgtttgttttgtttttctgagatggagtctcgctctgttgcccaggctggagtgcagtgttgccatctcgacttactgcaacctctgccttccaggttcaagtgattccttgcctcagcctcccgtgtagctgggatcacaggtgcctgccaccatgcccggctaatttttgtattgttagtagacacagggtttcgccatgttggccaggctagtctcgaactcctgacctcaagtgatctgccttcctcagcctcctaaagtgctggggttacaggagtgaaccaccatgcccagccttcaattaccttttatttattttatttatttatttatttttgagacggagtctttctgtgttgcccaggctggagtgcggtggcgcaatcttagctcactgcaacctcctcctcccaggctcaagtgattctcatgcatcagcttcccgagtagctgggacttcaggtgcccgccaccacacttggctaatttttgtgtttttagtagagacggggtttcaccatgttggccaggctggtcttgaatttctgacctcaaatgatcctcctgcttcagcctcccaaagtgctgggattacaggcgtgagccactgcccccaacagcaagtaccttttaaacattagagacatttagttgccatcctcaaacccgtttgggtgtgtggagagaatgttgggtcgtgacatggttgttagttatctaaagatgtcagccatcaatcatcactgtgtgatgtgcacactgaagctgtaatccttcatctaggatgatattttttaagatggaaaattctacaaccctgagaataaggatttcagatccaaatttgagactcagccctacgagtaactctttaacttcagagagttaaaagaagatgcacagttgatgaagatttaaaggagaaaatggaaatcaaatgtcatttagcactcaaaggcctacatgtcatttctgacatttttctgtttgtgtgaaattttttttttcctataaaatgattgtgaagttttctggtagaattattgtttgcctttctaatgtaatagcatattagggtttttttttttttctttttctttttttgagacagagtctcactctgtcgcccaggctggagtgcagtggcacgatctcgggtcactgcaatcttccgcctcctgggttcctgcctcagcctcccgagtagctgggactacaggcgcacgtcaccacacccggctaattttttgtatttttagtagtgacagggattcaccgtcttagccagggtggtcttgatctcctgacctcatgatctacccgcctcggcttcccaaagtgctgggattacaggcatgagccgctgtgcctggctattagagattttttattataatttatctccaagataaaagcagtgacattatattgccacataattgaaaaatacaagagaaataaaaatcatccatgcttttgttagcctatcactgtcattgaaatattatgttacatggcagtttgcttgctggttgctctgttaggcaacgctctggtgacattcctttagctattaattgaggaatgtagaatgacagaacagtgtttctcctcaatgatacttgaaggatatttattaactttcatattgaattacattttattaaatttataatgagttaatgctgggaaataaaacactgatttaagtcattttggcttttagtactaaagcatttgacaataaatgacttcttcagaatatggtataccttctgaaagcaataaacgcattttaatgaattgtaaggaaacaacatcattttattttttatttttttttttgagacagactttcgcttttgttgcctaggctggagtgcaatggcgcgatctcggctcactgcaacatccgcctctgggttcaagcgattctcctgcctcagcttcctgagttgctgggattacaggcacgtgccaccacgcctggccaattttgtatttttagtagagacggggtttctccacgttggtcaggctggtctcaaactcctgacctcaggtgatctgcccgcctcagcctccgaaagtactggaattacaggcgtgagccaccgtgcctggccaacattattatttttttttaatctagaaaaatacacttctaagaaaattgattaaaaccaaccttcttcattagcccctaagatcacatctatgttctctttgttgcagcttcacttaaagagaggaaacttcttggtgctcaaagcaaaggagatgggcctcccagtgtgagtgtggggggtaaggcttctggggactcactgggtacacctgtccacttaaggaaatcacatttcacagaggccttgcctcttcatttcagtgggacagctgccatcgctcccatcattgctgctgtcaaggacgggaaaagcatcactcatgaaggaagagaggtgagatgcctggttttcttgattcagcagttacaggtagggtctgaaatgctgggcagagtctgtcttcttcaggccctacagacaccacttttgaaggacgtggaacagtttggacatcactcagctaagtgataaaatggcctcttttatctgtgtttgtcccgcatgtcaacacggctgcattcgagcatttttgtagattgtccatttaggatctagtcaccgtcctccttaaagggtgcatgctttccttggtacttgagctcaggacagtgtctaacaacagaccccatatggatgggcctggggtttatggtccagaggaatgccacagtattctatgtcaagatatttcctctgacttctgaggacattaggaccagtggccacagactgaagaaaaccttaatgccaagcctcctttcctggccagtgtaggcctgaagtgcctcaacctgacagttacctgtttaggtatccacaaagagaccagaagggtgttgatggtgatgtgtaaagttggttttgtgctttgtttacctctcagctcactggataggatatgtcatgttagcagttgccttgaaggcagttcagtttggtggctgagctgtgacccccagtgggcgggcttatttggttttgcagattttggctgaagagctgtgtactcctccagatcctggtgctgcttttgtggtggtagaatgtccagatgaaagcttcattcaacccatctgtgagaatgccacctttcagaggtaatgaggggtctctagggtgggagaagtgagagctgaaacccagcccagcatcgacatgggcatcttgtggcaagagctgtgtttctgggaagaccactatctgggtttacagttcagaggccggcactcctgccttaagtcactgttggtagttggtgggctccggtgtacacagcctcaaagtgaaattagaaaagattgaaaactagaaacaactgaggactagaaattcaactagaactcttacagctcttataccagaagaaattctagaacttttttgaattctaactaatgccccagattatcatttggattattttgaactgaattaattttcttccattacctgcattgaaacaaatgaggtgggtcagagtgtgtgagactgtcgtggtcaagagtccgtgttatgggatggactcacagctggggaatgtcttttgggctaactgccactctgttgttgtcctctatcgaagttaaccagttttgcggttcagctttcattccagatggaatcatctttgacccacctatctgagtttgaatcttttcccccactcttaatggtttacctgtatttttcctgttcctagtttgtatctatctgtattttttcacttgtttttttctacttaccacaacaaatccttttgggctgctgtaccccttccgagtcagagcgttaggagttgtttcatggtctgctttattctctgtgggtgaatttggatgcgctggtagccccggctttgtattttaatccagttttgggcagcaaaacctcttcaatgaatcaggtgtcatttgagagccatgtgtggatgtgtgatgatgctgggatagataaaaatagctactgtgtatatttctttttaaagggaactggagggaaacacatcagcatgttagtaagtggtctgttgtccaggtggtgaaatttcagatgattttcatttctcgtgcctgtgtctcaggtcctctggaaggcagacaccagggtggcattggaggtgcaggaggtttattcgaggaaatttgactgtgagagaggaaggagagagggagcaggaggaggcagggagagcctgggtctggctttgcaggttggacccgtatgagtggagagggtaggaaggaagtgcagtgctgagaaaggatcagccaggcctactggaaagcccagagcagagcttgccagatacaggaatcccacgtccattggaaatggcccagcaccggggtctgccgtgagcagcctgctgtgagagcatggcctgggcgtggaggctgtcagctcactgcagtgctgcagagggccgcacgatacccctccctggctgcgtggtccctgtcttggtgtgtcctgagtctgcatcactttgtaaagccccactcttctgcccaggtaccaaggaaaggcagatgcccccgtggccttggtggttcacatggccccagcatctgtgcttgtggacagcaggtaccagcagtggatggagaggtatggagcccagcccagcggcacttggggtaactcttctgggcagtggtggattcccctttcctcccctcgtgctctttccagcgctacctacccttctgcacctgcctaaactttctgtgggattcctgccttcccagaattctaggcttcccagatctgtgctacactcgtgaagaaaatgcaccgctaggtggcgcagtgtccacacgattccatttattttacaccctccacactcttcagggtgtctgaacaaatactgccgtttggttgaggattccataagtgaattccaaagaagagattgcagctataaaatgatagcttccatttactgaatgcccactttgtgggaggcagtgtgtgaaatacccttcatttcacttcatttcctctagggtcgtcgccagcagccctgggaggtagatgtttagtcactggaaggcatctttttcctcggggcatcgctggccagggccaggtggaggagtatgagttgagctcgggtgcggggtgaccttgggctgctttttggcccctgcccgtatctccccacatggcccgtttacctgcccctcactccatggcctgctctcctgctgtctctttcattcctcagggtttgggtcccctatttgtatgccctggacatcttctttttcttgtttttcctctcactcttcccagcacacctgaaaggcagctgagctagggaacaccgggctttgagacagcaggagtgggaccatgtttggccatgtagtaacactgcttggggcaagtcactgaactgtttgaacacctcatcctcattaccactcctgagctcagcaccactcctcagggggagctgcctcctaacagacgctgcaaatgccgggtctgtttcttcacaggtttgggcctgacacccagcacttggtcctgaatgagaactgtgcctcagttcacaaccttcgcagccacaagattcaaacccagctcaacctcatccacccggacatcttccccctgctcaccagtttccgctgtaaggtagtgtctcagaccggccccttgtcggcccagctctcgtcccctctctttctctccatgaatgtgttttgtctctttcagaaggagggccccaccctcagtgtgcccatggttcagggtgaatgcctcctcaagtaccagctccgtcccaggagggagtggcagaggtctgtgccatcttgaactaatggaatcgtctcagtcgagttgggaaacatttctgtaaatagccacatagtaaatgttccaggaggctctccagaccatatggtctctgttgtaactattcaactccgctttgagcacaaaagaaacacggacaataagctaatgaatgggcttggctgtgtgccagcgtgaatttatttagaaaagcagcctactccaggctgggttgaggtgggcggattggggccagtagttctccttttccaaaattgccttgcatgggaatagcagtgatagagctcgtgtgtttcacagtatagaaaataggaaatgtgtgatgaacaaagtcacccataatcctgttgcccagagataatgattgataacattttgtgtttcttgatttgtgtatgtgggtttatattgtcagtcttttcctgtatcactaaacagtcttaagtaacaagatttttattggtattccaaatagggatgtttactcatttgggatgtttccaattttttgttgtttttaatgaatgaaacaataaatgtcttatatataaatctttgatgggaactctgttcccttcaagtcattcctaaatgtgggattactggcccagagtgtgagacttgttaaggtacttgataaatgtaagatgccatcttgaaagcctcttccagtacaatccaaccaggaaagtgaacagccttactgccccacatctttattttaattaattaatttatttattttatttatttatttatttttttgagacggagtttcactcttgttgcccaggctggagtgcaatggcgtgatctcagctcactgcaacctccgcctcccgggttcaagcatttctcctgccccagcctcccgaatagctggaattacaggcgcctgctaccacgcccggctaattttttgtaattttagcagagacgggtttcaccatgttggcaggctggtctcgaactcctgacctcaggtgatccacccacctcagcctcccaaagtgttgggattacaggcgtgagccgtgcccggcctgttttaatttttaaggatctgaaccttgattttaagtttcctgcccactccacagtatttgtattagaatagagcatgtgctggattatgactggatgctgtgtgctgttgaggttgggtagttggggccctttaagagactatactagcaagactcgggcccacaggcaacatcacggggttgaagaacctggtgtccctttgttggcatctgcgcaggctcttaacacacagcagcgatacacagccctagccgacattcagatttaccttgtgcttgtgaaaaatattgcacagggcctgccctagacctagtgaattagaatcttgagagttaggcttgggactcacaagctcccagatgattttaatgctcagcgaggttgaagagccgcctgtccaaggagttgccactccgtgtgatctggggcttgctaggaaagtgggatctcaggcctcactgcagagctgccgaactggcttctgcgttttgccaaggttcctgggtgtgaacatgagtttcagagtcactcctctagggcccctgcttctcagctcggaccattgacccctcagaggacatttggcaacatctggaaacgttcttggttgtcacagcctaggaggtgggtagtggtgctgctagtgggtagaggtcaggggtactgcaccaggacagcagcactggccacagaaaaaaactgtcttgccctgagcatcagtagttccccgttgactggccctgaggcagagcgatgcagcatccaaaaggcggtggagcagacctgccccagatcctagtcacttaaccttcagtgttgatctgaaggaacttcctgcagattgtccccctgaatttattctggacatccccaatggggtctgctgaggccatataccctgtccgtcacctgagatgcttctctctcttcctgcagggatgccattattacttgcaatcctgaggaattcatagttgaggcgctgcagcttcccaacttccagcagagcgtgcaggagtacaggaggagtgcgcaggacggcccagccccagcaggtgagtgggagcccacagagcagcctttctttcctgggctctgcccctgctgctgttttcctagcattaagtggagtgctggtggggcgcattctaacctggcttttcagtctaatccagggcttctctactcagctctacattagaattatagtcattggaggagggggctttggggagtttaagaatcccaattcctggctgggcgcggtggctcacacctgtaatcccagcacttcgggaggccgaggcaggtggatcgcgaggtcgggagatcgagaccatcctggctaacatgatgaaaccccgtctctactaaaaatacaaaaattagctgggcgtggcggcgggcgcctgtagtcccagctactcgggagactgaggcaggagaatggcgagaacccgggaggcggagcttgcagtgagccaaggtcgtgccactgcgctccagcctggacgacagagtgagactccgtctcaaaaaaaaaaatcccaattcctgtgccccatcccacccaatcagagcatttggcgatggcacccaggcattcttggcaaggcacgcactgagtgaaacgttttagtgaacacctgtggaaagagctctgagcagggacttggctggcagagatctagtcctggctttgcggatgcaaatccatggaggatcttggccacgtcactcaactgaggctgagggccgggcacaggctttggaaccatcgggtctccctggatttgaatcctgaccctgcctcttaccatcttcactggagacctgggcgtctgagcctgtttcccccttgggaagcagagcatttcctacctggtagggctgggaggatgcgaccgaagtgcatggtcttgcagtgagagctggatgcaaggcacacactgttctcttgaaataaatgacagttcccagcataaagaaatgtcattttttaaatgtaaaagaattacagcaattcttttgaagaaaggactggagaatttatttgttcttcttagccttttggtgacagatagcctgtgggtcccacactggtgcgaagtcctttgtttcagagcggttgccaggggcctgccagtccccctcctgggaagctggatagaactatgttgcttacccatctgtcttagtctgtgttttgttattataaaagaatatgtgagactgggtaatttatcaagaaaagaggtgtatttagttcacggttctgcgggctgagaattgaaggtcacggccctagcttccagtgaaggcttccatgctgcatcataacgtggcagaggagcgcaagtaggaagtggacgcttgtgaagacgggataacctgagctgcactctggctttataacaacccccctctcctgggaacaaatccattcccttgagaagtaatgcagtctcctgagagccagtacttactactgcagctccaagccactcaggagggtccgtccctgtagcccaaacgccttccactaggccccgcctcccaaaaccgccatactagggagcacgtttccacatgaggtctggggacaaaccaatgacactcaaaccattgcaccttctcatggctgcatgctggctcacttttgacccaaaggaatggattgtttcacatggattttttcacagagaaaagaagtcagtacccagaaatcatcttccttggaacagggtctgccatcccgatgaagattcgaaatgtcagtgccacacttgtcaacataaggtatgctgctttcccaggaagcatccttccatcaagggcacgtttactttttaaacaaaagtcctgctgtactcaccagtcgatttgaaatgcggtatcaagccctgtcacttgtcatgtcgactggagtgtccaggagaggagcgtggccttactgcattttatagcctcagtagcaaactttaccctgggaatcaccaaaattcatcccatgatgtcttttaataaacagctgattttactgtgggcagtacacctagctaagaaattagctcctttaatttttacattaatcctatgaagtggtgaataactacccattttgttgatgagtgacctgatattcagagaggtgacttgctatggttcctacagctggtaagtggggcatctgaagtttgagcggggacttggggtcttgattgctacatggtattgtcccccagccatttgttggtagtatgttaaaaagctttagggttttgcacatttgtgttcagaacctttattggattccccttgacatgttttttagttgattctcttgggtttgcctggggtcatcagcagagagattagtcaaatgcgttgtgacatgtacacgttatctctacagatagtatgtgaagaaaataagattgtgaattaccaggtttgttttaaattttgctctgccatcttacatgctagtggtggatgataaacaaccaaatagtgcattaaatatatacagcagtgacgagatgtgccctgacatcagaaatatacaatctggggtgtgtttctctgtggatgaggacatgcaataaagcagcttggagtgagccggcctctcccgggggctgagatcctgggggaagaagggctttttgagtttgacctgacaccctgcgagcagcttttgaaccagctgaagctaatgggaaggtgctattgccaccttgcctccgcctcccgactcctttttcccccagaaggtaatgtcttagcaccggggcttctctctgcaaaatgggtgcagccctctcagtgttcgtggctcctcccagagaatgaaggaggccagagcgggtcagcactctctctgccttggagcagagcttctgaaatggactgcacagcagaatagcccaagaagtttgtcagaatccagacttccagagccctgcctaaaaccaagtcagaaaccccgagtgacacctgggagtctgcgttaactggctccctgaatgaagcacctgcagcccgccctgcaccaggtgtctttgaggacatgagctgaggaaaccccgaccacttgcaaagggggaaaagtccgatggcagctggacctagaaagagtctcatatggcccagtgcctgtcctggtattttcaacagaggctgtggccacagtcaatctgcatggtcagattcattgttaggactaaatgctttaagcctcctataaactttttttttttttttttgatgcccagcctttgtgtaagtctacttgaaagggtttcagggttccatggatacttctttgctataaagaggatgacacatgtaaaatcacctttatggttaaattaattggcttttatattagctcctcaaagcaaagcaggagagacagaaatttctgcagttgcttcttggtcctgtccaaagcagacatcagcctctgaaccatcagcagtcttcctagtggcagtgactctcttcctcttctcttctgcagccccgacacgtctctgctactggactgtggtgagggcacatttgggcagctgtgccgtcattacggagaccaggtggacagggtcctgggcaccctggctgctgtgtttgtgtcccacctgcacgcagatcaccacacggtgagtgttgggctggaccacaaagctggagcctggaggaggcactgccacgttgagttggccctttggctgcgtcttttcctccgcttccaaacttgcccagagcttttgttactcatctctggctaggaaatggttttttgcaaaactcaacatagtccttctgcgccacaagaatgtcttctcttcctgttcagttcctttcctgcagcaggacaggtttgagtttacccagccttccttgagtcttgaatctcacacggcctgctcagcggaagctttgaccggatgcaggaggtgtggctatgagaccctcaccttggtctcctggggtgccgggccctgggccgttgccctcttcccagcacgggtcgtgtcgctttctgcctgtgacatttcagggccatggcgcagggggctcggcctgtgccacccccactgcggctgtgttagaggctggtgggtgacgtcgggctggcaactcctgcaagagagagggctgcagaccctaacccggaggggatggccctggggcctggctgacgcatgtctcctgtttccttgccagggcttgccaagtatcttgctgcagagagaacgcgccttggtaagtgtggcacttgatgggcgttctgagtttcagcggtttacacatcatccgccatgcctcttggcactccagtttttattgagatgttctgtcgtcgagtcggcacttgcattttttgttccaggcatctttgggaaagccgcttcaccctttgctggtggttgcccccaaccagctcaaagcctggctccagcagtaccacaaccagtgccaggaggtcctgcaccacatcaggtgagcatccagggcagcctggcccgctgggctgttgcttgctgccgtctccttcagaagctcaaggtggacactggggtagttaccaatatcccccagcagccttgcccttgacatggtcccagatggcagaagcaggggagaagtgcattggctgaaggacagaaaccattagatagttcccatgtaatgcttattttcttagaagcatttcttcccagtcctcatttgagttctgagctgctttctaaacttcgagcagcttttcttgatgagacagttccagagccaagcacccaaatagtggctagcacagagaatgtccatagcaggtgtgtggctagctggcaggtggcaccatcctcaccccaaggggaaggagtcccctctgctggagccatccgtggcccgtgctgcctgagccggaggcagcattcacctgctgggtttctcccagtggcctagaggctttggtttggctctttatatttgactgctgtttcctcatcatagtgactatgatttaactcatgttttctcctaagaatgattttggggttctccagccaaagacttaaactttggttccagatgtccaagaaacgtttattatcattttaaatgttttgtctttttacagtatgattcctgccaaatgccttcaggaaggggctgagatctccagtcctgcagtggaaagattgatcagttcgctgttgcgaacatgtgatttggaagaggtaaggggcacagccgcaggcatcatgggggcgaggtggggagcagagctgcagagccctccagccccaccctttcagtttcagacctgtctggtgcggcactgcaagcatgcgtttggctgtgcgctggtgcacacctctggctggaaagtggtctattccggggacaccatgccctgcgaggctctggtccggatgggtgagtagaggaagaagcaagccaccctgaggttgctctggggtttgtgtagctggaggtgaatgcaggtgggcttgcagggaaacgtcagcagaggcaggagactcaggtccccaccctcagagtctctggttgtcatcctagtaggcagacccagggccaggggagctgagtgttgagaccaggaaacagcacgtgactgaggcctgtgtgccgctctcgcagagaactctgccctgatccttgtgctgcttctccagggaaagatgccaccctcctgatacatgaagccaccctggaagatggtttggaagaggaagcagtggaaaagacacacaggtagcaaaggccggtcagtccttgtcgcccacatcctctccctcccccactacgtgacactgagcagccgtcgtttgtctccactgatgtggggctgccctgcttcctatcaagggctatgggggcttccttgacctgtggcagtgctcacaggctcttggcctttatttttgcagaattttctaagcaagattctagagtgaggcacagttttttgaaagcatctagaaatcggctgaataaactataagccatgtcagggaattgccaggggaaggcgggggctgggggactgaatttttggctgctaatttcaacgaaagagtgcattaccccaggtgggccctgtggtttctcttgggtgccctcatggacagatttggcagccagcacagagggtgggcttcatccaggggtgtgtgcgaaggctctggccctcaggggagattgtgctggctacggaggtgcccgttaagaaaacccaccagcttccccgggtgccctggcagttgatggccagggtctgtgccactgtctgctttgcagtcttgcagttgagttcagcttcagtctgctctgtccttcacctgcagcacaacgtcccaagccatcagcgtggggatgcggatgaacgcggagttcattatgctgaaccacttcagccagcgctatgccaaggtccccctcttcagccccaacttcagcgagaaagtgggagttgcctttgaccacatgaaggtctgtatgtcacacggacagcacagggcggggacggggcagggagacaggactctacacactgagtaggacggtcagctggagtttgctttcttatttggggccaccgtgggaaaaggttatctacccatcactaaccaggtcgaaccaccctgggtttgctggtgagacccacctcctgcaggggccaactagtcttcagtctcagttcactggaaatttctgagaatccttttaggcctggactgctcacacagtcatggcatttgagcctcagcacagacctgtgagacaggtggttgcctcttgtgagtgggaaagccaggcctgacccttggccttccggaatgaaggggcagagccggagccaggcctcgtttttcaggagcttgattttgagagcatctggactgctctcccttccctctccggaggcccttagccaggcctggggagcctctgcccctttagagggttccctccatgccattcttttttccatttcagctgtggcctgttggcttgtgccaaggaaggggcgttggcgctgctgtgtgagcacatgactgcatcccttccagctcctgtcccccacccctgcccctctgagacatgtccttgtcttctattgtgtcttctaggtctgctttggagactttccaacaatgcccaagctgattcccccactgaaagccctgtttgctggcgacatcgaggagatggaggagcgcagggagaagcgggagctgcggcaggtgcgggcggccctcctgtccagggagctggcaggcggcctggaggatggggagcctcagcagaagcgggcccacacagaggagccacaggccaagaaggtcagagcccagtgaagatctgggagaccctgaactcagaaggctgtgtgtcttctgccccacgcacgcacccgtatctgccctccttgctggtagaagctgaagagcacggtcccccaggaggcagctcaggataggtggtatggagctgtgccgaggcttgggctcccacataagcactagtctatagatgcctcttaggactggtgcctggcacagccgcgggccaggaggctgccacacggaagcaagcagatgaactaatttcatttcaaggcagtttttaaagaagtcttggaaacagacggcggcacctttcctctaatccagcaaagtgattccctgcacaccagagacaagcagagtaacaggatcagtgggtctaagtgtccgagacttaacgaaaatagtatttcagctgcaataaagattgagtttgcaa

SEQ ID NO: 11819 - DNA, 3738 bp, Homo sapiens
agggcttcggcttccctgcttcacacatgtggttcactgttgcgggggttcgtggagttatggtgggtgggaaatccgagattctttgcatccatgtgatttctgcggatctgtgaagaacttcaggcctgggtctgagcgtccttttcccaacccttgggccccggcctggctgtcagcactttcggagctccaccctcttccgtgcaccccaaggccagtgtgtcgttgttagcgtgtggggtggacagatctggtgtgtagccggtggtggagaaaggactcattttgtcctagcacccacacacacaggcccccactcctctccacctctgctaaggagggctcaaaacccaccagcataaatgtggctcggtagtccaacgtggacttttaatttttttttcttttttttttttccagagtctacaataaaacatctaattggtgtcagagagtttacagaataaaaccttctgaatgtcttgtgtaatgtttgtcttgtaggtatctcttcaactgtggagaaggcgttcagagactcatgcaggagcacaagttaaaggttgctcgcctggacaacatattcctgacacgaatgcactggtctaatgttgggggcttaagtggaatgattcttactttaaaggaaaccgggcttccaaagtgtgtactttctggacctccacaactggaaaaatacctcgaagcaatcaaaatattttctggtccattgaaaggaatagaactggctgtgcggccccactctgccccagaatacgaggatgaaaccatgacagtttaccagatccccatacacagtgaacagaggaggggaaagcaccaaccatggcagagtccagaaaggcctctcagcaggctcagtccagagcgatcttcagactccgagtcgaatgaaaatgagccacaccttccacatggtgttagccagagaagaggggtcagggactcttccctggtcgtagctttcatctgtaagcttcacttaaagagaggaaacttcttggtgctcaaagcaaaggagatgggcctcccagttgggacagctgccatcgctcccatcattgctgctgtcaaggacgggaaaagcatcactcatgaaggaagagagattttggctgaagagctgtgtactcctccagatcctggtgctgcttttgtggtggtagaatgtccagatgaaagcttcattcaacccatctgtgagaatgccacctttcagaggtaccaaggaaaggcagatgcccccgtggccttggtggttcacatggccccagcatctgtgcttgtggacagcaggtaccagcagtggatggagaggtttgggcctgacacccagcacttggtcctgaatgagaactgtgcctcagttcacaaccttcgcagccacaagattcaaacccagctcaacctcatccacccggacatcttccccctgctcaccagtttccgctgtaagaaggagggccccaccctcagtgtgcccatggttcagggtgaatgcctcctcaagtaccagctccgtcccaggagggagtggcagagggatgccattattacttgcaatcctgaggaattcatagttgaggcgctgcagcttcccaacttccagcagagcgtgcaggagtacaggaggagtgcgcaggacggcccagccccagcagagaaaagaagtcagtacccagaaatcatcttccttggaacagggtctgccatcccgatgaagattcgaaatgtcagtgccacacttgtcaacataagccccgacacgtctctgctactggactgtggtgagggcacatttgggcagctgtgccgtcattacggagaccaggtggacagggtcctgggcaccctggctgctgtgtttgtgtcccacctgcacgcagatcaccacacggtgagtgttgggctggaccacaaagctggagcctggaggaggcactgccacgttgagttggccctttggctgcgtcttttcctccgcttccaaacttgcccagagcttttgttactcatctctggctaggaaatggttttttgcaaaactcaacatagtccttctgcgccacaagaatgtcttctcttcctgttcagttcctttcctgcagcaggacaggtttgagtttacccagccttccttgagtcttgaatctcacacggcctgctcagcggaagctttgaccggatgcaggaggtgtggctatgagaccctcaccttggtctcctggggtgccgggccctgggccgttgccctcttcccagcacgggtcgtgtcgctttctgcctgtgacatttcagggccatggcgcagggggctcggcctgtgccacccccactgcggctgtgttagaggctggtgggtgacgtcgggctggcaactcctgcaagagagagggctgcagaccctaacccggaggggatggccctggggcctggctgacgcatgtctcctgtttccttgccagggcttgccaagtatcttgctgcagagagaacgcgccttggcatctttgggaaagccgcttcaccctttgctggtggttgcccccaaccagctcaaagcctggctccagcagtaccacaaccagtgccaggaggtcctgcaccacatcagtatgattcctgccaaatgccttcaggaaggggctgagatctccagtcctgcagtggaaagattgatcagttcgctgttgcgaacatgtgatttggaagagtttcagacctgtctggtgcggcactgcaagcatgcgtttggctgtgcgctggtgcacacctctggctggaaagtggtctattccggggacaccatgccctgcgaggctctggtccggatggggaaagatgccaccctcctgatacatgaagccaccctggaagatggtttggaagaggaagcagtggaaaagacacacagcacaacgtcccaagccatcagcgtggggatgcggatgaacgcggagttcattatgctgaaccacttcagccagcgctatgccaaggtccccctcttcagccccaacttcagcgagaaagtgggagttgcctttgaccacatgaaggtctgctttggagactttccaacaatgcccaagctgattcccccactgaaagccctgtttgctggcgacatcgaggagatggaggagcgcagggagaagcgggagctgcggcaggtgcgggcggccctcctgtccagggagctggcaggcggcctggaggatggggagcctcagcagaagcgggcccacacagaggagccacaggccaagaaggtcagagcccagtgaagatctgggagaccctgaactcagaaggctgtgtgtcttctgccccacgcacgcacccgtatctgccctccttgctggtagaagctgaagagcacggtcccccaggaggcagctcaggataggtggtatggagctgtgccgaggcttgggctcccacataagcactagtctatagatgcctcttaggactggtgcctggcacagccgcgggccaggaggctgccacacggaagcaagcagatgaactaatttcatttcaaggcagtttttaaagaagtcttggaaacagacggcggcacctttcctctaatccagcaaagtgattccctgcacaccagagacaagcagagtaacaggatcagtgggtctaagtgtccgagacttaacgaaaatagtatttcagctgcaataaagattgagtttgcaa

SEQ ID NO: 11820 - DNA, 11716 bp, Homo sapiens
tttaaagggaactggagggaaacacatcagcatgttagtaagtggtctgttgtccaggtggtgaaatttcagatgattttcatttctcgtgcctgtgtctcaggtcctctggaaggcagacaccagggtggcattggaggtgcaggaggtttattcgaggaaatttgactgtgagagaggaaggagagagggagcaggaggaggcagggagagcctgggtctggctttgcaggttggacccgtatgagtggagagggtaggaaggaagtgcagtgctgagaaaggatcagccaggcctactggaaagcccagagcagagcttgccagatacaggaatcccacgtccattggaaatggcccagcaccggggtctgccgtgagcagcctgctgtgagagcatggcctgggcgtggaggctgtcagctcactgcagtgctgcagagggccgcacgatacccctccctggctgcgtggtccctgtcttggtgtgtcctgagtctgcatcactttgtaaagccccactcttctgcccaggtaccaaggaaaggcagatgcccccgtggccttggtggttcacatggccccagcatctgtgcttgtggacagcaggtaccagcagtggatggagaggtatggagcccagcccagcggcacttggggtaactcttctgggcagtggtggattcccctttcctcccctcgtgctctttccagcgctacctacccttctgcacctgcctaaactttctgtgggattcctgccttcccagaattctaggcttcccagatctgtgctacactcgtgaagaaaatgcaccgctaggtggcgcagtgtccacacgattccatttattttacaccctccacactcttcagggtgtctgaacaaatactgccgtttggttgaggattccataagtgaattccaaagaagagattgcagctataaaatgatagcttccatttactgaatgcccactttgtgggaggcagtgtgtgaaatacccttcatttcacttcatttcctctagggtcgtcgccagcagccctgggaggtagatgtttagtcactggaaggcatctttttcctcggggcatcgctggccagggccaggtggaggagtatgagttgagctcgggtgcggggtgaccttgggctgctttttggcccctgcccgtatctccccacatggcccgtttacctgcccctcactccatggcctgctctcctgctgtctctttcattcctcagggtttgggtcccctatttgtatgccctggacatcttctttttcttgtttttcctctcactcttcccagcacacctgaaaggcagctgagctagggaacaccgggctttgagacagcaggagtgggaccatgtttggccatgtagtaacactgcttggggcaagtcactgaactgtttgaacacctcatcctcattaccactcctgagctcagcaccactcctcagggggagctgcctcctaacagacgctgcaaatgccgggtctgtttcttcacaggtttgggcctgacacccagcacttggtcctgaatgagaactgtgcctcagttcacaaccttcgcagccacaagattcaaacccagctcaacctcatccacccggacatcttccccctgctcaccagtttccgctgtaaggtagtgtctcagaccggccccttgtcggcccagctctcgtcccctctctttctctccatgaatgtgttttgtctctttcagaaggagggccccaccctcagtgtgcccatggttcagggtgaatgcctcctcaagtaccagctccgtcccaggagggagtggcagaggtctgtgccatcttgaactaatggaatcgtctcagtcgagttgggaaacatttctgtaaatagccacatagtaaatgttccaggaggctctccagaccatatggtctctgttgtaactattcaactccgctttgagcacaaaagaaacacggacaataagctaatgaatgggcttggctgtgtgccagcgtgaatttatttagaaaagcagcctactccaggctgggttgaggtgggcggattggggccagtagttctccttttccaaaattgccttgcatgggaatagcagtgatagagctcgtgtgtttcacagtatagaaaataggaaatgtgtgatgaacaaagtcacccataatcctgttgcccagagataatgattgataacattttgtgtttcttgatttgtgtatgtgggtttatattgtcagtcttttcctgtatcactaaacagtcttaagtaacaagatttttattggtattccaaatagggatgtttactcatttgggatgtttccaattttttgttgtttttaatgaatgaaacaataaatgtcttatatataaatctttgatgggaactctgttcccttcaagtcattcctaaatgtgggattactggcccagagtgtgagacttgttaaggtacttgataaatgtaagatgccatcttgaaagcctcttccagtacaatccaaccaggaaagtgaacagccttactgccccacatctttattttaattaattaatttatttattttatttatttatttatttttttgagacggagtttcactcttgttgcccaggctggagtgcaatggcgtgatctcagctcactgcaacctccgcctcccgggttcaagcatttctcctgccccagcctcccgaatagctggaattacaggcgcctgctaccacgcccggctaattttttgtaattttagcagagacgggtttcaccatgttggcaggctggtctcgaactcctgacctcaggtgatccacccacctcagcctcccaaagtgttgggattacaggcgtgagccgtgcccggcctgttttaatttttaaggatctgaaccttgattttaagtttcctgcccactccacagtatttgtattagaatagagcatgtgctggattatgactggatgctgtgtgctgttgaggttgggtagttggggccctttaagagactatactagcaagactcgggcccacaggcaacatcacggggttgaagaacctggtgtccctttgttggcatctgcgcaggctcttaacacacagcagcgatacacagccctagccgacattcagatttaccttgtgcttgtgaaaaatattgcacagggcctgccctagacctagtgaattagaatcttgagagttaggcttgggactcacaagctcccagatgattttaatgctcagcgaggttgaagagccgcctgtccaaggagttgccactccgtgtgatctggggcttgctaggaaagtgggatctcaggcctcactgcagagctgccgaactggcttctgcgttttgccaaggttcctgggtgtgaacatgagtttcagagtcactcctctagggcccctgcttctcagctcggaccattgacccctcagaggacatttggcaacatctggaaacgttcttggttgtcacagcctaggaggtgggtagtggtgctgctagtgggtagaggtcaggggtactgcaccaggacagcagcactggccacagaaaaaaactgtcttgccctgagcatcagtagttccccgttgactggccctgaggcagagcgatgcagcatccaaaaggcggtggagcagacctgccccagatcctagtcacttaaccttcagtgttgatctgaaggaacttcctgcagattgtccccctgaatttattctggacatccccaatggggtctgctgaggccatataccctgtccgtcacctgagatgcttctctctcttcctgcagggatgccattattacttgcaatcctgaggaattcatagttgaggcgctgcagcttcccaacttccagcagagcgtgcaggagtacaggaggagtgcgcaggacggcccagccccagcaggtgagtgggagcccacagagcagcctttctttcctgggctctgcccctgctgctgttttcctagcattaagtggagtgctggtggggcgcattctaacctggcttttcagtctaatccagggcttctctactcagctctacattagaattatagtcattggaggagggggctttggggagtttaagaatcccaattcctggctgggcgcggtggctcacacctgtaatcccagcacttcgggaggccgaggcaggtggatcgcgaggtcgggagatcgagaccatcctggctaacatgatgaaaccccgtctctactaaaaatacaaaaattagctgggcgtggcggcgggcgcctgtagtcccagctactcgggagactgaggcaggagaatggcgagaacccgggaggcggagcttgcagtgagccaaggtcgtgccactgcgctccagcctggacgacagagtgagactccgtctcaaaaaaaaaaatcccaattcctgtgccccatcccacccaatcagagcatttggcgatggcacccaggcattcttggcaaggcacgcactgagtgaaacgttttagtgaacacctgtggaaagagctctgagcagggacttggctggcagagatctagtcctggctttgcggatgcaaatccatggaggatcttggccacgtcactcaactgaggctgagggccgggcacaggctttggaaccatcgggtctccctggatttgaatcctgaccctgcctcttaccatcttcactggagacctgggcgtctgagcctgtttcccccttgggaagcagagcatttcctacctggtagggctgggaggatgcgaccgaagtgcatggtcttgcagtgagagctggatgcaaggcacacactgttctcttgaaataaatgacagttcccagcataaagaaatgtcattttttaaatgtaaaagaattacagcaattcttttgaagaaaggactggagaatttatttgttcttcttagccttttggtgacagatagcctgtgggtcccacactggtgcgaagtcctttgtttcagagcggttgccaggggcctgccagtccccctcctgggaagctggatagaactatgttgcttacccatctgtcttagtctgtgttttgttattataaaagaatatgtgagactgggtaatttatcaagaaaagaggtgtatttagttcacggttctgcgggctgagaattgaaggtcacggccctagcttccagtgaaggcttccatgctgcatcataacgtggcagaggagcgcaagtaggaagtggacgcttgtgaagacgggataacctgagctgcactctggctttataacaacccccctctcctgggaacaaatccattcccttgagaagtaatgcagtctcctgagagccagtacttactactgcagctccaagccactcaggagggtccgtccctgtagcccaaacgccttccactaggccccgcctcccaaaaccgccatactagggagcacgtttccacatgaggtctggggacaaaccaatgacactcaaaccattgcaccttctcatggctgcatgctggctcacttttgacccaaaggaatggattgtttcacatggattttttcacagagaaaagaagtcagtacccagaaatcatcttccttggaacagggtctgccatcccgatgaagattcgaaatgtcagtgccacacttgtcaacataaggtatgctgctttcccaggaagcatccttccatcaagggcacgtttactttttaaacaaaagtcctgctgtactcaccagtcgatttgaaatgcggtatcaagccctgtcacttgtcatgtcgactggagtgtccaggagaggagcgtggccttactgcattttatagcctcagtagcaaactttaccctgggaatcaccaaaattcatcccatgatgtcttttaataaacagctgattttactgtgggcagtacacctagctaagaaattagctcctttaatttttacattaatcctatgaagtggtgaataactacccattttgttgatgagtgacctgatattcagagaggtgacttgctatggttcctacagctggtaagtggggcatctgaagtttgagcggggacttggggtcttgattgctacatggtattgtcccccagccatttgttggtagtatgttaaaaagctttagggttttgcacatttgtgttcagaacctttattggattccccttgacatgttttttagttgattctcttgggtttgcctggggtcatcagcagagagattagtcaaatgcgttgtgacatgtacacgttatctctacagatagtatgtgaagaaaataagattgtgaattaccaggtttgttttaaattttgctctgccatcttacatgctagtggtggatgataaacaaccaaatagtgcattaaatatatacagcagtgacgagatgtgccctgacatcagaaatatacaatctggggtgtgtttctctgtggatgaggacatgcaataaagcagcttggagtgagccggcctctcccgggggctgagatcctgggggaagaagggctttttgagtttgacctgacaccctgcgagcagcttttgaaccagctgaagctaatgggaaggtgctattgccaccttgcctccgcctcccgactcctttttcccccagaaggtaatgtcttagcaccggggcttctctctgcaaaatgggtgcagccctctcagtgttcgtggctcctcccagagaatgaaggaggccagagcgggtcagcactctctctgccttggagcagagcttctgaaatggactgcacagcagaatagcccaagaagtttgtcagaatccagacttccagagccctgcctaaaaccaagtcagaaaccccgagtgacacctgggagtctgcgttaactggctccctgaatgaagcacctgcagcccgccctgcaccaggtgtctttgaggacatgagctgaggaaaccccgaccacttgcaaagggggaaaagtccgatggcagctggacctagaaagagtctcatatggcccagtgcctgtcctggtattttcaacagaggctgtggccacagtcaatctgcatggtcagattcattgttaggactaaatgctttaagcctcctataaactttttttttttttttttgatgcccagcctttgtgtaagtctacttgaaagggtttcagggttccatggatacttctttgctataaagaggatgacacatgtaaaatcacctttatggttaaattaattggcttttatattagctcctcaaagcaaagcaggagagacagaaatttctgcagttgcttcttggtcctgtccaaagcagacatcagcctctgaaccatcagcagtcttcctagtggcagtgactctcttcctcttctcttctgcagccccgacacgtctctgctactggactgtggtgagggcacatttgggcagctgtgccgtcattacggagaccaggtggacagggtcctgggcaccctggctgctgtgtttgtgtcccacctgcacgcagatcaccacacggtgagtgttgggctggaccacaaagctggagcctggaggaggcactgccacgttgagttggccctttggctgcgtcttttcctccgcttccaaacttgcccagagcttttgttactcatctctggctaggaaatggttttttgcaaaactcaacatagtccttctgcgccacaagaatgtcttctcttcctgttcagttcctttcctgcagcaggacaggtttgagtttacccagccttccttgagtcttgaatctcacacggcctgctcagcggaagctttgaccggatgcaggaggtgtggctatgagaccctcaccttggtctcctggggtgccgggccctgggccgttgccctcttcccagcacgggtcgtgtcgctttctgcctgtgacatttcagggccatggcgcagggggctcggcctgtgccacccccactgcggctgtgttagaggctggtgggtgacgtcgggctggcaactcctgcaagagagagggctgcagaccctaacccggaggggatggccctggggcctggctgacgcatgtctcctgtttccttgccagggcttgccaagtatcttgctgcagagagaacgcgccttggtaagtgtggcacttgatgggcgttctgagtttcagcggtttacacatcatccgccatgcctcttggcactccagtttttattgagatgttctgtcgtcgagtcggcacttgcattttttgttccaggcatctttgggaaagccgcttcaccctttgctggtggttgcccccaaccagctcaaagcctggctccagcagtaccacaaccagtgccaggaggtcctgcaccacatcaggtgagcatccagggcagcctggcccgctgggctgttgcttgctgccgtctccttcagaagctcaaggtggacactggggtagttaccaatatcccccagcagccttgcccttgacatggtcccagatggcagaagcaggggagaagtgcattggctgaaggacagaaaccattagatagttcccatgtaatgcttattttcttagaagcatttcttcccagtcctcatttgagttctgagctgctttctaaacttcgagcagcttttcttgatgagacagttccagagccaagcacccaaatagtggctagcacagagaatgtccatagcaggtgtgtggctagctggcaggtggcaccatcctcaccccaaggggaaggagtcccctctgctggagccatccgtggcccgtgctgcctgagccggaggcagcattcacctgctgggtttctcccagtggcctagaggctttggtttggctctttatatttgactgctgtttcctcatcatagtgactatgatttaactcatgttttctcctaagaatgattttggggttctccagccaaagacttaaactttggttccagatgtccaagaaacgtttattatcattttaaatgttttgtctttttacagtatgattcctgccaaatgccttcaggaaggggctgagatctccagtcctgcagtggaaagattgatcagttcgctgttgcgaacatgtgatttggaagaggtaaggggcacagccgcaggcatcatgggggcgaggtggggagcagagctgcagagccctccagccccaccctttcagtttcagacctgtctggtgcggcactgcaagcatgcgtttggctgtgcgctggtgcacacctctggctggaaagtggtctattccggggacaccatgccctgcgaggctctggtccggatgggtgagtagaggaagaagcaagccaccctgaggttgctctggggtttgtgtagctggaggtgaatgcaggtgggcttgcagggaaacgtcagcagaggcaggagactcaggtccccaccctcagagtctctggttgtcatcctagtaggcagacccagggccaggggagctgagtgttgagaccaggaaacagcacgtgactgaggcctgtgtgccgctctcgcagagaactctgccctgatccttgtgctgcttctccagggaaagatgccaccctcctgatacatgaagccaccctggaagatggtttggaagaggaagcagtggaaaagacacacaggtagcaaaggccggtcagtccttgtcgcccacatcctctccctcccccactacgtgacactgagcagccgtcgtttgtctccactgatgtggggctgccctgcttcctatcaagggctatgggggcttccttgacctgtggcagtgctcacaggctcttggcctttatttttgcagaattttctaagcaagattctagagtgaggcacagttttttgaaagcatctagaaatcggctgaataaactataagccatgtcagggaattgccaggggaaggcgggggctgggggactgaatttttggctgctaatttcaacgaaagagtgcattaccccaggtgggccctgtggtttctcttgggtgccctcatggacagatttggcagccagcacagagggtgggcttcatccaggggtgtgtgcgaaggctctggccctcaggggagattgtgctggctacggaggtgcccgttaagaaaacccaccagcttccccgggtgccctggcagttgatggccagggtctgtgccactgtctgctttgcagtcttgcagttgagttcagcttcagtctgctctgtccttcacctgcagcacaacgtcccaagccatcagcgtggggatgcggatgaacgcggagttcattatgctgaaccacttcagccagcgctatgccaaggtccccctcttcagccccaacttcagcgagaaagtgggagttgcctttgaccacatgaaggtctgtatgtcacacggacagcacagggcggggacggggcagggagacaggactctacacactgagtaggacggtcagctggagtttgctttcttatttggggccaccgtgggaaaaggttatctacccatcactaaccaggtcgaaccaccctgggtttgctggtgagacccacctcctgcaggggccaactagtcttcagtctcagttcactggaaatttctgagaatccttttaggcctggactgctcacacagtcatggcatttgagcctcagcacagacctgtgagacaggtggttgcctcttgtgagtgggaaagccaggcctgacccttggccttccggaatgaaggggcagagccggagccaggcctcgtttttcaggagcttgattttgagagcatctggactgctctcccttccctctccggaggcccttagccaggcctggggagcctctgcccctttagagggttccctccatgccattcttttttccatttcagctgtggcctgttggcttgtgccaaggaaggggcgttggcgctgctgtgtgagcacatgactgcatcccttccagctcctgtcccccacccctgcccctctgagacatgtccttgtcttctattgtgtcttctaggtctgctttggagactttccaacaatgcccaagctgattcccccactgaaagccctgtttgctggcgacatcgaggagatggaggagcgcagggagaagcgggagctgcggcaggtgcgggcggccctcctgtccagggagctggcaggcggcctggaggatggggagcctcagcagaagcgggcccacacagaggagccacaggccaagaaggtcagagcccagtgaagatctgggagaccctgaactcagaaggctgtgtgtcttctgccccacgcacgcacccgtatctgccctccttgctggtagaagctgaagagcacggtcccccaggaggcagctcaggataggtggtatggagctgtgccgaggcttgggctcccacataagcactagtctatagatgcctcttaggactggtgcctggcacagccgcgggccaggaggctgccacacggaagcaagcagatgaactaatttcatttcaaggcagtttttaaagaagtcttggaaacagacggcggcacctttcctctaatccagcaaagtgattccctgcacaccagagacaagcagagtaacaggatcagtgggtctaagtgtccgagacttaacgaaaatagtatttcagctgcaataaagattgagtttgc

SEQ ID NO: 11821 - DNA, 2452 bp, Homo sapiens
tttaaagggaactggagggaaacacatcagcatgttagtaagtggtctgttgtccaggtggtgaaatttcagatgattttcatttctcgtgcctgtgtctcaggtcctctggaaggcagacaccagggtggcattggaggtgcaggaggtttattcgaggaaatttgactgtgagagaggaaggagagagggagcaggaggaggcagggagagcctgggtctggctttgcaggttggacccgtatgagtggagagggtaggaaggaagtgcagtgctgagaaaggatcagccaggcctactggaaagcccagagcagagcttgccagatacaggaatcccacgtccattggaaatggcccagcaccggggtctgccgtgagcagcctgctgtgagagcatggcctgggcgtggaggctgtcagctcactgcagtgctgcagagggccgcacgatacccctccctggctgcgtggtccctgtcttggtgtgtcctgagtctgcatcactttgtaaagccccactcttctgcccaggtaccaaggaaaggcagatgcccccgtggccttggtggttcacatggccccagcatctgtgcttgtggacagcaggtaccagcagtggatggagaggtttgggcctgacacccagcacttggtcctgaatgagaactgtgcctcagttcacaaccttcgcagccacaagattcaaacccagctcaacctcatccacccggacatcttccccctgctcaccagtttccgctaaggagggccccaccctcagtgtgcccatggttcagggtgaatgcctcctcaagtaccagctccgtcccaggagggagtggcagagggatgccattattacttgcaatcctgaggaattcatagttgaggcgctgcagcttcccaacttccagcagagcgtgcaggagtacaggaggagtgcgcaggacggcccagccccagcagagaaaagaagtcagtacccagaaatcatcttccttggaacagggtctgccatcccgatgaagattcgaaatgtcagtgccacacttgtcaacataagccccgacacgtctctgctactggactgtggtgagggcacatttgggcagctgtgccgtcattacggagaccaggtggacagggtcctgggcaccctggctgctgtgtttgtgtcccacctgcacgcagatcaccacacgggcttgccaagtatcttgctgcagagagaacgcgccttggcatctttgggaaagccgcttcaccctttgctggtggttgcccccaaccagctcaaagcctggctccagcagtaccacaaccagtgccaggaggtcctgcaccacatcagtatgattcctgccaaatgccttcaggaaggggctgagatctccagtcctgcagtggaaagattgatcagttcgctgttgcgaacatgtgatttggaagagtttcagacctgtctggtgcggcactgcaagcatgcgtttggctgtgcgctggtgcacacctctggctggaaagtggtctattccggggacaccatgccctgcgaggctctggtccggatggggaaagatgccaccctcctgatacatgaagccaccctggaagatggtttggaagaggaagcagtggaaaagacacacagcacaacgtcccaagccatcagcgtggggatgcggatgaacgcggagttcattatgctgaaccacttcagccagcgctatgccaaggtccccctcttcagccccaacttcagcgagaaagtgggagttgcctttgaccacatgaaggtctgctttggagactttccaacaatgcccaagctgattcccccactgaaagccctgtttgctggcgacatcgaggagatggaggagcgcagggagaagcgggagctgcggcaggtgcgggcggccctcctgtccagggagctggcaggcggcctggaggatggggagcctcagcagaagcgggcccacacagaggagccacaggccaagaaggtcagagcccagtgaagatctgggagaccctgaactcagaaggctgtgtgtcttctgccccacgcacgcacccgtatctgccctccttgctggtagaagctgaagagcacggtcccccaggaggcagctcaggataggtggtatggagctgtgccgaggcttgggctcccacataagcactagtctatagatgcctcttaggactggtgcctggcacagccgcgggccaggaggctgccacacggaagcaagcagatgaactaatttcatttcaaggcagtttttaaagaagtcttggaaacagacggcggcacctttcctctaatccagcaaagtgattccctgcacaccagagacaagcagagtaacaggatcagtgggtctaagtgtccgagacttaacgaaaatagtatttcagctgcaataaagattgagtttgc

SEQ ID NO: 11822 - DNA, 4079 bp, Homo sapiens
agaaaagaagtcagtacccagaaatcatcttccttggaacagggtctgccatcccgatgaagattcgaaatgtcagtgccacacttgtcaacataaggtatgctgctttcccaggaagcatccttccatcaagggcacgtttactttttaaacaaaagtcctgctgtactcaccagtcgatttgaaatgcggtatcaagccctgtcacttgtcatgtcgactggagtgtccaggagaggagcgtggccttactgcattttatagcctcagtagcaaactttaccctgggaatcaccaaaattcatcccatgatgtcttttaataaacagctgattttactgtgggcagtacacctagctaagaaattagctcctttaatttttacattaatcctatgaagtggtgaataactacccattttgttgatgagtgacctgatattcagagaggtgacttgctatggttcctacagctggtaagtggggcatctgaagtttgagcggggacttggggtcttgattgctacatggtattgtcccccagccatttgttggtagtatgttaaaaagctttagggttttgcacatttgtgttcagaacctttattggattccccttgacatgttttttagttgattctcttgggtttgcctggggtcatcagcagagagattagtcaaatgcgttgtgacatgtacacgttatctctacagatagtatgtgaagaaaataagattgtgaattaccaggtttgttttaaattttgctctgccatcttacatgctagtggtggatgataaacaaccaaatagtgcattaaatatatacagcagtgacgagatgtgccctgacatcagaaatatacaatctggggtgtgtttctctgtggatgaggacatgcaataaagcagcttggagtgagccggcctctcccgggggctgagatcctgggggaagaagggctttttgagtttgacctgacaccctgcgagcagcttttgaaccagctgaagctaatgggaaggtgctattgccaccttgcctccgcctcccgactcctttttcccccagaaggtaatgtcttagcaccggggcttctctctgcaaaatgggtgcagccctctcagtgttcgtggctcctcccagagaatgaaggaggccagagcgggtcagcactctctctgccttggagcagagcttctgaaatggactgcacagcagaatagcccaagaagtttgtcagaatccagacttccagagccctgcctaaaaccaagtcagaaaccccgagtgacacctgggagtctgcgttaactggctccctgaatgaagcacctgcagcccgccctgcaccaggtgtctttgaggacatgagctgaggaaaccccgaccacttgcaaagggggaaaagtccgatggcagctggacctagaaagagtctcatatggcccagtgcctgtcctggtattttcaacagaggctgtggccacagtcaatctgcatggtcagattcattgttaggactaaatgctttaagcctcctataaactttttttttttttttttgatgcccagcctttgtgtaagtctacttgaaagggtttcagggttccatggatacttctttgctataaagaggatgacacatgtaaaatcacctttatggttaaattaattggcttttatattagctcctcaaagcaaagcaggagagacagaaatttctgcagttgcttcttggtcctgtccaaagcagacatcagcctctgaaccatcagcagtcttcctagtggcagtgactctcttcctcttctcttctgcagccccgacacgtctctgctactggactgtggtgagggcacatttgggcagctgtgccgtcattacggagaccaggtggacagggtcctgggcaccctggctgctgtgtttgtgtcccacctgcacgcagatcaccacacggtgagtgttgggctggaccacaaagctggagcctggaggaggcactgccacgttgagttggccctttggctgcgtcttttcctccgcttccaaacttgcccagagcttttgttactcatctctggctaggaaatggttttttgcaaaactcaacatagtccttctgcgccacaagaatgtcttctcttcctgttcagttcctttcctgcagcaggacaggtttgagtttacccagccttccttgagtcttgaatctcacacggcctgctcagcggaagctttgaccggatgcaggaggtgtggctatgagaccctcaccttggtctcctggggtgccgggccctgggccgttgccctcttcccagcacgggtcgtgtcgctttctgcctgtgacatttcagggccatggcgcagggggctcggcctgtgccacccccactgcggctgtgttagaggctggtgggtgacgtcgggctggcaactcctgcaagagagagggctgcagaccctaacccggaggggatggccctggggcctggctgacgcatgtctcctgtttccttgccagggcttgccaagtatcttgctgcagagagaacgcgccttggtaagtgtggcacttgatgggcgttctgagtttcagcggtttacacatcatccgccatgcctcttggcactccagtttttattgagatgttctgtcgtcgagtcggcacttgcattttttgttccaggcatctttgggaaagccgcttcaccctttgctggtggttgcccccaaccagctcaaagcctggctccagcagtaccacaaccagtgccaggaggtcctgcaccacatcaggtgagcatccagggcagcctggcccgctgggctgttgcttgctgccgtctccttcagaagctcaaggtggacactggggtagttaccaatatcccccagcagccttgcccttgacatggtcccagatggcagaagcaggggagaagtgcattggctgaaggacagaaaccattagatagttcccatgtaatgcttattttcttagaagcatttcttcccagtcctcatttgagttctgagctgctttctaaacttcgagcagcttttcttgatgagacagttccagagccaagcacccaaatagtggctagcacagagaatgtccatagcaggtgtgtggctagctggcaggtggcaccatcctcaccccaaggggaaggagtcccctctgctggagccatccgtggcccgtgctgcctgagccggaggcagcattcacctgctgggtttctcccagtggcctagaggctttggtttggctctttatatttgactgctgtttcctcatcatagtgactatgatttaactcatgttttctcctaagaatgattttggggttctccagccaaagacttaaactttggttccagatgtccaagaaacgtttattatcattttaaatgttttgtctttttacagtatgattcctgccaaatgccttcaggaaggggctgagatctccagtcctgcagtggaaagattgatcagttcgctgttgcgaacatgtgatttggaagaggtaaggggcacagccgcaggcatcatgggggcgaggtggggagcagagctgcagagccctccagccccaccctttcagtttcagacctgtctggtgcggcactgcaagcatgcgtttggctgtgcgctggtgcacacctctggctggaaagtggtctattccggggacaccatgccctgcgaggctctggtccggatgggtgagtagaggaagaagcaagccaccctgaggttgctctggggtttgtgtagctggaggtgaatgcaggtgggcttgcagggaaacgtcagcagaggcaggagactcaggtccccaccctcagagtctctggttgtcatcctagtaggcagacccagggccaggggagctgagtgttgagaccaggaaacagcacgtgactgaggcctgtgtgccgctctcgcagagaactctgccctgatccttgtgctgcttctccagggaaagatgccaccctcctgatacatgaagccaccctggaagatggtttggaagaggaagcagtggaaaagaca

SEQ ID NO: 11823 - DNA, 758 bp, Homo sapiens
agaaaagaagtcagtacccagaaatcatcttccttggaacagggtctgccatcccgatgaagattcgaaatgtcagtgccacacttgtcaacataagccccgacacgtctctgctactggactgtggtgagggcacatttgggcagctgtgccgtcattacggagaccaggtggacagggtcctgggcaccctggctgctgtgtttgtgtcccacctgcacgcagatcaccacacgggcttgccaagtatcttgctgcagagagaacgcgccttggcatctttgggaaagccgcttcaccctttgctggtggttgcccccaaccagctcaaagcctggctccagcagtaccacaaccagtgccaggaggtcctgcaccacatcagtatgattcctgccaaatgccttcaggaaggggctgagatctccagtcctgcagtggaaagattgatcagttcgctgttgcgaacatgtgatttggaagaggtaaggggcacagccgcaggcatcatgggggcgaggtggggagcagagctgcagagccctccagccccaccctttcagtttcagacctgtctggtgcggcactgcaagcatgcgtttggctgtgcgctggtgcacacctctggctggaaagtggtctattccggggacaccatgccctgcgaggctctggtccggatggggaaagatgccaccctcctgatacatgaagccaccctggaagatggtttggaagaggaagcagtggaaaagaca

SEQ ID NO: 11824 - DNA, 6682 bp, Homo sapiens
catgaatgtgttttgtctctttcagaaggagggccccaccctcagtgtgcccatggttcagggtgaatgcctcctcaagtaccagctccgtcccaggagggagtggcagaggtctgtgccatcttgaactaatggaatcgtctcagtcgagttgggaaacatttctgtaaatagccacatagtaaatgttccaggaggctctccagaccatatggtctctgttgtaactattcaactccgctttgagcacaaaagaaacacggacaataagctaatgaatgggcttggctgtgtgccagcgtgaatttatttagaaaagcagcctactccaggctgggttgaggtgggcggattggggccagtagttctccttttccaaaattgccttgcatgggaatagcagtgatagagctcgtgtgtttcacagtatagaaaataggaaatgtgtgatgaacaaagtcacccataatcctgttgcccagagataatgattgataacattttgtgtttcttgatttgtgtatgtgggtttatattgtcagtcttttcctgtatcactaaacagtcttaagtaacaagatttttattggtattccaaatagggatgtttactcatttgggatgtttccaattttttgttgtttttaatgaatgaaacaataaatgtcttatatataaatctttgatgggaactctgttcccttcaagtcattcctaaatgtgggattactggcccagagtgtgagacttgttaaggtacttgataaatgtaagatgccatcttgaaagcctcttccagtacaatccaaccaggaaagtgaacagccttactgccccacatctttattttaattaattaatttatttattttatttatttatttatttttttgagacggagtttcactcttgttgcccaggctggagtgcaatggcgtgatctcagctcactgcaacctccgcctcccgggttcaagcatttctcctgccccagcctcccgaatagctggaattacaggcgcctgctaccacgcccggctaattttttgtaattttagcagagacgggtttcaccatgttggcaggctggtctcgaactcctgacctcaggtgatccacccacctcagcctcccaaagtgttgggattacaggcgtgagccgtgcccggcctgttttaatttttaaggatctgaaccttgattttaagtttcctgcccactccacagtatttgtattagaatagagcatgtgctggattatgactggatgctgtgtgctgttgaggttgggtagttggggccctttaagagactatactagcaagactcgggcccacaggcaacatcacggggttgaagaacctggtgtccctttgttggcatctgcgcaggctcttaacacacagcagcgatacacagccctagccgacattcagatttaccttgtgcttgtgaaaaatattgcacagggcctgccctagacctagtgaattagaatcttgagagttaggcttgggactcacaagctcccagatgattttaatgctcagcgaggttgaagagccgcctgtccaaggagttgccactccgtgtgatctggggcttgctaggaaagtgggatctcaggcctcactgcagagctgccgaactggcttctgcgttttgccaaggttcctgggtgtgaacatgagtttcagagtcactcctctagggcccctgcttctcagctcggaccattgacccctcagaggacatttggcaacatctggaaacgttcttggttgtcacagcctaggaggtgggtagtggtgctgctagtgggtagaggtcaggggtactgcaccaggacagcagcactggccacagaaaaaaactgtcttgccctgagcatcagtagttccccgttgactggccctgaggcagagcgatgcagcatccaaaaggcggtggagcagacctgccccagatcctagtcacttaaccttcagtgttgatctgaaggaacttcctgcagattgtccccctgaatttattctggacatccccaatggggtctgctgaggccatataccctgtccgtcacctgagatgcttctctctcttcctgcagggatgccattattacttgcaatcctgaggaattcatagttgaggcgctgcagcttcccaacttccagcagagcgtgcaggagtacaggaggagtgcgcaggacggcccagccccagcaggtgagtgggagcccacagagcagcctttctttcctgggctctgcccctgctgctgttttcctagcattaagtggagtgctggtggggcgcattctaacctggcttttcagtctaatccagggcttctctactcagctctacattagaattatagtcattggaggagggggctttggggagtttaagaatcccaattcctggctgggcgcggtggctcacacctgtaatcccagcacttcgggaggccgaggcaggtggatcgcgaggtcgggagatcgagaccatcctggctaacatgatgaaaccccgtctctactaaaaatacaaaaattagctgggcgtggcggcgggcgcctgtagtcccagctactcgggagactgaggcaggagaatggcgagaacccgggaggcggagcttgcagtgagccaaggtcgtgccactgcgctccagcctggacgacagagtgagactccgtctcaaaaaaaaaaatcccaattcctgtgccccatcccacccaatcagagcatttggcgatggcacccaggcattcttggcaaggcacgcactgagtgaaacgttttagtgaacacctgtggaaagagctctgagcagggacttggctggcagagatctagtcctggctttgcggatgcaaatccatggaggatcttggccacgtcactcaactgaggctgagggccgggcacaggctttggaaccatcgggtctccctggatttgaatcctgaccctgcctcttaccatcttcactggagacctgggcgtctgagcctgtttcccccttgggaagcagagcatttcctacctggtagggctgggaggatgcgaccgaagtgcatggtcttgcagtgagagctggatgcaaggcacacactgttctcttgaaataaatgacagttcccagcataaagaaatgtcattttttaaatgtaaaagaattacagcaattcttttgaagaaaggactggagaatttatttgttcttcttagccttttggtgacagatagcctgtgggtcccacactggtgcgaagtcctttgtttcagagcggttgccaggggcctgccagtccccctcctgggaagctggatagaactatgttgcttacccatctgtcttagtctgtgttttgttattataaaagaatatgtgagactgggtaatttatcaagaaaagaggtgtatttagttcacggttctgcgggctgagaattgaaggtcacggccctagcttccagtgaaggcttccatgctgcatcataacgtggcagaggagcgcaagtaggaagtggacgcttgtgaagacgggataacctgagctgcactctggctttataacaacccccctctcctgggaacaaatccattcccttgagaagtaatgcagtctcctgagagccagtacttactactgcagctccaagccactcaggagggtccgtccctgtagcccaaacgccttccactaggccccgcctcccaaaaccgccatactagggagcacgtttccacatgaggtctggggacaaaccaatgacactcaaaccattgcaccttctcatggctgcatgctggctcacttttgacccaaaggaatggattgtttcacatggattttttcacagagaaaagaagtcagtacccagaaatcatcttccttggaacagggtctgccatcccgatgaagattcgaaatgtcagtgccacacttgtcaacataaggtatgctgctttcccaggaagcatccttccatcaagggcacgtttactttttaaacaaaagtcctgctgtactcaccagtcgatttgaaatgcggtatcaagccctgtcacttgtcatgtcgactggagtgtccaggagaggagcgtggccttactgcattttatagcctcagtagcaaactttaccctgggaatcaccaaaattcatcccatgatgtcttttaataaacagctgattttactgtgggcagtacacctagctaagaaattagctcctttaatttttacattaatcctatgaagtggtgaataactacccattttgttgatgagtgacctgatattcagagaggtgacttgctatggttcctacagctggtaagtggggcatctgaagtttgagcggggacttggggtcttgattgctacatggtattgtcccccagccatttgttggtagtatgttaaaaagctttagggttttgcacatttgtgttcagaacctttattggattccccttgacatgttttttagttgattctcttgggtttgcctggggtcatcagcagagagattagtcaaatgcgttgtgacatgtacacgttatctctacagatagtatgtgaagaaaataagattgtgaattaccaggtttgttttaaattttgctctgccatcttacatgctagtggtggatgataaacaaccaaatagtgcattaaatatatacagcagtgacgagatgtgccctgacatcagaaatatacaatctggggtgtgtttctctgtggatgaggacatgcaataaagcagcttggagtgagccggcctctcccgggggctgagatcctgggggaagaagggctttttgagtttgacctgacaccctgcgagcagcttttgaaccagctgaagctaatgggaaggtgctattgccaccttgcctccgcctcccgactcctttttcccccagaaggtaatgtcttagcaccggggcttctctctgcaaaatgggtgcagccctctcagtgttcgtggctcctcccagagaatgaaggaggccagagcgggtcagcactctctctgccttggagcagagcttctgaaatggactgcacagcagaatagcccaagaagtttgtcagaatccagacttccagagccctgcctaaaaccaagtcagaaaccccgagtgacacctgggagtctgcgttaactggctccctgaatgaagcacctgcagcccgccctgcaccaggtgtctttgaggacatgagctgaggaaaccccgaccacttgcaaagggggaaaagtccgatggcagctggacctagaaagagtctcatatggcccagtgcctgtcctggtattttcaacagaggctgtggccacagtcaatctgcatggtcagattcattgttaggactaaatgctttaagcctcctataaactttttttttttttttttgatgcccagcctttgtgtaagtctacttgaaagggtttcagggttccatggatacttctttgctataaagaggatgacacatgtaaaatcacctttatggttaaattaattggcttttatattagctcctcaaagcaaagcaggagagacagaaatttctgcagttgcttcttggtcctgtccaaagcagacatcagcctctgaaccatcagcagtcttcctagtggcagtgactctcttcctcttctcttctgcagccccgacacgtctctgctactggactgtggtgagggcacatttgggcagctgtgccgtcattacggagaccaggtggacagggtcctgggcaccctggctgctgtgtttgtgtcccacctgcacgcagatcaccacacggtgagtgttgggctggaccacaaagctggagcctggaggaggcactgccacgttgagttggccctttggctgcgtcttttcctccgcttccaaacttgcccagagcttttgttactcatctctggctaggaaatggttttttgcaaaactcaacatagtccttctgcgccacaagaatgtcttctcttcctgttcagttcctttcctgcagcaggacaggtttgagtttacccagccttccttgagtcttgaatctcacacggcctgctcagcggaagctttgaccggatgcaggaggtgtggctatgagaccctcaccttggtctcctggggtgccgggccctgggccgttgccctcttcccagcacgggtcgtgtcgctttctgcctgtgacatttcagggccatggcgcagggggctcggcctgtgccacccccactgcggctgtgttagaggctggtgggtgacgtcgggctggcaactcctgcaagagagagggctgcagaccctaacccggaggggatggccctggggcctggctgacgcatgtctcctgtttccttgccagggcttgccaagtatcttgctgcagagagaacgcgccttggtaagtgtggcacttgatgggcgttctgagtttcagcggtttacacatcatccgccatgcctcttggcactccagtttttattgagatgttctgtcgtcgagtcggcacttgcattttttgttccaggcatctttgggaaagccgcttcaccctttgctggtggttgcccccaaccagctcaaagcctggctccagcagtaccacaaccagtgccaggaggtcctgcaccacatcag

SEQ ID NO: 11825 - DNA, 615 bp, Homo sapiens
catgaatgtgttttgtctctttcagaaggagggccccaccctcagtgtgcccatggttcagggtgaatgcctcctcaagtaccagctccgtcccaggagggagtggcagagggatgccattattacttgcaatcctgaggaattcatagttgaggcgctgcagcttcccaacttccagcagagcgtgcaggagtacaggaggagtgcgcaggacggcccagccccagcagagaaaagaagtcagtacccagaaatcatcttccttggaacagggtctgccatcccgatgaagattcgaaatgtcagtgccacacttgtcaacataagccccgacacgtctctgctactggactgtggtgagggcacatttgggcagctgtgccgtcattacggagaccaggtggacagggtcctgggcaccctggctgctgtgtttgtgtcccacctgcacgcagatcaccacacgggcttgccaagtatcttgctgcagagagaacgcgccttggcatctttgggaaagccgcttcaccctttgctggtggttgcccccaaccagctcaaagcctggctccagcagtaccacaaccagtgccaggaggtcctgcaccacatcag

SEQ ID NO: 11826 - DNA, 6243 bp, Homo sapiens
ttttggtggagacgggcgcatgtgggcgctttgctcgctgctgcggtccgcggccggacgcaccatgtcgcagggacgcaccatatcgcaggcacccgcccgccgcgagcggccgcgcaaggacccgctgcggcacctgcgcacgcgagagaagcgcggaccgtcggggtgctccggcggcccaaacaccgtgtacctgcaggtggtggcagcgggtagccgggactcgggcgccgcgctctacgtcttctccgagttcaaccggtcagtcaacgagccacgccccgtcccgctgggccctcagtgcggcgcagcctctgagcatcggggcacctcccagggcttcggcttccctgcttcacacatgtggttcactgttgcgggggttcgtggagttatggtgggtgggaaatccgagattctttgcatccatgtgatttctgcggatctgtgaagaacttcaggcctgggtctgagcgtccttttcccaacccttgggccccggcctggctgtcagcactttcggagctccaccctcttccgtgcaccccaaggccagtgtgtcgttgttagcgtgtggggtggacagatctggtgtgtagccggtggtggagaaaggactcattttgtcctagcacccacacacacaggcccccactcctctccacctctgctaaggagggctcaaaacccaccagcataaatgtggctcggtagtccaacgtggacttttaatttttttttcttttttttttttccagagtctacaataaaacatctaattggtgtcagagagtttacagaataaaaccttctgaatgtcttgtgtaatgtttgtcttgtaggtatctcttcaactgtggagaaggcgttcagagactcatgcaggagcacaagtgagtcagtctcttgctttcggagggggagttgattacggggcttgaaagccgaaatgagaggccagttgttttttatagcaaaagtggtccttgttctgttcatgttatcctgtttaaatgttttttcattcttaggttaaaggttgctcgcctggacaacatattcctgacacgaatgcactggtctaatgttgggggcttaagtggtgagtatattctttgcagtgtcagaggctggtgggaagtctctgggattttaaccggctttaccatttttccaagtctggggtgggcagctacttttttttttttttttttttttgtcagtggcgtgatcttggctcactgcaacctttgccttctgggctcaggtgatcccctcacctcagcctcccaaatagctgggaccacacgtgtgccccatcacacctggctaattttttttgtatgttttgtagcgacggggttttgctatgttgcccaggctggtctcaaacttctgcgatcctcctgtctcggcctcccagagtgctgggattacaggcatgagccaccgcacctggcctggaattctttttataccagcccagtcagcagcagcacagagcattaaaagctgtgactcaggagaacagattttaatatggataccacctcttaagtgttaccatccacttagtttcttgcgttgcggggacagagatttgtggcagtaaactggagagtctagcagtggtgattacagttaatatgtttaccgcagacgccattggcacattggcagccacacacatacccactgtccagattaccctgtcatttatgtctatcaaccggaaggtcaggattgtgttgcagccaaattgtgtgggcttggtggcatggaccggaaggagtgaagtgttagaccagtctcccttctcagggctgagactagggtgaggcacttagggtgccagcccttcacttgcatgattccttacattttgcacactgggtgccttgctgcttcaccctagtgacagctcagcccattctagaggcatttaaagaatatttggtgtctgttacacctctagctggcatcacttctgctctgtacatcttccctggttgtacttccaaagctggaaggtggagatgtagataaatagttggattagtacggggtgctcctcctgttagtgacgacaggtcaaattgatgagagatctgattttatgcatcctttttaggaatgattcttactttaaaggaaaccgggcttccaaagtgtgtactttctggacctccacaactggtgagtctttcctgacacatctttcaaaagcaatctttccttttgtaatatcagtaacaagaattttcctttttgcaaatcagtcttctgccctccagagatacctggtcgttgaaacgcttcccctttcaagttaaaaagacttgagttctgattaactatgtgaccttgatcaagttactttacctttctgagctttagtttattcatctataagatgactatcacgtttcatagagttgttaaagattaaatgacgtagcagcacatataaagcactaaatcactttattagatatatgtttggcaccaagtaggcacacaagaaagggcagcttttgtttttattcaataaatttctgacatcttcttacctttcagtccagcttattacactcttgagaaggcgtgtgtgtgttgttgaatataacagttcattttccagtccttaagaagaaagtcaccaagacctgttaagtctttccccaaaataacgtttgaaatccatccatttgtctcttattgaggccttccttatttctgttttctatgcctgtaaactacaatagcctcccatattcattctcgccttcctgtaatccatctgccacacagcagccagagaggtcacttcaagacagaaaagtagtgtgtcacttgccaccctaaagcccttcatgggctccccattgcaatacaatcaaaacaccttgatatggcctacaagtcctgtaggccccggccgctacccacacttccatctgtacccatcgctgaactgcagctgcatgggctgactcttatgtccctctaactccctggccacttcaggactttcgcccttccgcgggttccctctgcctcttctaattgctgcctatattgttactgaaccttcagggctcagctagagggtcatttactccagaactgcctcttcttctctagacaagttggatcccagccttctgtatttttcattttccttgcagagcacttagcataatgccactaagctgtttctgttatcgtgtttccttttgtctcctccactggcctgattagagcaaggcctccatctctttttcctgctatatccttggcatctgatataatggatactcagtaaatatttgtaataaatgatgttcaaaatatttactaagctttgttttatgttgatacctattggtaaccttttaaatacttgaatagttgctgtgttctacatttgttcaaccataactgctcatttctttgtttttcattaggaaaaatacctcgaagcaatcaaaatattttctggtccattgaaaggaatagaactgggtacgtctttgtctgtgactcatcctctgctatttctaacttatatatgccctgacctctcaaattagaatccattaaaaacatcaacatcaaacctcaaaatcaaatgcttcatcaccacgagatttttttttttttttttttttttggatagagtcttgctttcttaccaggctggagtgcagtggcatgatctcggctcactgcaacctccacctcctgggttcaagccattctcccacctcagcctcctgagtagctaggactacaggcgcatgccatcacgctcagctaattttttgtatttttagtagagacggggtttcaccatgttggccaggatagtctcgatctcttgaccttgtgatctgcccgcctcagcctcccaaaatgagctaccatgtggctggagatgggatttctaaatagtgacattttctgtgttcccacctcatgctgtaaaaataggggccaggtcggcaggagtgattgaacagctgatgcctgcctgtgtacatgctgtgtggcattctccatccagacggcagggctcctgcctcagttccagaggtgcttctcgtcgttgagttgctttgagttgggggcgggggtgacaagggttccctagaggttttgtggccaactttgtacattgaaacgcagctccagctgcgcaggggggcttacagcctcttgatgggaagaggcctcactgaggatgctagtagggctcttgtcctggcactggtgtgtatctgtggcttgttaatactcctcttttatagaaacactaatactttgtttcaaaatatacatcagctcttctggtttgcgatgataggttccctggcttcactattctgtttgttaacttgggtctctgaaagttgagtactagtttcttgtttttcaatttttaacggatagtcaccaaagattataatgtcttttcatctggctgtagtaaatataaatggctgaccaaaatacacttttatttatttcctaaaaatggtaatctccttagaaagtctggttttcgtgtcagattcccaccataattctgaggcaattcagttgctcgtggttggtgatcctgaagttactcttcccacacatcttcactaatgcaatcactttgctgttgtgtggttttcttgtagctgtgcggccccactctgccccagaatacgaggatgaaaccatgacagtttaccagatccccatacacagtgagtatgaaagccaggtttcccaggaggagggtgtacgtcctgagtaaagaaaacatggatgaaaatagaaactgaacacttgctgtgggcaccctgttttgtgttctgagcatgattagaaaatttagttgaggaatgaagatatggctcctgccctggcttataaacttacggatgtctgacttatgcctaatgatagtgattatgctttggaatattagataatcaagcactgttggtaaatagattgcattcaagtttgcacattcattgcttggaggttttttcccacaggcgtaataccctcttttgatcagacgatcatgaagaggtttgcacagatagatttttttaaataaataatgattacagcaacctaaaagaagtgttgttgggggttagaagctcctgcaaattccgaagtatcagggccagatgatgtggtcttagcttaggaaaagagttagtcttgtccttgaacttggctaaagacattcatgtctggttttacttacatgtgaagagagtaccaagcagtaggggtatttccttgttagtactaactaatgtgatgcttactaagtagtgctgatgggtgacagaccagagcacccagcaaaggccagagaagtccagaacctggcgaggagatgaggcttacactgactgaaggcagaaggcagcagggaggagaggaatgtgccggagcaatggcacaagtgctcctaggccagtgctgtgatgagctgatcagcactcccattgcctggcttgctcctcctgctcagatgccttctctcacctgacccctgctgtagccacccccagcctgagttgcatccacctgtttgttgtccatttccagcaccctgttcttcgctccatggcatgtgacagttaactttcatatgtgatttgcgtgatcgatgttaacatgctcagttttgccgatcactgttttttcagtgtccagcggccctcagtgagtgaacttacgttcattctcgttgcagctgtgctttagcttcttagagcagcgaatttttttcccttgatcttgagccttaactaaatgtaaaatgaggctccttcttgagataggtaccctttgggtctatgtgttttagcgggagtgatgataataaataagcatgtctacaacccacatgctgtttagataacacgttgttgagttggtactgtggccgaggctgtgagctaagcagaaacataaacattaataggacataggtgcagcccagaaaccaggtaggaagttaactaactagttatttcctactgtatagtaaaaggtgtgctgatttaattggcgttctggcattcccatgtatgaacgtctgggccttggctgtcagctcaccttgtgcagtgtgtaatttggtggtatctgtactgaccaggtgaacagaggaggggaaagcaccaaccatggcagagtccagaaaggcctctcagcagg

SEQ ID NO: 11827 - DNA, 579 bp, Homo sapiens
ttttggtggagacgggcgcatgtgggcgctttgctcgctgctgcggtccgcggccggacgcaccatgtcgcagggacgcaccatatcgcaggcacccgcccgccgcgagcggccgcgcaaggacccgctgcggcacctgcgcacgcgagagaagcgcggaccgtcggggtgctccggcggcccaaacaccgtgtacctgcaggtggtggcagcgggtagccgggactcgggcgccgcgctctacgtcttctccgagttcaaccggtatctcttcaactgtggagaaggcgttcagagactcatgcaggagcacaagttaaaggttgctcgcctggacaacatattcctgacacgaatgcactggtctaatgttgggggcttaagtggaatgattcttactttaaaggaaaccgggcttccaaagtgtgtactttctggacctccacaactgctgtgcggccccactctgccccagaatacgaggatgaaaccatgacagtttaccagatccccatacacagtgaacagaggaggggaaagcaccaaccatggcagagtccagaaaggcctctcagcagg

SEQ ID NO: 11828 - DNA, 3562 bp, Homo sapiens
gccagatacaggaatcccacgtccattggaaatggcccagcaccggggtctgccgtgagcagcctgctgtgagagcatggcctgggcgtggaggctgtcagctcactgcagtgctgcagagggccgcacgatacccctccctggctgcgtggtccctgtcttggtgtgtcctgagtctgcatcactttgtaaagccccactcttctgcccaggtaccaaggaaaggcagatgcccccgtggccttggtggttcacatggccccagcatctgtgcttgtggacagcaggtaccagcagtggatggagaggtatggagcccagcccagcggcacttggggtaactcttctgggcagtggtggattcccctttcctcccctcgtgctctttccagcgctacctacccttctgcacctgcctaaactttctgtgggattcctgccttcccagaattctaggcttcccagatctgtgctacactcgtgaagaaaatgcaccgctaggtggcgcagtgtccacacgattccatttattttacaccctccacactcttcagggtgtctgaacaaatactgccgtttggttgaggattccataagtgaattccaaagaagagattgcagctataaaatgatagcttccatttactgaatgcccactttgtgggaggcagtgtgtgaaatacccttcatttcacttcatttcctctagggtcgtcgccagcagccctgggaggtagatgtttagtcactggaaggcatctttttcctcggggcatcgctggccagggccaggtggaggagtatgagttgagctcgggtgcggggtgaccttgggctgctttttggcccctgcccgtatctccccacatggcccgtttacctgcccctcactccatggcctgctctcctgctgtctctttcattcctcagggtttgggtcccctatttgtatgccctggacatcttctttttcttgtttttcctctcactcttcccagcacacctgaaaggcagctgagctagggaacaccgggctttgagacagcaggagtgggaccatgtttggccatgtagtaacactgcttggggcaagtcactgaactgtttgaacacctcatcctcattaccactcctgagctcagcaccactcctcagggggagctgcctcctaacagacgctgcaaatgccgggtctgtttcttcacaggtttgggcctgacacccagcacttggtcctgaatgagaactgtgcctcagttcacaaccttcgcagccacaagattcaaacccagctcaacctcatccacccggacatcttccccctgctcaccagtttccgctgtaaggtagtgtctcagaccggccccttgtcggcccagctctcgtcccctctctttctctccatgaatgtgttttgtctctttcagaaggagggccccaccctcagtgtgcccatggttcagggtgaatgcctcctcaagtaccagctccgtcccaggagggagtggcagaggtctgtgccatcttgaactaatggaatcgtctcagtcgagttgggaaacatttctgtaaatagccacatagtaaatgttccaggaggctctccagaccatatggtctctgttgtaactattcaactccgctttgagcacaaaagaaacacggacaataagctaatgaatgggcttggctgtgtgccagcgtgaatttatttagaaaagcagcctactccaggctgggttgaggtgggcggattggggccagtagttctccttttccaaaattgccttgcatgggaatagcagtgatagagctcgtgtgtttcacagtatagaaaataggaaatgtgtgatgaacaaagtcacccataatcctgttgcccagagataatgattgataacattttgtgtttcttgatttgtgtatgtgggtttatattgtcagtcttttcctgtatcactaaacagtcttaagtaacaagatttttattggtattccaaatagggatgtttactcatttgggatgtttccaattttttgttgtttttaatgaatgaaacaataaatgtcttatatataaatctttgatgggaactctgttcccttcaagtcattcctaaatgtgggattactggcccagagtgtgagacttgttaaggtacttgataaatgtaagatgccatcttgaaagcctcttccagtacaatccaaccaggaaagtgaacagccttactgccccacatctttattttaattaattaatttatttattttatttatttatttatttttttgagacggagtttcactcttgttgcccaggctggagtgcaatggcgtgatctcagctcactgcaacctccgcctcccgggttcaagcatttctcctgccccagcctcccgaatagctggaattacaggcgcctgctaccacgcccggctaattttttgtaattttagcagagacgggtttcaccatgttggcaggctggtctcgaactcctgacctcaggtgatccacccacctcagcctcccaaagtgttgggattacaggcgtgagccgtgcccggcctgttttaatttttaaggatctgaaccttgattttaagtttcctgcccactccacagtatttgtattagaatagagcatgtgctggattatgactggatgctgtgtgctgttgaggttgggtagttggggccctttaagagactatactagcaagactcgggcccacaggcaacatcacggggttgaagaacctggtgtccctttgttggcatctgcgcaggctcttaacacacagcagcgatacacagccctagccgacattcagatttaccttgtgcttgtgaaaaatattgcacagggcctgccctagacctagtgaattagaatcttgagagttaggcttgggactcacaagctcccagatgattttaatgctcagcgaggttgaagagccgcctgtccaaggagttgccactccgtgtgatctggggcttgctaggaaagtgggatctcaggcctcactgcagagctgccgaactggcttctgcgttttgccaaggttcctgggtgtgaacatgagtttcagagtcactcctctagggcccctgcttctcagctcggaccattgacccctcagaggacatttggcaacatctggaaacgttcttggttgtcacagcctaggaggtgggtagtggtgctgctagtgggtagaggtcaggggtactgcaccaggacagcagcactggccacagaaaaaaactgtcttgccctgagcatcagtagttccccgttgactggccctgaggcagagcgatgcagcatccaaaaggcggtggagcagacctgccccagatcctagtcacttaaccttcagtgttgatctgaaggaacttcctgcagattgtccccctgaatttattctggacatccccaatggggtctgctgaggccatataccctgtccgtcacctgagatgcttctctctcttcctgcagggatgccattattacttgcaatcctgaggaattcatagttgaggcgctgc

SEQ ID NO: 11829 - DNA, 664 bp, Homo sapiens
gccagatacaggaatcccacgtccattggaaatggcccagcaccggggtctgccgtgagcagcctgctgtgagagcatggcctgggcgtggaggctgtcagctcactgcagtgctgcagagggccgcacgatacccctccctggctgcgtggtccctgtcttggtgtgtcctgagtctgcatcactttgtaaagccccactcttctgcccaggtaccaaggaaaggcagatgcccccgtggccttggtggttcacatggccccagcatctgtgcttgtggacagcaggtaccagcagtggatggagaggtttgggcctgacacccagcacttggtcctgaatgagaactgtgcctcagttcacaaccttcgcagccacaagattcaaacccagctcaacctcatccacccggacatcttccccctgctcaccagtttccgctgtaaggtagtgtctcagaccggccccttgtcggcccagctctcgtcccctctctttctctccatgaatgtgttttgtctctttcagaaggagggccccaccctcagtgtgcccatggttcagggtgaatgcctcctcaagtaccagctccgtcccaggagggagtggcagagggatgccattattacttgcaatcctgaggaattcatagttgaggcgctgc

SEQ ID NO: 11830 - DNA, 4277 bp, Homo sapiens
tttggccatgtagtaacactgcttggggcaagtcactgaactgtttgaacacctcatcctcattaccactcctgagctcagcaccactcctcagggggagctgcctcctaacagacgctgcaaatgccgggtctgtttcttcacaggtttgggcctgacacccagcacttggtcctgaatgagaactgtgcctcagttcacaaccttcgcagccacaagattcaaacccagctcaacctcatccacccggacatcttccccctgctcaccagtttccgctgtaaggtagtgtctcagaccggccccttgtcggcccagctctcgtcccctctctttctctccatgaatgtgttttgtctctttcagaaggagggccccaccctcagtgtgcccatggttcagggtgaatgcctcctcaagtaccagctccgtcccaggagggagtggcagaggtctgtgccatcttgaactaatggaatcgtctcagtcgagttgggaaacatttctgtaaatagccacatagtaaatgttccaggaggctctccagaccatatggtctctgttgtaactattcaactccgctttgagcacaaaagaaacacggacaataagctaatgaatgggcttggctgtgtgccagcgtgaatttatttagaaaagcagcctactccaggctgggttgaggtgggcggattggggccagtagttctccttttccaaaattgccttgcatgggaatagcagtgatagagctcgtgtgtttcacagtatagaaaataggaaatgtgtgatgaacaaagtcacccataatcctgttgcccagagataatgattgataacattttgtgtttcttgatttgtgtatgtgggtttatattgtcagtcttttcctgtatcactaaacagtcttaagtaacaagatttttattggtattccaaatagggatgtttactcatttgggatgtttccaattttttgttgtttttaatgaatgaaacaataaatgtcttatatataaatctttgatgggaactctgttcccttcaagtcattcctaaatgtgggattactggcccagagtgtgagacttgttaaggtacttgataaatgtaagatgccatcttgaaagcctcttccagtacaatccaaccaggaaagtgaacagccttactgccccacatctttattttaattaattaatttatttattttatttatttatttatttttttgagacggagtttcactcttgttgcccaggctggagtgcaatggcgtgatctcagctcactgcaacctccgcctcccgggttcaagcatttctcctgccccagcctcccgaatagctggaattacaggcgcctgctaccacgcccggctaattttttgtaattttagcagagacgggtttcaccatgttggcaggctggtctcgaactcctgacctcaggtgatccacccacctcagcctcccaaagtgttgggattacaggcgtgagccgtgcccggcctgttttaatttttaaggatctgaaccttgattttaagtttcctgcccactccacagtatttgtattagaatagagcatgtgctggattatgactggatgctgtgtgctgttgaggttgggtagttggggccctttaagagactatactagcaagactcgggcccacaggcaacatcacggggttgaagaacctggtgtccctttgttggcatctgcgcaggctcttaacacacagcagcgatacacagccctagccgacattcagatttaccttgtgcttgtgaaaaatattgcacagggcctgccctagacctagtgaattagaatcttgagagttaggcttgggactcacaagctcccagatgattttaatgctcagcgaggttgaagagccgcctgtccaaggagttgccactccgtgtgatctggggcttgctaggaaagtgggatctcaggcctcactgcagagctgccgaactggcttctgcgttttgccaaggttcctgggtgtgaacatgagtttcagagtcactcctctagggcccctgcttctcagctcggaccattgacccctcagaggacatttggcaacatctggaaacgttcttggttgtcacagcctaggaggtgggtagtggtgctgctagtgggtagaggtcaggggtactgcaccaggacagcagcactggccacagaaaaaaactgtcttgccctgagcatcagtagttccccgttgactggccctgaggcagagcgatgcagcatccaaaaggcggtggagcagacctgccccagatcctagtcacttaaccttcagtgttgatctgaaggaacttcctgcagattgtccccctgaatttattctggacatccccaatggggtctgctgaggccatataccctgtccgtcacctgagatgcttctctctcttcctgcagggatgccattattacttgcaatcctgaggaattcatagttgaggcgctgcagcttcccaacttccagcagagcgtgcaggagtacaggaggagtgcgcaggacggcccagccccagcaggtgagtgggagcccacagagcagcctttctttcctgggctctgcccctgctgctgttttcctagcattaagtggagtgctggtggggcgcattctaacctggcttttcagtctaatccagggcttctctactcagctctacattagaattatagtcattggaggagggggctttggggagtttaagaatcccaattcctggctgggcgcggtggctcacacctgtaatcccagcacttcgggaggccgaggcaggtggatcgcgaggtcgggagatcgagaccatcctggctaacatgatgaaaccccgtctctactaaaaatacaaaaattagctgggcgtggcggcgggcgcctgtagtcccagctactcgggagactgaggcaggagaatggcgagaacccgggaggcggagcttgcagtgagccaaggtcgtgccactgcgctccagcctggacgacagagtgagactccgtctcaaaaaaaaaaatcccaattcctgtgccccatcccacccaatcagagcatttggcgatggcacccaggcattcttggcaaggcacgcactgagtgaaacgttttagtgaacacctgtggaaagagctctgagcagggacttggctggcagagatctagtcctggctttgcggatgcaaatccatggaggatcttggccacgtcactcaactgaggctgagggccgggcacaggctttggaaccatcgggtctccctggatttgaatcctgaccctgcctcttaccatcttcactggagacctgggcgtctgagcctgtttcccccttgggaagcagagcatttcctacctggtagggctgggaggatgcgaccgaagtgcatggtcttgcagtgagagctggatgcaaggcacacactgttctcttgaaataaatgacagttcccagcataaagaaatgtcattttttaaatgtaaaagaattacagcaattcttttgaagaaaggactggagaatttatttgttcttcttagccttttggtgacagatagcctgtgggtcccacactggtgcgaagtcctttgtttcagagcggttgccaggggcctgccagtccccctcctgggaagctggatagaactatgttgcttacccatctgtcttagtctgtgttttgttattataaaagaatatgtgagactgggtaatttatcaagaaaagaggtgtatttagttcacggttctgcgggctgagaattgaaggtcacggccctagcttccagtgaaggcttccatgctgcatcataacgtggcagaggagcgcaagtaggaagtggacgcttgtgaagacgggataacctgagctgcactctggctttataacaacccccctctcctgggaacaaatccattcccttgagaagtaatgcagtctcctgagagccagtacttactactgcagctccaagccactcaggagggtccgtccctgtagcccaaacgccttccactaggccccgcctcccaaaaccgccatactagggagcacgtttccacatgaggtctggggacaaaccaatgacactcaaaccattgcaccttctcatggctgcatgctggctcacttttgacccaaaggaatggattgtttcacatggattttttcacagagaaaagaagtcagtacccagaaatcatcttccttggaacagggtctgccatcccgatga

SEQ ID NO: 11831 - DNA, 550 bp, Homo sapiens
tttggccatgtagtaacactgcttggggcaagtcactgaactgtttgaacacctcatcctcattaccactcctgagctcagcaccactcctcagggggagctgcctcctaacagacgctgcaaatgccgggtctgtttcttcacaggtttgggcctgacacccagcacttggtcctgaatgagaactgtgcctcagttcacaaccttcgcagccacaagattcaaacccagctcaacctcatccacccggacatcttccccctgctcaccagtttccgctgtaagaaggagggccccaccctcagtgtgcccatggttcagggtgaatgcctcctcaagtaccagctccgtcccaggagggagtggcagagggatgccattattacttgcaatcctgaggaattcatagttgaggcgctgcagcttcccaacttccagcagagcgtgcaggagtacaggaggagtgcgcaggacggcccagccccagcagagaaaagaagtcagtacccagaaatcatcttccttggaacagggtctgccatcccgatga

SEQ ID NO: 11832 - DNA, 11893 bp, Homo sapiens
agtgcggcgcagcctctgagcatcggggcacctcccagggcttcggcttccctgcttcacacatgtggttcactgttgcgggggttcgtggagttatggtgggtgggaaatccgagattctttgcatccatgtgatttctgcggatctgtgaagaacttcaggcctgggtctgagcgtccttttcccaacccttgggccccggcctggctgtcagcactttcggagctccaccctcttccgtgcaccccaaggccagtgtgtcgttgttagcgtgtggggtggacagatctggtgtgtagccggtggtggagaaaggactcattttgtcctagcacccacacacacaggcccccactcctctccacctctgctaaggagggctcaaaacccaccagcataaatgtggctcggtagtccaacgtggacttttaatttttttttcttttttttttttccagagtctacaataaaacatctaattggtgtcagagagtttacagaataaaaccttctgaatgtcttgtgtaatgtttgtcttgtaggtatctcttcaactgtggagaaggcgttcagagactcatgcaggagcacaagtgagtcagtctcttgctttcggagggggagttgattacggggcttgaaagccgaaatgagaggccagttgttttttatagcaaaagtggtccttgttctgttcatgttatcctgtttaaatgttttttcattcttaggttaaaggttgctcgcctggacaacatattcctgacacgaatgcactggtctaatgttgggggcttaagtggtgagtatattctttgcagtgtcagaggctggtgggaagtctctgggattttaaccggctttaccatttttccaagtctggggtgggcagctacttttttttttttttttttttttgtcagtggcgtgatcttggctcactgcaacctttgccttctgggctcaggtgatcccctcacctcagcctcccaaatagctgggaccacacgtgtgccccatcacacctggctaattttttttgtatgttttgtagcgacggggttttgctatgttgcccaggctggtctcaaacttctgcgatcctcctgtctcggcctcccagagtgctgggattacaggcatgagccaccgcacctggcctggaattctttttataccagcccagtcagcagcagcacagagcattaaaagctgtgactcaggagaacagattttaatatggataccacctcttaagtgttaccatccacttagtttcttgcgttgcggggacagagatttgtggcagtaaactggagagtctagcagtggtgattacagttaatatgtttaccgcagacgccattggcacattggcagccacacacatacccactgtccagattaccctgtcatttatgtctatcaaccggaaggtcaggattgtgttgcagccaaattgtgtgggcttggtggcatggaccggaaggagtgaagtgttagaccagtctcccttctcagggctgagactagggtgaggcacttagggtgccagcccttcacttgcatgattccttacattttgcacactgggtgccttgctgcttcaccctagtgacagctcagcccattctagaggcatttaaagaatatttggtgtctgttacacctctagctggcatcacttctgctctgtacatcttccctggttgtacttccaaagctggaaggtggagatgtagataaatagttggattagtacggggtgctcctcctgttagtgacgacaggtcaaattgatgagagatctgattttatgcatcctttttaggaatgattcttactttaaaggaaaccgggcttccaaagtgtgtactttctggacctccacaactggtgagtctttcctgacacatctttcaaaagcaatctttccttttgtaatatcagtaacaagaattttcctttttgcaaatcagtcttctgccctccagagatacctggtcgttgaaacgcttcccctttcaagttaaaaagacttgagttctgattaactatgtgaccttgatcaagttactttacctttctgagctttagtttattcatctataagatgactatcacgtttcatagagttgttaaagattaaatgacgtagcagcacatataaagcactaaatcactttattagatatatgtttggcaccaagtaggcacacaagaaagggcagcttttgtttttattcaataaatttctgacatcttcttacctttcagtccagcttattacactcttgagaaggcgtgtgtgtgttgttgaatataacagttcattttccagtccttaagaagaaagtcaccaagacctgttaagtctttccccaaaataacgtttgaaatccatccatttgtctcttattgaggccttccttatttctgttttctatgcctgtaaactacaatagcctcccatattcattctcgccttcctgtaatccatctgccacacagcagccagagaggtcacttcaagacagaaaagtagtgtgtcacttgccaccctaaagcccttcatgggctccccattgcaatacaatcaaaacaccttgatatggcctacaagtcctgtaggccccggccgctacccacacttccatctgtacccatcgctgaactgcagctgcatgggctgactcttatgtccctctaactccctggccacttcaggactttcgcccttccgcgggttccctctgcctcttctaattgctgcctatattgttactgaaccttcagggctcagctagagggtcatttactccagaactgcctcttcttctctagacaagttggatcccagccttctgtatttttcattttccttgcagagcacttagcataatgccactaagctgtttctgttatcgtgtttccttttgtctcctccactggcctgattagagcaaggcctccatctctttttcctgctatatccttggcatctgatataatggatactcagtaaatatttgtaataaatgatgttcaaaatatttactaagctttgttttatgttgatacctattggtaaccttttaaatacttgaatagttgctgtgttctacatttgttcaaccataactgctcatttctttgtttttcattaggaaaaatacctcgaagcaatcaaaatattttctggtccattgaaaggaatagaactgggtacgtctttgtctgtgactcatcctctgctatttctaacttatatatgccctgacctctcaaattagaatccattaaaaacatcaacatcaaacctcaaaatcaaatgcttcatcaccacgagatttttttttttttttttttttttggatagagtcttgctttcttaccaggctggagtgcagtggcatgatctcggctcactgcaacctccacctcctgggttcaagccattctcccacctcagcctcctgagtagctaggactacaggcgcatgccatcacgctcagctaattttttgtatttttagtagagacggggtttcaccatgttggccaggatagtctcgatctcttgaccttgtgatctgcccgcctcagcctcccaaaatgagctaccatgtggctggagatgggatttctaaatagtgacattttctgtgttcccacctcatgctgtaaaaataggggccaggtcggcaggagtgattgaacagctgatgcctgcctgtgtacatgctgtgtggcattctccatccagacggcagggctcctgcctcagttccagaggtgcttctcgtcgttgagttgctttgagttgggggcgggggtgacaagggttccctagaggttttgtggccaactttgtacattgaaacgcagctccagctgcgcaggggggcttacagcctcttgatgggaagaggcctcactgaggatgctagtagggctcttgtcctggcactggtgtgtatctgtggcttgttaatactcctcttttatagaaacactaatactttgtttcaaaatatacatcagctcttctggtttgcgatgataggttccctggcttcactattctgtttgttaacttgggtctctgaaagttgagtactagtttcttgtttttcaatttttaacggatagtcaccaaagattataatgtcttttcatctggctgtagtaaatataaatggctgaccaaaatacacttttatttatttcctaaaaatggtaatctccttagaaagtctggttttcgtgtcagattcccaccataattctgaggcaattcagttgctcgtggttggtgatcctgaagttactcttcccacacatcttcactaatgcaatcactttgctgttgtgtggttttcttgtagctgtgcggccccactctgccccagaatacgaggatgaaaccatgacagtttaccagatccccatacacagtgagtatgaaagccaggtttcccaggaggagggtgtacgtcctgagtaaagaaaacatggatgaaaatagaaactgaacacttgctgtgggcaccctgttttgtgttctgagcatgattagaaaatttagttgaggaatgaagatatggctcctgccctggcttataaacttacggatgtctgacttatgcctaatgatagtgattatgctttggaatattagataatcaagcactgttggtaaatagattgcattcaagtttgcacattcattgcttggaggttttttcccacaggcgtaataccctcttttgatcagacgatcatgaagaggtttgcacagatagatttttttaaataaataatgattacagcaacctaaaagaagtgttgttgggggttagaagctcctgcaaattccgaagtatcagggccagatgatgtggtcttagcttaggaaaagagttagtcttgtccttgaacttggctaaagacattcatgtctggttttacttacatgtgaagagagtaccaagcagtaggggtatttccttgttagtactaactaatgtgatgcttactaagtagtgctgatgggtgacagaccagagcacccagcaaaggccagagaagtccagaacctggcgaggagatgaggcttacactgactgaaggcagaaggcagcagggaggagaggaatgtgccggagcaatggcacaagtgctcctaggccagtgctgtgatgagctgatcagcactcccattgcctggcttgctcctcctgctcagatgccttctctcacctgacccctgctgtagccacccccagcctgagttgcatccacctgtttgttgtccatttccagcaccctgttcttcgctccatggcatgtgacagttaactttcatatgtgatttgcgtgatcgatgttaacatgctcagttttgccgatcactgttttttcagtgtccagcggccctcagtgagtgaacttacgttcattctcgttgcagctgtgctttagcttcttagagcagcgaatttttttcccttgatcttgagccttaactaaatgtaaaatgaggctccttcttgagataggtaccctttgggtctatgtgttttagcgggagtgatgataataaataagcatgtctacaacccacatgctgtttagataacacgttgttgagttggtactgtggccgaggctgtgagctaagcagaaacataaacattaataggacataggtgcagcccagaaaccaggtaggaagttaactaactagttatttcctactgtatagtaaaaggtgtgctgatttaattggcgttctggcattcccatgtatgaacgtctgggccttggctgtcagctcaccttgtgcagtgtgtaatttggtggtatctgtactgaccaggtgaacagaggaggggaaagcaccaaccatggcagagtccagaaaggcctctcagcaggctcagtccagagcgatcttcagactccgagtcgaatgaaaatgagccacaccttccacatggtaatagtataaacaaaacagagcagcagaaaggcttgcgttttcttaattctctgccttgtaatgcttgtagagagtcattattgtaagaaagccaggtgtgtaaacagatccttcttcctgggcttactataacttggcccgttgggggaatgagaagggttgttgtaaaggtggcagcctgcaactttaataatgaccagtccacagttttggccacccagggtctgggtaggcccaaaactgtgttctgttttcccagaggagaacagggcctgacaaacggattcattttgtatttttcattaatgtaacatttatgcaaattttccattaatgtggaaactataactgctaagccaatgagacagtcaaatcagtgagaggctctgcacgtcttccagaatgacagcccactgggaaacggagttaaaagtccaagatgagatgtagctcaggagtcaggccgcttcgggagtttgttgtccttaacagaaggtcagcgttggcaaagctcggcagctcctctttctgtcctgaggtcttgtctagtgactgagaacaggctgacccctatgtgctgtccttgtttggatggcaccgggtaaagactgacaccagcattttctctgcaggcctttgaacttttgtgttatttcatatattatatgtgttataaagcacattacaatatatttttctctgtcttctccagtcctaggtgaaatgtgtcatttaaaaaaaatttcacttgccattctaaagtttttctggtgagagttttgtgtttttcatttacgcaaacacatctccacataagtagggaaaaaaagtcttcttgagtatattagtgtcttcagcctttgtattgggacagtagcgtccattaatttttatgtgaagtgaaattaggtatcgggtcataatcagtctgtgatgtcttcacagctttcacatttaccttgtgataatcaagtgtgtttttcctcaggtgttagccagagaagaggggtcagggactcttccctggtcgtagctttcatctgtaaggtaaggaagactttccggagggctgtacatgactggggtcttggtcagcgacctctggtttgcactttttcattaatttgagggtaggcactcctgttacctgagacaagaagagatagcagatcttcagaaaagctgatggaaggccgggtgcagtggctcacgcctgtaatcccagcactttgggagtccaaggcaggtggatcacgaggtcaggagtttgagaacagcctgaccaacgtggtgaaaccctgtctgtactaaaaatacaaaaattagctgggtgtggtggcgcatgcctgtaatcccagctacttgagaggccaaggcaagagaatcgcttgaacacaggaggcggaggttgcagtgagttgagattgcaccattgcactccagcctgggtgacagagcaagactctctcaaagaaaaaaaaaattcgatagaaatgacactggcaatgagcctgcaacaagtattactactgacctttcataattgtcatcacttgtaggtttcagagtttagatgctctgtttctcaaaataaccccatacttttatttccttttaaatttttttccagtgccctgtcagcctccgtacattttttttttttttttttgagaccatgtctgtctccatcgcctaggctggagtgtgcagtggcacaatctcggctcactgcagcctccacctcccaggttcaagtgattctcctgcctcagcctcccaagtagctaggattataggtgcgcgccaccacacccagttaatttttgtatttttagtagagatggggtttcaccatgttggccaggctggtttcactcctgacctcaggtgatccacccaccttggcctcccaaaatgctgggattacaggcgtgaagcactgtgcctggtccatattcttttatatttgccaatgattggtccttttagaattcagaaattattgaaggcagctgtgtttgttttccttcaactccatcaggcctttattcaaagtcttttaactctgttttactttatttcattcccctgcaatagctaaggtctaacaccagattaattggaatattagctagcattcacaaaggcctagatctgtaactctgaaattggtcaaattccattaaaaatttttgttacaataagctgtttgtaagatctgactagtggcttatttttaatagaattttgcattaaaattttatcaatacaatttgcaacaaatttgtctaaatatgtgaaaagatttcattgcctttttgtgggcttagattattttttaatgttgattttgaaatatatttggaattgttatctaaattctaaaagctacaagtgaaaataataatgaaagtaagtagttaatattagtggcaagatcattgccagtatcatttctatcgatttatttgaataatgtgattttcataaaagttaagtactactgttaacaggcttattacttgtatgtttctgagttttagatagcaaaatcattttttaaagttttaaaaatattttatttttgataatctatatttatattgtctgatttttaaactgttttctatggtaatctttaaatcgtattcctgctttccggaataggtaacagtgagcatgatgaaaagtgacaagctcacttttacacactcgggcagttgccctattatcaggcagccgttcctgggggctgccagctgcctgccctggcttttccatctccttccttgctgtcttctgcggctccttctgagggctgctgtcactggattagcctataacgcctttcccctcttctaattaatttgctgctctcaggtgaggttttggaaagcaataaagctgagctaggtcaagttccaggagtctcttggcatgaggacctgaaaaactcatctgttggaagacctcggctttgggcagctggtgcactgttggggcgttattggctgcgttctggctctcatcagtcttccagatactctgcattcctcagagaggaacatatctccatgggttgagttcagctcccagggagatgggtttccctgccttaagtcggcaagtacctttttttttctttttttgagacagagtctcgctctgtcaccaggctggagtgcagtggtgcgatcttggctcactgcaacctctgcctcccagggtcaagcagttctcctgcctcagcctcccgagtagctgggactacaggagcgcaccaccatgcccagctaatttttgtatttttttagtagagacggggtttcaccatgttggccaggatggtctggatctcttgatttcctgatccgcctgccttggcctcccaaagtgctgggattacaggcgtgagccatcatgaccagcctttatgtttctttgtttgttttgtttttctgagatggagtctcgctctgttgcccaggctggagtgcagtgttgccatctcgacttactgcaacctctgccttccaggttcaagtgattccttgcctcagcctcccgtgtagctgggatcacaggtgcctgccaccatgcccggctaatttttgtattgttagtagacacagggtttcgccatgttggccaggctagtctcgaactcctgacctcaagtgatctgccttcctcagcctcctaaagtgctggggttacaggagtgaaccaccatgcccagccttcaattaccttttatttattttatttatttatttatttttgagacggagtctttctgtgttgcccaggctggagtgcggtggcgcaatcttagctcactgcaacctcctcctcccaggctcaagtgattctcatgcatcagcttcccgagtagctgggacttcaggtgcccgccaccacacttggctaatttttgtgtttttagtagagacggggtttcaccatgttggccaggctggtcttgaatttctgacctcaaatgatcctcctgcttcagcctcccaaagtgctgggattacaggcgtgagccactgcccccaacagcaagtaccttttaaacattagagacatttagttgccatcctcaaacccgtttgggtgtgtggagagaatgttgggtcgtgacatggttgttagttatctaaagatgtcagccatcaatcatcactgtgtgatgtgcacactgaagctgtaatccttcatctaggatgatattttttaagatggaaaattctacaaccctgagaataaggatttcagatccaaatttgagactcagccctacgagtaactctttaacttcagagagttaaaagaagatgcacagttgatgaagatttaaaggagaaaatggaaatcaaatgtcatttagcactcaaaggcctacatgtcatttctgacatttttctgtttgtgtgaaattttttttttcctataaaatgattgtgaagttttctggtagaattattgtttgcctttctaatgtaatagcatattagggtttttttttttttctttttctttttttgagacagagtctcactctgtcgcccaggctggagtgcagtggcacgatctcgggtcactgcaatcttccgcctcctgggttcctgcctcagcctcccgagtagctgggactacaggcgcacgtcaccacacccggctaattttttgtatttttagtagtgacagggattcaccgtcttagccagggtggtcttgatctcctgacctcatgatctacccgcctcggcttcccaaagtgctgggattacaggcatgagccgctgtgcctggctattagagattttttattataatttatctccaagataaaagcagtgacattatattgccacataattgaaaaatacaagagaaataaaaatcatccatgcttttgttagcctatcactgtcattgaaatattatgttacatggcagtttgcttgctggttgctctgttaggcaacgctctggtgacattcctttagctattaattgaggaatgtagaatgacagaacagtgtttctcctcaatgatacttgaaggatatttattaactttcatattgaattacattttattaaatttataatgagttaatgctgggaaataaaacactgatttaagtcattttggcttttagtactaaagcatttgacaataaatgacttcttcagaatatggtataccttctgaaagcaataaacgcattttaatgaattgtaaggaaacaacatcattttattttttatttttttttttgagacagactttcgcttttgttgcctaggctggagtgcaatggcgcgatctcggctcactgcaacatccgcctctgggttcaagcgattctcctgcctcagcttcctgagttgctgggattacaggcacgtgccaccacgcctggccaattttgtatttttagtagagacggggtttctccacgttggtcaggctggtctcaaactcctgacctcaggtgatctgcccgcctcagcctccgaaagtactggaattacaggcgtgagccaccgtgcctggccaacattattatttttttttaatctagaaaaatacacttctaagaaaattgattaaaaccaaccttcttcattagcccctaagatcacatctatgttctctttgttgcagcttcacttaaagagaggaaacttcttggtgctcaaagcaaaggagatgggcctcccagtgtgagtgtggggggtaaggcttctggggactcactgggtacacctgtccacttaaggaaatcacatttcacagaggccttgcctcttcatttcagtgggacagctgccatcgctcccatcattgctgctgtcaaggacgggaaaagcat

SEQ ID NO: 11833 - DNA, 579 bp, Homo sapiens
agtgcggcgcagcctctgagcatcggggcacctcccagggcttcggcttccctgcttcacacatgtggttcactgttgcgggggttcgtggagttatggtatctcttcaactgtggagaaggcgttcagagactcatgcaggagcacaagttaaaggttgctcgcctggacaacatattcctgacacgaatgcactggtctaatgttgggggcttaagtggaatgattcttactttaaaggaaaccgggcttccaaagtgtgtactttctggacctccacaactggaaaaatacctcgaagcaatcaaaatattttctggtccattgaaaggaatagaactggctgtgcggccccactctgccccagaatacgaggatgaaaccatgacagtttaccagatccccatacacagtgttagccagagaagaggggtcagggactcttccctggtcgtagctttcatctcttcacttaaagagaggaaacttcttggtgctcaaagcaaaggagatgggcctcccagttgggacagctgccatcgctcccatcattgctgctgtcaaggacgggaaaagcat

SEQ ID NO: 11834 - DNA, 5981 bp, Homo sapiens
atcggggcacctcccagggcttcggcttccctgcttcacacatgtggttcactgttgcgggggttcgtggagttatggtgggtgggaaatccgagattctttgcatccatgtgatttctgcggatctgtgaagaacttcaggcctgggtctgagcgtccttttcccaacccttgggccccggcctggctgtcagcactttcggagctccaccctcttccgtgcaccccaaggccagtgtgtcgttgttagcgtgtggggtggacagatctggtgtgtagccggtggtggagaaaggactcattttgtcctagcacccacacacacaggcccccactcctctccacctctgctaaggagggctcaaaacccaccagcataaatgtggctcggtagtccaacgtggacttttaatttttttttcttttttttttttccagagtctacaataaaacatctaattggtgtcagagagtttacagaataaaaccttctgaatgtcttgtgtaatgtttgtcttgtaggtatctcttcaactgtggagaaggcgttcagagactcatgcaggagcacaagtgagtcagtctcttgctttcggagggggagttgattacggggcttgaaagccgaaatgagaggccagttgttttttatagcaaaagtggtccttgttctgttcatgttatcctgtttaaatgttttttcattcttaggttaaaggttgctcgcctggacaacatattcctgacacgaatgcactggtctaatgttgggggcttaagtggtgagtatattctttgcagtgtcagaggctggtgggaagtctctgggattttaaccggctttaccatttttccaagtctggggtgggcagctacttttttttttttttttttttttgtcagtggcgtgatcttggctcactgcaacctttgccttctgggctcaggtgatcccctcacctcagcctcccaaatagctgggaccacacgtgtgccccatcacacctggctaattttttttgtatgttttgtagcgacggggttttgctatgttgcccaggctggtctcaaacttctgcgatcctcctgtctcggcctcccagagtgctgggattacaggcatgagccaccgcacctggcctggaattctttttataccagcccagtcagcagcagcacagagcattaaaagctgtgactcaggagaacagattttaatatggataccacctcttaagtgttaccatccacttagtttcttgcgttgcggggacagagatttgtggcagtaaactggagagtctagcagtggtgattacagttaatatgtttaccgcagacgccattggcacattggcagccacacacatacccactgtccagattaccctgtcatttatgtctatcaaccggaaggtcaggattgtgttgcagccaaattgtgtgggcttggtggcatggaccggaaggagtgaagtgttagaccagtctcccttctcagggctgagactagggtgaggcacttagggtgccagcccttcacttgcatgattccttacattttgcacactgggtgccttgctgcttcaccctagtgacagctcagcccattctagaggcatttaaagaatatttggtgtctgttacacctctagctggcatcacttctgctctgtacatcttccctggttgtacttccaaagctggaaggtggagatgtagataaatagttggattagtacggggtgctcctcctgttagtgacgacaggtcaaattgatgagagatctgattttatgcatcctttttaggaatgattcttactttaaaggaaaccgggcttccaaagtgtgtactttctggacctccacaactggtgagtctttcctgacacatctttcaaaagcaatctttccttttgtaatatcagtaacaagaattttcctttttgcaaatcagtcttctgccctccagagatacctggtcgttgaaacgcttcccctttcaagttaaaaagacttgagttctgattaactatgtgaccttgatcaagttactttacctttctgagctttagtttattcatctataagatgactatcacgtttcatagagttgttaaagattaaatgacgtagcagcacatataaagcactaaatcactttattagatatatgtttggcaccaagtaggcacacaagaaagggcagcttttgtttttattcaataaatttctgacatcttcttacctttcagtccagcttattacactcttgagaaggcgtgtgtgtgttgttgaatataacagttcattttccagtccttaagaagaaagtcaccaagacctgttaagtctttccccaaaataacgtttgaaatccatccatttgtctcttattgaggccttccttatttctgttttctatgcctgtaaactacaatagcctcccatattcattctcgccttcctgtaatccatctgccacacagcagccagagaggtcacttcaagacagaaaagtagtgtgtcacttgccaccctaaagcccttcatgggctccccattgcaatacaatcaaaacaccttgatatggcctacaagtcctgtaggccccggccgctacccacacttccatctgtacccatcgctgaactgcagctgcatgggctgactcttatgtccctctaactccctggccacttcaggactttcgcccttccgcgggttccctctgcctcttctaattgctgcctatattgttactgaaccttcagggctcagctagagggtcatttactccagaactgcctcttcttctctagacaagttggatcccagccttctgtatttttcattttccttgcagagcacttagcataatgccactaagctgtttctgttatcgtgtttccttttgtctcctccactggcctgattagagcaaggcctccatctctttttcctgctatatccttggcatctgatataatggatactcagtaaatatttgtaataaatgatgttcaaaatatttactaagctttgttttatgttgatacctattggtaaccttttaaatacttgaatagttgctgtgttctacatttgttcaaccataactgctcatttctttgtttttcattaggaaaaatacctcgaagcaatcaaaatattttctggtccattgaaaggaatagaactgggtacgtctttgtctgtgactcatcctctgctatttctaacttatatatgccctgacctctcaaattagaatccattaaaaacatcaacatcaaacctcaaaatcaaatgcttcatcaccacgagatttttttttttttttttttttttggatagagtcttgctttcttaccaggctggagtgcagtggcatgatctcggctcactgcaacctccacctcctgggttcaagccattctcccacctcagcctcctgagtagctaggactacaggcgcatgccatcacgctcagctaattttttgtatttttagtagagacggggtttcaccatgttggccaggatagtctcgatctcttgaccttgtgatctgcccgcctcagcctcccaaaatgagctaccatgtggctggagatgggatttctaaatagtgacattttctgtgttcccacctcatgctgtaaaaataggggccaggtcggcaggagtgattgaacagctgatgcctgcctgtgtacatgctgtgtggcattctccatccagacggcagggctcctgcctcagttccagaggtgcttctcgtcgttgagttgctttgagttgggggcgggggtgacaagggttccctagaggttttgtggccaactttgtacattgaaacgcagctccagctgcgcaggggggcttacagcctcttgatgggaagaggcctcactgaggatgctagtagggctcttgtcctggcactggtgtgtatctgtggcttgttaatactcctcttttatagaaacactaatactttgtttcaaaatatacatcagctcttctggtttgcgatgataggttccctggcttcactattctgtttgttaacttgggtctctgaaagttgagtactagtttcttgtttttcaatttttaacggatagtcaccaaagattataatgtcttttcatctggctgtagtaaatataaatggctgaccaaaatacacttttatttatttcctaaaaatggtaatctccttagaaagtctggttttcgtgtcagattcccaccataattctgaggcaattcagttgctcgtggttggtgatcctgaagttactcttcccacacatcttcactaatgcaatcactttgctgttgtgtggttttcttgtagctgtgcggccccactctgccccagaatacgaggatgaaaccatgacagtttaccagatccccatacacagtgagtatgaaagccaggtttcccaggaggagggtgtacgtcctgagtaaagaaaacatggatgaaaatagaaactgaacacttgctgtgggcaccctgttttgtgttctgagcatgattagaaaatttagttgaggaatgaagatatggctcctgccctggcttataaacttacggatgtctgacttatgcctaatgatagtgattatgctttggaatattagataatcaagcactgttggtaaatagattgcattcaagtttgcacattcattgcttggaggttttttcccacaggcgtaataccctcttttgatcagacgatcatgaagaggtttgcacagatagatttttttaaataaataatgattacagcaacctaaaagaagtgttgttgggggttagaagctcctgcaaattccgaagtatcagggccagatgatgtggtcttagcttaggaaaagagttagtcttgtccttgaacttggctaaagacattcatgtctggttttacttacatgtgaagagagtaccaagcagtaggggtatttccttgttagtactaactaatgtgatgcttactaagtagtgctgatgggtgacagaccagagcacccagcaaaggccagagaagtccagaacctggcgaggagatgaggcttacactgactgaaggcagaaggcagcagggaggagaggaatgtgccggagcaatggcacaagtgctcctaggccagtgctgtgatgagctgatcagcactcccattgcctggcttgctcctcctgctcagatgccttctctcacctgacccctgctgtagccacccccagcctgagttgcatccacctgtttgttgtccatttccagcaccctgttcttcgctccatggcatgtgacagttaactttcatatgtgatttgcgtgatcgatgttaacatgctcagttttgccgatcactgttttttcagtgtccagcggccctcagtgagtgaacttacgttcattctcgttgcagctgtgctttagcttcttagagcagcgaatttttttcccttgatcttgagccttaactaaatgtaaaatgaggctccttcttgagataggtaccctttgggtctatgtgttttagcgggagtgatgataataaataagcatgtctacaacccacatgctgtttagataacacgttgttgagttggtactgtggccgaggctgtgagctaagcagaaacataaacattaataggacataggtgcagcccagaaaccaggtaggaagttaactaactagttatttcctactgtatagtaaaaggtgtgctgatttaattggcgttctggcattcccatgtatgaacgtctgggccttggctgtcagctcaccttgtgcagtgtgtaatttggtggtatctgtactgaccaggtgaacagaggaggggaaagcaccaaccatggcagagtccagaaaggcctctcagcaggctcagtccagagcgatcttcagactccgagtcgaatgaaaatgagccacaccttccacatg

SEQ ID NO: 11835 - DNA, 581 bp, Homo sapiens
atcggggcacctcccagggcttcggcttccctgcttcacacatgtggttcactgttgcgggggttcgtggagttatggtgggtgggaaatccgagattctttgcatccatgtgatttctgcggatctgtgaagaacttcaggcctgggtatctcttcaactgtggagaaggcgttcagagactcatgcaggagcacaagttaaaggttgctcgcctggacaacatattcctgacacgaatgcactggtctaatgttgggggcttaagtggaatgattcttactttaaaggaaaccgggcttccaaagtgtgtactttctggacctccacaactggaaaaatacctcgaagcaatcaaaatattttctggtccattgaaaggaatagaactggctgtgcggccccactctgccccagaatacgaggatgaaaccatgacagtttaccagatccccatacacagtgaacagaggaggggaaagcaccaaccatggcagagtccagaaaggcctctcagcaggctcagtccagagcgatcttcagactccgagtcgaatgaaaatgagccacaccttccacatg

SEQ ID NO: 11836 - DNA, 6373 bp, Homo sapiens
aagctcggtgcacggcgcgctgattggctggatccgccatgcggagcggctaggtggtgcacgggaaacgcgggcgtaggtgaccggcggctttctcagttttggtggagacgggcgcatgtgggcgctttgctcgctgctgcggtccgcggccggacgcaccatgtcgcagggacgcaccatatcgcaggcacccgcccgccgcgagcggccgcgcaaggacccgctgcggcacctgcgcacgcgagagaagcgcggaccgtcggggtgctccggcggcccaaacaccgtgtacctgcaggtggtggcagcgggtagccgggactcgggcgccgcgctctacgtcttctccgagttcaaccggtcagtcaacgagccacgccccgtcccgctgggccctcagtgcggcgcagcctctgagcatcggggcacctcccagggcttcggcttccctgcttcacacatgtggttcactgttgcgggggttcgtggagttatggtgggtgggaaatccgagattctttgcatccatgtgatttctgcggatctgtgaagaacttcaggcctgggtctgagcgtccttttcccaacccttgggccccggcctggctgtcagcactttcggagctccaccctcttccgtgcaccccaaggccagtgtgtcgttgttagcgtgtggggtggacagatctggtgtgtagccggtggtggagaaaggactcattttgtcctagcacccacacacacaggcccccactcctctccacctctgctaaggagggctcaaaacccaccagcataaatgtggctcggtagtccaacgtggacttttaatttttttttcttttttttttttccagagtctacaataaaacatctaattggtgtcagagagtttacagaataaaaccttctgaatgtcttgtgtaatgtttgtcttgtaggtatctcttcaactgtggagaaggcgttcagagactcatgcaggagcacaagtgagtcagtctcttgctttcggagggggagttgattacggggcttgaaagccgaaatgagaggccagttgttttttatagcaaaagtggtccttgttctgttcatgttatcctgtttaaatgttttttcattcttaggttaaaggttgctcgcctggacaacatattcctgacacgaatgcactggtctaatgttgggggcttaagtggtgagtatattctttgcagtgtcagaggctggtgggaagtctctgggattttaaccggctttaccatttttccaagtctggggtgggcagctacttttttttttttttttttttttgtcagtggcgtgatcttggctcactgcaacctttgccttctgggctcaggtgatcccctcacctcagcctcccaaatagctgggaccacacgtgtgccccatcacacctggctaattttttttgtatgttttgtagcgacggggttttgctatgttgcccaggctggtctcaaacttctgcgatcctcctgtctcggcctcccagagtgctgggattacaggcatgagccaccgcacctggcctggaattctttttataccagcccagtcagcagcagcacagagcattaaaagctgtgactcaggagaacagattttaatatggataccacctcttaagtgttaccatccacttagtttcttgcgttgcggggacagagatttgtggcagtaaactggagagtctagcagtggtgattacagttaatatgtttaccgcagacgccattggcacattggcagccacacacatacccactgtccagattaccctgtcatttatgtctatcaaccggaaggtcaggattgtgttgcagccaaattgtgtgggcttggtggcatggaccggaaggagtgaagtgttagaccagtctcccttctcagggctgagactagggtgaggcacttagggtgccagcccttcacttgcatgattccttacattttgcacactgggtgccttgctgcttcaccctagtgacagctcagcccattctagaggcatttaaagaatatttggtgtctgttacacctctagctggcatcacttctgctctgtacatcttccctggttgtacttccaaagctggaaggtggagatgtagataaatagttggattagtacggggtgctcctcctgttagtgacgacaggtcaaattgatgagagatctgattttatgcatcctttttaggaatgattcttactttaaaggaaaccgggcttccaaagtgtgtactttctggacctccacaactggtgagtctttcctgacacatctttcaaaagcaatctttccttttgtaatatcagtaacaagaattttcctttttgcaaatcagtcttctgccctccagagatacctggtcgttgaaacgcttcccctttcaagttaaaaagacttgagttctgattaactatgtgaccttgatcaagttactttacctttctgagctttagtttattcatctataagatgactatcacgtttcatagagttgttaaagattaaatgacgtagcagcacatataaagcactaaatcactttattagatatatgtttggcaccaagtaggcacacaagaaagggcagcttttgtttttattcaataaatttctgacatcttcttacctttcagtccagcttattacactcttgagaaggcgtgtgtgtgttgttgaatataacagttcattttccagtccttaagaagaaagtcaccaagacctgttaagtctttccccaaaataacgtttgaaatccatccatttgtctcttattgaggccttccttatttctgttttctatgcctgtaaactacaatagcctcccatattcattctcgccttcctgtaatccatctgccacacagcagccagagaggtcacttcaagacagaaaagtagtgtgtcacttgccaccctaaagcccttcatgggctccccattgcaatacaatcaaaacaccttgatatggcctacaagtcctgtaggccccggccgctacccacacttccatctgtacccatcgctgaactgcagctgcatgggctgactcttatgtccctctaactccctggccacttcaggactttcgcccttccgcgggttccctctgcctcttctaattgctgcctatattgttactgaaccttcagggctcagctagagggtcatttactccagaactgcctcttcttctctagacaagttggatcccagccttctgtatttttcattttccttgcagagcacttagcataatgccactaagctgtttctgttatcgtgtttccttttgtctcctccactggcctgattagagcaaggcctccatctctttttcctgctatatccttggcatctgatataatggatactcagtaaatatttgtaataaatgatgttcaaaatatttactaagctttgttttatgttgatacctattggtaaccttttaaatacttgaatagttgctgtgttctacatttgttcaaccataactgctcatttctttgtttttcattaggaaaaatacctcgaagcaatcaaaatattttctggtccattgaaaggaatagaactgggtacgtctttgtctgtgactcatcctctgctatttctaacttatatatgccctgacctctcaaattagaatccattaaaaacatcaacatcaaacctcaaaatcaaatgcttcatcaccacgagatttttttttttttttttttttttggatagagtcttgctttcttaccaggctggagtgcagtggcatgatctcggctcactgcaacctccacctcctgggttcaagccattctcccacctcagcctcctgagtagctaggactacaggcgcatgccatcacgctcagctaattttttgtatttttagtagagacggggtttcaccatgttggccaggatagtctcgatctcttgaccttgtgatctgcccgcctcagcctcccaaaatgagctaccatgtggctggagatgggatttctaaatagtgacattttctgtgttcccacctcatgctgtaaaaataggggccaggtcggcaggagtgattgaacagctgatgcctgcctgtgtacatgctgtgtggcattctccatccagacggcagggctcctgcctcagttccagaggtgcttctcgtcgttgagttgctttgagttgggggcgggggtgacaagggttccctagaggttttgtggccaactttgtacattgaaacgcagctccagctgcgcaggggggcttacagcctcttgatgggaagaggcctcactgaggatgctagtagggctcttgtcctggcactggtgtgtatctgtggcttgttaatactcctcttttatagaaacactaatactttgtttcaaaatatacatcagctcttctggtttgcgatgataggttccctggcttcactattctgtttgttaacttgggtctctgaaagttgagtactagtttcttgtttttcaatttttaacggatagtcaccaaagattataatgtcttttcatctggctgtagtaaatataaatggctgaccaaaatacacttttatttatttcctaaaaatggtaatctccttagaaagtctggttttcgtgtcagattcccaccataattctgaggcaattcagttgctcgtggttggtgatcctgaagttactcttcccacacatcttcactaatgcaatcactttgctgttgtgtggttttcttgtagctgtgcggccccactctgccccagaatacgaggatgaaaccatgacagtttaccagatccccatacacagtgagtatgaaagccaggtttcccaggaggagggtgtacgtcctgagtaaagaaaacatggatgaaaatagaaactgaacacttgctgtgggcaccctgttttgtgttctgagcatgattagaaaatttagttgaggaatgaagatatggctcctgccctggcttataaacttacggatgtctgacttatgcctaatgatagtgattatgctttggaatattagataatcaagcactgttggtaaatagattgcattcaagtttgcacattcattgcttggaggttttttcccacaggcgtaataccctcttttgatcagacgatcatgaagaggtttgcacagatagatttttttaaataaataatgattacagcaacctaaaagaagtgttgttgggggttagaagctcctgcaaattccgaagtatcagggccagatgatgtggtcttagcttaggaaaagagttagtcttgtccttgaacttggctaaagacattcatgtctggttttacttacatgtgaagagagtaccaagcagtaggggtatttccttgttagtactaactaatgtgatgcttactaagtagtgctgatgggtgacagaccagagcacccagcaaaggccagagaagtccagaacctggcgaggagatgaggcttacactgactgaaggcagaaggcagcagggaggagaggaatgtgccggagcaatggcacaagtgctcctaggccagtgctgtgatgagctgatcagcactcccattgcctggcttgctcctcctgctcagatgccttctctcacctgacccctgctgtagccacccccagcctgagttgcatccacctgtttgttgtccatttccagcaccctgttcttcgctccatggcatgtgacagttaactttcatatgtgatttgcgtgatcgatgttaacatgctcagttttgccgatcactgttttttcagtgtccagcggccctcagtgagtgaacttacgttcattctcgttgcagctgtgctttagcttcttagagcagcgaatttttttcccttgatcttgagccttaactaaatgtaaaatgaggctccttcttgagataggtaccctttgggtctatgtgttttagcgggagtgatgataataaataagcatgtctacaacccacatgctgtttagataacacgttgttgagttggtactgtggccgaggctgtgagctaagcagaaacataaacattaataggacataggtgcagcccagaaaccaggtaggaagttaactaactagttatttcctactgtatagtaaaaggtgtgctgatttaattggcgttctggcattcccatgtatgaacgtctgggccttggctgtcagctcaccttgtgcagtgtgtaatttggtggtatctgtactgaccaggtgaacagaggaggggaaagcaccaaccatggcagagtccagaaaggcctctcagcaggctcagtccagagcgatcttcagactccgagt

SEQ ID NO: 11837 - DNA, 479 bp, Homo sapiens
aagctcggtgcacggcgcgctgattggctggatccgccatgcggagcggctaggtggtgcacgggaaacgcgggcgtatctcttcaactgtggagaaggcgttcagagactcatgcaggagcacaagttaaaggttgctcgcctggacaacatattcctgacacgaatgcactggtctaatgttgggggcttaagtggaatgattcttactttaaaggaaaccgggcttccaaagtgtgtactttctggacctccacaactggaaaaatacctcgaagcaatcaaaatattttctggtccattgaaaggaatagaactggctgtgcggccccactctgccccagaatacgaggatgaaaccatgacagtttaccagatccccatacacagtgaacagaggaggggaaagcaccaaccatggcagagtccagaaaggcctctcagcaggctcagtccagagcgatcttcagactccgagt

SEQ ID NO: 11838 - DNA, 20629 bp, Homo sapiens
aaaccatgacagtttaccagatccccatacacagtgagtatgaaagccaggtttcccaggaggagggtgtacgtcctgagtaaagaaaacatggatgaaaatagaaactgaacacttgctgtgggcaccctgttttgtgttctgagcatgattagaaaatttagttgaggaatgaagatatggctcctgccctggcttataaacttacggatgtctgacttatgcctaatgatagtgattatgctttggaatattagataatcaagcactgttggtaaatagattgcattcaagtttgcacattcattgcttggaggttttttcccacaggcgtaataccctcttttgatcagacgatcatgaagaggtttgcacagatagatttttttaaataaataatgattacagcaacctaaaagaagtgttgttgggggttagaagctcctgcaaattccgaagtatcagggccagatgatgtggtcttagcttaggaaaagagttagtcttgtccttgaacttggctaaagacattcatgtctggttttacttacatgtgaagagagtaccaagcagtaggggtatttccttgttagtactaactaatgtgatgcttactaagtagtgctgatgggtgacagaccagagcacccagcaaaggccagagaagtccagaacctggcgaggagatgaggcttacactgactgaaggcagaaggcagcagggaggagaggaatgtgccggagcaatggcacaagtgctcctaggccagtgctgtgatgagctgatcagcactcccattgcctggcttgctcctcctgctcagatgccttctctcacctgacccctgctgtagccacccccagcctgagttgcatccacctgtttgttgtccatttccagcaccctgttcttcgctccatggcatgtgacagttaactttcatatgtgatttgcgtgatcgatgttaacatgctcagttttgccgatcactgttttttcagtgtccagcggccctcagtgagtgaacttacgttcattctcgttgcagctgtgctttagcttcttagagcagcgaatttttttcccttgatcttgagccttaactaaatgtaaaatgaggctccttcttgagataggtaccctttgggtctatgtgttttagcgggagtgatgataataaataagcatgtctacaacccacatgctgtttagataacacgttgttgagttggtactgtggccgaggctgtgagctaagcagaaacataaacattaataggacataggtgcagcccagaaaccaggtaggaagttaactaactagttatttcctactgtatagtaaaaggtgtgctgatttaattggcgttctggcattcccatgtatgaacgtctgggccttggctgtcagctcaccttgtgcagtgtgtaatttggtggtatctgtactgaccaggtgaacagaggaggggaaagcaccaaccatggcagagtccagaaaggcctctcagcaggctcagtccagagcgatcttcagactccgagtcgaatgaaaatgagccacaccttccacatggtaatagtataaacaaaacagagcagcagaaaggcttgcgttttcttaattctctgccttgtaatgcttgtagagagtcattattgtaagaaagccaggtgtgtaaacagatccttcttcctgggcttactataacttggcccgttgggggaatgagaagggttgttgtaaaggtggcagcctgcaactttaataatgaccagtccacagttttggccacccagggtctgggtaggcccaaaactgtgttctgttttcccagaggagaacagggcctgacaaacggattcattttgtatttttcattaatgtaacatttatgcaaattttccattaatgtggaaactataactgctaagccaatgagacagtcaaatcagtgagaggctctgcacgtcttccagaatgacagcccactgggaaacggagttaaaagtccaagatgagatgtagctcaggagtcaggccgcttcgggagtttgttgtccttaacagaaggtcagcgttggcaaagctcggcagctcctctttctgtcctgaggtcttgtctagtgactgagaacaggctgacccctatgtgctgtccttgtttggatggcaccgggtaaagactgacaccagcattttctctgcaggcctttgaacttttgtgttatttcatatattatatgtgttataaagcacattacaatatatttttctctgtcttctccagtcctaggtgaaatgtgtcatttaaaaaaaatttcacttgccattctaaagtttttctggtgagagttttgtgtttttcatttacgcaaacacatctccacataagtagggaaaaaaagtcttcttgagtatattagtgtcttcagcctttgtattgggacagtagcgtccattaatttttatgtgaagtgaaattaggtatcgggtcataatcagtctgtgatgtcttcacagctttcacatttaccttgtgataatcaagtgtgtttttcctcaggtgttagccagagaagaggggtcagggactcttccctggtcgtagctttcatctgtaaggtaaggaagactttccggagggctgtacatgactggggtcttggtcagcgacctctggtttgcactttttcattaatttgagggtaggcactcctgttacctgagacaagaagagatagcagatcttcagaaaagctgatggaaggccgggtgcagtggctcacgcctgtaatcccagcactttgggagtccaaggcaggtggatcacgaggtcaggagtttgagaacagcctgaccaacgtggtgaaaccctgtctgtactaaaaatacaaaaattagctgggtgtggtggcgcatgcctgtaatcccagctacttgagaggccaaggcaagagaatcgcttgaacacaggaggcggaggttgcagtgagttgagattgcaccattgcactccagcctgggtgacagagcaagactctctcaaagaaaaaaaaaattcgatagaaatgacactggcaatgagcctgcaacaagtattactactgacctttcataattgtcatcacttgtaggtttcagagtttagatgctctgtttctcaaaataaccccatacttttatttccttttaaatttttttccagtgccctgtcagcctccgtacattttttttttttttttttgagaccatgtctgtctccatcgcctaggctggagtgtgcagtggcacaatctcggctcactgcagcctccacctcccaggttcaagtgattctcctgcctcagcctcccaagtagctaggattataggtgcgcgccaccacacccagttaatttttgtatttttagtagagatggggtttcaccatgttggccaggctggtttcactcctgacctcaggtgatccacccaccttggcctcccaaaatgctgggattacaggcgtgaagcactgtgcctggtccatattcttttatatttgccaatgattggtccttttagaattcagaaattattgaaggcagctgtgtttgttttccttcaactccatcaggcctttattcaaagtcttttaactctgttttactttatttcattcccctgcaatagctaaggtctaacaccagattaattggaatattagctagcattcacaaaggcctagatctgtaactctgaaattggtcaaattccattaaaaatttttgttacaataagctgtttgtaagatctgactagtggcttatttttaatagaattttgcattaaaattttatcaatacaatttgcaacaaatttgtctaaatatgtgaaaagatttcattgcctttttgtgggcttagattattttttaatgttgattttgaaatatatttggaattgttatctaaattctaaaagctacaagtgaaaataataatgaaagtaagtagttaatattagtggcaagatcattgccagtatcatttctatcgatttatttgaataatgtgattttcataaaagttaagtactactgttaacaggcttattacttgtatgtttctgagttttagatagcaaaatcattttttaaagttttaaaaatattttatttttgataatctatatttatattgtctgatttttaaactgttttctatggtaatctttaaatcgtattcctgctttccggaataggtaacagtgagcatgatgaaaagtgacaagctcacttttacacactcgggcagttgccctattatcaggcagccgttcctgggggctgccagctgcctgccctggcttttccatctccttccttgctgtcttctgcggctccttctgagggctgctgtcactggattagcctataacgcctttcccctcttctaattaatttgctgctctcaggtgaggttttggaaagcaataaagctgagctaggtcaagttccaggagtctcttggcatgaggacctgaaaaactcatctgttggaagacctcggctttgggcagctggtgcactgttggggcgttattggctgcgttctggctctcatcagtcttccagatactctgcattcctcagagaggaacatatctccatgggttgagttcagctcccagggagatgggtttccctgccttaagtcggcaagtacctttttttttctttttttgagacagagtctcgctctgtcaccaggctggagtgcagtggtgcgatcttggctcactgcaacctctgcctcccagggtcaagcagttctcctgcctcagcctcccgagtagctgggactacaggagcgcaccaccatgcccagctaatttttgtatttttttagtagagacggggtttcaccatgttggccaggatggtctggatctcttgatttcctgatccgcctgccttggcctcccaaagtgctgggattacaggcgtgagccatcatgaccagcctttatgtttctttgtttgttttgtttttctgagatggagtctcgctctgttgcccaggctggagtgcagtgttgccatctcgacttactgcaacctctgccttccaggttcaagtgattccttgcctcagcctcccgtgtagctgggatcacaggtgcctgccaccatgcccggctaatttttgtattgttagtagacacagggtttcgccatgttggccaggctagtctcgaactcctgacctcaagtgatctgccttcctcagcctcctaaagtgctggggttacaggagtgaaccaccatgcccagccttcaattaccttttatttattttatttatttatttatttttgagacggagtctttctgtgttgcccaggctggagtgcggtggcgcaatcttagctcactgcaacctcctcctcccaggctcaagtgattctcatgcatcagcttcccgagtagctgggacttcaggtgcccgccaccacacttggctaatttttgtgtttttagtagagacggggtttcaccatgttggccaggctggtcttgaatttctgacctcaaatgatcctcctgcttcagcctcccaaagtgctgggattacaggcgtgagccactgcccccaacagcaagtaccttttaaacattagagacatttagttgccatcctcaaacccgtttgggtgtgtggagagaatgttgggtcgtgacatggttgttagttatctaaagatgtcagccatcaatcatcactgtgtgatgtgcacactgaagctgtaatccttcatctaggatgatattttttaagatggaaaattctacaaccctgagaataaggatttcagatccaaatttgagactcagccctacgagtaactctttaacttcagagagttaaaagaagatgcacagttgatgaagatttaaaggagaaaatggaaatcaaatgtcatttagcactcaaaggcctacatgtcatttctgacatttttctgtttgtgtgaaattttttttttcctataaaatgattgtgaagttttctggtagaattattgtttgcctttctaatgtaatagcatattagggtttttttttttttctttttctttttttgagacagagtctcactctgtcgcccaggctggagtgcagtggcacgatctcgggtcactgcaatcttccgcctcctgggttcctgcctcagcctcccgagtagctgggactacaggcgcacgtcaccacacccggctaattttttgtatttttagtagtgacagggattcaccgtcttagccagggtggtcttgatctcctgacctcatgatctacccgcctcggcttcccaaagtgctgggattacaggcatgagccgctgtgcctggctattagagattttttattataatttatctccaagataaaagcagtgacattatattgccacataattgaaaaatacaagagaaataaaaatcatccatgcttttgttagcctatcactgtcattgaaatattatgttacatggcagtttgcttgctggttgctctgttaggcaacgctctggtgacattcctttagctattaattgaggaatgtagaatgacagaacagtgtttctcctcaatgatacttgaaggatatttattaactttcatattgaattacattttattaaatttataatgagttaatgctgggaaataaaacactgatttaagtcattttggcttttagtactaaagcatttgacaataaatgacttcttcagaatatggtataccttctgaaagcaataaacgcattttaatgaattgtaaggaaacaacatcattttattttttatttttttttttgagacagactttcgcttttgttgcctaggctggagtgcaatggcgcgatctcggctcactgcaacatccgcctctgggttcaagcgattctcctgcctcagcttcctgagttgctgggattacaggcacgtgccaccacgcctggccaattttgtatttttagtagagacggggtttctccacgttggtcaggctggtctcaaactcctgacctcaggtgatctgcccgcctcagcctccgaaagtactggaattacaggcgtgagccaccgtgcctggccaacattattatttttttttaatctagaaaaatacacttctaagaaaattgattaaaaccaaccttcttcattagcccctaagatcacatctatgttctctttgttgcagcttcacttaaagagaggaaacttcttggtgctcaaagcaaaggagatgggcctcccagtgtgagtgtggggggtaaggcttctggggactcactgggtacacctgtccacttaaggaaatcacatttcacagaggccttgcctcttcatttcagtgggacagctgccatcgctcccatcattgctgctgtcaaggacgggaaaagcatcactcatgaaggaagagaggtgagatgcctggttttcttgattcagcagttacaggtagggtctgaaatgctgggcagagtctgtcttcttcaggccctacagacaccacttttgaaggacgtggaacagtttggacatcactcagctaagtgataaaatggcctcttttatctgtgtttgtcccgcatgtcaacacggctgcattcgagcatttttgtagattgtccatttaggatctagtcaccgtcctccttaaagggtgcatgctttccttggtacttgagctcaggacagtgtctaacaacagaccccatatggatgggcctggggtttatggtccagaggaatgccacagtattctatgtcaagatatttcctctgacttctgaggacattaggaccagtggccacagactgaagaaaaccttaatgccaagcctcctttcctggccagtgtaggcctgaagtgcctcaacctgacagttacctgtttaggtatccacaaagagaccagaagggtgttgatggtgatgtgtaaagttggttttgtgctttgtttacctctcagctcactggataggatatgtcatgttagcagttgccttgaaggcagttcagtttggtggctgagctgtgacccccagtgggcgggcttatttggttttgcagattttggctgaagagctgtgtactcctccagatcctggtgctgcttttgtggtggtagaatgtccagatgaaagcttcattcaacccatctgtgagaatgccacctttcagaggtaatgaggggtctctagggtgggagaagtgagagctgaaacccagcccagcatcgacatgggcatcttgtggcaagagctgtgtttctgggaagaccactatctgggtttacagttcagaggccggcactcctgccttaagtcactgttggtagttggtgggctccggtgtacacagcctcaaagtgaaattagaaaagattgaaaactagaaacaactgaggactagaaattcaactagaactcttacagctcttataccagaagaaattctagaacttttttgaattctaactaatgccccagattatcatttggattattttgaactgaattaattttcttccattacctgcattgaaacaaatgaggtgggtcagagtgtgtgagactgtcgtggtcaagagtccgtgttatgggatggactcacagctggggaatgtcttttgggctaactgccactctgttgttgtcctctatcgaagttaaccagttttgcggttcagctttcattccagatggaatcatctttgacccacctatctgagtttgaatcttttcccccactcttaatggtttacctgtatttttcctgttcctagtttgtatctatctgtattttttcacttgtttttttctacttaccacaacaaatccttttgggctgctgtaccccttccgagtcagagcgttaggagttgtttcatggtctgctttattctctgtgggtgaatttggatgcgctggtagccccggctttgtattttaatccagttttgggcagcaaaacctcttcaatgaatcaggtgtcatttgagagccatgtgtggatgtgtgatgatgctgggatagataaaaatagctactgtgtatatttctttttaaagggaactggagggaaacacatcagcatgttagtaagtggtctgttgtccaggtggtgaaatttcagatgattttcatttctcgtgcctgtgtctcaggtcctctggaaggcagacaccagggtggcattggaggtgcaggaggtttattcgaggaaatttgactgtgagagaggaaggagagagggagcaggaggaggcagggagagcctgggtctggctttgcaggttggacccgtatgagtggagagggtaggaaggaagtgcagtgctgagaaaggatcagccaggcctactggaaagcccagagcagagcttgccagatacaggaatcccacgtccattggaaatggcccagcaccggggtctgccgtgagcagcctgctgtgagagcatggcctgggcgtggaggctgtcagctcactgcagtgctgcagagggccgcacgatacccctccctggctgcgtggtccctgtcttggtgtgtcctgagtctgcatcactttgtaaagccccactcttctgcccaggtaccaaggaaaggcagatgcccccgtggccttggtggttcacatggccccagcatctgtgcttgtggacagcaggtaccagcagtggatggagaggtatggagcccagcccagcggcacttggggtaactcttctgggcagtggtggattcccctttcctcccctcgtgctctttccagcgctacctacccttctgcacctgcctaaactttctgtgggattcctgccttcccagaattctaggcttcccagatctgtgctacactcgtgaagaaaatgcaccgctaggtggcgcagtgtccacacgattccatttattttacaccctccacactcttcagggtgtctgaacaaatactgccgtttggttgaggattccataagtgaattccaaagaagagattgcagctataaaatgatagcttccatttactgaatgcccactttgtgggaggcagtgtgtgaaatacccttcatttcacttcatttcctctagggtcgtcgccagcagccctgggaggtagatgtttagtcactggaaggcatctttttcctcggggcatcgctggccagggccaggtggaggagtatgagttgagctcgggtgcggggtgaccttgggctgctttttggcccctgcccgtatctccccacatggcccgtttacctgcccctcactccatggcctgctctcctgctgtctctttcattcctcagggtttgggtcccctatttgtatgccctggacatcttctttttcttgtttttcctctcactcttcccagcacacctgaaaggcagctgagctagggaacaccgggctttgagacagcaggagtgggaccatgtttggccatgtagtaacactgcttggggcaagtcactgaactgtttgaacacctcatcctcattaccactcctgagctcagcaccactcctcagggggagctgcctcctaacagacgctgcaaatgccgggtctgtttcttcacaggtttgggcctgacacccagcacttggtcctgaatgagaactgtgcctcagttcacaaccttcgcagccacaagattcaaacccagctcaacctcatccacccggacatcttccccctgctcaccagtttccgctgtaaggtagtgtctcagaccggccccttgtcggcccagctctcgtcccctctctttctctccatgaatgtgttttgtctctttcagaaggagggccccaccctcagtgtgcccatggttcagggtgaatgcctcctcaagtaccagctccgtcccaggagggagtggcagaggtctgtgccatcttgaactaatggaatcgtctcagtcgagttgggaaacatttctgtaaatagccacatagtaaatgttccaggaggctctccagaccatatggtctctgttgtaactattcaactccgctttgagcacaaaagaaacacggacaataagctaatgaatgggcttggctgtgtgccagcgtgaatttatttagaaaagcagcctactccaggctgggttgaggtgggcggattggggccagtagttctccttttccaaaattgccttgcatgggaatagcagtgatagagctcgtgtgtttcacagtatagaaaataggaaatgtgtgatgaacaaagtcacccataatcctgttgcccagagataatgattgataacattttgtgtttcttgatttgtgtatgtgggtttatattgtcagtcttttcctgtatcactaaacagtcttaagtaacaagatttttattggtattccaaatagggatgtttactcatttgggatgtttccaattttttgttgtttttaatgaatgaaacaataaatgtcttatatataaatctttgatgggaactctgttcccttcaagtcattcctaaatgtgggattactggcccagagtgtgagacttgttaaggtacttgataaatgtaagatgccatcttgaaagcctcttccagtacaatccaaccaggaaagtgaacagccttactgccccacatctttattttaattaattaatttatttattttatttatttatttatttttttgagacggagtttcactcttgttgcccaggctggagtgcaatggcgtgatctcagctcactgcaacctccgcctcccgggttcaagcatttctcctgccccagcctcccgaatagctggaattacaggcgcctgctaccacgcccggctaattttttgtaattttagcagagacgggtttcaccatgttggcaggctggtctcgaactcctgacctcaggtgatccacccacctcagcctcccaaagtgttgggattacaggcgtgagccgtgcccggcctgttttaatttttaaggatctgaaccttgattttaagtttcctgcccactccacagtatttgtattagaatagagcatgtgctggattatgactggatgctgtgtgctgttgaggttgggtagttggggccctttaagagactatactagcaagactcgggcccacaggcaacatcacggggttgaagaacctggtgtccctttgttggcatctgcgcaggctcttaacacacagcagcgatacacagccctagccgacattcagatttaccttgtgcttgtgaaaaatattgcacagggcctgccctagacctagtgaattagaatcttgagagttaggcttgggactcacaagctcccagatgattttaatgctcagcgaggttgaagagccgcctgtccaaggagttgccactccgtgtgatctggggcttgctaggaaagtgggatctcaggcctcactgcagagctgccgaactggcttctgcgttttgccaaggttcctgggtgtgaacatgagtttcagagtcactcctctagggcccctgcttctcagctcggaccattgacccctcagaggacatttggcaacatctggaaacgttcttggttgtcacagcctaggaggtgggtagtggtgctgctagtgggtagaggtcaggggtactgcaccaggacagcagcactggccacagaaaaaaactgtcttgccctgagcatcagtagttccccgttgactggccctgaggcagagcgatgcagcatccaaaaggcggtggagcagacctgccccagatcctagtcacttaaccttcagtgttgatctgaaggaacttcctgcagattgtccccctgaatttattctggacatccccaatggggtctgctgaggccatataccctgtccgtcacctgagatgcttctctctcttcctgcagggatgccattattacttgcaatcctgaggaattcatagttgaggcgctgcagcttcccaacttccagcagagcgtgcaggagtacaggaggagtgcgcaggacggcccagccccagcaggtgagtgggagcccacagagcagcctttctttcctgggctctgcccctgctgctgttttcctagcattaagtggagtgctggtggggcgcattctaacctggcttttcagtctaatccagggcttctctactcagctctacattagaattatagtcattggaggagggggctttggggagtttaagaatcccaattcctggctgggcgcggtggctcacacctgtaatcccagcacttcgggaggccgaggcaggtggatcgcgaggtcgggagatcgagaccatcctggctaacatgatgaaaccccgtctctactaaaaatacaaaaattagctgggcgtggcggcgggcgcctgtagtcccagctactcgggagactgaggcaggagaatggcgagaacccgggaggcggagcttgcagtgagccaaggtcgtgccactgcgctccagcctggacgacagagtgagactccgtctcaaaaaaaaaaatcccaattcctgtgccccatcccacccaatcagagcatttggcgatggcacccaggcattcttggcaaggcacgcactgagtgaaacgttttagtgaacacctgtggaaagagctctgagcagggacttggctggcagagatctagtcctggctttgcggatgcaaatccatggaggatcttggccacgtcactcaactgaggctgagggccgggcacaggctttggaaccatcgggtctccctggatttgaatcctgaccctgcctcttaccatcttcactggagacctgggcgtctgagcctgtttcccccttgggaagcagagcatttcctacctggtagggctgggaggatgcgaccgaagtgcatggtcttgcagtgagagctggatgcaaggcacacactgttctcttgaaataaatgacagttcccagcataaagaaatgtcattttttaaatgtaaaagaattacagcaattcttttgaagaaaggactggagaatttatttgttcttcttagccttttggtgacagatagcctgtgggtcccacactggtgcgaagtcctttgtttcagagcggttgccaggggcctgccagtccccctcctgggaagctggatagaactatgttgcttacccatctgtcttagtctgtgttttgttattataaaagaatatgtgagactgggtaatttatcaagaaaagaggtgtatttagttcacggttctgcgggctgagaattgaaggtcacggccctagcttccagtgaaggcttccatgctgcatcataacgtggcagaggagcgcaagtaggaagtggacgcttgtgaagacgggataacctgagctgcactctggctttataacaacccccctctcctgggaacaaatccattcccttgagaagtaatgcagtctcctgagagccagtacttactactgcagctccaagccactcaggagggtccgtccctgtagcccaaacgccttccactaggccccgcctcccaaaaccgccatactagggagcacgtttccacatgaggtctggggacaaaccaatgacactcaaaccattgcaccttctcatggctgcatgctggctcacttttgacccaaaggaatggattgtttcacatggattttttcacagagaaaagaagtcagtacccagaaatcatcttccttggaacagggtctgccatcccgatgaagattcgaaatgtcagtgccacacttgtcaacataaggtatgctgctttcccaggaagcatccttccatcaagggcacgtttactttttaaacaaaagtcctgctgtactcaccagtcgatttgaaatgcggtatcaagccctgtcacttgtcatgtcgactggagtgtccaggagaggagcgtggccttactgcattttatagcctcagtagcaaactttaccctgggaatcaccaaaattcatcccatgatgtcttttaataaacagctgattttactgtgggcagtacacctagctaagaaattagctcctttaatttttacattaatcctatgaagtggtgaataactacccattttgttgatgagtgacctgatattcagagaggtgacttgctatggttcctacagctggtaagtggggcatctgaagtttgagcggggacttggggtcttgattgctacatggtattgtcccccagccatttgttggtagtatgttaaaaagctttagggttttgcacatttgtgttcagaacctttattggattccccttgacatgttttttagttgattctcttgggtttgcctggggtcatcagcagagagattagtcaaatgcgttgtgacatgtacacgttatctctacagatagtatgtgaagaaaataagattgtgaattaccaggtttgttttaaattttgctctgccatcttacatgctagtggtggatgataaacaaccaaatagtgcattaaatatatacagcagtgacgagatgtgccctgacatcagaaatatacaatctggggtgtgtttctctgtggatgaggacatgcaataaagcagcttggagtgagccggcctctcccgggggctgagatcctgggggaagaagggctttttgagtttgacctgacaccctgcgagcagcttttgaaccagctgaagctaatgggaaggtgctattgccaccttgcctccgcctcccgactcctttttcccccagaaggtaatgtcttagcaccggggcttctctctgcaaaatgggtgcagccctctcagtgttcgtggctcctcccagagaatgaaggaggccagagcgggtcagcactctctctgccttggagcagagcttctgaaatggactgcacagcagaatagcccaagaagtttgtcagaatccagacttccagagccctgcctaaaaccaagtcagaaaccccgagtgacacctgggagtctgcgttaactggctccctgaatgaagcacctgcagcccgccctgcaccaggtgtctttgaggacatgagctgaggaaaccccgaccacttgcaaagggggaaaagtccgatggcagctggacctagaaagagtctcatatggcccagtgcctgtcctggtattttcaacagaggctgtggccacagtcaatctgcatggtcagattcattgttaggactaaatgctttaagcctcctataaactttttttttttttttttgatgcccagcctttgtgtaagtctacttgaaagggtttcagggttccatggatacttctttgctataaagaggatgacacatgtaaaatcacctttatggttaaattaattggcttttatattagctcctcaaagcaaagcaggagagacagaaatttctgcagttgcttcttggtcctgtccaaagcagacatcagcctctgaaccatcagcagtcttcctagtggcagtgactctcttcctcttctcttctgcagccccgacacgtctctgctactggactgtggtgagggcacatttgggcagctgtgccgtcattacggagaccaggtggacagggtcctgggcaccctggctgctgtgtttgtgtcccacctgcacgcagatcaccacacggtgagtgttgggctggaccacaaagctggagcctggaggaggcactgccacgttgagttggccctttggctgcgtcttttcctccgcttccaaacttgcccagagcttttgttactcatctctggctaggaaatggttttttgcaaaactcaacatagtccttctgcgccacaagaatgtcttctcttcctgttcagttcctttcctgcagcaggacaggtttgagtttacccagccttccttgagtcttgaatctcacacggcctgctcagcggaagctttgaccggatgcaggaggtgtggctatgagaccctcaccttggtctcctggggtgccgggccctgggccgttgccctcttcccagcacgggtcgtgtcgctttctgcctgtgacatttcagggccatggcgcagggggctcggcctgtgccacccccactgcggctgtgttagaggctggtgggtgacgtcgggctggcaactcctgcaagagagagggctgcagaccctaacccggaggggatggccctggggcctggctgacgcatgtctcctgtttccttgccagggcttgccaagtatcttgctgcagagagaacgcgccttggtaagtgtggcacttgatgggcgttctgagtttcagcggtttacacatcatccgccatgcctcttggcactccagtttttattgagatgttctgtcgtcgagtcggcacttgcattttttgttccaggcatctttgggaaagccgcttcaccctttgctggtggttgcccccaaccagctcaaagcctggctccagcagtaccacaaccagtgccaggaggtcctgcaccacatcaggtgagcatccagggcagcctggcccgctgggctgttgcttgctgccgtctccttcagaagctcaaggtggacactggggtagttaccaatatcccccagcagccttgcccttgacatggtcccagatggcagaagcaggggagaagtgcattggctgaaggacagaaaccattagatagttcccatgtaatgcttattttcttagaagcatttcttcccagtcctcatttgagttctgagctgctttctaaacttcgagcagcttttcttgatgagacagttccagagccaagcacccaaatagtggctagcacagagaatgtccatagcaggtgtgtggctagctggcaggtggcaccatcctcaccccaaggggaaggagtcccctctgctggagccatccgtggcccgtgctgcctgagccggaggcagcattcacctgctgggtttctcccagtggcctagaggctttggtttggctctttatatttgactgctgtttcctcatcatagtgactatgatttaactcatgttttctcctaagaatgattttggggttctccagccaaagacttaaactttggttccagatgtccaagaaacgtttattatcattttaaatgttttgtctttttacagtatgattcctgccaaatgccttcaggaaggggctgagatctccagtcctgcagtggaaagattgatcagttcgctgttgcgaacatgtgatttggaagaggtaaggggcacagccgcaggcatcatgggggcgaggtggggagcagagctgcagagccctccagccccaccctttcagtttcagacctgtctggtgcggcactgcaagcatgcgtttggctgtgcgctggtgcacacctctggctggaaagtggtctattccggggacaccatgccctgcgaggctctggtccggatgggtgagtagaggaagaagcaagccaccctgaggttgctctggggtttgtgtagctggaggtgaatgcaggtgggcttgcagggaaacgtcagcagaggcaggagactcaggtccccaccctcagagtctctggttgtcatcctagtaggcagacccagggccaggggagctgagtgttgagaccaggaaacagcacgtgactgaggcctgtgtgccgctctcgcagagaactctgccctgatccttgtgctgcttctccagggaaagatgccaccctcctgatacatgaagccaccctggaagatggtttggaagaggaagcagtggaaaagacacacaggtagcaaaggccggtcagtccttgtcgcccacatcctctccctcccccactacgtgacactgagcagccgtcgtttgtctccactgatgtggggctgccctgcttcctatcaagggctatgggggcttccttgacctgtggcagtgctcacaggctcttggcctttatttttgcagaattttctaagcaagattctagagtgaggcacagttttttgaaagcatctagaaatcggctgaataaactataagccatgtcagggaattgccaggggaaggcgggggctgggggactgaatttttggctgctaatttcaacgaaagagtgcattaccccaggtgggccctgtggtttctcttgggtgccctcatggacagatttggcagccagcacagagggtgggcttcatccaggggtgtgtgcgaaggctctggccctcaggggagattgtgctggctacggaggtgcccgttaagaaaacccaccagcttccccgggtgccctggcagttgatggccagggtctgtgccactgtctgctttgcagtcttgcagttgagttcagcttcagtctgctctgtccttcacctgcagcacaacgtcccaagccatcagcgtggggatgcggatgaacgcggagttcattatgctgaaccacttcagccagcgctatgccaaggtccccctcttcagccccaacttcagcgagaaagtgggagttgcctttgaccacatgaaggtctgtatgtcacacggacagcacagggcggggacggggcagggagacaggactctacacactgagtaggacggtcagctggagtttgctttcttatttggggccaccgtgggaaaaggttatctacccatcactaaccaggtcgaaccaccctgggtttgctggtgagacccacctcctgcaggggccaactagtcttcagtctcagttcactggaaatttctgagaatccttttaggcctggactgctcacacagtcatggcatttgagcctcagcacagacctgtgagacaggtggttgcctcttgtgagtgggaaagccaggcctgacccttggccttccggaatgaaggggcagagccggagccaggcctcgtttttcaggagcttgattttgagagcatctggactgctctcccttccctctccggaggcccttagccaggcctggggagcctctgcccctttagagggttccctccatgccattcttttttccatttcagctgtggcctgttggcttgtgccaaggaaggggcgttggcgctgctgtgtgagcacatgactgcatcccttccagctcctgtcccccacccctgcccctctgagacatgtccttgtcttctattgtgtcttctaggtctgctttggagactttccaacaatgcccaagctgattcccccactgaaagccctgtttgctggcgacatcgaggagatggaggagcgcagggagaagcgggagctgcggcaggtgcgggcggccctcctgtccagggagctggcaggcggcctggaggatggggagcctcagcagaagcgggcccacacagaggagccacaggccaagaaggtcagagcccagtgaagatctgggagaccctgaactcagaaggctgtgtgtcttctgccccacgcacgcacccgtatctgccctccttgctggtagaagctgaagagcacggtcccccaggaggcagctcaggataggtggtatggagctgtgccgaggcttgggctcccacataagcactagtctatagatgcctcttaggactggtgcctggcacagccg

SEQ ID NO: 11839 - DNA, 2087 bp, Homo sapiens
aaaccatgacagtttaccagatccccatacacagtgaacagaggaggggaaagcaccaaccatggcagagtccagaaaggcctctcagcaggctcagtccagagcgatcttcagactccgagtcgaatgaaaatgagccacaccttccacatggtgttagccagagaagaggggtcagggactcttccctggtcgtagctttcatctgtaagcttcacttaaagagaggaaacttcttggtgctcaaagcaaaggagatgggcctcccagttgggacagctgccatcgctcccatcattgctgctgtcaaggacgggaaaagcatcactcatgaaggaagagagattttggctgaagagctgtgtactcctccagatcctggtgctgcttttgtggtggtagaatgtccagatgaaagcttcattcaacccatctgtgagaatgccacctttcagaggtaccagcagtggatggagaggtttgggcctgacacccagcacttggtcctgaatgagaactgtgcctcagttcacaaccttcgcagccacaagattcaaacccagctcaacctcatccacccggacatcttccccctgctcaccagtttccgctgtaagaaggagggccccaccctcagtgtgcccatggttcagggtgaatgcctcctcaagtaccagctccgtcccaggagggagtggcagagggatgccattattacttgcaatcctgaggaattcatagttgaggcgctgcagcttcccaacttccagcagagcgtgcaggagtacaggaggagtgcgcaggacggcccagccccagcagagaaaagaagtcagtacccagaaatcatcttccttggaacagggtctgccatcccgatgaagattcgaaatgtcagtgccacacttgtcaacataagccccgacacgtctctgctactggactgtggtgagggcacatttgggcagctgtgccgtcattacggagaccaggtggacagggtcctgggcaccctggctgctgtgtttgtgtcccacctgcacgcagatcaccacacgggcttgccaagtatcttgctgcagagagaacgcgccttggcatctttgggaaagccgcttcaccctttgctggtggttgcccccaaccagctcaaagcctggctccagcagtaccacaaccagtgccaggaggtcctgcaccacatcagtatgattcctgccaaatgccttcaggaaggggctgagatctccagtcctgcagtggaaagattgatcagttcgctgttgcgaacatgtgatttggaagagtttcagacctgtctggtgcggcactgcaagcatgcgtttggctgtgcgctggtgcacacctctggctggaaagtggtctattccggggacaccatgccctgcgaggctctggtccggatggggaaagatgccaccctcctgatacatgaagccaccctggaagatggtttggaagaggaagcagtggaaaagacacacagcacaacgtcccaagccatcagcgtggggatgcggatgaacgcggagttcattatgctgaaccacttcagccagcgctatgccaaggtccccctcttcagccccaacttcagcgagaaagtgggagttgcctttgaccacatgaaggtctgctttggagactttccaacaatgcccaagctgattcccccactgaaagccctgtttgctggcgacatcgaggagatggaggagcgcagggagaagcgggagctgcggcaggtgcgggcggccctcctgtccagggagctggcaggcggcctggaggatggggagcctcagcagaagcgggcccacacagaggagccacaggccaagaaggtcagagcccagtgaagatctgggagaccctgaactcagaaggctgtgtgtcttctgccccacgcacgcacccgtatctgccctccttgctggtagaagctgaagagcacggtcccccaggaggcagctcaggataggtggtatggagctgtgccgaggcttgggctcccacataagcactagtctatagatgcctcttaggactggtgcctggcacagccg

SEQ ID NO: 11840 - DNA, 14135 bp, Homo sapiens
cccgtcccgctgggccctcagtgcggcgcagcctctgagcatcggggcacctcccagggcttcggcttccctgcttcacacatgtggttcactgttgcgggggttcgtggagttatggtgggtgggaaatccgagattctttgcatccatgtgatttctgcggatctgtgaagaacttcaggcctgggtctgagcgtccttttcccaacccttgggccccggcctggctgtcagcactttcggagctccaccctcttccgtgcaccccaaggccagtgtgtcgttgttagcgtgtggggtggacagatctggtgtgtagccggtggtggagaaaggactcattttgtcctagcacccacacacacaggcccccactcctctccacctctgctaaggagggctcaaaacccaccagcataaatgtggctcggtagtccaacgtggacttttaatttttttttcttttttttttttccagagtctacaataaaacatctaattggtgtcagagagtttacagaataaaaccttctgaatgtcttgtgtaatgtttgtcttgtaggtatctcttcaactgtggagaaggcgttcagagactcatgcaggagcacaagtgagtcagtctcttgctttcggagggggagttgattacggggcttgaaagccgaaatgagaggccagttgttttttatagcaaaagtggtccttgttctgttcatgttatcctgtttaaatgttttttcattcttaggttaaaggttgctcgcctggacaacatattcctgacacgaatgcactggtctaatgttgggggcttaagtggtgagtatattctttgcagtgtcagaggctggtgggaagtctctgggattttaaccggctttaccatttttccaagtctggggtgggcagctacttttttttttttttttttttttgtcagtggcgtgatcttggctcactgcaacctttgccttctgggctcaggtgatcccctcacctcagcctcccaaatagctgggaccacacgtgtgccccatcacacctggctaattttttttgtatgttttgtagcgacggggttttgctatgttgcccaggctggtctcaaacttctgcgatcctcctgtctcggcctcccagagtgctgggattacaggcatgagccaccgcacctggcctggaattctttttataccagcccagtcagcagcagcacagagcattaaaagctgtgactcaggagaacagattttaatatggataccacctcttaagtgttaccatccacttagtttcttgcgttgcggggacagagatttgtggcagtaaactggagagtctagcagtggtgattacagttaatatgtttaccgcagacgccattggcacattggcagccacacacatacccactgtccagattaccctgtcatttatgtctatcaaccggaaggtcaggattgtgttgcagccaaattgtgtgggcttggtggcatggaccggaaggagtgaagtgttagaccagtctcccttctcagggctgagactagggtgaggcacttagggtgccagcccttcacttgcatgattccttacattttgcacactgggtgccttgctgcttcaccctagtgacagctcagcccattctagaggcatttaaagaatatttggtgtctgttacacctctagctggcatcacttctgctctgtacatcttccctggttgtacttccaaagctggaaggtggagatgtagataaatagttggattagtacggggtgctcctcctgttagtgacgacaggtcaaattgatgagagatctgattttatgcatcctttttaggaatgattcttactttaaaggaaaccgggcttccaaagtgtgtactttctggacctccacaactggtgagtctttcctgacacatctttcaaaagcaatctttccttttgtaatatcagtaacaagaattttcctttttgcaaatcagtcttctgccctccagagatacctggtcgttgaaacgcttcccctttcaagttaaaaagacttgagttctgattaactatgtgaccttgatcaagttactttacctttctgagctttagtttattcatctataagatgactatcacgtttcatagagttgttaaagattaaatgacgtagcagcacatataaagcactaaatcactttattagatatatgtttggcaccaagtaggcacacaagaaagggcagcttttgtttttattcaataaatttctgacatcttcttacctttcagtccagcttattacactcttgagaaggcgtgtgtgtgttgttgaatataacagttcattttccagtccttaagaagaaagtcaccaagacctgttaagtctttccccaaaataacgtttgaaatccatccatttgtctcttattgaggccttccttatttctgttttctatgcctgtaaactacaatagcctcccatattcattctcgccttcctgtaatccatctgccacacagcagccagagaggtcacttcaagacagaaaagtagtgtgtcacttgccaccctaaagcccttcatgggctccccattgcaatacaatcaaaacaccttgatatggcctacaagtcctgtaggccccggccgctacccacacttccatctgtacccatcgctgaactgcagctgcatgggctgactcttatgtccctctaactccctggccacttcaggactttcgcccttccgcgggttccctctgcctcttctaattgctgcctatattgttactgaaccttcagggctcagctagagggtcatttactccagaactgcctcttcttctctagacaagttggatcccagccttctgtatttttcattttccttgcagagcacttagcataatgccactaagctgtttctgttatcgtgtttccttttgtctcctccactggcctgattagagcaaggcctccatctctttttcctgctatatccttggcatctgatataatggatactcagtaaatatttgtaataaatgatgttcaaaatatttactaagctttgttttatgttgatacctattggtaaccttttaaatacttgaatagttgctgtgttctacatttgttcaaccataactgctcatttctttgtttttcattaggaaaaatacctcgaagcaatcaaaatattttctggtccattgaaaggaatagaactgggtacgtctttgtctgtgactcatcctctgctatttctaacttatatatgccctgacctctcaaattagaatccattaaaaacatcaacatcaaacctcaaaatcaaatgcttcatcaccacgagatttttttttttttttttttttttggatagagtcttgctttcttaccaggctggagtgcagtggcatgatctcggctcactgcaacctccacctcctgggttcaagccattctcccacctcagcctcctgagtagctaggactacaggcgcatgccatcacgctcagctaattttttgtatttttagtagagacggggtttcaccatgttggccaggatagtctcgatctcttgaccttgtgatctgcccgcctcagcctcccaaaatgagctaccatgtggctggagatgggatttctaaatagtgacattttctgtgttcccacctcatgctgtaaaaataggggccaggtcggcaggagtgattgaacagctgatgcctgcctgtgtacatgctgtgtggcattctccatccagacggcagggctcctgcctcagttccagaggtgcttctcgtcgttgagttgctttgagttgggggcgggggtgacaagggttccctagaggttttgtggccaactttgtacattgaaacgcagctccagctgcgcaggggggcttacagcctcttgatgggaagaggcctcactgaggatgctagtagggctcttgtcctggcactggtgtgtatctgtggcttgttaatactcctcttttatagaaacactaatactttgtttcaaaatatacatcagctcttctggtttgcgatgataggttccctggcttcactattctgtttgttaacttgggtctctgaaagttgagtactagtttcttgtttttcaatttttaacggatagtcaccaaagattataatgtcttttcatctggctgtagtaaatataaatggctgaccaaaatacacttttatttatttcctaaaaatggtaatctccttagaaagtctggttttcgtgtcagattcccaccataattctgaggcaattcagttgctcgtggttggtgatcctgaagttactcttcccacacatcttcactaatgcaatcactttgctgttgtgtggttttcttgtagctgtgcggccccactctgccccagaatacgaggatgaaaccatgacagtttaccagatccccatacacagtgagtatgaaagccaggtttcccaggaggagggtgtacgtcctgagtaaagaaaacatggatgaaaatagaaactgaacacttgctgtgggcaccctgttttgtgttctgagcatgattagaaaatttagttgaggaatgaagatatggctcctgccctggcttataaacttacggatgtctgacttatgcctaatgatagtgattatgctttggaatattagataatcaagcactgttggtaaatagattgcattcaagtttgcacattcattgcttggaggttttttcccacaggcgtaataccctcttttgatcagacgatcatgaagaggtttgcacagatagatttttttaaataaataatgattacagcaacctaaaagaagtgttgttgggggttagaagctcctgcaaattccgaagtatcagggccagatgatgtggtcttagcttaggaaaagagttagtcttgtccttgaacttggctaaagacattcatgtctggttttacttacatgtgaagagagtaccaagcagtaggggtatttccttgttagtactaactaatgtgatgcttactaagtagtgctgatgggtgacagaccagagcacccagcaaaggccagagaagtccagaacctggcgaggagatgaggcttacactgactgaaggcagaaggcagcagggaggagaggaatgtgccggagcaatggcacaagtgctcctaggccagtgctgtgatgagctgatcagcactcccattgcctggcttgctcctcctgctcagatgccttctctcacctgacccctgctgtagccacccccagcctgagttgcatccacctgtttgttgtccatttccagcaccctgttcttcgctccatggcatgtgacagttaactttcatatgtgatttgcgtgatcgatgttaacatgctcagttttgccgatcactgttttttcagtgtccagcggccctcagtgagtgaacttacgttcattctcgttgcagctgtgctttagcttcttagagcagcgaatttttttcccttgatcttgagccttaactaaatgtaaaatgaggctccttcttgagataggtaccctttgggtctatgtgttttagcgggagtgatgataataaataagcatgtctacaacccacatgctgtttagataacacgttgttgagttggtactgtggccgaggctgtgagctaagcagaaacataaacattaataggacataggtgcagcccagaaaccaggtaggaagttaactaactagttatttcctactgtatagtaaaaggtgtgctgatttaattggcgttctggcattcccatgtatgaacgtctgggccttggctgtcagctcaccttgtgcagtgtgtaatttggtggtatctgtactgaccaggtgaacagaggaggggaaagcaccaaccatggcagagtccagaaaggcctctcagcaggctcagtccagagcgatcttcagactccgagtcgaatgaaaatgagccacaccttccacatggtaatagtataaacaaaacagagcagcagaaaggcttgcgttttcttaattctctgccttgtaatgcttgtagagagtcattattgtaagaaagccaggtgtgtaaacagatccttcttcctgggcttactataacttggcccgttgggggaatgagaagggttgttgtaaaggtggcagcctgcaactttaataatgaccagtccacagttttggccacccagggtctgggtaggcccaaaactgtgttctgttttcccagaggagaacagggcctgacaaacggattcattttgtatttttcattaatgtaacatttatgcaaattttccattaatgtggaaactataactgctaagccaatgagacagtcaaatcagtgagaggctctgcacgtcttccagaatgacagcccactgggaaacggagttaaaagtccaagatgagatgtagctcaggagtcaggccgcttcgggagtttgttgtccttaacagaaggtcagcgttggcaaagctcggcagctcctctttctgtcctgaggtcttgtctagtgactgagaacaggctgacccctatgtgctgtccttgtttggatggcaccgggtaaagactgacaccagcattttctctgcaggcctttgaacttttgtgttatttcatatattatatgtgttataaagcacattacaatatatttttctctgtcttctccagtcctaggtgaaatgtgtcatttaaaaaaaatttcacttgccattctaaagtttttctggtgagagttttgtgtttttcatttacgcaaacacatctccacataagtagggaaaaaaagtcttcttgagtatattagtgtcttcagcctttgtattgggacagtagcgtccattaatttttatgtgaagtgaaattaggtatcgggtcataatcagtctgtgatgtcttcacagctttcacatttaccttgtgataatcaagtgtgtttttcctcaggtgttagccagagaagaggggtcagggactcttccctggtcgtagctttcatctgtaaggtaaggaagactttccggagggctgtacatgactggggtcttggtcagcgacctctggtttgcactttttcattaatttgagggtaggcactcctgttacctgagacaagaagagatagcagatcttcagaaaagctgatggaaggccgggtgcagtggctcacgcctgtaatcccagcactttgggagtccaaggcaggtggatcacgaggtcaggagtttgagaacagcctgaccaacgtggtgaaaccctgtctgtactaaaaatacaaaaattagctgggtgtggtggcgcatgcctgtaatcccagctacttgagaggccaaggcaagagaatcgcttgaacacaggaggcggaggttgcagtgagttgagattgcaccattgcactccagcctgggtgacagagcaagactctctcaaagaaaaaaaaaattcgatagaaatgacactggcaatgagcctgcaacaagtattactactgacctttcataattgtcatcacttgtaggtttcagagtttagatgctctgtttctcaaaataaccccatacttttatttccttttaaatttttttccagtgccctgtcagcctccgtacattttttttttttttttttgagaccatgtctgtctccatcgcctaggctggagtgtgcagtggcacaatctcggctcactgcagcctccacctcccaggttcaagtgattctcctgcctcagcctcccaagtagctaggattataggtgcgcgccaccacacccagttaatttttgtatttttagtagagatggggtttcaccatgttggccaggctggtttcactcctgacctcaggtgatccacccaccttggcctcccaaaatgctgggattacaggcgtgaagcactgtgcctggtccatattcttttatatttgccaatgattggtccttttagaattcagaaattattgaaggcagctgtgtttgttttccttcaactccatcaggcctttattcaaagtcttttaactctgttttactttatttcattcccctgcaatagctaaggtctaacaccagattaattggaatattagctagcattcacaaaggcctagatctgtaactctgaaattggtcaaattccattaaaaatttttgttacaataagctgtttgtaagatctgactagtggcttatttttaatagaattttgcattaaaattttatcaatacaatttgcaacaaatttgtctaaatatgtgaaaagatttcattgcctttttgtgggcttagattattttttaatgttgattttgaaatatatttggaattgttatctaaattctaaaagctacaagtgaaaataataatgaaagtaagtagttaatattagtggcaagatcattgccagtatcatttctatcgatttatttgaataatgtgattttcataaaagttaagtactactgttaacaggcttattacttgtatgtttctgagttttagatagcaaaatcattttttaaagttttaaaaatattttatttttgataatctatatttatattgtctgatttttaaactgttttctatggtaatctttaaatcgtattcctgctttccggaataggtaacagtgagcatgatgaaaagtgacaagctcacttttacacactcgggcagttgccctattatcaggcagccgttcctgggggctgccagctgcctgccctggcttttccatctccttccttgctgtcttctgcggctccttctgagggctgctgtcactggattagcctataacgcctttcccctcttctaattaatttgctgctctcaggtgaggttttggaaagcaataaagctgagctaggtcaagttccaggagtctcttggcatgaggacctgaaaaactcatctgttggaagacctcggctttgggcagctggtgcactgttggggcgttattggctgcgttctggctctcatcagtcttccagatactctgcattcctcagagaggaacatatctccatgggttgagttcagctcccagggagatgggtttccctgccttaagtcggcaagtacctttttttttctttttttgagacagagtctcgctctgtcaccaggctggagtgcagtggtgcgatcttggctcactgcaacctctgcctcccagggtcaagcagttctcctgcctcagcctcccgagtagctgggactacaggagcgcaccaccatgcccagctaatttttgtatttttttagtagagacggggtttcaccatgttggccaggatggtctggatctcttgatttcctgatccgcctgccttggcctcccaaagtgctgggattacaggcgtgagccatcatgaccagcctttatgtttctttgtttgttttgtttttctgagatggagtctcgctctgttgcccaggctggagtgcagtgttgccatctcgacttactgcaacctctgccttccaggttcaagtgattccttgcctcagcctcccgtgtagctgggatcacaggtgcctgccaccatgcccggctaatttttgtattgttagtagacacagggtttcgccatgttggccaggctagtctcgaactcctgacctcaagtgatctgccttcctcagcctcctaaagtgctggggttacaggagtgaaccaccatgcccagccttcaattaccttttatttattttatttatttatttatttttgagacggagtctttctgtgttgcccaggctggagtgcggtggcgcaatcttagctcactgcaacctcctcctcccaggctcaagtgattctcatgcatcagcttcccgagtagctgggacttcaggtgcccgccaccacacttggctaatttttgtgtttttagtagagacggggtttcaccatgttggccaggctggtcttgaatttctgacctcaaatgatcctcctgcttcagcctcccaaagtgctgggattacaggcgtgagccactgcccccaacagcaagtaccttttaaacattagagacatttagttgccatcctcaaacccgtttgggtgtgtggagagaatgttgggtcgtgacatggttgttagttatctaaagatgtcagccatcaatcatcactgtgtgatgtgcacactgaagctgtaatccttcatctaggatgatattttttaagatggaaaattctacaaccctgagaataaggatttcagatccaaatttgagactcagccctacgagtaactctttaacttcagagagttaaaagaagatgcacagttgatgaagatttaaaggagaaaatggaaatcaaatgtcatttagcactcaaaggcctacatgtcatttctgacatttttctgtttgtgtgaaattttttttttcctataaaatgattgtgaagttttctggtagaattattgtttgcctttctaatgtaatagcatattagggtttttttttttttctttttctttttttgagacagagtctcactctgtcgcccaggctggagtgcagtggcacgatctcgggtcactgcaatcttccgcctcctgggttcctgcctcagcctcccgagtagctgggactacaggcgcacgtcaccacacccggctaattttttgtatttttagtagtgacagggattcaccgtcttagccagggtggtcttgatctcctgacctcatgatctacccgcctcggcttcccaaagtgctgggattacaggcatgagccgctgtgcctggctattagagattttttattataatttatctccaagataaaagcagtgacattatattgccacataattgaaaaatacaagagaaataaaaatcatccatgcttttgttagcctatcactgtcattgaaatattatgttacatggcagtttgcttgctggttgctctgttaggcaacgctctggtgacattcctttagctattaattgaggaatgtagaatgacagaacagtgtttctcctcaatgatacttgaaggatatttattaactttcatattgaattacattttattaaatttataatgagttaatgctgggaaataaaacactgatttaagtcattttggcttttagtactaaagcatttgacaataaatgacttcttcagaatatggtataccttctgaaagcaataaacgcattttaatgaattgtaaggaaacaacatcattttattttttatttttttttttgagacagactttcgcttttgttgcctaggctggagtgcaatggcgcgatctcggctcactgcaacatccgcctctgggttcaagcgattctcctgcctcagcttcctgagttgctgggattacaggcacgtgccaccacgcctggccaattttgtatttttagtagagacggggtttctccacgttggtcaggctggtctcaaactcctgacctcaggtgatctgcccgcctcagcctccgaaagtactggaattacaggcgtgagccaccgtgcctggccaacattattatttttttttaatctagaaaaatacacttctaagaaaattgattaaaaccaaccttcttcattagcccctaagatcacatctatgttctctttgttgcagcttcacttaaagagaggaaacttcttggtgctcaaagcaaaggagatgggcctcccagtgtgagtgtggggggtaaggcttctggggactcactgggtacacctgtccacttaaggaaatcacatttcacagaggccttgcctcttcatttcagtgggacagctgccatcgctcccatcattgctgctgtcaaggacgggaaaagcatcactcatgaaggaagagaggtgagatgcctggttttcttgattcagcagttacaggtagggtctgaaatgctgggcagagtctgtcttcttcaggccctacagacaccacttttgaaggacgtggaacagtttggacatcactcagctaagtgataaaatggcctcttttatctgtgtttgtcccgcatgtcaacacggctgcattcgagcatttttgtagattgtccatttaggatctagtcaccgtcctccttaaagggtgcatgctttccttggtacttgagctcaggacagtgtctaacaacagaccccatatggatgggcctggggtttatggtccagaggaatgccacagtattctatgtcaagatatttcctctgacttctgaggacattaggaccagtggccacagactgaagaaaaccttaatgccaagcctcctttcctggccagtgtaggcctgaagtgcctcaacctgacagttacctgtttaggtatccacaaagagaccagaagggtgttgatggtgatgtgtaaagttggttttgtgctttgtttacctctcagctcactggataggatatgtcatgttagcagttgccttgaaggcagttcagtttggtggctgagctgtgacccccagtgggcgggcttatttggttttgcagattttggctgaagagctgtgtactcctccagatcctggtgctgcttttgtggtggtagaatgtccagatgaaagcttcattcaacccatctgtgagaatgccacctttcagaggtaatgaggggtctctagggtgggagaagtgagagctgaaacccagcccagcatcgacatgggcatcttgtggcaagagctgtgtttctgggaagaccactatctgggtttacagttcagaggccggcactcctgccttaagtcactgttggtagttggtgggctccggtgtacacagcctcaaagtgaaattagaaaagattgaaaactagaaacaactgaggactagaaattcaactagaactcttacagctcttataccagaagaaattctagaacttttttgaattctaactaatgccccagattatcatttggattattttgaactgaattaattttcttccattacctgcattgaaacaaatgaggtgggtcagagtgtgtgagactgtcgtggtcaagagtccgtgttatgggatggactcacagctggggaatgtcttttgggctaactgccactctgttgttgtcctctatcgaagttaaccagttttgcggttcagctttcattccagatggaatcatctttgacccacctatctgagtttgaatcttttcccccactcttaatggtttacctgtatttttcctgttcctagtttgtatctatctgtattttttcacttgtttttttctacttaccacaacaaatccttttgggctgctgtaccccttccgagtcagagcgttaggagttgtttcatggtctgctttattctctgtgggtgaatttggatgcgctggtagccccggctttgtattttaatccagttttgggcagcaaaacctcttcaatgaatcaggtgtcatttgagagccatgtgtggatgtgtgatgatgctgggatagataaaaatagctactgtgtatatttctttttaaagggaactggagggaaacacatcagcatgttagtaagtggtctgttgtccaggtggtgaaatttcagatgattttcatttctcgtgcctgtgtctcaggtcctctggaaggcagacaccagggtggcattggaggtgcaggaggtttattcgaggaaatttgactgtgagagaggaaggagagagggagcaggaggaggcagggagagcctgggtctggctttgcaggttggacccgtatgagtggagagggtaggaaggaagtgcagtgctgagaaaggatcagccaggcctactggaaagcccagagcagagcttgccagatacaggaatcccacgtccattggaaatggcccagcaccggggtctgccgtgagcagcctgctgtgagagcatggcctgggcgtggaggctgtcagctcactgcagtgctgcagagggccgcacgatacccctccctggctgcgtggtccctgtcttggtgtgtcctgagtctgcatcactttgtaaagccccactcttctgcccaggtaccaaggaaaggcagatgcccccg

SEQ ID NO: 11841 - DNA, 866 bp, Homo sapiens
cccgtcccgctgggccctcagtgcggcgcagcctctgagcatcggggcacctcccagggcttcggcttccctgcttcacacatgtggttcactgttgcgggggtatctcttcaactgtggagaaggcgttcagagactcatgcaggagcacaagttaaaggttgctcgcctggacaacatattcctgacacgaatgcactggtctaatgttgggggcttaagtggaatgattcttactttaaaggaaaccgggcttccaaagtgtgtactttctggacctccacaactggaaaaatacctcgaagcaatcaaaatattttctggtccattgaaaggaatagaactggctgtgcggccccactctgccccagaatacgaggatgaaaccatgacagtttaccagatccccatacacagtgaacagaggaggggaaagcaccaaccatggcagagtccagaaaggcctctcagcaggctcagtccagagcgatcttcagactccgagtcgaatgaaaatgagccacaccttccacatggtgttagccagagaagaggggtcagggactcttccctggtcgtagctttcatctgtaagcttcacttaaagagaggaaacttcttggtgctcaaagcaaaggagatgggcctcccagttgggacagctgccatcgctcccatcattgctgctgtcaaggacgggaaaagcatcactcatgaaggaagagagattttggctgaagagctgtgtactcctccagatcctggtgctgcttttgtggtggtagaatgtccagatgaaagcttcattcaacccatctgtgagaatgccacctttcagaggtaccaaggaaaggcagatgcccccg

SEQ ID NO: 11842 - DNA, 14110 bp, Homo sapiens
ccctgcttcacacatgtggttcactgttgcgggggttcgtggagttatggtgggtgggaaatccgagattctttgcatccatgtgatttctgcggatctgtgaagaacttcaggcctgggtctgagcgtccttttcccaacccttgggccccggcctggctgtcagcactttcggagctccaccctcttccgtgcaccccaaggccagtgtgtcgttgttagcgtgtggggtggacagatctggtgtgtagccggtggtggagaaaggactcattttgtcctagcacccacacacacaggcccccactcctctccacctctgctaaggagggctcaaaacccaccagcataaatgtggctcggtagtccaacgtggacttttaatttttttttcttttttttttttccagagtctacaataaaacatctaattggtgtcagagagtttacagaataaaaccttctgaatgtcttgtgtaatgtttgtcttgtaggtatctcttcaactgtggagaaggcgttcagagactcatgcaggagcacaagtgagtcagtctcttgctttcggagggggagttgattacggggcttgaaagccgaaatgagaggccagttgttttttatagcaaaagtggtccttgttctgttcatgttatcctgtttaaatgttttttcattcttaggttaaaggttgctcgcctggacaacatattcctgacacgaatgcactggtctaatgttgggggcttaagtggtgagtatattctttgcagtgtcagaggctggtgggaagtctctgggattttaaccggctttaccatttttccaagtctggggtgggcagctacttttttttttttttttttttttgtcagtggcgtgatcttggctcactgcaacctttgccttctgggctcaggtgatcccctcacctcagcctcccaaatagctgggaccacacgtgtgccccatcacacctggctaattttttttgtatgttttgtagcgacggggttttgctatgttgcccaggctggtctcaaacttctgcgatcctcctgtctcggcctcccagagtgctgggattacaggcatgagccaccgcacctggcctggaattctttttataccagcccagtcagcagcagcacagagcattaaaagctgtgactcaggagaacagattttaatatggataccacctcttaagtgttaccatccacttagtttcttgcgttgcggggacagagatttgtggcagtaaactggagagtctagcagtggtgattacagttaatatgtttaccgcagacgccattggcacattggcagccacacacatacccactgtccagattaccctgtcatttatgtctatcaaccggaaggtcaggattgtgttgcagccaaattgtgtgggcttggtggcatggaccggaaggagtgaagtgttagaccagtctcccttctcagggctgagactagggtgaggcacttagggtgccagcccttcacttgcatgattccttacattttgcacactgggtgccttgctgcttcaccctagtgacagctcagcccattctagaggcatttaaagaatatttggtgtctgttacacctctagctggcatcacttctgctctgtacatcttccctggttgtacttccaaagctggaaggtggagatgtagataaatagttggattagtacggggtgctcctcctgttagtgacgacaggtcaaattgatgagagatctgattttatgcatcctttttaggaatgattcttactttaaaggaaaccgggcttccaaagtgtgtactttctggacctccacaactggtgagtctttcctgacacatctttcaaaagcaatctttccttttgtaatatcagtaacaagaattttcctttttgcaaatcagtcttctgccctccagagatacctggtcgttgaaacgcttcccctttcaagttaaaaagacttgagttctgattaactatgtgaccttgatcaagttactttacctttctgagctttagtttattcatctataagatgactatcacgtttcatagagttgttaaagattaaatgacgtagcagcacatataaagcactaaatcactttattagatatatgtttggcaccaagtaggcacacaagaaagggcagcttttgtttttattcaataaatttctgacatcttcttacctttcagtccagcttattacactcttgagaaggcgtgtgtgtgttgttgaatataacagttcattttccagtccttaagaagaaagtcaccaagacctgttaagtctttccccaaaataacgtttgaaatccatccatttgtctcttattgaggccttccttatttctgttttctatgcctgtaaactacaatagcctcccatattcattctcgccttcctgtaatccatctgccacacagcagccagagaggtcacttcaagacagaaaagtagtgtgtcacttgccaccctaaagcccttcatgggctccccattgcaatacaatcaaaacaccttgatatggcctacaagtcctgtaggccccggccgctacccacacttccatctgtacccatcgctgaactgcagctgcatgggctgactcttatgtccctctaactccctggccacttcaggactttcgcccttccgcgggttccctctgcctcttctaattgctgcctatattgttactgaaccttcagggctcagctagagggtcatttactccagaactgcctcttcttctctagacaagttggatcccagccttctgtatttttcattttccttgcagagcacttagcataatgccactaagctgtttctgttatcgtgtttccttttgtctcctccactggcctgattagagcaaggcctccatctctttttcctgctatatccttggcatctgatataatggatactcagtaaatatttgtaataaatgatgttcaaaatatttactaagctttgttttatgttgatacctattggtaaccttttaaatacttgaatagttgctgtgttctacatttgttcaaccataactgctcatttctttgtttttcattaggaaaaatacctcgaagcaatcaaaatattttctggtccattgaaaggaatagaactgggtacgtctttgtctgtgactcatcctctgctatttctaacttatatatgccctgacctctcaaattagaatccattaaaaacatcaacatcaaacctcaaaatcaaatgcttcatcaccacgagatttttttttttttttttttttttggatagagtcttgctttcttaccaggctggagtgcagtggcatgatctcggctcactgcaacctccacctcctgggttcaagccattctcccacctcagcctcctgagtagctaggactacaggcgcatgccatcacgctcagctaattttttgtatttttagtagagacggggtttcaccatgttggccaggatagtctcgatctcttgaccttgtgatctgcccgcctcagcctcccaaaatgagctaccatgtggctggagatgggatttctaaatagtgacattttctgtgttcccacctcatgctgtaaaaataggggccaggtcggcaggagtgattgaacagctgatgcctgcctgtgtacatgctgtgtggcattctccatccagacggcagggctcctgcctcagttccagaggtgcttctcgtcgttgagttgctttgagttgggggcgggggtgacaagggttccctagaggttttgtggccaactttgtacattgaaacgcagctccagctgcgcaggggggcttacagcctcttgatgggaagaggcctcactgaggatgctagtagggctcttgtcctggcactggtgtgtatctgtggcttgttaatactcctcttttatagaaacactaatactttgtttcaaaatatacatcagctcttctggtttgcgatgataggttccctggcttcactattctgtttgttaacttgggtctctgaaagttgagtactagtttcttgtttttcaatttttaacggatagtcaccaaagattataatgtcttttcatctggctgtagtaaatataaatggctgaccaaaatacacttttatttatttcctaaaaatggtaatctccttagaaagtctggttttcgtgtcagattcccaccataattctgaggcaattcagttgctcgtggttggtgatcctgaagttactcttcccacacatcttcactaatgcaatcactttgctgttgtgtggttttcttgtagctgtgcggccccactctgccccagaatacgaggatgaaaccatgacagtttaccagatccccatacacagtgagtatgaaagccaggtttcccaggaggagggtgtacgtcctgagtaaagaaaacatggatgaaaatagaaactgaacacttgctgtgggcaccctgttttgtgttctgagcatgattagaaaatttagttgaggaatgaagatatggctcctgccctggcttataaacttacggatgtctgacttatgcctaatgatagtgattatgctttggaatattagataatcaagcactgttggtaaatagattgcattcaagtttgcacattcattgcttggaggttttttcccacaggcgtaataccctcttttgatcagacgatcatgaagaggtttgcacagatagatttttttaaataaataatgattacagcaacctaaaagaagtgttgttgggggttagaagctcctgcaaattccgaagtatcagggccagatgatgtggtcttagcttaggaaaagagttagtcttgtccttgaacttggctaaagacattcatgtctggttttacttacatgtgaagagagtaccaagcagtaggggtatttccttgttagtactaactaatgtgatgcttactaagtagtgctgatgggtgacagaccagagcacccagcaaaggccagagaagtccagaacctggcgaggagatgaggcttacactgactgaaggcagaaggcagcagggaggagaggaatgtgccggagcaatggcacaagtgctcctaggccagtgctgtgatgagctgatcagcactcccattgcctggcttgctcctcctgctcagatgccttctctcacctgacccctgctgtagccacccccagcctgagttgcatccacctgtttgttgtccatttccagcaccctgttcttcgctccatggcatgtgacagttaactttcatatgtgatttgcgtgatcgatgttaacatgctcagttttgccgatcactgttttttcagtgtccagcggccctcagtgagtgaacttacgttcattctcgttgcagctgtgctttagcttcttagagcagcgaatttttttcccttgatcttgagccttaactaaatgtaaaatgaggctccttcttgagataggtaccctttgggtctatgtgttttagcgggagtgatgataataaataagcatgtctacaacccacatgctgtttagataacacgttgttgagttggtactgtggccgaggctgtgagctaagcagaaacataaacattaataggacataggtgcagcccagaaaccaggtaggaagttaactaactagttatttcctactgtatagtaaaaggtgtgctgatttaattggcgttctggcattcccatgtatgaacgtctgggccttggctgtcagctcaccttgtgcagtgtgtaatttggtggtatctgtactgaccaggtgaacagaggaggggaaagcaccaaccatggcagagtccagaaaggcctctcagcaggctcagtccagagcgatcttcagactccgagtcgaatgaaaatgagccacaccttccacatggtaatagtataaacaaaacagagcagcagaaaggcttgcgttttcttaattctctgccttgtaatgcttgtagagagtcattattgtaagaaagccaggtgtgtaaacagatccttcttcctgggcttactataacttggcccgttgggggaatgagaagggttgttgtaaaggtggcagcctgcaactttaataatgaccagtccacagttttggccacccagggtctgggtaggcccaaaactgtgttctgttttcccagaggagaacagggcctgacaaacggattcattttgtatttttcattaatgtaacatttatgcaaattttccattaatgtggaaactataactgctaagccaatgagacagtcaaatcagtgagaggctctgcacgtcttccagaatgacagcccactgggaaacggagttaaaagtccaagatgagatgtagctcaggagtcaggccgcttcgggagtttgttgtccttaacagaaggtcagcgttggcaaagctcggcagctcctctttctgtcctgaggtcttgtctagtgactgagaacaggctgacccctatgtgctgtccttgtttggatggcaccgggtaaagactgacaccagcattttctctgcaggcctttgaacttttgtgttatttcatatattatatgtgttataaagcacattacaatatatttttctctgtcttctccagtcctaggtgaaatgtgtcatttaaaaaaaatttcacttgccattctaaagtttttctggtgagagttttgtgtttttcatttacgcaaacacatctccacataagtagggaaaaaaagtcttcttgagtatattagtgtcttcagcctttgtattgggacagtagcgtccattaatttttatgtgaagtgaaattaggtatcgggtcataatcagtctgtgatgtcttcacagctttcacatttaccttgtgataatcaagtgtgtttttcctcaggtgttagccagagaagaggggtcagggactcttccctggtcgtagctttcatctgtaaggtaaggaagactttccggagggctgtacatgactggggtcttggtcagcgacctctggtttgcactttttcattaatttgagggtaggcactcctgttacctgagacaagaagagatagcagatcttcagaaaagctgatggaaggccgggtgcagtggctcacgcctgtaatcccagcactttgggagtccaaggcaggtggatcacgaggtcaggagtttgagaacagcctgaccaacgtggtgaaaccctgtctgtactaaaaatacaaaaattagctgggtgtggtggcgcatgcctgtaatcccagctacttgagaggccaaggcaagagaatcgcttgaacacaggaggcggaggttgcagtgagttgagattgcaccattgcactccagcctgggtgacagagcaagactctctcaaagaaaaaaaaaattcgatagaaatgacactggcaatgagcctgcaacaagtattactactgacctttcataattgtcatcacttgtaggtttcagagtttagatgctctgtttctcaaaataaccccatacttttatttccttttaaatttttttccagtgccctgtcagcctccgtacattttttttttttttttttgagaccatgtctgtctccatcgcctaggctggagtgtgcagtggcacaatctcggctcactgcagcctccacctcccaggttcaagtgattctcctgcctcagcctcccaagtagctaggattataggtgcgcgccaccacacccagttaatttttgtatttttagtagagatggggtttcaccatgttggccaggctggtttcactcctgacctcaggtgatccacccaccttggcctcccaaaatgctgggattacaggcgtgaagcactgtgcctggtccatattcttttatatttgccaatgattggtccttttagaattcagaaattattgaaggcagctgtgtttgttttccttcaactccatcaggcctttattcaaagtcttttaactctgttttactttatttcattcccctgcaatagctaaggtctaacaccagattaattggaatattagctagcattcacaaaggcctagatctgtaactctgaaattggtcaaattccattaaaaatttttgttacaataagctgtttgtaagatctgactagtggcttatttttaatagaattttgcattaaaattttatcaatacaatttgcaacaaatttgtctaaatatgtgaaaagatttcattgcctttttgtgggcttagattattttttaatgttgattttgaaatatatttggaattgttatctaaattctaaaagctacaagtgaaaataataatgaaagtaagtagttaatattagtggcaagatcattgccagtatcatttctatcgatttatttgaataatgtgattttcataaaagttaagtactactgttaacaggcttattacttgtatgtttctgagttttagatagcaaaatcattttttaaagttttaaaaatattttatttttgataatctatatttatattgtctgatttttaaactgttttctatggtaatctttaaatcgtattcctgctttccggaataggtaacagtgagcatgatgaaaagtgacaagctcacttttacacactcgggcagttgccctattatcaggcagccgttcctgggggctgccagctgcctgccctggcttttccatctccttccttgctgtcttctgcggctccttctgagggctgctgtcactggattagcctataacgcctttcccctcttctaattaatttgctgctctcaggtgaggttttggaaagcaataaagctgagctaggtcaagttccaggagtctcttggcatgaggacctgaaaaactcatctgttggaagacctcggctttgggcagctggtgcactgttggggcgttattggctgcgttctggctctcatcagtcttccagatactctgcattcctcagagaggaacatatctccatgggttgagttcagctcccagggagatgggtttccctgccttaagtcggcaagtacctttttttttctttttttgagacagagtctcgctctgtcaccaggctggagtgcagtggtgcgatcttggctcactgcaacctctgcctcccagggtcaagcagttctcctgcctcagcctcccgagtagctgggactacaggagcgcaccaccatgcccagctaatttttgtatttttttagtagagacggggtttcaccatgttggccaggatggtctggatctcttgatttcctgatccgcctgccttggcctcccaaagtgctgggattacaggcgtgagccatcatgaccagcctttatgtttctttgtttgttttgtttttctgagatggagtctcgctctgttgcccaggctggagtgcagtgttgccatctcgacttactgcaacctctgccttccaggttcaagtgattccttgcctcagcctcccgtgtagctgggatcacaggtgcctgccaccatgcccggctaatttttgtattgttagtagacacagggtttcgccatgttggccaggctagtctcgaactcctgacctcaagtgatctgccttcctcagcctcctaaagtgctggggttacaggagtgaaccaccatgcccagccttcaattaccttttatttattttatttatttatttatttttgagacggagtctttctgtgttgcccaggctggagtgcggtggcgcaatcttagctcactgcaacctcctcctcccaggctcaagtgattctcatgcatcagcttcccgagtagctgggacttcaggtgcccgccaccacacttggctaatttttgtgtttttagtagagacggggtttcaccatgttggccaggctggtcttgaatttctgacctcaaatgatcctcctgcttcagcctcccaaagtgctgggattacaggcgtgagccactgcccccaacagcaagtaccttttaaacattagagacatttagttgccatcctcaaacccgtttgggtgtgtggagagaatgttgggtcgtgacatggttgttagttatctaaagatgtcagccatcaatcatcactgtgtgatgtgcacactgaagctgtaatccttcatctaggatgatattttttaagatggaaaattctacaaccctgagaataaggatttcagatccaaatttgagactcagccctacgagtaactctttaacttcagagagttaaaagaagatgcacagttgatgaagatttaaaggagaaaatggaaatcaaatgtcatttagcactcaaaggcctacatgtcatttctgacatttttctgtttgtgtgaaattttttttttcctataaaatgattgtgaagttttctggtagaattattgtttgcctttctaatgtaatagcatattagggtttttttttttttctttttctttttttgagacagagtctcactctgtcgcccaggctggagtgcagtggcacgatctcgggtcactgcaatcttccgcctcctgggttcctgcctcagcctcccgagtagctgggactacaggcgcacgtcaccacacccggctaattttttgtatttttagtagtgacagggattcaccgtcttagccagggtggtcttgatctcctgacctcatgatctacccgcctcggcttcccaaagtgctgggattacaggcatgagccgctgtgcctggctattagagattttttattataatttatctccaagataaaagcagtgacattatattgccacataattgaaaaatacaagagaaataaaaatcatccatgcttttgttagcctatcactgtcattgaaatattatgttacatggcagtttgcttgctggttgctctgttaggcaacgctctggtgacattcctttagctattaattgaggaatgtagaatgacagaacagtgtttctcctcaatgatacttgaaggatatttattaactttcatattgaattacattttattaaatttataatgagttaatgctgggaaataaaacactgatttaagtcattttggcttttagtactaaagcatttgacaataaatgacttcttcagaatatggtataccttctgaaagcaataaacgcattttaatgaattgtaaggaaacaacatcattttattttttatttttttttttgagacagactttcgcttttgttgcctaggctggagtgcaatggcgcgatctcggctcactgcaacatccgcctctgggttcaagcgattctcctgcctcagcttcctgagttgctgggattacaggcacgtgccaccacgcctggccaattttgtatttttagtagagacggggtttctccacgttggtcaggctggtctcaaactcctgacctcaggtgatctgcccgcctcagcctccgaaagtactggaattacaggcgtgagccaccgtgcctggccaacattattatttttttttaatctagaaaaatacacttctaagaaaattgattaaaaccaaccttcttcattagcccctaagatcacatctatgttctctttgttgcagcttcacttaaagagaggaaacttcttggtgctcaaagcaaaggagatgggcctcccagtgtgagtgtggggggtaaggcttctggggactcactgggtacacctgtccacttaaggaaatcacatttcacagaggccttgcctcttcatttcagtgggacagctgccatcgctcccatcattgctgctgtcaaggacgggaaaagcatcactcatgaaggaagagaggtgagatgcctggttttcttgattcagcagttacaggtagggtctgaaatgctgggcagagtctgtcttcttcaggccctacagacaccacttttgaaggacgtggaacagtttggacatcactcagctaagtgataaaatggcctcttttatctgtgtttgtcccgcatgtcaacacggctgcattcgagcatttttgtagattgtccatttaggatctagtcaccgtcctccttaaagggtgcatgctttccttggtacttgagctcaggacagtgtctaacaacagaccccatatggatgggcctggggtttatggtccagaggaatgccacagtattctatgtcaagatatttcctctgacttctgaggacattaggaccagtggccacagactgaagaaaaccttaatgccaagcctcctttcctggccagtgtaggcctgaagtgcctcaacctgacagttacctgtttaggtatccacaaagagaccagaagggtgttgatggtgatgtgtaaagttggttttgtgctttgtttacctctcagctcactggataggatatgtcatgttagcagttgccttgaaggcagttcagtttggtggctgagctgtgacccccagtgggcgggcttatttggttttgcagattttggctgaagagctgtgtactcctccagatcctggtgctgcttttgtggtggtagaatgtccagatgaaagcttcattcaacccatctgtgagaatgccacctttcagaggtaatgaggggtctctagggtgggagaagtgagagctgaaacccagcccagcatcgacatgggcatcttgtggcaagagctgtgtttctgggaagaccactatctgggtttacagttcagaggccggcactcctgccttaagtcactgttggtagttggtgggctccggtgtacacagcctcaaagtgaaattagaaaagattgaaaactagaaacaactgaggactagaaattcaactagaactcttacagctcttataccagaagaaattctagaacttttttgaattctaactaatgccccagattatcatttggattattttgaactgaattaattttcttccattacctgcattgaaacaaatgaggtgggtcagagtgtgtgagactgtcgtggtcaagagtccgtgttatgggatggactcacagctggggaatgtcttttgggctaactgccactctgttgttgtcctctatcgaagttaaccagttttgcggttcagctttcattccagatggaatcatctttgacccacctatctgagtttgaatcttttcccccactcttaatggtttacctgtatttttcctgttcctagtttgtatctatctgtattttttcacttgtttttttctacttaccacaacaaatccttttgggctgctgtaccccttccgagtcagagcgttaggagttgtttcatggtctgctttattctctgtgggtgaatttggatgcgctggtagccccggctttgtattttaatccagttttgggcagcaaaacctcttcaatgaatcaggtgtcatttgagagccatgtgtggatgtgtgatgatgctgggatagataaaaatagctactgtgtatatttctttttaaagggaactggagggaaacacatcagcatgttagtaagtggtctgttgtccaggtggtgaaatttcagatgattttcatttctcgtgcctgtgtctcaggtcctctggaaggcagacaccagggtggcattggaggtgcaggaggtttattcgaggaaatttgactgtgagagaggaaggagagagggagcaggaggaggcagggagagcctgggtctggctttgcaggttggacccgtatgagtggagagggtaggaaggaagtgcagtgctgagaaaggatcagccaggcctactggaaagcccagagcagagcttgccagatacaggaatcccacgtccattggaaatggcccagcaccggggtctgccgtgagcagcctgctgtgagagcatggcctgggcgtggaggctgtcagctcactgcagtgctgcagagggccgcacgatacccctccctggctgcgtggtccctgtcttggtgtgtcctgagtctgcatcactttgtaaagccccactcttctgcccaggtaccaaggaaaggcagatgcccccgtggccttggtggttcacatggccccagcatctgtgcttgtgga

SEQ ID NO: 11843 - DNA, 849 bp, Homo sapiens
ccctgcttcacacatgtggttcactgttgcgggggttcgtggagttatggtatctcttcaactgtggagaaggcgttcagagactcatgcaggagcacaagttgctcgcctggacaacatattcctgacacgaatgcactggtctaatgttgggggcttaagtggaatgattcttactttaaaggaaaccgggcttccaaagtgtgtactttctggacctccacaactggaaaaatacctcgaagcaatcaaaatattttctggtccattgaaaggaatagaactggctgtgcggccccactctgccccagaatacgaggatgaaaccatgacagtttaccagatccccatacacagtgaacagaggaggggaaagcaccaaccatggcagagtccagaaaggcctctcagcaggctcagtccagagcgatcttcagactccgagtcgaatgaaaatgagccacaccttccacatggtgttagccagagaagaggggtcagggactcttccctggtcgtagctttcatctgtaagcttcacttaaagagaggaaacttcttggtgctcaaagcaaaggagatgggcctcccagttgggacagctgccatcgctcccatcattgctgctgtcaaggacgggaaaagcatcactcatgaaggaagagagattttggctgaagagctgtgtactcctccagatcctggtgctgcttttgtggtggtagaatgtccagatgaaagcttcattcaacccatctgtgagaatgccacctttcagaggtaccaaggaaaggcagatgcccccgtggccttggtggttcacatggccccagcatctgtgcttgtgga

SEQ ID NO: 11844 - DNA, 5904 bp, Homo sapiens
gttgcgggggttcgtggagttatggtgggtgggaaatccgagattctttgcatccatgtgatttctgcggatctgtgaagaacttcaggcctgggtctgagcgtccttttcccaacccttgggccccggcctggctgtcagcactttcggagctccaccctcttccgtgcaccccaaggccagtgtgtcgttgttagcgtgtggggtggacagatctggtgtgtagccggtggtggagaaaggactcattttgtcctagcacccacacacacaggcccccactcctctccacctctgctaaggagggctcaaaacccaccagcataaatgtggctcggtagtccaacgtggacttttaatttttttttcttttttttttttccagagtctacaataaaacatctaattggtgtcagagagtttacagaataaaaccttctgaatgtcttgtgtaatgtttgtcttgtaggtatctcttcaactgtggagaaggcgttcagagactcatgcaggagcacaagtgagtcagtctcttgctttcggagggggagttgattacggggcttgaaagccgaaatgagaggccagttgttttttatagcaaaagtggtccttgttctgttcatgttatcctgtttaaatgttttttcattcttaggttaaaggttgctcgcctggacaacatattcctgacacgaatgcactggtctaatgttgggggcttaagtggtgagtatattctttgcagtgtcagaggctggtgggaagtctctgggattttaaccggctttaccatttttccaagtctggggtgggcagctacttttttttttttttttttttttgtcagtggcgtgatcttggctcactgcaacctttgccttctgggctcaggtgatcccctcacctcagcctcccaaatagctgggaccacacgtgtgccccatcacacctggctaattttttttgtatgttttgtagcgacggggttttgctatgttgcccaggctggtctcaaacttctgcgatcctcctgtctcggcctcccagagtgctgggattacaggcatgagccaccgcacctggcctggaattctttttataccagcccagtcagcagcagcacagagcattaaaagctgtgactcaggagaacagattttaatatggataccacctcttaagtgttaccatccacttagtttcttgcgttgcggggacagagatttgtggcagtaaactggagagtctagcagtggtgattacagttaatatgtttaccgcagacgccattggcacattggcagccacacacatacccactgtccagattaccctgtcatttatgtctatcaaccggaaggtcaggattgtgttgcagccaaattgtgtgggcttggtggcatggaccggaaggagtgaagtgttagaccagtctcccttctcagggctgagactagggtgaggcacttagggtgccagcccttcacttgcatgattccttacattttgcacactgggtgccttgctgcttcaccctagtgacagctcagcccattctagaggcatttaaagaatatttggtgtctgttacacctctagctggcatcacttctgctctgtacatcttccctggttgtacttccaaagctggaaggtggagatgtagataaatagttggattagtacggggtgctcctcctgttagtgacgacaggtcaaattgatgagagatctgattttatgcatcctttttaggaatgattcttactttaaaggaaaccgggcttccaaagtgtgtactttctggacctccacaactggtgagtctttcctgacacatctttcaaaagcaatctttccttttgtaatatcagtaacaagaattttcctttttgcaaatcagtcttctgccctccagagatacctggtcgttgaaacgcttcccctttcaagttaaaaagacttgagttctgattaactatgtgaccttgatcaagttactttacctttctgagctttagtttattcatctataagatgactatcacgtttcatagagttgttaaagattaaatgacgtagcagcacatataaagcactaaatcactttattagatatatgtttggcaccaagtaggcacacaagaaagggcagcttttgtttttattcaataaatttctgacatcttcttacctttcagtccagcttattacactcttgagaaggcgtgtgtgtgttgttgaatataacagttcattttccagtccttaagaagaaagtcaccaagacctgttaagtctttccccaaaataacgtttgaaatccatccatttgtctcttattgaggccttccttatttctgttttctatgcctgtaaactacaatagcctcccatattcattctcgccttcctgtaatccatctgccacacagcagccagagaggtcacttcaagacagaaaagtagtgtgtcacttgccaccctaaagcccttcatgggctccccattgcaatacaatcaaaacaccttgatatggcctacaagtcctgtaggccccggccgctacccacacttccatctgtacccatcgctgaactgcagctgcatgggctgactcttatgtccctctaactccctggccacttcaggactttcgcccttccgcgggttccctctgcctcttctaattgctgcctatattgttactgaaccttcagggctcagctagagggtcatttactccagaactgcctcttcttctctagacaagttggatcccagccttctgtatttttcattttccttgcagagcacttagcataatgccactaagctgtttctgttatcgtgtttccttttgtctcctccactggcctgattagagcaaggcctccatctctttttcctgctatatccttggcatctgatataatggatactcagtaaatatttgtaataaatgatgttcaaaatatttactaagctttgttttatgttgatacctattggtaaccttttaaatacttgaatagttgctgtgttctacatttgttcaaccataactgctcatttctttgtttttcattaggaaaaatacctcgaagcaatcaaaatattttctggtccattgaaaggaatagaactgggtacgtctttgtctgtgactcatcctctgctatttctaacttatatatgccctgacctctcaaattagaatccattaaaaacatcaacatcaaacctcaaaatcaaatgcttcatcaccacgagatttttttttttttttttttttttggatagagtcttgctttcttaccaggctggagtgcagtggcatgatctcggctcactgcaacctccacctcctgggttcaagccattctcccacctcagcctcctgagtagctaggactacaggcgcatgccatcacgctcagctaattttttgtatttttagtagagacggggtttcaccatgttggccaggatagtctcgatctcttgaccttgtgatctgcccgcctcagcctcccaaaatgagctaccatgtggctggagatgggatttctaaatagtgacattttctgtgttcccacctcatgctgtaaaaataggggccaggtcggcaggagtgattgaacagctgatgcctgcctgtgtacatgctgtgtggcattctccatccagacggcagggctcctgcctcagttccagaggtgcttctcgtcgttgagttgctttgagttgggggcgggggtgacaagggttccctagaggttttgtggccaactttgtacattgaaacgcagctccagctgcgcaggggggcttacagcctcttgatgggaagaggcctcactgaggatgctagtagggctcttgtcctggcactggtgtgtatctgtggcttgttaatactcctcttttatagaaacactaatactttgtttcaaaatatacatcagctcttctggtttgcgatgataggttccctggcttcactattctgtttgttaacttgggtctctgaaagttgagtactagtttcttgtttttcaatttttaacggatagtcaccaaagattataatgtcttttcatctggctgtagtaaatataaatggctgaccaaaatacacttttatttatttcctaaaaatggtaatctccttagaaagtctggttttcgtgtcagattcccaccataattctgaggcaattcagttgctcgtggttggtgatcctgaagttactcttcccacacatcttcactaatgcaatcactttgctgttgtgtggttttcttgtagctgtgcggccccactctgccccagaatacgaggatgaaaccatgacagtttaccagatccccatacacagtgagtatgaaagccaggtttcccaggaggagggtgtacgtcctgagtaaagaaaacatggatgaaaatagaaactgaacacttgctgtgggcaccctgttttgtgttctgagcatgattagaaaatttagttgaggaatgaagatatggctcctgccctggcttataaacttacggatgtctgacttatgcctaatgatagtgattatgctttggaatattagataatcaagcactgttggtaaatagattgcattcaagtttgcacattcattgcttggaggttttttcccacaggcgtaataccctcttttgatcagacgatcatgaagaggtttgcacagatagatttttttaaataaataatgattacagcaacctaaaagaagtgttgttgggggttagaagctcctgcaaattccgaagtatcagggccagatgatgtggtcttagcttaggaaaagagttagtcttgtccttgaacttggctaaagacattcatgtctggttttacttacatgtgaagagagtaccaagcagtaggggtatttccttgttagtactaactaatgtgatgcttactaagtagtgctgatgggtgacagaccagagcacccagcaaaggccagagaagtccagaacctggcgaggagatgaggcttacactgactgaaggcagaaggcagcagggaggagaggaatgtgccggagcaatggcacaagtgctcctaggccagtgctgtgatgagctgatcagcactcccattgcctggcttgctcctcctgctcagatgccttctctcacctgacccctgctgtagccacccccagcctgagttgcatccacctgtttgttgtccatttccagcaccctgttcttcgctccatggcatgtgacagttaactttcatatgtgatttgcgtgatcgatgttaacatgctcagttttgccgatcactgttttttcagtgtccagcggccctcagtgagtgaacttacgttcattctcgttgcagctgtgctttagcttcttagagcagcgaatttttttcccttgatcttgagccttaactaaatgtaaaatgaggctccttcttgagataggtaccctttgggtctatgtgttttagcgggagtgatgataataaataagcatgtctacaacccacatgctgtttagataacacgttgttgagttggtactgtggccgaggctgtgagctaagcagaaacataaacattaataggacataggtgcagcccagaaaccaggtaggaagttaactaactagttatttcctactgtatagtaaaaggtgtgctgatttaattggcgttctggcattcccatgtatgaacgtctgggccttggctgtcagctcaccttgtgcagtgtgtaatttggtggtatctgtactgaccaggtgaacagaggaggggaaagcaccaaccatggcagagtccagaaaggcctctcagcaggctcagtccagagcgatcttcagactccgagtcgaatg

SEQ ID NO: 11845 - DNA, 588 bp, Homo sapiens
gttgcgggggttcgtggagttatggtgggtgggaaatccgagattctttgcatccatgtgatttctgcggatctgtgaagaacttcaggcctgggtctgagcgtccttttcccaacccttgggccccggcctggctgtcagcactttcggagctccaccctcttccgtgcaccccaaggtatctcttcaactgtggagaaggcgttcagagactcatgcaggagcacaagttaaaggttgctcgcctggacaacatattcctgacacgaatgcactggtctaatgttgggggcttaagtggaatgattcttactttaaaggaaaccgggcttccaaagtgtgtactttctggacctccacaactggaaaaatacctcgaagcaatcaaaatattttctggtccattgaaaggaatagaactggctgtgcggccccactctgccccagaatacgaggatgaaaccatgacagtttaccagatccccatacacagtgaacagaggaggggaaagcaccaaccatggcagagtccagaaaggcctctcagcaggctcagtccagagcgatcttcagactccgagtcgaatg

SEQ ID NO: 11846 - DNA, 5913 bp, Homo sapiens
gcactcccagtgctgcggctgcctagttgacgcacccattgagtcgctggcttctttgcagcgcttcagcgttttcccctggagggcgcctccatccttggaggcctagtgccgtcggagagagagcgggagccgcggacagagacgcgtgcgcaattcggagccgactctgggtgcggactgtgggagctgactctgggtagccggctgcgcgtggctggggaggcgaggccggacgcacctctgtttgggggtcctcagagattaatgattcatcaagggatagttgtacttgtctcgtgggaatcacttcatcatgcgaaatctgaaattatttcggaccctggagttcagggatattcaaggtccagggaatcctcagtgcttctctctccgaactgaacaggggacggtgctcattggttcagaacatggcctgatagaagtagaccctgtctcaagagaagtgaaaaatgaagtttctttggtggcagaaggctttctcccagaggatggaagtggccgcattgttggtgttcaggacttgctggatcaggagtctgtgtgtgtggccacagcctctggagacgtcatactctgcagtctcagcacacaacagctggagtgtgttgggagtgtagccagtggtatctctgttatgagttggagtcctgaccaagagctggtgcttcttgccacaggtcaacagaccctgattatgatgacaaaagattttgagccaatcctggagcagcagatccatcaggatgattttggtgaaagcaagtttatcactgttggatggggtaggaaggagacacagttccatggatcagaaggcagacaagcagcttttcagatgcaaatgcatgagtctgctttgccctgggatgaccatagaccacaagttacctggcggggggatggacagttttttgctgtgagtgttgtttgcccagaaacaggggctcggaaggtcagagtgtggaaccgagagtttgctttgcagtcaaccagtgagcctgtggcaggactgggaccagccctggcttggaaaccctcaggcagtttgattgcatctacacaagataaacccaaccagcaggatattgtgttttttgagaaaaatggactccttcatggacactttacacttcccttccttaaagatgaggttaaggtaaatgacttgctctggaatgcagattcctctgtgcttgcagtctggctggaagaccttcagagagaagaaagctccattccgaaaacctgtgttcagctctggactgttggaaactatcactggtatctcaagcaaagtttatccttcagcacctgtgggaagagcaagattgtgtctctgatgtgggaccctgtgaccccataccggctgcatgttctctgtcagggctggcattacctcgcctatgattggcactggacgactgaccggagcgtgggagataattcaagtgacttgtccaatgtggctgtcattgatggaaacagggtgttggtgacagtcttccggcagactgtggttccgcctcccatgtgcacctaccaactgctgttcccacaccctgtgaatcaagtcacattcttagcacaccctcaaaagagtaatgaccttgctgttctagatgccagtaaccagatttctgtttataaatgtggtgattgtccaagtgctgaccctacagtgaaactgggagctgtgggtggaagtggatttaaagtttgccttagaactcctcatttggaaaagagatacaaaatccagtttgagaataatgaagatcaagatgtaaacccgctgaaactaggccttctcacttggattgaagaagacgtcttcctggctgtaagccacagtgagttcagcccccggtctgtcattcaccatttgactgcagcttcttctgagatggatgaagagcatggacagctcaatgtcagttcatctgcagcggtggatggggtcataatcagtctatgttgcaattccaagaccaagtcagtagtattacagctggctgatggccagatatttaagtacctttgggagtcaccttctctggctattaaaccatggaagaactctggtggatttcctgttcggtttccttatccatgcacccagaccgaattggccatgattggagaagaggaatgtgtccttggtctgactgacaggtgtcgctttttcatcaatgacattgaggttgcgtcaaatatcacgtcatttgcagtatatgatgagtttttattgttgacaacccattcccatacctgccagtgtttttgcctgagggatgcttcatttaaaacattacaggccggcctgagcagcaatcatgtgtcccatggggaagttctgcggaaagtggagaggggttcacggattgtcactgttgtgccccaggacacaaagcttgtattacagatgccaaggggaaacttagaagttgttcatcatcgagccctggttttagctcagattcggaagtggttggacaaacttatgtttaaagaggcatttgaatgcatgagaaagctgagaatcaatctcaatctgatttatgatcataaccctaaggtgtttcttggaaatgtggaaaccttcattaaacagatagattctgtgaatcatattaacttgttttttacagaattgaaagaagaagatgtcacgaagaccatgtaccctgcaccagttaccagcagtgtctacctgtccagggatcctgacgggaataaaatagaccttgtctgcgatgctatgagagcagtcatggagagcataaatcctcataaatactgcctatccatacttacatctcatgtaaagaagacaaccccagaactggaaattgtactgcaaaaagtacacgagcttcaaggaaatgctccctctgatcctgatgctgtgagtgctgaagaggccttgaaatatttgctgcatctggtagatgttaatgaattatatgatcattctcttggcacctatgactttgatttggtcctcatggtagctgagaagtcacagaaggatcccaaagaatatcttccatttcttaatacacttaagaaaatggaaactaattatcagcggtttactatagacaaatacttgaaacgatatgaaaaagccattggccacctcagcaaatgtggacctgagtacttcccagaatgcttaaacttgataaaagataaaaacttgtataacgaagctctgaagttatattcaccaagctcacaacagtaccaggatatcagcattgcttatggggagcacctgatgcaggagcacatgtatgagccagcggggctcatgtttgcccgttgcggtgcccacgagaaagctctctcagcctttctgacatgtggcaactggaagcaagccctctgtgtggcagcccagcttaactttaccaaagaccagctggtgggcctcggcagaactctggcaggaaagctggttgagcagaggaagcacattgatgcggccatggttttggaagagtgtgcccaggattatgaagaagctgtgctcttgctgttagaaggagctgcctgggaagaagctttgaggctggtatacaaatataacagactggatattatagaaaccaacgtaaagccttccattttagaagcccagaaaaattatatggcatttctggactctcagacagccacattcagtcgccacaagaaacgtttattggtagttcgagagctcaaggagcaagcccagcaggcaggtctggatgatgaggtaccccacgggcaagagtcagacctcttctctgaaactagcagtgtcgtgagtggcagtgagatgagtggcaaatactcccatagtaactccaggatatcagcgagatcatccaagaatcgccgaaaagcggagcggaagaagcacagcctcaaagaaggcagtccgctggaggacctggccctcctggaggcactgagtgaagtggtgcagaacactgaaaacctgaaagatgaagtataccatattttaaaggtactctttctctttgagtttgatgaacaaggaagggaattacagaaggcctttgaagatacgctgcagttgatggaaaggtcacttccagaaatttggactcttacttaccagcagaattcagctaccccggttctaggtcccaattctactgcaaatagtatcatggcatcttatcagcaacagaagacttcggttcctgttcttgatgctgagctttttataccaccaaagatcaacagaagaacccagtggaagctgagcctgctagactgagtgactgcagttaggagggatccgacagagaagaccatttccactcattcctgttgtcctaccaccccttgctctttgagggctggctattgagaactggaaagagtaaaatgataacttaccttagcattgccaagaacttcagcagacaacaagcaattctatttattttatgttgtgtatacatcttgatcattagcaagacattaagctttaaccattatggcaccattttgtgagaatgattgttctttcacttgggctgtttgagagcataattatggtaatcatgagattaatgtttcatgatttctacctccaaagtgtgaagacaagtaaaacaatgtttctaaattgtcttattttgttggcggagaagattacaatggctattagtgctacatttggtcaaatgtaatcacttaaatagcttcttgtcaccttaaactaaagcagaataaaaagtatcctttgaaattataagccctcctttgctgacagctattattttgtaacatcttaccaggtcatgtgctttcagttataactgggctgagcctcctataattacaatgtctatagggactgttttactgcctgtgtattttctgctagagagttagcaatgttagagctagaacagattagaatttctaaacagtatcatgcacagttggtgtgagtgatcagtgtgcattgtatggcatgcatggttgtgaattattctctgttctccaaatactgtttctttaactcagatatttttgttagtgtctaggccacttcatttatttttcgtcatggtactttactgacttctctttattcaattctccacgccctcaccaaaaaaaactgtctcaaaatgagaatattttattttcatggtgagtctagaaaacgcccacttcattctgattaaaaattcttccatgttttaaatatcagaaccagacctttcttactgtgtatcttagcccatttgtgtctctataacaacaaccagctttcaaaggaactaatagagtgaaaactcactcattaccacgaggatggcacaagcgattcacgtaggatctgcccctgtgaccaaaacacctcccattgggccccacttccaacactggtgatcacatttcaacatgaggtttagggaaacaaatgcctaaactacagcactgtacataaactaacaggaaatgctgcttttgatcctcaaagaagtgatatagccaaaattgtaatttaagaagcctttcccagtatagcaagatgttaactatagaatcaatctaggagtattcactgtaaaattcaacttttctgtatgtttgaacattttcacaatctcataggagtttttaaaaagaagagaaagaagatatactttgctttggagaaatctactttttgacttacatgggtttgctgtaattaagtgcccaatattgaaaggctgcaagtactttgtaatcactctttggcatgggtaaataagcatggtaacttatattgaaatatagtgctcttgctttggataactgtaaagggacccatgctgatagactggaaatagaagtaaatgtgtttattgataa

SEQ ID NO: 11847 - DNA, 10224 bp, Homo sapiens
ttactgttaagggacgaagtggtttagtgagagataccaggtcattttcccatatacatgctttggaagcatctttcaaggctaattttggctgtatatgattttcaattcctgtgctaaatttagattctagctgccatttaagataggactctgtggtgtatatacctattccctcacagaaattcagaaagtacatagtttcatacataataaagacatattaaagaagcacttgagctaaagtatctgtttaactttgtagtcaactgctgcttattgtctctacaggaaagctggttgagcagaggaagcacattgatgcggccatggttttggaagagtgtgcccaggtaaactcaattcctcccttctaaaccccccagtcagcaagaaaggtcttctcaattgtatcttagtgatcatgaaagttaaaggaactgtgcataattgttaagtccagagatagtgtttgccccagaggtcttatcttgctggcttgacttggaaatctaaatttagtacatctctaagtttggtgaggtagaatatgaaggtgctctactttaacataccactggtttgaccttggtagaaagtacttaattacatctcaaggtagctgtgctttttaaaattgagtttgccaaagtagaaacaatgagaaaggaccattataaaacaggatcattgaaggctacatactcttggcttttactctcattctccctattggaaatgtctcttttacctcagggacctggaggtacagcagattataaggataagtacccatatgagcatttggtagtattataggatttattatgaaaataataaaactgcagtaacactggccacagactaacagtacacaggtgcacagttgacaccagggattattgccttgtagagttttgacctttgatgagagagtgttttttacagttgttactgatagcacatttatgtaacttaattgtgctttaaaaatatttaattgtctcttgtgtaataacagtaagtgaaagacgataactaaaattttatataattagatcctggagagaatatttgttgggtgattgaattgaaaataccagtgaatgaaacatacctaaaagggtagataggttgggttggaaagatataccacatcgagggttaattaaatggataagatgtcattatctttttttctttgtaaaggaagattaatgcataaaattattttgtgtaatttacatacaataaaattatgtgttgtacagttgtataatttacatataataaagctaattcaccaattttagatgaagaattcagtacatttggacatatgtttgtagctgtgtaaccaccattgcactcatgatctagaacatttctaacacccccaaaagttccctacttccccttttgcagtcagccttctccctccactgccagcctttggcaaactgatcagtcagtaaagtttcacattatctagaatttcatataaacagaaccatatggtatgtagtctttttaatctggctcctttcactcacatagtgcattggagatgcatccatgttgtagtttattcctttgtattgctgaatagtatcccattatatgtatatgtcagaatttgttgatttaccagttgatgtacatttggattgttttcagtttggggttattatgaataacgcagccatgaacattctagtgcaggtctttatggggacaggagtaggaatgccacatcccgtggtaagtggatgtttaactttttaggaagctgcagaactaatctgcagtggccgtatcattttgcattcccctcagtgatatgtgagagtgcttcagtgactcctatactcaccaacactgggtgtattactgtgacactagatgtattatctattgctacgtaacaacttaccttaaaagctggcagcttaaaacaacagaccctattatcccactttttcaatgggccaagaatcttggctgggcttagctggggcctctggctcagggtcctttacaaggctgcaattaaggtattggccagggctagagtcatctcaaggcttgactagtttttaatttcattttctaatgttttattactagtatatagaaatatagctgaagtgttttgcagggaggctgtataattgaccttgtatcctgcaaccttgctaaactcatttattagttctagaagctcttgggtgtattctctaggattttctacatcaacaaacatggtttctataaatatagttttatgtctttcttacaatcaatacttttttctatctgtattgcattttctagggcttccagtgtggtgttgaatagaagtgttaagagtgaacatccttgcctttttcctgatattggagaaaattcacttgtcttttagcattaagtgtcatgtttgcttttttaaaattttattctatattattttatttttgagacagagtcttgctctgtcacccaggctggagtgcagtggtgtgatctcagctcactacaaccttgacctcctaggctcaagcgatcctcccacctcagcctcctgagtagctgggactgcaggaacatgccaccatgcctggctaatttttgtattttttgtagggatggggttttgccatgttgcccaggctggtcttgaactgttggattcaagcaattcgcctgtctcagcctcccaaagtgctgggattacaggcatgagcctccgtgcctggcctgatatttgcttttttttttttttttaatgctctctattgcagagttggcaaactacaacctgtgacaaatccagcatgccacctgtttttgtaaataaagctttattggagcatagccatgctcattagtttacatcttgtgtatggctgctttaacactacagcagcagagttagagttgtgacacagatagtttggcccataaggcctatatttactgtctaatcttttacaggaaaaatttgccaattcctgccctcttggtttgaggaaattcccttctgttccttgttctgagagtttgtatcatgaatgggtgttaaattttgtcaaatgcattttcaactatgaagggttttgtttttagacgagtgatatgggggactaggtgattgattttctactgttaaaccaaccttgcatctctgggttcaaccccacttggtattatagatttattaccctttttctcttgtggcagattagatctactaaaattttcttgaggatttttgtgtttgtgttcatgagggatattgtagttttttcgtgtctttgccatgttttgggtatcaggataatgctgctgtcattgaggggtgacaaaaatgaggggtggtgtcctttacacttctgttttctggaggatttcatgtagaattggtatgagagtctagcttatggttaaaaacctatgtgtgatgtttcagacctgaccataaacaattacagactttacctaggaggccacatggggaaaagctgccctccctacaccagacttggcgtactgccaatgcattacagtttctaaagggagttgcagtcaaggactcagggccccctgttagtcatgctcttgtaacagtatttgcattgagagtcctggcactttcattcttaggtctctctatctgaggccatgggccaaggtcttcttcaggcacctctgccaaggcctgtttatgcaagaaggagtggaaaaaccttgacatttttttccactgtgactcactacccagtacttttccacccttagcccccttcctttgcacccatacccccaagatccatcaaactgctaaagcctttttttccaagctccttcaacagtgaaccaaccctcatgtctgtgtggatccagctgactcttgactagtgagttgttccttgggaaaaaatggaacagagagagttggtgctttccctggttttagcctcttgcttataccaatgcaatgcctgaaggcttaattcatttttgacttgttgctttgatcagctactccaacacctgacagctcagctctttctcccagctcttgggagatatttttttctttaaatgtttagtagaatataccagtaaggccatctcggccaggagttttctttaatgaaagcttttccactattagttcagttactttagtagacattagcctattcaagtttatctgtgtcttctggaatgagcattggtagtttatgtctttcaagtaatttgttcatttcatctaaattgtcagatttattggtatgaagtgtttatagtattctcttattttactgtccgtagggtctatggtgatgtcctgtctttcattctagatattgatgtgtcttcttttttctgattattctggccagaggtttatcaattttattgatcttattaaagaatgaactgtttcattgtttttctctatgatttttctgtattctatatcattctttttttattattttattattttatttgctctttatttttctagtttcttaaggtgatggcttacttttatttttttcttatttttttcttttgttgttgttgtttttttaaagaaacagggtcccactcttgctcaggctggagtgcagtggcacgatcatggttcactgcagtctcaaactcctacattcaagctgtcctcccccctcagcctccagagtagttgggattacaggtgcatgccaccatgcctggctaatttttaattttttttgtagagatggggtgttactagttgcccacgctggtctgaaactcctggcctcaagtgatccctccacctctgcctcccaaagtgctgggattccatgtgtaagccactgtgcctgaccaaggtgatggcttaaagctattgatttgagatgattccttactttatagtttaagcatataatgccataattttcctcaagcaccgttttagttatgttatacaaattttgaaatgttttgttttcatttcctaatttcccttgtgatttctttattgaaccttggcttatttagaagtatgtttaacttgcagatattggagatttgccagccatctttttgttattaatttctactttaattttgttgtgattagagaacatacattttattaatttaaatttataatttattttaatttataatatggtctgttttacagaatgttgtgtgtgtatttgaaaataatatgaaagctactattattggatggagtgttctataaatgtcagttagattaggttgatcatgctgttctagctttttatatccttattgatttcctcactacttgctctatcaatgactgggaaagtgttgaagtctcccagtatttgtctatttctcctttgattctaccagtgtttgcttaatgtattttgaagctctgttataggtgcatacatgtttatgagtatgttatagatgtattcattttgatatccttctttctctgttactattcctaattctgaatttgactttaatgttattaatataattcttccagctttctcttggttagtcttttcattgcatatctttttctatccttttacttttaatctagctgaatgtagtctttattttgaaagtgcgttccttgttgatagcattattggttcttttttttttttaaatctaatttgacaatctctgtcttttaattggagggtttagacatttgcattgaatgtgattaccaatatagttagatttaaacctacagtcttgctgtttgctttttgtttgtttcattgatcctttgtttcttgtttttttctttttttgctttcctttggatttagtatttttcataattccattttacctccactgttggcttattagctatacttcttcatttcagtattttagtggttgctgtaggatttataataaatatcattaactgaccatatcttcagataatcgtatactacttcatatatagtgtaaaaaccttacaagagtattcactccataatactttgttattgcttttgctttaagtgatcaatgattgtttaaggaaattttttaatgacctttcatgtttattctttttttttttttccaaaagattcagtattttccgagttttcaaaaactgctggccactcaaagtggatcaacaaaaatttaagagctaaaactgtaaaactcttgaaggctgggcacagaggttcatgcctgtgattccagcactttgagaagctgaggtgggacaatcacttgagcccaggggtttgagaccagcctgggtaacatagaaagaccttgtttctacaaaaaataaaaacacaattagccaggcatggcggtgtgcacctgtagtcccaacttcttgggaggccaaggtggcaggatttcctgagcctgtaagtttgagactgcagtgagctgagttcacgccactgcacttcagcctggacaacagaacaagaccctgtctcaaaaccagaacgaaactataaaactcttagaagaaaacagggctaaatcttcatgactttggatttggcaatggatggttagaattaataccaaaaacacaatcaataaattgataaattggatttaataaaaattaagaacttttgtgtatcaaggacattgtcaagaatgtgaaaagacagcatatagaatggaagaagatatttgcaaatcctatatctgataaaggtttaatatccagaatatgtaaggaactcctgcagctcaacaacagaaagccagttaaatcaattttgaaatgagcaaacgcctgtaaacccagctgcttggcagattgagacaggaggattgcttgaggctaggagttcaagaccaacctggacaacatagtgagaccctgtctaaaaacatttttttaattagctgggtgtggtggcatattcctgtagtcccagctacatgggagaccgaggcaggaggatcacttggggccaggcagtcaaggctgccgtgagctgtgattatgccactgcatcccagcctgggcgacagagtgagaccctgtctgagaaaaaaaaaaaaaaaagaacaaaaaaaaatttagaagattgctattctagtctactattttttcaaagggtggtcttgttaacaattctggagcccacctaaacctgctaaatcaaacttggtagtaaagctggggagatgggcatgtctaacagacgtttctggtggttttgatgtccaggcgtgcagagagatgatgcttaccttgtgttttgtcattattttcaggatttacaccccttccttgtcttttgtatcaatatttatggagtcatgaactctaggataggcatgatgttgagaactaggagttctcccctggccagggagatagaggcaggtctgtggttagttttgtagttggctgtgatgacatctgacatgctctcttcacttgttgtcttcttcctgttcccttgtcaggattatgaagaagctgtgctcttgctgttagaaggagctgcctgggaagaagctttgaggctggtaagaatcttgtaaatcctctggatgttgggtgctaagcagagagagcaagcaagggattccaggtcagttggaatctcttgtcttctgaggttcatgaaataagtagaaataggtcaggttcctggcttaaggaaaagcggtgtttttaaaatcatttttatcattcttgataataatttgaaatattactgtcttttactgaaatgaattgaatttccttggctgccttgtaggaggcctgtttttcaggaaaatattctgattacctctgaaagtaatccatgtctttctaagtatcttaactctccagtgactagaagttttccttcctaaaattattgtgtttttccttctaggtatacaaatataacagactggatattatagaaaccaacgtaaagccttccattttagaaggtgagggttccattttagatagaattcctcatttggaagaaggtgaggagagagagatgagagagtctcctcctatttactgtgttttcttaataatatgtcatgtagactcaatcaaaattaccacctggatataatatttaattctcactagaatttttaaatatgctgaactattaaatggtaacaaaatatttaaatgttagaaacctgtgatcaaatatgattaagaatctttgtatttggaaatagtaaacttgaatatgaactatattagataataatataacactgataaatttctggcatttaataatcatgttgtggttatataagataatatcctattattctcaagagataaatgctgaaatatttaggaatgaaggatcatatctctgccttactcttaaaaggttccacaaaagtattaatgaatgtgtgtatgcatgcagagaaacaggaagcaaaaaaatgtcaaaatgttagtaattggtaaatcaaagtaaagggtatatgtgtgttcattgaactcttacaacttttatgtaggtttcaacgtttcaaagtattttttaaaagttaccttttcaaatgaagtttgtggttcttagagaacatatgaatattaccagttctagaatactcagatggtcactgtgacctcttaaaagcaaagtggagaaggacatcagtttgacttatagaaaccttagggagtggttgattttaagttctgcatttttatgcacatctaccctgtaagtaacgtctggcctttctgacatttacatgtatgcacattcttaccttgtctgcacccccttcctccatcctaattaaaacgttgctggggtactttttatgtcattcactttaggtacctctaactgggtactgaaaacatcattcctcatctataataatctaaccagctcttacttagattttcaccactaatgagaacctttcttagataaatgccgataattcatctacataggcccaaaacctattaataaaatgcatccttggatagtagtattttgcttttttaaaatgtattctactagtgttatttttctcttgtgtatttttccattggacaatatttattagatacattttttccacatccatgggcattttgatggatgtttagccagaaacatttaggtaattttcttcttatttttgttaactgagctcccctcccctaccccccctttttttgtttgtttgttttgtttgtttgtttgttttgccaatcctcccttgctttaggtatcaagtcttcgttcaggtgattttacaagttcagtggtagcgcatattctgggataatgttgatgaactctaagatctggaatctcagtctctaatttgttaatgcttattaaggaaaaagagctcgcttggaaaacctagtaacctctttctttttgctgaattttaaccctccttcactgctccccgcctttagttttttctctttgcttaaacctcatgctcaaactattttccattctgcatctccagcccagaaaaattatatggcatttctggactctcagacagccacattcagtcgccacaagaaacgtttattggtagttcgagagctcaaggagcaagcccagcaggcaggtctgggtgagtatctgcgtgaaggccatcgacgtgcgggggcagtggggttgggtaacgccacacattgtctagattgcttggtgatccgcctgcaatctgattactgtgccatgggcaagtgtgaggcttctgtggagccccttcagggccctctgtgtctgtgtttgtgtgttggtgaagggcaggaccaagcatgaatggggagagctctgccagacattcccacctacccccattcacccagagcagctgaccacttccgtgtctaacaaaatgagtttcctcatttccagaaaaaagttcaggaaactactgatttacattagtaattactgtatttaatattatctcattcattttgagatcaactttgcaatcattttcatccatcctttgatatgcaccagttgactctagttagttcatttaccgccctgaaagtaaacccacacattagcaggcagtgttttcatcggcttctggttcttcttttctagatgatgaggtaccccacgggcaagagtcagacctcttctctgaaactagcagtgtcgtgagtggcagtgagatgagtggcaaatactcccatagtaa

SEQ ID NO: 11848 - DNA, 437 bp, Homo sapiens
ttactgttaagggacgaagtggtttagtgagagataccaggaaagctggttgagcagaggaagcacattgatgcggccatggttttggaagagtgtgcccaggattatgaagaagctgtgctcttgctgttagaaggagctgcctgggaagaagctttgaggctggtatacaaatataacagactggatattatagaaaccaacgtaaagccttccattttagaagcccagaaaaattatatggcatttctggactctcagacagccacattcagtcgccacaagaaacgtttattggtagttcgagagctcaaggagcaagcccagcaggcaggtctggatgatgaggtaccccacgggcaagagtcagacctcttctctgaaactagcagtgtcgtgagtggcagtgagatgagtggcaaatactcccatagtaa

SEQ ID NO: 11849 - DNA, 25567 bp, Homo sapiens
gacctgagtacttcccagaatgcttaaacttgataaaagataaaaacttgtataacgaagctctgaagttatattcaccaagctcacaacagtaccaggtatgtggtatgtgaaaatgaggctctcctggttttgctttttgctttagtaggaaaggagtgaggatcctaagttcataacaccatccttggcttcaaaatttatcttaaaactaattagcctcaatttgaacttcttatctgggagaatggtcctgacctgttctctgattcctcatctggaataccacagcaccttcctcgtggggttccctgcttctttcccacccctcctctagcccaaccttactgctgtaagtctgattatcctaacaagtacagatctttcccatatatttcagcataaagggaaatttttgtttgcttgaaaaagcatccctttagctttttttatataccacacactttgcttctaagttaaatgtgttatatgatcctcttaacagcctcatagggtgctgtacacaatttgtagatgaggaagcaacttgcctgaggatccagagctacaaagtgctggacctgggatacagagcccaggctgcctgaccaccctgcccatgccattaaccaccactctaccatgccaccagcatcaccattttcagtttgtcctcagacaatatacacatctttctttgatcaagcccctgccagcttctttagcaccagcttctgccactgtccacattcccagttacttgtaggtagttctacagatgtcacatcgtgtgattcctctgtcatttctctacccaccagccttcctttagccccatttgtccatcagaacccttgggttactcctgaatgccattcctggaccaggcgccaaacactgagcccccagagcagcctgccctcgccttggtgattgcatttgtcaaactgctgattagctggtttgtcgcctccaccaggctgtgggctccttaagggcagggactccatgttgtattcctctctgaatctctggctaacatccagcctggagaatcgaggatttggccagtggctacctctttgcccttgttttctgttctcttccacactctctctgctctagtcacactggccgtcctgttactcctcagacctgctatacacattcctgctgcatggccatggtgccttctctgccctctgcctggtgccccctatctcatcacgtggtttattctcctgacagccattagagctcacactccctgagagctgcaaggagactgtcctctgtccctttactcacgtttgccattatgctatagactatattttgtccctaagtccatcctctgttactataagagcagcaacttggtggtggttcttatatggtttttcatttgtttggttttattttttgccttgctgtagtatccatactgcccagaatggtgcatatgtagttaagagtaattatttgttgagtgaataaatggcacatcctcagtaaggttttgaatgaaaaaatgactgtactaactgatcaactgtaagattttcccaggtaattctttcaagggagttccaagtataggaactaaggcagctacactggagctttagagaaatgattgtcatatttcctcctcagtcctaaatctcctcttgtcacaggatatcagcattgcttatggggagcacctgatgcaggagcacatgtatgagccagcggggctcatgtttgcccgttgcggtgcccacgagaaagctctctcagcctttctgacatgtggcaactggaagcaagccctctgtgtggcagcccagcttaactttaccaaagaccagctggtgggcctcggcagaactctggcaggtaagtacaatcatttatatgtttacatctacaaaggttttaaaaaatttatttcttttgtttggtaattttgcaaataaatttagggcagaatactctgagacagtcttgttctcactgataaaaattaatttagaatgctttaaaggataagctactacagcaagagtcccagaatgcagtggcccaatatggaaagaagtttatttctctctcccatagggatttataggcccttccgttgtgtggctctgcaaccttttaggcagatggttgtagctgggttatctccacagctgtggggaaggaaggagagtggggagaagttagaatcatggtaaaacatttacctttaagttggaaatgacctggatggaagttaaactatcaccttctattccatctcggccacgccatgtagctggatgggctgtgccctgtaagaaggtaaagatgaatttttggatgggtccattctgttatagacagtaggttgttggaatagccaggaatgaggtggggaaaataaaaggccaaatgtcgaagcattctgaaagcaaaggcagtttagctgcgtcagggacaagggttgcccgaaccagaggcgaggctggtaccaggggctctagtaccagagtggaggaaagggtaaggacacctatgaaaagagatgagcagaagctctggtcatctcagcagtgcttgaagtaaagcaatgactggtatatttttttccctaacttgtaaatattgttgagatctcaaagaaaaaaataaaaagcagtcctaaaaaaattccaaactctatcctgttaaattttgttaaatttatgtaccagtccttctttgtcatttgcagtattctttttttcttgggattataccagtgtatgggattatcacttttctttttctggttattagcctttcccaaatccctccgtttccatgctggcctctttttacaaatgtcgagaattccttatttcaggccttttagttattcgttcggtctccattgttcctttctgctttagaaatttatgatattggttgtttataccttctatctctgttcttggatctcttctattctttacagctcttagcttgctatttcccatgtcttatgagggagtatttctagtttttctcagatgtttagcaaaagtaggtggggagggcagtggtcaaagatgtttgagaaatgttacacactggagtcactctgtgtgtacatttaacgtaggcagtttacacaagagagcaaaagaaaggtaactatttaaatagtggaggtgattttacctactttttttagtgatatatgcactggagtgagcatgcaatgagagaccggaatctaccagctccttcgaaagccttgggttctctgtgcctctcattgtggtttatctcaattgggctgagagtgattctaggatctaaagacactgcatgactcaaacataagtcagctacctccatctagtgctcaaccaaagaaatagtggtctcttactgttaagggacgaagtggtttagtgagagataccaggtcattttcccatatacatgctttggaagcatctttcaaggctaattttggctgtatatgattttcaattcctgtgctaaatttagattctagctgccatttaagataggactctgtggtgtatatacctattccctcacagaaattcagaaagtacatagtttcatacataataaagacatattaaagaagcacttgagctaaagtatctgtttaactttgtagtcaactgctgcttattgtctctacaggaaagctggttgagcagaggaagcacattgatgcggccatggttttggaagagtgtgcccaggtaaactcaattcctcccttctaaaccccccagtcagcaagaaaggtcttctcaattgtatcttagtgatcatgaaagttaaaggaactgtgcataattgttaagtccagagatagtgtttgccccagaggtcttatcttgctggcttgacttggaaatctaaatttagtacatctctaagtttggtgaggtagaatatgaaggtgctctactttaacataccactggtttgaccttggtagaaagtacttaattacatctcaaggtagctgtgctttttaaaattgagtttgccaaagtagaaacaatgagaaaggaccattataaaacaggatcattgaaggctacatactcttggcttttactctcattctccctattggaaatgtctcttttacctcagggacctggaggtacagcagattataaggataagtacccatatgagcatttggtagtattataggatttattatgaaaataataaaactgcagtaacactggccacagactaacagtacacaggtgcacagttgacaccagggattattgccttgtagagttttgacctttgatgagagagtgttttttacagttgttactgatagcacatttatgtaacttaattgtgctttaaaaatatttaattgtctcttgtgtaataacagtaagtgaaagacgataactaaaattttatataattagatcctggagagaatatttgttgggtgattgaattgaaaataccagtgaatgaaacatacctaaaagggtagataggttgggttggaaagatataccacatcgagggttaattaaatggataagatgtcattatctttttttctttgtaaaggaagattaatgcataaaattattttgtgtaatttacatacaataaaattatgtgttgtacagttgtataatttacatataataaagctaattcaccaattttagatgaagaattcagtacatttggacatatgtttgtagctgtgtaaccaccattgcactcatgatctagaacatttctaacacccccaaaagttccctacttccccttttgcagtcagccttctccctccactgccagcctttggcaaactgatcagtcagtaaagtttcacattatctagaatttcatataaacagaaccatatggtatgtagtctttttaatctggctcctttcactcacatagtgcattggagatgcatccatgttgtagtttattcctttgtattgctgaatagtatcccattatatgtatatgtcagaatttgttgatttaccagttgatgtacatttggattgttttcagtttggggttattatgaataacgcagccatgaacattctagtgcaggtctttatggggacaggagtaggaatgccacatcccgtggtaagtggatgtttaactttttaggaagctgcagaactaatctgcagtggccgtatcattttgcattcccctcagtgatatgtgagagtgcttcagtgactcctatactcaccaacactgggtgtattactgtgacactagatgtattatctattgctacgtaacaacttaccttaaaagctggcagcttaaaacaacagaccctattatcccactttttcaatgggccaagaatcttggctgggcttagctggggcctctggctcagggtcctttacaaggctgcaattaaggtattggccagggctagagtcatctcaaggcttgactagtttttaatttcattttctaatgttttattactagtatatagaaatatagctgaagtgttttgcagggaggctgtataattgaccttgtatcctgcaaccttgctaaactcatttattagttctagaagctcttgggtgtattctctaggattttctacatcaacaaacatggtttctataaatatagttttatgtctttcttacaatcaatacttttttctatctgtattgcattttctagggcttccagtgtggtgttgaatagaagtgttaagagtgaacatccttgcctttttcctgatattggagaaaattcacttgtcttttagcattaagtgtcatgtttgcttttttaaaattttattctatattattttatttttgagacagagtcttgctctgtcacccaggctggagtgcagtggtgtgatctcagctcactacaaccttgacctcctaggctcaagcgatcctcccacctcagcctcctgagtagctgggactgcaggaacatgccaccatgcctggctaatttttgtattttttgtagggatggggttttgccatgttgcccaggctggtcttgaactgttggattcaagcaattcgcctgtctcagcctcccaaagtgctgggattacaggcatgagcctccgtgcctggcctgatatttgcttttttttttttttttaatgctctctattgcagagttggcaaactacaacctgtgacaaatccagcatgccacctgtttttgtaaataaagctttattggagcatagccatgctcattagtttacatcttgtgtatggctgctttaacactacagcagcagagttagagttgtgacacagatagtttggcccataaggcctatatttactgtctaatcttttacaggaaaaatttgccaattcctgccctcttggtttgaggaaattcccttctgttccttgttctgagagtttgtatcatgaatgggtgttaaattttgtcaaatgcattttcaactatgaagggttttgtttttagacgagtgatatgggggactaggtgattgattttctactgttaaaccaaccttgcatctctgggttcaaccccacttggtattatagatttattaccctttttctcttgtggcagattagatctactaaaattttcttgaggatttttgtgtttgtgttcatgagggatattgtagttttttcgtgtctttgccatgttttgggtatcaggataatgctgctgtcattgaggggtgacaaaaatgaggggtggtgtcctttacacttctgttttctggaggatttcatgtagaattggtatgagagtctagcttatggttaaaaacctatgtgtgatgtttcagacctgaccataaacaattacagactttacctaggaggccacatggggaaaagctgccctccctacaccagacttggcgtactgccaatgcattacagtttctaaagggagttgcagtcaaggactcagggccccctgttagtcatgctcttgtaacagtatttgcattgagagtcctggcactttcattcttaggtctctctatctgaggccatgggccaaggtcttcttcaggcacctctgccaaggcctgtttatgcaagaaggagtggaaaaaccttgacatttttttccactgtgactcactacccagtacttttccacccttagcccccttcctttgcacccatacccccaagatccatcaaactgctaaagcctttttttccaagctccttcaacagtgaaccaaccctcatgtctgtgtggatccagctgactcttgactagtgagttgttccttgggaaaaaatggaacagagagagttggtgctttccctggttttagcctcttgcttataccaatgcaatgcctgaaggcttaattcatttttgacttgttgctttgatcagctactccaacacctgacagctcagctctttctcccagctcttgggagatatttttttctttaaatgtttagtagaatataccagtaaggccatctcggccaggagttttctttaatgaaagcttttccactattagttcagttactttagtagacattagcctattcaagtttatctgtgtcttctggaatgagcattggtagtttatgtctttcaagtaatttgttcatttcatctaaattgtcagatttattggtatgaagtgtttatagtattctcttattttactgtccgtagggtctatggtgatgtcctgtctttcattctagatattgatgtgtcttcttttttctgattattctggccagaggtttatcaattttattgatcttattaaagaatgaactgtttcattgtttttctctatgatttttctgtattctatatcattctttttttattattttattattttatttgctctttatttttctagtttcttaaggtgatggcttacttttatttttttcttatttttttcttttgttgttgttgtttttttaaagaaacagggtcccactcttgctcaggctggagtgcagtggcacgatcatggttcactgcagtctcaaactcctacattcaagctgtcctcccccctcagcctccagagtagttgggattacaggtgcatgccaccatgcctggctaatttttaattttttttgtagagatggggtgttactagttgcccacgctggtctgaaactcctggcctcaagtgatccctccacctctgcctcccaaagtgctgggattccatgtgtaagccactgtgcctgaccaaggtgatggcttaaagctattgatttgagatgattccttactttatagtttaagcatataatgccataattttcctcaagcaccgttttagttatgttatacaaattttgaaatgttttgttttcatttcctaatttcccttgtgatttctttattgaaccttggcttatttagaagtatgtttaacttgcagatattggagatttgccagccatctttttgttattaatttctactttaattttgttgtgattagagaacatacattttattaatttaaatttataatttattttaatttataatatggtctgttttacagaatgttgtgtgtgtatttgaaaataatatgaaagctactattattggatggagtgttctataaatgtcagttagattaggttgatcatgctgttctagctttttatatccttattgatttcctcactacttgctctatcaatgactgggaaagtgttgaagtctcccagtatttgtctatttctcctttgattctaccagtgtttgcttaatgtattttgaagctctgttataggtgcatacatgtttatgagtatgttatagatgtattcattttgatatccttctttctctgttactattcctaattctgaatttgactttaatgttattaatataattcttccagctttctcttggttagtcttttcattgcatatctttttctatccttttacttttaatctagctgaatgtagtctttattttgaaagtgcgttccttgttgatagcattattggttcttttttttttttaaatctaatttgacaatctctgtcttttaattggagggtttagacatttgcattgaatgtgattaccaatatagttagatttaaacctacagtcttgctgtttgctttttgtttgtttcattgatcctttgtttcttgtttttttctttttttgctttcctttggatttagtatttttcataattccattttacctccactgttggcttattagctatacttcttcatttcagtattttagtggttgctgtaggatttataataaatatcattaactgaccatatcttcagataatcgtatactacttcatatatagtgtaaaaaccttacaagagtattcactccataatactttgttattgcttttgctttaagtgatcaatgattgtttaaggaaattttttaatgacctttcatgtttattctttttttttttttccaaaagattcagtattttccgagttttcaaaaactgctggccactcaaagtggatcaacaaaaatttaagagctaaaactgtaaaactcttgaaggctgggcacagaggttcatgcctgtgattccagcactttgagaagctgaggtgggacaatcacttgagcccaggggtttgagaccagcctgggtaacatagaaagaccttgtttctacaaaaaataaaaacacaattagccaggcatggcggtgtgcacctgtagtcccaacttcttgggaggccaaggtggcaggatttcctgagcctgtaagtttgagactgcagtgagctgagttcacgccactgcacttcagcctggacaacagaacaagaccctgtctcaaaaccagaacgaaactataaaactcttagaagaaaacagggctaaatcttcatgactttggatttggcaatggatggttagaattaataccaaaaacacaatcaataaattgataaattggatttaataaaaattaagaacttttgtgtatcaaggacattgtcaagaatgtgaaaagacagcatatagaatggaagaagatatttgcaaatcctatatctgataaaggtttaatatccagaatatgtaaggaactcctgcagctcaacaacagaaagccagttaaatcaattttgaaatgagcaaacgcctgtaaacccagctgcttggcagattgagacaggaggattgcttgaggctaggagttcaagaccaacctggacaacatagtgagaccctgtctaaaaacatttttttaattagctgggtgtggtggcatattcctgtagtcccagctacatgggagaccgaggcaggaggatcacttggggccaggcagtcaaggctgccgtgagctgtgattatgccactgcatcccagcctgggcgacagagtgagaccctgtctgagaaaaaaaaaaaaaaaagaacaaaaaaaaatttagaagattgctattctagtctactattttttcaaagggtggtcttgttaacaattctggagcccacctaaacctgctaaatcaaacttggtagtaaagctggggagatgggcatgtctaacagacgtttctggtggttttgatgtccaggcgtgcagagagatgatgcttaccttgtgttttgtcattattttcaggatttacaccccttccttgtcttttgtatcaatatttatggagtcatgaactctaggataggcatgatgttgagaactaggagttctcccctggccagggagatagaggcaggtctgtggttagttttgtagttggctgtgatgacatctgacatgctctcttcacttgttgtcttcttcctgttcccttgtcaggattatgaagaagctgtgctcttgctgttagaaggagctgcctgggaagaagctttgaggctggtaagaatcttgtaaatcctctggatgttgggtgctaagcagagagagcaagcaagggattccaggtcagttggaatctcttgtcttctgaggttcatgaaataagtagaaataggtcaggttcctggcttaaggaaaagcggtgtttttaaaatcatttttatcattcttgataataatttgaaatattactgtcttttactgaaatgaattgaatttccttggctgccttgtaggaggcctgtttttcaggaaaatattctgattacctctgaaagtaatccatgtctttctaagtatcttaactctccagtgactagaagttttccttcctaaaattattgtgtttttccttctaggtatacaaatataacagactggatattatagaaaccaacgtaaagccttccattttagaaggtgagggttccattttagatagaattcctcatttggaagaaggtgaggagagagagatgagagagtctcctcctatttactgtgttttcttaataatatgtcatgtagactcaatcaaaattaccacctggatataatatttaattctcactagaatttttaaatatgctgaactattaaatggtaacaaaatatttaaatgttagaaacctgtgatcaaatatgattaagaatctttgtatttggaaatagtaaacttgaatatgaactatattagataataatataacactgataaatttctggcatttaataatcatgttgtggttatataagataatatcctattattctcaagagataaatgctgaaatatttaggaatgaaggatcatatctctgccttactcttaaaaggttccacaaaagtattaatgaatgtgtgtatgcatgcagagaaacaggaagcaaaaaaatgtcaaaatgttagtaattggtaaatcaaagtaaagggtatatgtgtgttcattgaactcttacaacttttatgtaggtttcaacgtttcaaagtattttttaaaagttaccttttcaaatgaagtttgtggttcttagagaacatatgaatattaccagttctagaatactcagatggtcactgtgacctcttaaaagcaaagtggagaaggacatcagtttgacttatagaaaccttagggagtggttgattttaagttctgcatttttatgcacatctaccctgtaagtaacgtctggcctttctgacatttacatgtatgcacattcttaccttgtctgcacccccttcctccatcctaattaaaacgttgctggggtactttttatgtcattcactttaggtacctctaactgggtactgaaaacatcattcctcatctataataatctaaccagctcttacttagattttcaccactaatgagaacctttcttagataaatgccgataattcatctacataggcccaaaacctattaataaaatgcatccttggatagtagtattttgcttttttaaaatgtattctactagtgttatttttctcttgtgtatttttccattggacaatatttattagatacattttttccacatccatgggcattttgatggatgtttagccagaaacatttaggtaattttcttcttatttttgttaactgagctcccctcccctaccccccctttttttgtttgtttgttttgtttgtttgtttgttttgccaatcctcccttgctttaggtatcaagtcttcgttcaggtgattttacaagttcagtggtagcgcatattctgggataatgttgatgaactctaagatctggaatctcagtctctaatttgttaatgcttattaaggaaaaagagctcgcttggaaaacctagtaacctctttctttttgctgaattttaaccctccttcactgctccccgcctttagttttttctctttgcttaaacctcatgctcaaactattttccattctgcatctccagcccagaaaaattatatggcatttctggactctcagacagccacattcagtcgccacaagaaacgtttattggtagttcgagagctcaaggagcaagcccagcaggcaggtctgggtgagtatctgcgtgaaggccatcgacgtgcgggggcagtggggttgggtaacgccacacattgtctagattgcttggtgatccgcctgcaatctgattactgtgccatgggcaagtgtgaggcttctgtggagccccttcagggccctctgtgtctgtgtttgtgtgttggtgaagggcaggaccaagcatgaatggggagagctctgccagacattcccacctacccccattcacccagagcagctgaccacttccgtgtctaacaaaatgagtttcctcatttccagaaaaaagttcaggaaactactgatttacattagtaattactgtatttaatattatctcattcattttgagatcaactttgcaatcattttcatccatcctttgatatgcaccagttgactctagttagttcatttaccgccctgaaagtaaacccacacattagcaggcagtgttttcatcggcttctggttcttcttttctagatgatgaggtaccccacgggcaagagtcagacctcttctctgaaactagcagtgtcgtgagtggcagtgagatgagtggcaaatactcccatagtaactccaggatatcagcgtacgtatcacattgattcagcacattgactatatcctgggcatatagggaaagtggaagcaaatagattggttttctactgggacggtgtagtgggagtggggagaatattcttcagcgctgtgtggaagttgttcagacactttcccagcatatctgagacattaaacttggcattggaaggttttcttcctcagccttgtggcttgtgtgttttcccattccccacgaggcagttcctcccctgaatgctcagtttatattaacatctgattttattttttgaacaaatgttgtgactaaattataggcactgaaaaaatgaaaagataagcttcttcaattcaaaatcaggattggaagagaccataaatgtaaaataagtcataacacttttaccaaatatagtaatttgtcagaaatatttattcagcactcatatggtaggtgcagtagatgttaccaaaaacttataaggagatatgagttataagagtttatagtcttgcttgggatgtgtaaagcaatgcaagattatatattcaaactgaattttgctttaggaatttaaaatggagatctgtgaagttgtgtggggtcatcagcaactgcaagaaagtagccaggcaaggtagcacatgcctgtagtcctagctactcaggaggcttaaaaatatctgtgtaatttctaacaggagatcatccaagaatcgccgaaaagcggagcggaagaagcacagcctcaaagaaggcagtccgctggaggacctggccctcctggaggcactgagtgaagtggtgcagaacactgaaaacctgaaaggtatattctcagtcctgatgatgattcctgaccacaaacaatagtgaataggcagtacagacaggcagagttcagtaggtgattaagctaccattttcccaatttgaggaaagatgagaacttttagcaggaagggtcatgtctgcacacattcctgaagcagcccttcttagctggtaactgagaagccttcctccatttggcatccccctaactgaactgggagagatgcttaggccaggataaagaattgtgggacactgctttctgcgtaggccccccagcgtgcttgattttctttttgtagtacatgtgtttaattattccagcatttgggaagaaaaaagataatgtgggagaaaggacctgcagtgggatcatagaaatttttggctttggatagaagctatgtatgattctgtcaatggagctgggaatataacttaccactctttcaaatttcttctctctagatgaagtataccatattttaaaggtactctttctctttgagtttgatgaacaaggaagggaattacagaaggcctttgaagatacgctgcagttgatggaaaggtcacttccagaaatttggactcttacttaccagcagaattcagctaccccggtaagttttctcagagacggtgtgcatttttttcatcattttcatgggttattgtattcacacaatctccaagtcaaaaagttttcctgttcttaaaacataagatgccatagttaaattatcttagatttatgtgtaagctgtcagtaagatttgatatttgcctgtagagtgactagtataccttggcataggttaaatggactgtcattttcctttctggatgaagtagctgtcatggagaaaatgggaaagtcacatgattgctcctggccttcaatgaggttggagtggggagagatgggggaagatggggtcagagacggcctctcactttcctttcagaactcagggatgggatcaggctttaaagggaccccaggcaattgcttttccttttgttttatgaaaaatttgacttgtcacttctatgttgttatgatggactttgcgggttgtgtttaaggctgaatcagctttgtatcgcagaattctagtatattgtcatctgtttattatttatacctctgttcactctcttatacttcaagtctattgttaagagtttttatttggattcaaaaaggctggtgtatcagtcaagatctagaaaggaaaacaaaagcctatctattattttatcacagaatttaatatatggatttgttaaataagtattagaggactaaacaaggcaaaagggaaatacagaggaaggacattgagatagtaactgtaggaagcagctttaccctctagctgagggaacaggaggagttgttgggaattattagaatttagaagcctggaagtggggccctgtagagctggctcttgaacctctgagaggagggtgccagccagctaatcctggcatttctgagggagctggttccaagcgtacagaagtaaatggaaactggaaggaacagctgctgctgggggaaaagccagccggtcgggccaggtgtggtggtggctcacgcctgtaatcccagcactttgggaggccaaggcaggcggatcacctgaagtcaggagttcgtgactaatgtggccaacatggagaagccccgtctctactaaaaatacaaaattacccgggcatggtggcgcatgcctgtaatcccagctactcaggaggctgaggcaagagaatcgcttgaacctgggagacagaggttgtgatgagccaagatcgtgccattgtactccaacctgggcagcaagagcgaatctccgtttaaaaaaaaaaaaaaaaaagccagccaatcacggaagaaatctagaaatcttttgttcatcctccagctttgtactccccctctggtgttcactgtaggcaggacatgatgggaagccagcagcaaggaagaatatctttcaggtgcccagccccagcaccacaagcagtggatagaagggtgggttggagctgagagattacaaatcagctcagtgtttagaaacacatacgcttatcatgtcttgatttcctcatttagaaatgggcataagacttctctgtgtgcttcaatagaatgctttgaaggttaaataagagggtgtgtgtaaaagcactttacaaaccgttgaaataaaagcaactaggaatcagggccccagaacttcttgaatttattataataggtatttcttagaagaaatgtgatcatcatcttcaaaactgtagtacttttgaagataattgtttttgttttttgagacagggtctcactctgttgctcaggctggagtgcagtgatcaccgctcactgcagcatccaccgccccgggctcaggtgatcctcccacctcagcctcttgagtagctgggactacaggcgcatgccacaacacctggttaattttcaaattttctgtagagacagggtgtcaccaagttgtccccgctggtcttgaacaactcctgggctcaagtggtctgcccacctcacctctccaaagtgctgggactataggcatcagccaccatgcccggcttgaagataataatttataataccactcccatgagtgatcttctcttctgatcacatattcacattaaggtctattttattttatttttttcttgctctgtcacccaggctagagtgcagtgacagtatgatcaatcatggcttggtgcagcctcgaatgcctgggctaaagcagtcctcccaccgcagtctcctgagtaattgggaccacaggtgcacaccaccatgcccagctaattttaaaattttttcctagacatggggagagggagtcttgctgtgttgcccaagctggtcttgaactcctggcctcaagtgatcctcctgccttggcctcccaaagtgctgagattacaggtgtaagccaccatgcctcccacattaagttctaagacatcaattttatgattgtggttttgattggtgaagtatggttgtggtatgtgcaggataccgtgagtgacttctcatggcattgctcttgagagtgtgccaccaagggtctgcactaaccaggggtgtgcccagaggctcgctgcaggcttgaaattcctgcggagtcttgtgttttacctggagcacatgtgcacagtttccattctgctccatagtatgcacatgtttgtatttatttcaacctaaaaatgtttgtttcccataactctttgcgtataattgatactctacgtatttgtagcctcttttactcttttccctttcctcagggagtggtttgctcatttagaaaaggccaagatatatcactgtagagtttcgtttcttttcttttcctccaccccccatctttaccttgttctgggagaaaggagaattagaagtctgagttgcagctggagaaactggcaaattaaaatcacattgggaaagagaattactgtgtttcacaccataccagtagaaatgacaggctgttttctgggggtagggatttggcctttggtattggcagtcttgagaagtattagataatctttgctgatacagtctattttctcctcaggttctaggtcccaattctactgcaaatagtatcatggcatcttatcagcaacagaagacttcggttcctgttcttggttagtattttttctcatttaatattacaatactaagcagaaggactatctttctgtaagtattgagaagatcagcagtataaggagagattggatacaatttttcactacaaaaaattgactacaattcttcctcaattctaagaccgcatctttagtatgatcagtttcatgcttctagcggtgggggacctggtgcaggaaaatccagcatgaccattgtatgtgtaatttttaaaaatatttatgtggcatatgcttgttcataaaggcacaccacagttccagtttcagtctaaactgtctacatttacatatacatcaaaagattcttctgaagcatcattactggctattggcagttatgctttgcatcttgggggcattttcataaaccttgcttatgagtgggacctttttattatgtttaggattgacaatataatttgaaggcaaatccaaagaatattagcattttatacatatttcctgtttagttatgcatgaagtgttttatttgttgaggggagatgattctcaattagattacttatatccctaaaaattaaaaaccctaagcgctttcttttgaaagttggttagaaacatttgatgagtcagcttgggactttcagtatttgcccttacttatagttggatcaatgaagcatcttagctttgaaaagtgaatgatagtttctaaaataattggcagttttaactgctattatttgcatttctagcatgtgacaagcaactttctgaaattttttttcaccgaagtgctacactgtaatagcattttgatgacatttgaagtagcctgtggggattcaaattaagtttgactttaacagcttatgttgctaccaggaagaacagctaccttccatcccagctaaactcatacatccagactgtaactactgtattcctagctcctcttctgtctagagaatggcaaggttcttttggtatcagtttcgacatatccacttattcctttttttttcttaagttttttcatttagaaaaaaaaacagatggggtcttaatatgttgcccaggctggtctcagcctcctggtctcaagtgatcctcctgcctcggcctcccaaagtgctgggattacaggcgtctgcccctgtgcccagcccacttatttcccagatgctaggaacttacattagacctgaggccatttggtcattgtttattttgtgctgtagtccaatccagttgtgatttctgcctcctgtgttcctcgttgctggcctgatgctgaccttcaggttaggtcagtcccatcattccccagggtattctagatggctttcccacttcaaagagcactttcttgttttccagctgagccttaaagacactctgtaatatttgagagcccctcattatctgagtgtttattatcattacccttgtggtttcaaggatgtataggaaaaggtaagttcctataattcaaaaattgccactgatgaactaatcacaaaattagtgccactcaaatattactcagctgcccctccccagctaacaatagttaagtatattggcacatccccacaagtgaaatcaatgacttgatgggtcatttctgattgtttcctgctttgatgcaatacaatatcatgcagatcaattgcaagtcttgcaaaaatttagtattacataaaatagattaaaatgatattggaaaagtacttgaatcacagctgggttggacttgttgcaattgatgacaaaataagtgcttcaaatgattttgactatcaaaggattgagagaggtccttagaaaaattgaaaagccctcaagttatttttataaaaatggccttttttgtgtgctgtgaaatccacatatggaaatgtgaaatatgtcatgtcctgctgtcatataatttgtcagaataattactttcttgcccaaaagtctgtactttgtgtttatttcaagttaagtctagaatcaaatatagttgtagttatgcctaattttaaaaaatgagatagagcacattatttttgtaactagtttttttttttttttttttttttttttttttttttcagacagagtcttgctctgtggcccaggcgggagtgcagtggcgcaatctcggctcactgcaagctccgcctcccgggttcacgccattctcctgcctcaccctcctgagtagctgggactacaggcgcccgccatcacgcccggctaatttttttgtatttttagtagagacggggtttcaccgtgttagccaggatggtctcgatctcctgacctcgtgatccacccgcctcggcctcccaaagtgctgggattacaagcgtgagccaccgcgcccggcctgtaactagtttttttaagataaagtcttattccaactttaattggaatttatgaaataccttgttgatagtgaatttatttaagtagccttttttcagtattgatattcttatatctttatggcaccatttagtggagagaaatgtaaacaaacataaagatgtagtattaaatcataactgcataaaattaactgtagtatgtactgcactactgtaataattttgtagctacctcctgttgctattgtggtgagtgagctcaagtgttaccaatatctgcttaaaatgccatgtgccgctaaccatctccacatgagcagcacatgagagtctccattaattgcatatggcagcgaaaagtgatctcttgcattgtcgtgtattttttatcacgtttaatgtaatatcgtaaaccttaaataacaccatgagacctataggaagtaccacaagtgttgctcccaggaagcagagaaaagtcataacattacaagaaaaagttgacttgctcgatatgtactatagattgaggtctgcagctgtagttgcccaccacttcaagataaatgaacccagtgcaaggactattataaaagaaaaggaaatttatgaagctgtcactgcagttatgccagcaggcatgaaaaccttgtactttttgcaaaatacctttttatgttgtattgaagatgcagcttttatgtgggtgcaggattgctatgagaaaggcatacctatacaactattatgatttgagaaaaagcacagtcattgtatgagaacttaaagcaaaaagatgaaggatcaaagctggagaatttaatgccagcaaaggatggtttgataattttagaaagaggtttggctttgtaaatgtctggataataggaaaagcagctcctgccatccaggaggcagcagcaaaggcagtcaggtttatgatcaggactgcccttatctgtaaagctgctaacccccgagcctggaagggaaaagattaacaccagctgccaggcttttggttgtaccatacaacaagaaggcttggacaaggagaacactttttctggattggttccattgtcgatttgtccctgaagttaagtagtatcttgccagtaaggggactgccttttaaagttcttttgatactggagaatgcccgaggccaccccaaactccatgagttcaacaccgaagacattgaagtgatctacttgcccccaaacacacatctctaattcagcctctagatcagggtgtcataaggacctttaaggctcgttacaaacagtactctatagaaaggattgtcaaatgtatggaaaagaaccttgacagaacatgaaagtctgaaagaattacaccatcaatgatgccatcattgttatagaaaaagctgtgaaagccatcaagcccaggacaataaattcctgctagagaaaactgtgtccagatgtgcatgacttcacaggctttacgacagccaatcaaggaaatcatgaaaaagattgtggatctggcacaaaaaaaaaaaaaaaaaaaaaaaatggtgcatgaaggatttcaagataggaatcttggagaaattcaagaggtgatagacatcacaccggaggaattaacagaagatgacttgatggagatgagtacttccaaaccagcgccagacaatgaggaagattacataaaagaagcagtgccagaaaataaattgacatttgttccaaaggttccaattattcaagactgcctttggcttcttttacaacatggatgattctatgttatgggcactgaaactaaaagaaactgtggaaggattggtaccttagagaaatgaaaaagcaaaaacatcagaaattatggtgtatttctgtaaagttagtgacactgagtgtgcccacctctcttgcctcctctttaacctcccctacctgtttcatctctaccacccctgagacagcaagaccaacccctccacttcctcctctacttcagcctactcaacgtggagatgacaaagatgaagacctttatgatgatccacttccatttaatgaatagtaaatattgttttctttatgattttcttaatattttcttttctctagcttactttattgtaggaatgtagtatataatacatataacatacaaaacatttgttaactgactttttatgctgccaatacactgccgaacaacagtaagctattggtacttgagttttggagattcagaagttaaacatggggccaggtgtggtggctcacacctgtaatcccagcactttgggaggctgaggtgggtggaacgagaccaggagttttgagagtagcctgggcagcatggtgaaaccttgtctctacagaaattagccaggtatggtggtgtacacttgtagtcccagctacttgggaggctgaggcaggagaatcgcttgaacccagggggtcgaggctgcagtgagtcatgatcgtgccactgcactccaacctgggcaacaaaatgagaccctgtctcaaaaaaagaaaaaaaaaaggtatatgcagatttttgactgtgcaggggggtccgcacccataaccctacattcaaggatcaactgtaatttttcatgcctgcatggctcatatgtacagatttactgctggaagtttatcataaataatgctgaaaaagaaaatccttatatatacatattttctcctatctctgcttgcagtatatgattcctggttagaaaagaaacttaacaaatctaagtgaaagagtgcctgggagttttaggttacaatgacagaatcttttcctaaccctctctctccattcactttttttaaagcaggggcatctttattgatcaacatgtttgtcgaagtttcatcataaagtagttcctgtccattaacttcacttactgaatatgtgctatcacattttgctattccttaaaaattgagctagactttacatatagtgaaatgcagagatttcaggtgtacaatttgatgagttttaataaatgtatacagccatgtgactgctgccaccacccctcccaccagtttgaaatacagaacattcttccactttgaatcactgggtgagcatgcctgaggttgaaatgcagtccctcctctcagggcggggcctccaggttgtgtttgctctgacctggaggttgcaggggtagcagacacatgaactctggctctgatggtcttattgctgcaaactccacctgcctagtttgtttagtttagagttactgcctcagcgccctccaacaagagtatgtctgtcacaatttcccttcctttcttgcttttagatgctgagctttttataccaccaaagatcaacagaagaacccagtggaagctgagcctgctagactgagtgactgcagttaggagggatccgacagagaagaccatttccactcattcctgttgtcctaccaccccttgctctttgagggctggctattgagaactggaaagagtaaaatgataacttaccttagcattgccaagaacttcagcagacaacaagcaattctatttattttatgttgtgtatacatcttgatcattagcaagacattaagctttaaccattatggcaccattttgtgagaatgattgttctttcacttgggctgtttgagagcataattatggtaatcatgagattaatgtttcatgatttctacctccaaagtgtgaagacaagtaaaacaatgtttctaaattgtcttattttgttggcggagaagattacaatggctattagtgctacatttggtcaaatgtaatcacttaaatagcttcttgtcaccttaaactaaagcagaataaaaagtatcctttgaaattataagccctcctttgctgacagctattattttgtaacatcttaccaggtcatgtgctttcagttataactgggctgagcctcctataattacaatgtctatagggactgttttactgcctgtgtattttctgctagagagttagcaatgttagagctagaacagattagaatttctaaacagtatcatgcacagttggtgtgagtgatcagtgtgcattgtatggcatgcatggttgtgaattattctctgttctccaaatactgtttctttaactcagatatttttgttagtgtctaggccacttcatttatttttcgtcatggtactttactgacttctctttattcaattctccacgccctcaccaaaaaaaactgtctcaaaatgagaatattttattttcatggtgagtctagaaaacgcccacttcattctgattaaaaattcttccatgttttaaatatcagaaccagacctttcttactgtgtatcttagcccatttgtgtctctataacaacaaccagctttcaaaggaactaatagagtgaaaactcactcattaccacgaggatggcacaagcgattcacgtaggatctgcccctgtgaccaaaacacctcccattgggccccacttccaacactggtgatcacatttcaacatgaggtttagggaaacaaatgcctaaactacagcactgtacataaactaacaggaaatgctgcttttgatcctcaaagaagtgatatagccaaaattgtaatttaagaagcctttcccagtatagcaagatgttaactatagaatcaatctaggagtattcactgtaaaattcaacttttctgtatgtttgaacattttcacaatctcataggagtttttaaaaagaagagaaagaagatatactttgctttggagaaatctactttttgacttacatgggtttgctgtaattaagtgcccaatattgaaaggctgcaagtactttgtaatcactctttggcatgggtaaataagcatggtaacttatattgaaatatagtgctcttgctttggataactgtaaagggacccatgctgatagactggaaatagaagtaaatgtgtttattgataa

SEQ ID NO: 11850 - DNA, 2840 bp, Homo sapiens
gacctgagtacttcccagaatgcttaaacttgataaaagataaaaacttgtataacgaagctctgaagttatattcaccaagctcacaacagtaccaggatatcagcattgcttatggggagcacctgatgcaggagcacatgtatgagccagcggggctcatgtttgcccgttgcggtgcccacgagaaagctctctcagcctttctgacatgtggcaactggaagcaagccctctgtgtggcagcccagcttaactttaccaaagaccagctggtgggcctcggcagaactctggcaggaaagctggttgagcagaggaagcacattgatgcggccatggttttggaagagtgtgcccaggattatgaagaagctgtgctcttgctgttagaaggagctgcctgggaagaagctttgaggctggtatacaaatataacagactggatattatagaaaccaacgtaaagccttccattttagaagcccagaaaaattatatggcatttctggactctcagacagccacattcagtcgccacaagaaacgtttattggtagttcgagagctcaaggagcaagcccagcaggcaggtctggatgatgaggtaccccacgggcaagagtcagacctcttctctgaaactagcagtgtcgtgagtggcagtgagatgagtggcaaatactcccatagtaactccaggatatcagcgagatcatccaagaatcgccgaaaagcggagcggaagaagcacagcctcaaagaaggcagtccgctggaggacctggccctcctggaggcactgagtgaagtggtgcagaacactgaaaacctgaaagatgaagtataccatattttaaaggtactctttctctttgagtttgatgaacaaggaagggaattacagaaggcctttgaagatacgctgcagttgatggaaaggtcacttccagaaatttggactcttacttaccagcagaattcagctaccccgacatggggagagggagtcttgctgtgttgcccaagctggtcttgaactcctggcctcaagtgatcctcctgccttggcctcccaaagtgctgagattacaggtgttctaggtcccaattctactgcaaatagtatcatggcatcttatcagcaacagaagacttcggttcctgttcttgatgctgagctttttataccaccaaagatcaacagaagaacccagtggaagctgagcctgctagactgagtgactgcagttaggagggatccgacagagaagaccatttccactcattcctgttgtcctaccaccccttgctctttgagggctggctattgagaactggaaagagtaaaatgataacttaccttagcattgccaagaacttcagcagacaacaagcaattctatttattttatgttgtgtatacatcttgatcattagcaagacattaagctttaaccattatggcaccattttgtgagaatgattgttctttcacttgggctgtttgagagcataattatggtaatcatgagattaatgtttcatgatttctacctccaaagtgtgaagacaagtaaaacaatgtttctaaattgtcttattttgttggcggagaagattacaatggctattagtgctacatttggtcaaatgtaatcacttaaatagcttcttgtcaccttaaactaaagcagaataaaaagtatcctttgaaattataagccctcctttgctgacagctattattttgtaacatcttaccaggtcatgtgctttcagttataactgggctgagcctcctataattacaatgtctatagggactgttttactgcctgtgtattttctgctagagagttagcaatgttagagctagaacagattagaatttctaaacagtatcatgcacagttggtgtgagtgatcagtgtgcattgtatggcatgcatggttgtgaattattctctgttctccaaatactgtttctttaactcagatatttttgttagtgtctaggccacttcatttatttttcgtcatggtactttactgacttctctttattcaattctccacgccctcaccaaaaaaaactgtctcaaaatgagaatattttattttcatggtgagtctagaaaacgcccacttcattctgattaaaaattcttccatgttttaaatatcagaaccagacctttcttactgtgtatcttagcccatttgtgtctctataacaacaaccagctttcaaaggaactaatagagtgaaaactcactcattaccacgaggatggcacaagcgattcacgtaggatctgcccctgtgaccaaaacacctcccattgggccccacttccaacactggtgatcacatttcaacatgaggtttagggaaacaaatgcctaaactacagcactgtacataaactaacaggaaatgctgcttttgatcctcaaagaagtgatatagccaaaattgtaatttaagaagcctttcccagtatagcaagatgttaactatagaatcaatctaggagtattcactgtaaaattcaacttttctgtatgtttgaacattttcacaatctcataggagtttttaaaaagaagagaaagaagatatactttgctttggagaaatctactttttgacttacatgggtttgctgtaattaagtgcccaatattgaaaggctgcaagtactttgtaatcactctttggcatgggtaaataagcatggtaacttatattgaaatatagtgctcttgctttggataactgtaaagggacccatgctgatagactggaaatagaagtaaatgtgtttattgataa

SEQ ID NO: 11851 - DNA, 3823 bp, Homo sapiens
gggtgcggactgtgggagctgactctgggtagccggctgcgcgtggctggggaggcgaggccggacgcacctctgtttgggggtcctcagaccctcaggcagtttgattgcatctacacaagataaacccaaccagcaggatattgtgttttttgagaaaaatggactccttcatggacactttacacttcccttccttaaagatgaggttaaggtaaatgacttgctctggaatgcagattcctctgtgcttgcagtctggctggaagaccttcagagagaagaaagctccattccgaaaacctgtgttcagctctggactgttggaaactatcactggtatctcaagcaaagtttatccttcagcacctgtgggaagagcaagattgtgtctctgatgtgggaccctgtgaccccataccggctgcatgttctctgtcagggctggcattacctcgcctatgattggcactggacgactgaccggagcgtgggagataattcaagtgacttgtccaatgtggctgtcattgatggaaacagggtgttggtgacagtcttccggcagactgtggttccgcctcccatgtgcacctaccaactgctgttcccacaccctgtgaatcaagtcacattcttagcacaccctcaaaagagtaatgaccttgctgttctagatgccagtaaccagatttctgtttataaatgtggtgattgtccaagtgctgaccctacagtgaaactgggagctgtgggtggaagtggatttaaagtttgccttagaactcctcatttggaaaagagatacaaaatccagtttgagaataatgaagatcaagatgtaaacccgctgaaactaggccttctcacttggattgaagaagacgtcttcctggctgtaagccacagtgagttcagcccccggtctgtcattcaccatttgactgcagcttcttctgagatggatgaagagcatggacagctcaatgtcagttcatctgcagcggtggatggggtcataatcagtctatgttgcaattccaagaccaagtcagtagtattacagctggctgatggccagatatttaagtacctttgggagtcaccttctctggctattaaaccatggaagaactctggtggatttcctgttcggtttccttatccatgcacccagaccgaattggccatgattggagaagaggaatgtgtccttggtctgactgacaggtgtcgctttttcatcaatgacattgaggttgcgtcaaatatcacgtcatttgcagtatatgatgagtttttattgttgacaacccattcccatacctgccagtgtttttgcctgagggatgcttcatttaaaacattacaggccggcctgagcagcaatcatgtgtcccatggggaagttctgcggaaagtggagaggggttcacggattgtcactgttgtgccccaggacacaaagcttgtattacagatgccaaggggaaacttagaagttgttcatcatcgagccctggttttagctcagattcggaagtggttggacaaacttatgtttaaagaggcatttgaatgcatgagaaagctgagaatcaatctcaatctgatttatgatcataaccctaaggtgtttcttggaaatgtggaaaccttcattaaacagatagattctgtgaatcatattaacttgttttttacagaattgaaagaagaagatgtcacgaagaccatgtaccctgcaccagttaccagcagtgtctacctgtccagggatcctgacgggaataaaatagaccttgtctgcgatgctatgagagcagtcatggagagcataaatcctcataaatactgcctatccatacttacatctcatgtaaagaagacaaccccagaactggaaattgtactgcaaaaagtacacgagcttcaaggaaatgctccctctgatcctgatgctgtgagtgctgaagaggccttgaaatatttgctgcatctggtagatgttaatgaattatatgatcattctcttggcacctatgactttgatttggtcctcatggtagctgagaagtcacagaaggatcccaaagaatatcttccatttcttaatacacttaagaaaatggaaactaattatcagcggtttactatagacaaatacttgaaacgatatgaaaaagccattggccacctcagcaaatgtggacctgagtacttcccagaatgcttaaacttgataaaagataaaaacttgtataacgaagctctgaagttatattcaccaagctcacaacagtaccaggatatcagcattgcttatggggagcacctgatgcaggagcacatgtatgagccagcggggctcatgtttgcccgttgcggtgcccacgagaaagctctctcagcctttctgacatgtggcaactggaagcaagccctctgtgtggcagcccagcttaactttaccaaagaccagctggtgggcctcggcagaactctggcaggaaagctggttgagcagaggaagcacattgatgcggccatggttttggaagagtgtgcccaggattatgaagaagctgtgctcttgctgttagaaggagctgcctgggaagaagctttgaggctggtatacaaatataacagactggatattatagaaaccaacgtaaagccttccattttagaagcccagaaaaattatatggcatttctggactctcagacagccacattcagtcgccacaagaaacgtttattggtagttcgagagctcaaggagcaagcccagcaggcaggtctggatgatgaggtaccccacgggcaagagtcagacctcttctctgaaactagcagtgtcgtgagtggcagtgagatgagtggcaaatactcccatagtaactccaggatatcagcgagatcatccaagaatcgccgaaaagcggagcggaagaagcacagcctcaaagaaggcagtccgctggaggacctggccctcctggaggcactgagtgaagtggtgcagaacactgaaaacctgaaagatgaagtataccatattttaaaggtactctttctctttgagtttgatgaacaaggaagggaattacagaaggcctttgaagatacgctgcagttgatggaaaggtcacttccagaaatttggactcttacttaccagcagaattcagctaccccggttctaggtcccaattctactgcaaatagtatcatggcatcttatcagcaacagaagacttcggttcctgttcttgatgctgagctttttataccaccaaagatcaacagaagaacccagtggaagctgagcctgctagactgagtgactgcagttaggagggatccgacagagaagaccatttccactcattcctgttgtcctaccaccccttgctctttgagggctggctattgagaactggaaagagtaaaatgataacttaccttagcattgccaagaacttcagcagacaacaagcaattctatttattttatgttgtgtatacatcttgatcattagcaagacattaagctttaaccattatggcaccattttgtgagaatgattgttctttcacttgggctgtttgagagcataattatggtaatcatgagattaatgtttcatgatttctacctccaaagtgtgaagacaagtaaaacaatgtttctaaattgtcttattttgttggcggagaagattacaatggctattagtgctacatttggtcaaatgtaatcacttaaatagcttcttgtcaccttaaactaaagcagaataaaaagtatcctttg

SEQ ID NO: 11852 - DNA, 2097 bp, Homo sapiens
gcaggcggtgacgtgttgccggcgggggccgggcgggggtgcggctccaggaaaggagcgcggcctccaggaagccggctggccgtgatgctgcccactggtggtcccccgctcccggggtccccggccggccaagcaggagggctctaactccgtgaggaccccagcattatttctataattgtttgtgagaaggactgaatcccagagcattgccttgttgctgacctttcagtatggggaggattggcatctcctgtctttttcctgcttcttggcattttagcatatctccagtagggtgtcctcgaattctgaataccaatttacgccaaattatggtcattagtgtcctggctgctgctgtttcacttttatatttttctgttgtcataatccgaaataagtatgggcgactaaccagagacaagaaatttcaaaggtacctggcacgagttaccgacattgaagctacagacaccaataaccccaatgtgaactatgggatcgtggtggactgtggtagcagtgggtctcgagtatttgtttactgctggccaaggcataatggcaatccacatgatctgttggatatcaggcaaatgagggataaaaaccgaaagccagtggtcatgaagataaaaccgggcatttcagaatttgctacctctccagagaaagtcagtgattacatttctccacttttgaactttgctgcagagcatgtgccacgggcaaaacacaaagagacacctctctacattctctgcacggctggaatgagaatcctccccgaaagccagcagaaagctattctggaagaccttctgaccgatatccccgtgcactttgactttctgttttctgactctcatgcagaagtaatttctgggaaacaagaaggtgtgtatgcttggattggcattaattttgtccttggacgatttgagcatattgaagatgatgatgaggccgttgtggaagttaacattcctggaagtgaaagcagcgaagccattgtccgtaaaaggacagcgggcattctcgacatgggcggcgtgtcgactcagatagcgtacgaagtccccaaaactgaagaagtagctaaaaacttgttagctgaatttaacttgggatgtgatgttcaccaaactgagcatgtgtatcgagtctatgtggccacgtttcttgggtttggtggcaatgctgctcgacagagatacgaagacagaatatttgccaacaccattcaaaagaacaggctcctgggtaaacagactggtctgactcctgatatgccgtacttggacccctgcctacccctagacattaaagatgaaatccagcaaaatggacaaaccatatacctacgagggactggagactttgacctgtgtcgagagactatccagcctttcatgaataaaacaaacgagacccagacttccctcaatggggtctaccagcccccaattcacttccagaacagtgaattctatggcttctccgaattctactactgcaccgaggatgtgttacgaatggggggagactacaatgctgctaaatttactaaagctgcaaaggattattgtgcaacaaagtggtccattttgcgggaacgctttgaccgaggactgtacgcctctcatgctgacctccacaggcttaagtatcagtgcttcaaatcggcctggatgtttgaggtgtttcataggggcttttcgtttcctgtcaactataaaagcttaaagactgccttgcaagtttacgacaaggaggttcagtggacccttggagccatcctctacaggacccgctttctaccattaaggaaaatagggatgctgataataccttgctcagggggttgtccaaagctgtgttgtgcagtatggcagccaccaccatatggggccaccaaacacttgcaatgtgctgcttggaattgagatgcgctgcaaacgcaaagtacgtgctggatttcaaagacttagtacaaaaagaaaaaagaacgcaaaacatctcattaataatttttgtattgattccatattgaaatatattgcatcaaataaaatatatctttaacattga

SEQ ID NO: 11853 - DNA, 28486 bp, Homo sapiens
aggaaaggagcgcggcctccaggaagccggctggccgtgatgctgcccactggtggtcccccgctcccggggtccccggccggccaagcaggtgaggttgccttccgagcgtgggtgaggggagggcgggcggccgaaggggccggcgagtgggttggagtgcgggggccggcggcgcggcgagcgggccgcggacgagcctctctgccccaggcccccacagccgcctgcttagccccgcggaccggttcccgcctcccctgccgcgcggccacatccgagcgccccgggaccaacccctgtgagccctggcggccggcgcgctcccccagcccctggcaggggacacctggcggtcgcgcgcctcgggtgaccgctcgggatccccccctcgaatgggcggagcttgaccgggcagcagggatgctgcacccgggacccagccggccctgcctgccgctttaaatgatgacattcgctcgtcttgtcgttttcgctttgctttgcttttgccagatttcatgttagatttcttcttggaaaaatggagcttattgggcagtaaagtgatgatgcacagcattgtttctgaacttgagtaatgcgcggaccccttttaaaggaacaattctctcatggtctagaatgtgtcccagaacccttagggtgcttcagaccccagttagatgaaccctagtgcagagcgttttcagagaacacttatcacgaaggaaactaaagagatcctttatgattcaggaactttcaggctagaaggtaaactagaggtaatggaagaattctaaattagacactcaaagcccaggctaatttcgcattgcagtctttgttgtctcctttttgtgatgaaaataccaaattatccagctttagagaggcctaaaagagttatattatttgtgttaccatatatttgatgtttttgtatcaggtttgttaattctgtttgacatagtagaattataaaatggaacactaattcgtgtagttgaatcgtttatttctctgtttaccttaacagaggtcttgtagttgttgcatgttgaatctatggcttatattcttctacctctaataggaaatgtgtgactgaggcccttgaggatatagtctaggaaggagacaaaaatgaacatttatctaaggatttatattctctacgtatttactcagcatgtttatttaaaatagactactcatgaataaagagacgattccaattgtaagaaaacatcaggatgtgtaacaggttaaatcttgacaaagaaacatgttgacttgtgccttgaaagaagtgtagtcttgagaggaggacacggtggtggctcggaggaagtgctgttagtaaatgcctgaggcaggcatggagacagcttgtgtgggagagaagagagagacctgctgcactggagctgagagatggtatctgggactgatgagaggataggttggtgagataaggtggaccagttgatggataaaaggtttcaggtgccacacaggaaacttggtgttgatccatggccttccagaaggttcttagctgatcatattttgaaggccgtgttttacaaagagttgcttgtaaagtgtggcgtgcacagtgaaggcagaaggtgggtgagtcgccaagagatctgtcttgaggtagtggtgcctgctgtggtcatcttagatatgagggatatctgaggaagaatcgactggcttggagaatgatagaagattgtcaacaccggatgtgggaatcaaagctgagaaccaggtaatccaggtcaatggggattggtggtacccgtcttagacctggagaatttggagggtggtattagagtttgcattagaagatttcaaccctagagttggactagttgagcttgcagtaacagggcttcaatgagcttggaacgtggaactggaacttgaggaaagtcagagttaattcaggaaaagtgaccagaaaaagactacttaaaatgggaaccagaattttgcaaattaatagagggaggaagaggttaagattttatattgaaaaataaaattaaaatgtgtaagataaatattgaacatacagatcataaatgcaactacatacatatcttcttaaagaatgaatcaagttgtcttcatgtatcttttgtcactactgagtaacggtgccacccggcagcctccacatcagcctctcactctcagaaagacagttgtttcttgcaaaacgctgccggaatggttgagagcatctttaatttttccaggttctcttgaatcctttgatattcaaatcattcttttctgaagtacccttccctgtggtacctttgcttattcagaagctgagctctcccagaggctgacttctctgtgattttgtttgcctgtgatttgagttcactaacatctgtttccttgcatcttgtgtttttccaccagaggaaccatttccctttgtggttgatttgcattgttttcgtcgttatctgtagaactgtcagtgagagactgacaaagacattgacacctgactgtaggctttattccaataatgttcagccaagtagggccccactagctgaaatcatgagaattaatgcatctctctggtgataggtctaacacaatttaggcttttttaaaacatgtcagttttatgtggtattactgaatttgcctcccagtgccctggtgcgaagattcttagctagaaggacaattggagtttacatttgaagatcaaattaccatttaactcttaggcaataatccattgtacttttgtcctgagttaaaattacagtgcttcagcagttataagctgtcctattttctctgcttttaaacacaagctttgtaacttaaaatatctgtttgtccttttgatcaaaatcatcacatatctcaaaaaaaaaaaattcctgagacaaacctcagatgacacaaagtttcctaagtgcgctgtgatcattctctcggtcaccttcctcttcgaagtgtgttctttctcaccccatctagaattgacctcccacctctaggaatcttttcctgctaaagctagccttctctgtgctcttctctgagctcttataacaagaatcccagtaatttaacattgcctttaattagtatcttgactattttctgggcattagtattttctctgtagcaatctgcaaactccatgaaatttggagttgggtttgttactcctcatgtcaccttcgtagtcctgactttcttcctcaaggaccagtttgcctttaaccatgactttaagctgttaaataaaactgtcttttctttggttctcagttcagctatcacacaactatcactgatgttttttttaaatgttcagattggaattcctgtgtcctgataggcttttaagataggctttctcaatatattcggaaaagtatttgatcctggaaacaaggtttcatccgtcaaaggtagcttgttaaaaattgttatttcctctgatgataaaattaatatatgtcctttgaaaaatataggcaagcctagggaagaaaataaagatgatacctgatctcattgcccagaaataactaagcactgttaatattttggtttctttcctaacattttatccccccatgcatggggacattttttcacttaatatatcatgaacttgttttcatgtcaataaatagatctatgtcatcacctttaatagtcacattgtattccattgcataaatgtaccccacagtggacattagtaacagtgttttgctgttccacacaatactatgatgaccatcctatagattttttagtgaattttcctgatgacttcctaaagatgaatttctggaagtgtgatgggtagagcagaggataggcatgcataagtgttcgtgtgtgtcaccccagtacccccagaaggttagtgatgtgcctgtccagagtctcacagcagtactcatcgaccttttccccttcccctgttagccaagtatcaccaggccttcatgtctgtcaatatgatagctgtttttatttctatttatctgaatactgattattttatcagccatttcaatgagatttatttcaataatctcaaattgtctttgctcatttttctgttcagtctttctcttatttctttataataactggctatgtaaaggttatttactctttgtcatgcactttacaagtacttttcccaagttgtgtgtattcatagcagggagggatttttttgtttgttttaagcacacagaagttttaaacttgtgtagctattttataaaaacattaaaatccatttaaacgtctagatcattgatttttttttctttttactttttgtgtaaacttttaaatcacagacattgtttgtcctaaatttggggtacatggtacaatatggacaccatattaaaacttgaactaattaaagtgattttttcccctttgtcaggtaggcattattaatactttttactctctaatatctttgtgtgtatgttttatttcctccactgccttatagattctttaaggtctgggcctatatctaattcatctttgtgtctcccatttccagccatttgtgaaacctgcaatagttactcatgatttgtgtggcaggcactggtcacgggggaaacagaagaataagaggctgtccctgccctagtggggcttgtcatgtaatgaggaagccaaccacacgtataatactttagcccactgctgtgataagcaaatactctggggatatgaggattagggaaactcaccgaggactcatgcttgatttgtgtcagcattgattcttaggaatgcaactgacaacacaaggaagaggttcattctgctaatgccaaggaatgcgaggcatttcagtgatctgtagcttgtgtttcatgtggctggagcctagggtacgtaggaggggtctgtcagggaatgagacagaaagataggccccagatcagtactgtgcaaagagctttctgcgatgatgtcagtgttttatgtgtggactggctaatgcagaagctatatgtggctattaagcacttcaaaggtggctagtacaactgaggaactcaatttttaattttatttaaatttaattactttaaataaccacacatggcaagtggctgcctcattggacagcaccggactaaatcatgagggacctcttttacaccctaaggagttgactgtttcctgagtgagagagaaaagttgggggatggggagttatgattccctgtttgttttggaaatgtcactctagtgtagagttcttaacccttttgggtcccagaactctaaaacttgacttcttgccagtccctttcctagggtctgcaaagctacaactgcagcactcaactgagcagaccaaaacctgggcctgggggagctcccattctgggggaagagacaaaaaagagaaacacaagacacgcattatgttagaggacaaggatgggtggattctcacacttgcatcccacctctccctcccaggagctgtgtgaccttagacaagttacttagcctctctgcctcatccataaagtgttgtgataatagtatctgtcttgtaagttgttaggggaatgaagttagtatttgtacaatgtttggaacaaggcctggtacataatgagcactataaaagcatttaataaataaataaatgctaaggagaaaagatcaatcagggaagggaattgctggggagggggtaggcattgcagttattgatcaggtgaccagggaagtcctccttgagaaggtgacattatttgagtaaagacctgaagggaatgaaaaagtgagccatacagattacttcctagtagagggggcaacaagttgagagaccctgagaccagagagtgcctggcatttttgaagaccactcggaacattggtgtggctggaatgcagtgtaaaggaggagagagcagacgatgaggtcagagccttaacaggtgttagatcctgtagggctttgtagattggagtctttggaggatttctgagtacagaagtaatctgatcggggtcctgagcaaggggtgggagtgtggagctatcaatttccaagaaagtatcattgcccgagggtgataaaggcgaggtcactggttgagactgccggtagaagactagttaggctgctctttagagcaggcaagagataagagcctgatctcaggcaaagatgataaggaaagggattttagataagctgaggttaaagaaattaaaggaatctgtaagaaattacatttggggccaggcacagtggctcacgcctgtaatcccagcactttgggaggctgaggccggcagatcaccgggtcaggggctcgagaccagcctggccaacgtggcgaaaccccgtctctactaaaagtacaaaaattcactgggagtggtgacgggcgcctgtagtcccagctactcgggaggctgaggcaggagaatcgctttaacctgggaggaggttgcagtgagctgagattgtgccattgcactccaccagcctgggcgacaagagcaagactctgtctcaaaaaaaaaaaaaaaagaaaagaaaaaaagaaattacatttggaagatgaaggaagagggatcacacgtgaatctggtttccgatttgtgtagcttggtgggatcaagattgggactgcgggggcagagcagattaggagaaaaaggggagaagattgcagttgttaggggtgcagttttagaattttctcatggttctgtgcaacattcagatagagatggctcataggctgttgaaaaagtgtagaagagaagcctggggtggagaaagaaaaatttgagttacctgatcattgaagcctcagtaatgattgtagttagaagagaatgaggctagacagagagcctggaaacataagagtagtcggggttggcagagaacaacgcttaaaggatcctgagcagcagttattccagagctcagaagcagaccagacgagacagctgtcttgagaggtcaagcagctttgtgagaccgaggaaagatagagaccgcttgtcctttggcttcagcagattggaaggaggccctggctaaaggcatctgtctgctctgcaatttgaggcctggaggctggaggaggagtgataatggtggagtcggagaactgactagggacaaagtgccttgcacagtactttgtacataaaagggcagtctaatagacatttatcaagtgaatggatatttcaggttcacattcagcttattctgcctttctcctacctccaccccaaatctcccttgtaccataaggtatttaaggcctatttgatatcctgatattttggggtcacagacactttaggttagacagcactaactagtaccagacgattatcatctcttttgatttaggtctatattggacagtatgaaattaacttagaagtgtgttgctcagaataaacccttccaacagcttcagtgcaaggatcatgtatagattatatgtggttggatttaagcacacacttaaagaacgtagatgttttctttgatgatgctatctttgtgatttgtctcacttcctggaacaggagggctctaactccgtgaggaccccagcattatttctataattgtttgtgagaaggactgaatcccagagcattgccttgttgctgacctttcagtatggggaggtaagtgatgggcctaatcaccatgaaacatgaaatcttggtgatgcaaaaacaggtcttgagagaaaaaaaatctaaatcgcaagtgaaaaatgtgaagttgtgctgtgcttctgtttaagaccttttttcttccagggcccagtgaggtattttaatgcatgaagcactcttcaaggtgaagagtaaagaaattaactgtaaaataatagaatttatcccaaaggcagtgaaatttttttaaatcctaatcatatttctagaatgagcctctcattcttgacataaactgaggggaaaagttcttgattatttgcagaaatgtcttgtgggaatatttctaaaagtacaggacatagaaaactcatttattgactttgttatggggatgttgttaaaatgctgttttctcccattactcaagtcatctgggagaaatttgccttggacttcagtgttgagaaaatttgttcctcctgagctatttgtatatttctggtgtaatgggcaatgagctcagtcgtatttgcagcaggcccagcttacgacatgcctttctccatactgcattcccgtttggtctcatcatccttacactcgatttcatgatcgatttatatatttatgttattgaagttattctcgtaagcagtctctaattctgtatctatgttggagcaaagcagggtaaaattaaaaatctacataatactgtcaagagaaggggaaaacccagaagtgtcgtaaccttcagggcctgattctcattcagatgattttatgataaggggtttgtagctgttgtgtagcatatgcaagatgccagtatacagatacctacagttagggaaatccaggtagctcaagccaaatatcttattttaggatcactttaggtgaaggaagcctcattggagcagattgctttaaaatctttttccttctaatttcaggattggcatctcctgtctttttcctgcttcttggcattttagcatatctccagtagggtgtcctcgaattctgaataccaatttacgccaaattatggtcattagtgtcctggctgctgctgtttcacttttatatttttctgttgtcataatccgaaataagtatgggcgactaaccagagacaagaaatttcaaaggtaagagataaaaacatttgctttctagaccagaagccttaccttctgtcttacctgttttaggctgctggaacagaattccatagactgggtggcttataaacaacagcaatttgtttctaactgttctagaggttgggaaatccacgatcaaggtgccataggttttgtgtgtggtgagggcctgattcctggttctgagatgaggaggtcttcttgctgtttcctcacatgatggaaagggggtgagggggctccctgaagtttctgccctcatgaactaatcatccccctgaggccccacctcctaatagcatcgcattggtgattaggtctccaacatacgaattttggggggccccagacattcagaccataacaccatcatttcatggcttcacgacgtttggctttagattggaatttaaggaactgtaggaactagattctgtgccatgttcatcatggcatgaacagttaaaccatttgaagctagttaactgctaactaccaaatccatatcataagaggtcctggaataattatttatacataagcgtctcgtgtaatatgttttaagctgatttttgagttggtagtttagaaatagaattttgcattttggaatttgtttgaacttctgtaatggagtgtgtgtctgatttagatgatctttatcatcatcacttgttttgttttcttttgactcttcaattattcaacagttgtattgatgttatagtggtgctgctacatagcttagaaattactgacttggtatttgctgcattttctctgttagacttcaggtgatattctttgtctaaatcaaagcatacgtgtgtttctatacaaggtacctggcacgagttaccgacattgaagctacagacaccaataaccccaatgtgaactatgggatcgtggtggactgtggtagcagtgggtctcgagtatttgtttactgctggccaaggcataatggcaatccacatgatctgttggatatcaggcaaatgagggataaaaaccgaaagccagtggtcatgaagataaaaccgggtatgtaaatgagaacatctgcctggtaaccagggtgtgtaccttcattctctgtggcgtctttcatatcgttccctttctacaccatggccctgagtcaaacctcacaccaggacctgatgggtctccttgtttcactttcttttcccttttctgtccattttgcaaagggtgactaacaccttgataaaacatccaaacagacatgtctttttgtctcccatagcattttaaatagtgccttactcatggtatctacgcagatgttgctggttggcattaattatggagagttttttcctatttagtaaccattggtctctatccttaatgacaaggtaatttcagataactcatgaaaatctgtaatatattggcatatatttgtcacttttaaaaattgctggccacatgtagttctagtcatctagattatttggtgagtgtgaccacagaacttagagctaatcataattatgtatagtttttaaagatactgtaatttctaagccagtgtgacatgtaaaagtttaggtttggcttccttattaggtaatttacatcagtgatgctcttttttctgtatcatcaccatttccatggacagcagcttctgtcaggagcatttagaatgggagataccgggagtgccttgaaacaagttttatgtcttgatagttgatcactgatttcaaacagttgaccacagatcttaatagagatgcagcacttttatgtcatcttactaatgtattaaaatagtaaaatatcaaatgcaaacaatccaagaaatttatctggtaaattattagagaatattgataaataataattattatagcttattatccccatttcagaaataaaatttaaaagaatattcagtttaacatgagaaaaatacatatcctcatagaagagtctccaaccatgtagaatggtgacccctcgagtcctcattctttacggaataattcagaccccacctcctccttcaggcagccctcaacaagttgattatcctttgatgtatgggcagctaggaaccagcatattactcagaaaatctaaagtctgtacctcacttttcaggttaaagagagacaacctactgtgtgtctgtataccagcattattttatcagagtacatttccatgaacaaagattaattttttagtgagtgtcttctaagttttagttttatgtatttctaccccttaaatttttatgtatccctaacctagaaacattttcagttaaagtaatattgatcaaataaaaaacttacgagaagactgaaaaaataaagcattttacatttcatctagcttcacgtaccaggtcccatcagtgactaaacagatctcatggaataagatgaaaacttccatgccttggagttgtccttttagaacaaagggtcaactacattatcatcctagagtatacattagaatctcattaaaatcaggcttaacattggtctgtcttgcactatacaaagtgtatgaaatggaaatcaaaatacctttttattgcactactctgtcctgaagcatggacttccgtgtataacattgcagcaaggctctagaaatttcttaatagggtctggctagtttagggcttcgagtgcattgaaattgaattgtatgtgttgtcaaaaacttacagtttagtcaattttttgctaattcctttgatgaatcacttaatctttttgggtttgtaattttctaatgtgtgaaataaggtatttttagacttctaaagcgcccctcatttttaatattgtaggctaaatgacacctagaaatattcatttgtgtactcattcagcagatacatgctgggcacctgccatttgctaggcactgtgttaggtgctatgaatataagtttgaacagacacattttgtgcccttgagaagcttttagttgtaatgagacaggcaagtaaataggtaattttgatatggtgtaatgaatgtacatctagcaaaaggaagtaagcatggaatttaacaagagttgtcttcagggttctgttagggtgacttccatggaggctggagccaagtgggtgtgcaggaattaaccaggtgaaaaggggtagggaggtggatggagaagactcttcttggtggtggaggagcagggccctaaggccacagtaaggtgcattatggaaatgttagttcagtgtagctgaaggcaatggaaggaacatgggaagagataagggtgggtgagttatgcagagcagggtgttctagagttgagccttacctggaggacattgagccacaaaagaattggaagcctgaagaggcatcctttgggtagggaatggtggggagatggtcaggatcagagggtgggatgtgctgtggcaggctggcagagggcgtgtccaaagggatgaggagtaaagtcatgtgagaggaaccaaggagaggcgatctatgaaacccaggttgtgtgttgggatgagggagagggacttcatctaagaccctggcttgggctgctgggtgcccagcgctgatggcctcggagggaggtaaccagcagtgagagcaggtttgtagtgaaagttgagttcagattttgccatgatgcattgggggtggctgtgaggacaagcaagggcagtgtctggtggacagttaccccacgctcacctggaggctaatgagtgctgcatggctggtggcacagttcggagttcatggcatgctgatggtgatagcagcctcaggagggactgagctcacctgaggagagggggagcacgtttctcgagggcaggcaagagcccatgcgcatggcagtgacacacagcagatgctcagtcaggtctgtgtgctttgatgaagaagaaaaggacatagcactgaatagtgccaccaacatttaagtaaggtctgcagaagaagttgctagaaggataggaaaaactaaggaagtgtaatgtgtagcatgatttccctaaaattagccactctgaagaaacatcacatgttatagctaaaatatctgcttcttaactaaagtatcctgtttctctaggcatttcagaatttgctacctctccagagaaagtcagtgattacatttctccacttttgaactttgctgcagagcatgtgccacgggcaaaacacaaagagacacctctctacattctctgcacggctggaatgagaatcctccccgaaaggtgatcctccacagaagggcaagggtgagggtgggttcctggaggggagagggggtgttcttctcccccttcctccttctcctctccatcatcatcatcatcattgaaaggaaaatattcaaaattctttcttcaagtctgtaacagtaccagaactattcctttagccagaatccaccaaatagcctttaattgacttaggactataggcaacggtaaaggtgtcatttttaaaaacctaatctattttacgtagttaaggaatgcttgcagttgtagttttacatctagaaatcacataattcacacaacttgttcattttgaaaattcattcctaatataatctttccaacgaatttcttttttaaaaaaattaactgtttcatacaagatataccagatccctggttttgttttttgtttgtttatttttttccttttctaaacagaagataccaagctgtaatcttttgatttgtaaatgtttttattactttacagccagcagaaagctattctggaagaccttctgaccgatatccccgtgcactttgactttctgttttctgactctcatgcagaagtaatttctgggaaacaagaaggttggtatattggtcttcagtttaaaatttgggaagctgttcctttaaatcctccccattttcaccaatgtaccctttgttatactcctattgtcttaacatttgggaaataatagccttgaaatattacaatttttaaattactaaatcagtttcttatatgactagtctttgttgccctaacattaagccactgaaagataaccgtttgtcttcaccacatgtagtgacatagcttgatataaactcactttgatagaaaaggcttgtgtgccttgcctaagttgtgtggcttcctgggacgttgatcattattgagctgttggagcttcttctcgactttgatacactgagaaatatcaaatctttgttctattttcaaagaaatgattctccttgagaatgaaatgtcaagtcaatgaaattatttggggtatagcttgctagaaatgtataccaaaaagtatttcaaaagccgtctgtcatttcagcattaatacttcctatgtgaaagagactgtagagaatacagaaatggggtgaaatttacacattgctattcagctgcttacagacaattgagctacacagttagctgttctatgagggttttaggtaccagaaaaaagatgaggaaaaaatatcacaggagttcttaagagggaggcatttttttttttccagctagggccatgatggagaaagtgacatctgaactgcacctcaagggaagggatagttctaaatagaacatgccagagcatgggaagggtggggctctgagggaggggcaggaagcacacaccaggcagaagaaaggacttgactcaggacaggttggaaagagggcactgtggacagagaaacacaaatgttttagtttgactgggtggtggcccttctggaaggagtggcgggaatgttaacagttggctggctcttgaattgtcagtccaggaatttggacttctttctgtagatgagtccaatagcagagagtagagcaggttgcagcagaggaataggggcagggatggattagatggactacccaaggtgacaatgaaacccaggtgtagggaatgtgaaaatagaatcagacttggcagctgagtgaatggagggataaaggaaagagcagaagataccttgaattttttttttttttgagatggagtctcgctctgtcaccaggctggagtgcagtggcacgatcttgactcactgcaacctccacctcccgggttgaagtgattctcctgcctcagcttcccgaatagctgggactacaggcgccgccaccatgcccaactaatttttgtatttttagtagagacggggtttcaccatgttggccaggatggtctcaatctcttgacctcatgatctgcctgcctcggcctcacaaagtgctgggattacaggcatgagccattgcacccagctgataccttgaatttttaaaaccttggatttgacaggtttaacatcataaaagtgaaaattatagtattttgaaacataaatttcaaaagaaaactggcacctagcgtattgtatttccaacctgtgtagatggtataaaactataaacattaaagttgagagttcttggaaagccatttggagtaataaaaacatcagtagcaaggtgttatttcagatgattttacaggttatcagggagtgaaataagtgagacgtttgcacagactgcgcagataggagttacacaaaatgttttaaaactttttcttctcttcaccctgtaaaatgtctataggtgtgtatgcttggattggcattaattttgtccttggacgatttgagcatattgaagatggtaagtgtcatggttccaacaaatgtatctagttggaaattggtgcttttctgtttaatccaaaggctgaaaaaagagctaagctttgtgacactcctaagcgtgtaggagtagaatgagagcagctgcagttgaacgtaattcaacttgattttagttgggaggagtagactgggtttgcctgaatatgcttgaaatagaccatgaaaagaaggtgactcttcagaagagcccagttctctggattagttctgttccagtgaacactttctgttctttctagatgatgaggccgttgtggaagttaacattcctggaagtgaaagcagcgaagccattgtccgtaaaaggacagcgggcattctcgacatgggcggcgtgtcgactcagatagcgtacgaagtccccaaaactgtaagctttgcgtcctcacagcaggtcattatctgtacaaatttccttctgtttggtttggttttcatttaacgtgtgtccatcgttcttgttttgttttctgagtctgaacacatctttactgtgctggctgaggtgccgcctctcaacccaggagaaaggagacaggacgaacaaggcagacctcagctgagccgcttgtgtgtgttcattgaaatcagctggtttgttttctgaacgtagagtttttctttggtatatacgcagtcgcatgcttgagtttcagtttatattttctcttcaatcacgtcttttctcaacaggttttatgaaatgtaaaataataacatctgattttttaagttagaattgggggaaattcttttttttaatggttcagactttgagcttccttggggaagattgaggtttgtatccactgcttccacatctttcaactggtggtttactcgaactgttctccaccctgttctgtgccctctcagttgctgcctgggcagccttgtctagagaaccccggcacggtttccagatgtatttctgaattgctacacgtctttattactccatttgtgttcagctgtagattaacaccaaagcctagctttctggattttcccctcaaaggtgggcggcagcatagcgtggccggcgggggacggttcaaagtgagaccgtggagctagacaggcctgggtttcttcatcatcctcctcctcactagttgtgtgaccttgtgcaagtcatgtaccttctttaagctggtttcttcatctgtaaacgtgaacaaaagtacctacaacatggggttattagaaggtttaaatgagataatgcatccagtatatctaatgcactgccaggcagctagtatgttctcaataaatgttactgacatctttattaagttccttggaaaaatgctttgtaaattcaagtattacaatttgtttttcctacctcccattccagacatgcctctagagactgttacactctttgtaaaaaatcatgtttttccctctcaatataaagtaaaaaatacatagaaataacgtttggaataaatactgaaaaatcaagattaaaaatttcccatggattcatcacctaaaaaagccattgttagccttttagtgaatttctttttttttctactcatagttttaaaaaatatggttgttataatcttagtttatatgatttttgtcctttatttaacagtgcatgagcatgttcctccataagctattgattactgtaactaaccttcccttgctattatatatttagatgacatctagttttttctgtcacagaatgacaaaggacatctttgcatatagaaacatttccatgtttaggtgtatttccacagcataggattccagaaataaattatgtcagagggtatgaactattttgctgactttctctttcaaaaagtcataacagtatcacaaatttgcagcccatctgaaatttcctaaatcagaattgtcatattgaattatgagtgatgcttagaagggtccttgggaagtgcagaagcagacatttttgtcccttttagatgagactatttttagacttttctttttagtaggaggctaaagtagcttaagctattaaggtttgttatgcttatgtctgcaggaagaagtagctaaaaacttgttagctgaatttaacttgggatgtgatgttcaccaaactgagcatgtgtatcgagtctatgtggccacgtttcttgggtttggtggcaatgctgctcgacagagatacgaagacagaatatttgccaacaccattcaaaagaacaggtaaagcacctttcactacttggcagtcatttgcaaacctaggtctctcctcataaaaaacagacccaggcaaagtgggaagaactcaattagcaaaagtgtgttgcactgttagctttttattcccccactagctgagcagggagaagagatgaaagcacaccagggtcctgcctttggccctctgtcccaccgtgccctgaaggaggtgtgtgcgtgcgctctctcacccgcatctcaactgatggattagaaatttcaccatcaagctatagaatagtttggagccctgggtggtgctattcatgattcagagtccttgggaaacccagtatctggagcactcgtggtgtcctggaggcctcaggtagtgtgttctcttgttgctgaggagattgaaatatgtgatgttctggagactctgtggatgaagcagccagtgcagctagttagtggataagaaccatcgtgaagggaattattcaagagaaataaattatctagaagagtcagagttagtggcttttgaatttagcaatgaagctttaaaaaatgagtgtatgaagaattgtggtatagaaaatatataaaacaaaacagcactctattggtttaaattgactgtataagtgtaagtatatagcacttatttatttgaaatttgtaagaacataaaagctatttggataaataaaaaaatctgaatctggggttatgtaagctatcctatttattactgtgttttatttgtttattttgatgaaacaattttgagggaaaaaaatcctagttcatagagctaagagattgtatacttccttgattaatgtaatcttaataaacctgtgaaggcctgaacttgaaaaaagaccaagttggagctattcagtacatttaccacaaagtcatgtgtgtaaataggaaaagcaataaaaaccttttcctgtgtctcttccaaaagttaactgaatagttttaattataagattggtagtcccatgattttgtatttttaattggtatttagcacattttggtataatcatttttatagtagtcttaaactagaaatattttatagacaacatttgtaacatattttttccgaaaccttaatttttactcattggttttaatgtcagaaagctttatataatggatagtttagtggtacttcttaatttagatataggacaactaaaaataatagcatgaaatatatatttgactactcttggacttttatagtaattacaggtgtttcatatgtcatgaattgagcattgaagtacacatttatctcttcgccatttgtagtggtgattaatttttttaaattaagcgaacatttttatggcaaagaccttaatttattacattcaactgcatgatgagtaaccctgatctgaggaatacacaacttgtgagttgagtgaaaagtgaaaacttgactgtcggtgatgaatattgaattctgaccatgcttaaccctttaacagttcaacacctgtcaggcccctgtgatttcacagtatccaacaccaacatcacttgagattttgtgagctcttctctgtttcttgttgcttgaaggcatgcacacacaataggatgacagatgttaactcccagaaatttcattagcaagtaataagcctagtgcctttcagttaacaaaattaatgtttattttctacagggcatctcagagcccattgtacaatggaaactgctgtctgctgcagttgggacccatagctgatcaaggaaagaaataagttgaaacagaatgataaaaatagagccaagccttagacattctgtcttaacttctgtattcatttgctaatcttttcctctgaaccaaggtctgtttttagactccatcctttctttggcatgcactgcacccctcattgagataccagtttgtctttgtttaaagaatactgaggacttaaaagagatttgcaaggcaatttgataccaaatccttctagatgtttgctaatttttcccagttttaaaaatcctacccacacctagtttgataattttctagtaacttttctaaagcatctaacctgctttgcccaggaccggatcttgtcacagtcacgttccttccatctgtattaggtaaaaccacaagcactagtgcaaaaatggggctggtaacacagttgccttgtgcccagcagctgggaacatcaggccttgttgccaggatcgtcggctaatcgggtaggttatccaactggactctggtagcctgtctgctgcaggcaagtttgtatcctgactctccaagaaagtctcaagtgtgtattttcctaactaattatctcggaacccttttctgttccacagacacggtcctgcaggtctcatgtcccacagagcgtattttgagaaacactggtttgcagccacttcctgaaaacacagttttctgtaggactcacgatgaagtttcttgttttgccataggctcctgggtaaacagactggtctgactcctgatatgccgtacttggacccctgcctacccctagacattaaagatgaaatccagcaaaatggacaaaccatatacctacgagggactggagactttgacctgtgtcgagagactatccagcctttcatgaataaaacaaacgagacccagacttccctcaatggggtctaccagcccccaattcacttccagaacagtgaattctatggcttctccgaattctactactgcaccgaggatgtgttacgaatggggggagactacaatgctgctaaatttactaaagctgcaaaggtacccttgagagacgccgtctgctctgcatgcttttgagagaccagtgtggacggtgacgggttatgtcctcctttcacattgacagggaaagacggagtatagaaggctgcactgcagcatgttgggatcctgttccctttgcttggagggaggttgaatagtcacagcagaagtaaaaaatgtactgtacgctgacttctgcaccactccattagctaccctggtcatcagttagctccaaattacagtcttttatgtcatttttgtgctttgctgcatgtgacaattctcctactagccttccccctccctgacctgccaggatactcctgttcttgtgttctctctgccttcctgacaccccttaaacttaggtgatgccagacttccacacttggcccctgatcttcaggttcttggatggtctcatccatattcagggtttgctgctgcctctcaagaagaggctccaatcctgacccctgcccggttgcctgctagattccacaactccagacaaacccaccatcctctctccattctgttcctgttcttctctcggttaatggcatcgccaaccatccagtccccttccctgcagcctaggagtcatggacttctccctctaaccatttcatctctccctatacaccccagtgtaatcagtcacaagtgtggtattttatcttccaagtatttctcaaacccatctcgaagcgcagagcactgtatgctgtaatcatgtcagacagctggcttccctcacgctctccgcgacttctctgtgtccatgtccatgttcctgaagtgcctatgccgagcccgttccccaggccaagtgctttttccttgtgctccctgtcacacacccaggcccatctcccacctctcagcagtgtcttcatcctttaaatagaggtcgggatggtagccacctcgaggagttaagtattacattgagaagacacacttacacaatgctcaataaaagttattataacaaataacttcaagaaaagtgggatctctttcccttctgttaaagacaaaaaccttttgcagttattatcccagtagcttgtactgtgtcctccacagatgtaggacttagtttgaagtagctaaaatactgcttcacttttccaaaaatgtatgcccgtaccatgcagtcatggagggagaaactaaacagttttggagaggttggttgtggacagcaaagctctctttaacaataccctggacagaattttaaggcaaggcattgtgtttgcgaatcagtaagtattccctgagtgtttgtgtgtcttgccatttgttgtataagttaagcttgtgtgtttcctaatgggaaggatatgcttgttacaaatataaatttggtaaaccatttttaaagtgagaattttaataagcctttactagtgatctattttggtgaatttgttttcaggattattgtgcaacaaagtggtccattttgcgggaacgctttgaccgaggactgtacgcctctcatgctgacctccacaggcttaagtaagtactagaaggtcaagcccagggcactcttaagaaccataatgcagtgttggccccactggcttgccacaccctggcctcagtccagcttcttctcactcactgttcttcccatctaccctgggcccctttcaaacgggacaaatacttgtgcccagacatattccgtatcttttttgttttggtcacttttactgtctcttacccctgaaattcccctgttcatacctttgcttgttcaagtcctgcccagacatcagagtccagccagaggctgtccctttccagtcttcctctgtcccctcaatcagacttcatccctttctctgagtctcaagaattcatcctacctcgccaatgcatttatcatgttctgctttttctgttgctttttaaaaatcccctttcattgtaagtcacttaagtgcagacactgtatcttactaattattgtatcttattacttgcttagcacagtgcttggcaaaaaataaacctctaataaatatttagagtcatagaatatcagagctgaagagaaccttcctaccatctcattttataataaactgaggtacaaagaggttggaacctgttcagtattcattcaaggagtacatggtgaaatgccagctggaaaagaaacctatctcagggatatatgacattatgccgagaccgggttcatgcactgattgatttgacaggtgaactgctccatgttgtgggaccagggatgtgaagcaagtacatcaaccttgaaacgcgcgcagttggtttgggagagccggcctgaggaagcccctgccccaaggctgcccacagagggaaggattgtgtgtgtgtgtgtgtgtgtgccatcttgacagagtgagtcagtctgacttgcctttgtgcttgccgtttgtaggtatcagtgcttcaaatcggcctggatgtttgaggtgtttcataggggcttttcgtttcctgtcaactataaaagcttaaagactgccttgcaagtttacgacaaggaggttcagtggacccttggagccatcctctacaggacccgctttctaccattaaggtagggctgtgaatttgggaacgagaatcaaaaagatgcttttctgcagttacagcacctcatggcagctgtggtctgtggctgtttggggcattgctgttagagccggccacggcagaattgtagggacagtgacgtttgcttttggtcttgccccctccccacaagtgcttcctcccttctcaccctaccatcccgtaatacacagcactcctgtcctactgccctgtgtttggttattctcaactgtctgttccccagccccggcaaaagggtcagttccggggttcttaacctttatgactcaggcctcttctccaaatactgtttaaatgcatgtataaatacataggattacagaagaaaccatcatattgaaataataccaaaatattacagaaaacaagtttgtgatactgtaatatgtgttcttctctattaacacattaaataacaggatctggcagcagaattagcactttctgtaatttcagtgtagtcaatgagcgtcaatgatattttgaggcattgatgataccataatgggacatgaaagatctgtgattttcgttagtaacaaagttgcaggtgctgccaacgctaatgatagtttgttgtctgcattcatggtcaaagaaatgctacatctcagtcagcgcttgggtagaacaaagatgtgcgtttttccccattcacgtttgcagatctgctgtcagttgacctgtgctaagaacctgagttacctgatagatgagacatttgctcttccccccaccccctccatttaattgagcatttctcagcaacccttttaactgggttaactgtaaaaatggtgagtcatgggtgttactgatcacaagcatgcagtttgtttacatgttgacttctttgtatcagcgaaaccttcacggctcttctaaattcctctgattttggttgcccaaattataatgaccgacttcagagtatactttcacatgttatctcactgatacttagaagccccctgcattgggctgttccgttctccatttcagaggtagggttgcagttcctaaagtgcagctctggggcctgggtcccgccgtccccctgtgcaccctttccacccctttccttgcttactgtcctgtttgttgtttggtgttcacatgggcagagacatccagcaggaggccttccgagccagtcacacccactggcggggcgtttcctttgtctacaaccactacctgttctctggctgcttcctggtggtgctgctggccatcctgctgtacctgctgcggctgcggcgcatccacaggcgcactccccggagcagctcggccgccgccctctggatggaggagggccttcccgcccagaatgccccggggaccttgtgatccagctcacagctccacgaagactcaaaaggaaaagccatttttgcctcagggtttctcctctttattttcctgtggttttgttttttctttcccttttttgttcctccaaacaaaaacaaaatgcaggccgagcgcggtggctcacgcctgtaatcccagcactttgggaggccgaggcgggcggatcatgaggtcaggagatcgagaccatcctggctaacacggtgaaaccccgtctctactaaaaatacaaaaaattagctgggtgtggtggcgggcgcccgtagtcccagctactcaggaggctgaggcaggagaatggcatgaacctgggaggcagagcttgcagtgagccgagatcacaccactgcactccagcctgggcgacagagtgagactccgtctcaaaaaaaaaaaatgcattgtttataagccctgctgtctagaagtattgcgtttagccattttgagtacagcattaaattgaggagtggggaagagggaaattcacttgatttttgctgcacaggatatctgccaaaaataaatgagatttctggggtttctctaaggaatgttaaatttaaacacatgcactttgatactggagggaggtggaaagatgcattctgtcagtggagaggggactgaatagtgatgctttcatagaaccaaaaaacttactgcctgaaatgataatcctcttttttctctatcttgaaagctctaacctgaagagggtgatttttttttttatttattgttcaggtctgttactgtatatgttttctttgcaaatttaaattttttaaaccatttatatccaaaacagagaaacatgggcaccaggagataaccatttataaaagtgatagtgaactatcgactacagctttgtgcgagtgtgtgaaaaatcccaagaaaccagcgtgaggggaggcaatgctggttctttaaaaacacacacttcagaatttactggtacattttatttagaaaaatcctcgttactgttatcttttcctgaccgcaggtaattacgctccttattccatatttcagtggcattagaacactgtggttttgaaagaattggaaattcctagtttcaccagtttcggttttattggaactagagcacatgcccacttcttgctcagtattcctcagtgtttctgcttaatcgtgcctcagtttcttccagcttccaattggtgtttcccccaccccccttaattaaaagtcatctcagcttttaatcgtactgggagaccccatgcacagcctgccgagtcctcttcctaaccgcattgactgaggctgttgctggcagcaccactgtaaatccagaagggaagagtctgcatccaatacaggaaataaattcacattttgaaggaaaaaattcgacaatttaagccaaaatctaaaaaggacaattggattggcatatgtgagattggtgttttttcacctatttatttagttgagaagtttggggaattctcgtacagtttttttaggtggagtttgttttgtgcgagtgtctgtgtgtgctgttccctaactccagaacagttaaattcctgtagttggtagcagattagtacccagaagtggggttgttgctataacagataactgaggatattataaaagtggctttggaactaggtactgggcagaggctgggagagtttggagaaacaggagagaaaaggcctgtattgccatgaactgagcattaggggcagttctgctgagggatcagaagagaagaccaagggaattctgtcccagttgtggctcaaactgcctcaggtgcagcttaacctgcgtctctggaaggtaaaatgcatctgatccttgaggcaagagctgtgggggcatggctccctcacctggatttcaaagcgtgttaccagcagcctggggacccaggctctgcctctggatttacctgcatcgtatttgcgcttcgtggtcaaagttgttaagaaaggggtgagcttctggctacctaataagttggtcttggccacctgcctgcgacacttcctggaggagccatggattattggtggaggctgcagggagctggcgatggagccactggtgtcagcagcagagagggaagaaaggaaaggaaggggccacaaatggttgaagtgggcaggtgggcacccagggagttaggggaccccgccttccagctctgggcatagaagagttagtcacatacctgaggatcctgaaacaagggctgagaaaacctcattgctccagctgagaggtagtagtggatttgccatttttaaacagttgcctaagaaaaaacgttgaagaatatgcagcagacactatatgtggcctgtaaagcctagaatatttactaaaatatttacagaaaaagtttgctggtccttgtgagaacaatgcagttcaaaaaaggatacagacagaagcatcctcttaaatcaggaatgtagtttccatttgtgggcacgaaaagatggacaagagaagtaaccaaacttcaatcttaaaatatttgttgcaccagaatttcacttcggatttttccgtctagattattttcaagatgagttttgaaacaaaccaagaaacctgcccctcacccaaaattgtttaaaaagagaccactcaagggagttcattatgccgtatggagatgtctgcagtcgcagcaaatcacattccagagaaggtctcgcgtaggtgaagacagccaggtgctttctctaagagatacagggtgggtgagagacaagccagggaggatcttaattcaagagaagaattcataccaagagctgaccaagaaggcagtaaattctgtgtacttgtagcagaagaaattggactaggaacttgcccaaagctttatcaaagaaaagcattgtgttcaatcttggtagaaacatgccagcaataagtgcttatgttccatagccatatcatgggcttctcacttttaaacctcctccaggggatgttctcagacatttcacaatccctctggggacattacagtagaagagaaacacatggaactgtaccagtgctttttgcccatgttcatcctaagctccggctttaggcagtgctttctgacctgggcggagtgaagacgctgctggtggctgaggccagtaacatggggcccctgcccagccaccctgaaggctgggtaggtccctcttttcaccaccagttttccacatctgtgtactctagattaacaaactctggataaacagatatttacattttaaactcaggcctacacagagtagttttccttataaggagcatgtatcacttagcaagaaactaaaaatggcaaatgagtttttcatcctttaagaaaaaaatcagctttagaattctctgcggtcagttgtgtgcaatgcaacaaaactacctttcagtaaattacttagttatttatttcagtgttttgtttcttttgatactaagtttccctttcaataatgaatgatgtgaccaaccaaggagaatttgtttgttctgtactaaaattatattttacagttaggaattataaaaagcaagggagcatctttaaatgttttttgtttaagcgatgtcttccatccaaagtaagaataatactctcggaaggtccttttggtgtcatgtcacttgctgtatgtggcagccttacagtgccacacttgggtactgaaaaatcaataaaacgaaagttcatcatccca

SEQ ID NO: 11854 - DNA, 5803 bp, Homo sapiens
aggaaaggagcgcggcctccaggaagccggctggccgtgatgctgcccactggtggtcccccgctcccggggtccccggccggccaagcaggagggctctaactccgtgaggaccccagcattatttctataattgtttgtgagaaggactgaatcccagagcattgccttgttgctgacctttcagtatggggaggattggcatctcctgtctttttcctgcttcttggcattttagcatatctccagtagggtgtcctcgaattctgaataccaatttacgccaaattatggtcattagtgtcctggctgctgctgtttcacttttatatttttctgttgtcataatccgaaataagtatgggcgactaaccagagacaagaaatttcaaaggtacctggcacgagttaccgacattgaagctacagacaccaataaccccaatgtgaactatgggatcgtggtggactgtggtagcagtgggtctcgagtatttgtttactgctggccaaggcataatggcaatccacatgatctgttggatatcaggcaaatgagggataaaaaccgaaagccagtggtcatgaagataaaaccgggcatttcagaatttgctacctctccagagaaagtcagtgattacatttctccacttttgaactttgctgcagagcatgtgccacgggcaaaacacaaagagacacctctctacattctctgcacggctggaatgagaatcctccccgaaagccagcagaaagctattctggaagaccttctgaccgatatccccgtgcactttgactttctgttttctgactctcatgcagaagtaatttctgggaaacaagaaggtgtgtatgcttggattggcattaattttgtccttggacgatttgagcatattgaagatgatgatgaggccgttgtggaagttaacattcctggaagtgaaagcagcgaagccattgtccgtaaaaggacagcgggcattctcgacatgggcggcgtgtcgactcagatagcgtacgaagtccccaaaactgtaagctttgcgtcctcacagcaggaagaagtagctaaaaacttgttagctgaatttaacttgggatgtgatgttcaccaaactgagcatgtgtatcgagtctatgtggccacgtttcttgggtttggtggcaatgctgctcgacagagatacgaagacagaatatttgccaacaccattcaaaagaacaggctcctgggtaaacagactggtctgactcctgatatgccgtacttggacccctgcctacccctagacattaaagatgaaatccagcaaaatggacaaaccatatacctacgagggactggagactttgacctgtgtcgagagactatccagcctttcatgaataaaacaaacgagacccagacttccctcaatggggtctaccagcccccaattcacttccagaacagtgaattctatggcttctccgaattctactactgcaccgaggatgtgttacgaatggggggagactacaatgctgctaaatttactaaagctgcaaaggattattgtgcaacaaagtggtccattttgcgggaacgctttgaccgaggactgtacgcctctcatgctgacctccacaggcttaagtatcagtgcttcaaatcggcctggatgtttgaggtgtttcataggggcttttcgtttcctgtcaactataaaagcttaaagactgccttgcaagtttacgacaaggaggttcagtggacccttggagccatcctctacaggacccgctttctaccattaagagacatccagcaggaggccttccgagccagtcacacccactggcggggcgtttcctttgtctacaaccactacctgttctctggctgcttcctggtggtgctgctggccatcctgctgtacctgctgcggctgcggcgcatccacaggcgcactccccggagcagctcggccgccgccctctggatggaggagggccttcccgcccagaatgccccggggaccttgtgatccagctcacagctccacgaagactcaaaaggaaaagccatttttgcctcagggtttctcctctttattttcctgtggttttgttttttctttcccttttttgttcctccaaacaaaaacaaaatgcaggccgagcgcggtggctcacgcctgtaatcccagcactttgggaggccgaggcgggcggatcatgaggtcaggagatcgagaccatcctggctaacacggtgaaaccccgtctctactaaaaatacaaaaaattagctgggtgtggtggcgggcgcccgtagtcccagctactcaggaggctgaggcaggagaatggcatgaacctgggaggcagagcttgcagtgagccgagatcacaccactgcactccagcctgggcgacagagtgagactccgtctcaaaaaaaaaaaatgcattgtttataagccctgctgtctagaagtattgcgtttagccattttgagtacagcattaaattgaggagtggggaagagggaaattcacttgatttttgctgcacaggatatctgccaaaaataaatgagatttctggggtttctctaaggaatgttaaatttaaacacatgcactttgatactggagggaggtggaaagatgcattctgtcagtggagaggggactgaatagtgatgctttcatagaaccaaaaaacttactgcctgaaatgataatcctcttttttctctatcttgaaagctctaacctgaagagggtgatttttttttttatttattgttcaggtctgttactgtatatgttttctttgcaaatttaaattttttaaaccatttatatccaaaacagagaaacatgggcaccaggagataaccatttataaaagtgatagtgaactatcgactacagctttgtgcgagtgtgtgaaaaatcccaagaaaccagcgtgaggggaggcaatgctggttctttaaaaacacacacttcagaatttactggtacattttatttagaaaaatcctcgttactgttatcttttcctgaccgcaggtaattacgctccttattccatatttcagtggcattagaacactgtggttttgaaagaattggaaattcctagtttcaccagtttcggttttattggaactagagcacatgcccacttcttgctcagtattcctcagtgtttctgcttaatcgtgcctcagtttcttccagcttccaattggtgtttcccccaccccccttaattaaaagtcatctcagcttttaatcgtactgggagaccccatgcacagcctgccgagtcctcttcctaaccgcattgactgaggctgttgctggcagcaccactgtaaatccagaagggaagagtctgcatccaatacaggaaataaattcacattttgaaggaaaaaattcgacaatttaagccaaaatctaaaaaggacaattggattggcatatgtgagattggtgttttttcacctatttatttagttgagaagtttggggaattctcgtacagtttttttaggtggagtttgttttgtgcgagtgtctgtgtgtgctgttccctaactccagaacagttaaattcctgtagttggtagcagattagtacccagaagtggggttgttgctataacagataactgaggatattataaaagtggctttggaactaggtactgggcagaggctgggagagtttggagaaacaggagagaaaaggcctgtattgccatgaactgagcattaggggcagttctgctgagggatcagaagagaagaccaagggaattctgtcccagttgtggctcaaactgcctcaggtgcagcttaacctgcgtctctggaaggtaaaatgcatctgatccttgaggcaagagctgtgggggcatggctccctcacctggatttcaaagcgtgttaccagcagcctggggacccaggctctgcctctggatttacctgcatcgtatttgcgcttcgtggtcaaagttgttaagaaaggggtgagcttctggctacctaataagttggtcttggccacctgcctgcgacacttcctggaggagccatggattattggtggaggctgcagggagctggcgatggagccactggtgtcagcagcagagagggaagaaaggaaaggaaggggccacaaatggttgaagtgggcaggtgggcacccagggagttaggggaccccgccttccagctctgggcatagaagagttagtcacatacctgaggatcctgaaacaagggctgagaaaacctcattgctccagctgagaggtagtagtggatttgccatttttaaacagttgcctaagaaaaaacgttgaagaatatgcagcagacactatatgtggcctgtaaagcctagaatatttactaaaatatttacagaaaaagtttgctggtccttgtgagaacaatgcagttcaaaaaaggatacagacagaagcatcctcttaaatcaggaatgtagtttccatttgtgggcacgaaaagatggacaagagaagtaaccaaacttcaatcttaaaatatttgttgcaccagaatttcacttcggatttttccgtctagattattttcaagatgagttttgaaacaaaccaagaaacctgcccctcacccaaaattgtttaaaaagagaccactcaagggagttcattatgccgtatggagatgtctgcagtcgcagcaaatcacattccagagaaggtctcgcgtaggtgaagacagccaggtgctttctctaagagatacagggtgggtgagagacaagccagggaggatcttaattcaagagaagaattcataccaagagctgaccaagaaggcagtaaattctgtgtacttgtagcagaagaaattggactaggaacttgcccaaagctttatcaaagaaaagcattgtgttcaatcttggtagaaacatgccagcaataagtgcttatgttccatagccatatcatgggcttctcacttttaaacctcctccaggggatgttctcagacatttcacaatccctctggggacattacagtagaagagaaacacatggaactgtaccagtgctttttgcccatgttcatcctaagctccggctttaggcagtgctttctgacctgggcggagtgaagacgctgctggtggctgaggccagtaacatggggcccctgcccagccaccctgaaggctgggtaggtccctcttttcaccaccagttttccacatctgtgtactctagattaacaaactctggataaacagatatttacattttaaactcaggcctacacagagtagttttccttataaggagcatgtatcacttagcaagaaactaaaaatggcaaatgagtttttcatcctttaagaaaaaaatcagctttagaattctctgcggtcagttgtgtgcaatgcaacaaaactacctttcagtaaattacttagttatttatttcagtgttttgtttcttttgatactaagtttccctttcaataatgaatgatgtgaccaaccaaggagaatttgtttgttctgtactaaaattatattttacagttaggaattataaaaagcaagggagcatctttaaatgttttttgtttaagcgatgtcttccatccaaagtaagaataatactctcggaaggtccttttggtgtcatgtcacttgctgtatgtggcagccttacagtgccacacttgggtactgaaaaatcaataaaacgaaagttcatcatccca

SEQ ID NO: 11855 - DNA, 24770 bp, Homo sapiens
gcaggcggtgacgtgttgccggcgggggccgggcgggggtgcggctccaggaaaggagcgcggcctccaggaagccggctggccgtgatgctgcccactggtggtcccccgctcccggggtccccggccggccaagcaggtgaggttgccttccgagcgtgggtgaggggagggcgggcggccgaaggggccggcgagtgggttggagtgcgggggccggcggcgcggcgagcgggccgcggacgagcctctctgccccaggcccccacagccgcctgcttagccccgcggaccggttcccgcctcccctgccgcgcggccacatccgagcgccccgggaccaacccctgtgagccctggcggccggcgcgctcccccagcccctggcaggggacacctggcggtcgcgcgcctcgggtgaccgctcgggatccccccctcgaatgggcggagcttgaccgggcagcagggatgctgcacccgggacccagccggccctgcctgccgctttaaatgatgacattcgctcgtcttgtcgttttcgctttgctttgcttttgccagatttcatgttagatttcttcttggaaaaatggagcttattgggcagtaaagtgatgatgcacagcattgtttctgaacttgagtaatgcgcggaccccttttaaaggaacaattctctcatggtctagaatgtgtcccagaacccttagggtgcttcagaccccagttagatgaaccctagtgcagagcgttttcagagaacacttatcacgaaggaaactaaagagatcctttatgattcaggaactttcaggctagaaggtaaactagaggtaatggaagaattctaaattagacactcaaagcccaggctaatttcgcattgcagtctttgttgtctcctttttgtgatgaaaataccaaattatccagctttagagaggcctaaaagagttatattatttgtgttaccatatatttgatgtttttgtatcaggtttgttaattctgtttgacatagtagaattataaaatggaacactaattcgtgtagttgaatcgtttatttctctgtttaccttaacagaggtcttgtagttgttgcatgttgaatctatggcttatattcttctacctctaataggaaatgtgtgactgaggcccttgaggatatagtctaggaaggagacaaaaatgaacatttatctaaggatttatattctctacgtatttactcagcatgtttatttaaaatagactactcatgaataaagagacgattccaattgtaagaaaacatcaggatgtgtaacaggttaaatcttgacaaagaaacatgttgacttgtgccttgaaagaagtgtagtcttgagaggaggacacggtggtggctcggaggaagtgctgttagtaaatgcctgaggcaggcatggagacagcttgtgtgggagagaagagagagacctgctgcactggagctgagagatggtatctgggactgatgagaggataggttggtgagataaggtggaccagttgatggataaaaggtttcaggtgccacacaggaaacttggtgttgatccatggccttccagaaggttcttagctgatcatattttgaaggccgtgttttacaaagagttgcttgtaaagtgtggcgtgcacagtgaaggcagaaggtgggtgagtcgccaagagatctgtcttgaggtagtggtgcctgctgtggtcatcttagatatgagggatatctgaggaagaatcgactggcttggagaatgatagaagattgtcaacaccggatgtgggaatcaaagctgagaaccaggtaatccaggtcaatggggattggtggtacccgtcttagacctggagaatttggagggtggtattagagtttgcattagaagatttcaaccctagagttggactagttgagcttgcagtaacagggcttcaatgagcttggaacgtggaactggaacttgaggaaagtcagagttaattcaggaaaagtgaccagaaaaagactacttaaaatgggaaccagaattttgcaaattaatagagggaggaagaggttaagattttatattgaaaaataaaattaaaatgtgtaagataaatattgaacatacagatcataaatgcaactacatacatatcttcttaaagaatgaatcaagttgtcttcatgtatcttttgtcactactgagtaacggtgccacccggcagcctccacatcagcctctcactctcagaaagacagttgtttcttgcaaaacgctgccggaatggttgagagcatctttaatttttccaggttctcttgaatcctttgatattcaaatcattcttttctgaagtacccttccctgtggtacctttgcttattcagaagctgagctctcccagaggctgacttctctgtgattttgtttgcctgtgatttgagttcactaacatctgtttccttgcatcttgtgtttttccaccagaggaaccatttccctttgtggttgatttgcattgttttcgtcgttatctgtagaactgtcagtgagagactgacaaagacattgacacctgactgtaggctttattccaataatgttcagccaagtagggccccactagctgaaatcatgagaattaatgcatctctctggtgataggtctaacacaatttaggcttttttaaaacatgtcagttttatgtggtattactgaatttgcctcccagtgccctggtgcgaagattcttagctagaaggacaattggagtttacatttgaagatcaaattaccatttaactcttaggcaataatccattgtacttttgtcctgagttaaaattacagtgcttcagcagttataagctgtcctattttctctgcttttaaacacaagctttgtaacttaaaatatctgtttgtccttttgatcaaaatcatcacatatctcaaaaaaaaaaaattcctgagacaaacctcagatgacacaaagtttcctaagtgcgctgtgatcattctctcggtcaccttcctcttcgaagtgtgttctttctcaccccatctagaattgacctcccacctctaggaatcttttcctgctaaagctagccttctctgtgctcttctctgagctcttataacaagaatcccagtaatttaacattgcctttaattagtatcttgactattttctgggcattagtattttctctgtagcaatctgcaaactccatgaaatttggagttgggtttgttactcctcatgtcaccttcgtagtcctgactttcttcctcaaggaccagtttgcctttaaccatgactttaagctgttaaataaaactgtcttttctttggttctcagttcagctatcacacaactatcactgatgttttttttaaatgttcagattggaattcctgtgtcctgataggcttttaagataggctttctcaatatattcggaaaagtatttgatcctggaaacaaggtttcatccgtcaaaggtagcttgttaaaaattgttatttcctctgatgataaaattaatatatgtcctttgaaaaatataggcaagcctagggaagaaaataaagatgatacctgatctcattgcccagaaataactaagcactgttaatattttggtttctttcctaacattttatccccccatgcatggggacattttttcacttaatatatcatgaacttgttttcatgtcaataaatagatctatgtcatcacctttaatagtcacattgtattccattgcataaatgtaccccacagtggacattagtaacagtgttttgctgttccacacaatactatgatgaccatcctatagattttttagtgaattttcctgatgacttcctaaagatgaatttctggaagtgtgatgggtagagcagaggataggcatgcataagtgttcgtgtgtgtcaccccagtacccccagaaggttagtgatgtgcctgtccagagtctcacagcagtactcatcgaccttttccccttcccctgttagccaagtatcaccaggccttcatgtctgtcaatatgatagctgtttttatttctatttatctgaatactgattattttatcagccatttcaatgagatttatttcaataatctcaaattgtctttgctcatttttctgttcagtctttctcttatttctttataataactggctatgtaaaggttatttactctttgtcatgcactttacaagtacttttcccaagttgtgtgtattcatagcagggagggatttttttgtttgttttaagcacacagaagttttaaacttgtgtagctattttataaaaacattaaaatccatttaaacgtctagatcattgatttttttttctttttactttttgtgtaaacttttaaatcacagacattgtttgtcctaaatttggggtacatggtacaatatggacaccatattaaaacttgaactaattaaagtgattttttcccctttgtcaggtaggcattattaatactttttactctctaatatctttgtgtgtatgttttatttcctccactgccttatagattctttaaggtctgggcctatatctaattcatctttgtgtctcccatttccagccatttgtgaaacctgcaatagttactcatgatttgtgtggcaggcactggtcacgggggaaacagaagaataagaggctgtccctgccctagtggggcttgtcatgtaatgaggaagccaaccacacgtataatactttagcccactgctgtgataagcaaatactctggggatatgaggattagggaaactcaccgaggactcatgcttgatttgtgtcagcattgattcttaggaatgcaactgacaacacaaggaagaggttcattctgctaatgccaaggaatgcgaggcatttcagtgatctgtagcttgtgtttcatgtggctggagcctagggtacgtaggaggggtctgtcagggaatgagacagaaagataggccccagatcagtactgtgcaaagagctttctgcgatgatgtcagtgttttatgtgtggactggctaatgcagaagctatatgtggctattaagcacttcaaaggtggctagtacaactgaggaactcaatttttaattttatttaaatttaattactttaaataaccacacatggcaagtggctgcctcattggacagcaccggactaaatcatgagggacctcttttacaccctaaggagttgactgtttcctgagtgagagagaaaagttgggggatggggagttatgattccctgtttgttttggaaatgtcactctagtgtagagttcttaacccttttgggtcccagaactctaaaacttgacttcttgccagtccctttcctagggtctgcaaagctacaactgcagcactcaactgagcagaccaaaacctgggcctgggggagctcccattctgggggaagagacaaaaaagagaaacacaagacacgcattatgttagaggacaaggatgggtggattctcacacttgcatcccacctctccctcccaggagctgtgtgaccttagacaagttacttagcctctctgcctcatccataaagtgttgtgataatagtatctgtcttgtaagttgttaggggaatgaagttagtatttgtacaatgtttggaacaaggcctggtacataatgagcactataaaagcatttaataaataaataaatgctaaggagaaaagatcaatcagggaagggaattgctggggagggggtaggcattgcagttattgatcaggtgaccagggaagtcctccttgagaaggtgacattatttgagtaaagacctgaagggaatgaaaaagtgagccatacagattacttcctagtagagggggcaacaagttgagagaccctgagaccagagagtgcctggcatttttgaagaccactcggaacattggtgtggctggaatgcagtgtaaaggaggagagagcagacgatgaggtcagagccttaacaggtgttagatcctgtagggctttgtagattggagtctttggaggatttctgagtacagaagtaatctgatcggggtcctgagcaaggggtgggagtgtggagctatcaatttccaagaaagtatcattgcccgagggtgataaaggcgaggtcactggttgagactgccggtagaagactagttaggctgctctttagagcaggcaagagataagagcctgatctcaggcaaagatgataaggaaagggattttagataagctgaggttaaagaaattaaaggaatctgtaagaaattacatttggggccaggcacagtggctcacgcctgtaatcccagcactttgggaggctgaggccggcagatcaccgggtcaggggctcgagaccagcctggccaacgtggcgaaaccccgtctctactaaaagtacaaaaattcactgggagtggtgacgggcgcctgtagtcccagctactcgggaggctgaggcaggagaatcgctttaacctgggaggaggttgcagtgagctgagattgtgccattgcactccaccagcctgggcgacaagagcaagactctgtctcaaaaaaaaaaaaaaaagaaaagaaaaaaagaaattacatttggaagatgaaggaagagggatcacacgtgaatctggtttccgatttgtgtagcttggtgggatcaagattgggactgcgggggcagagcagattaggagaaaaaggggagaagattgcagttgttaggggtgcagttttagaattttctcatggttctgtgcaacattcagatagagatggctcataggctgttgaaaaagtgtagaagagaagcctggggtggagaaagaaaaatttgagttacctgatcattgaagcctcagtaatgattgtagttagaagagaatgaggctagacagagagcctggaaacataagagtagtcggggttggcagagaacaacgcttaaaggatcctgagcagcagttattccagagctcagaagcagaccagacgagacagctgtcttgagaggtcaagcagctttgtgagaccgaggaaagatagagaccgcttgtcctttggcttcagcagattggaaggaggccctggctaaaggcatctgtctgctctgcaatttgaggcctggaggctggaggaggagtgataatggtggagtcggagaactgactagggacaaagtgccttgcacagtactttgtacataaaagggcagtctaatagacatttatcaagtgaatggatatttcaggttcacattcagcttattctgcctttctcctacctccaccccaaatctcccttgtaccataaggtatttaaggcctatttgatatcctgatattttggggtcacagacactttaggttagacagcactaactagtaccagacgattatcatctcttttgatttaggtctatattggacagtatgaaattaacttagaagtgtgttgctcagaataaacccttccaacagcttcagtgcaaggatcatgtatagattatatgtggttggatttaagcacacacttaaagaacgtagatgttttctttgatgatgctatctttgtgatttgtctcacttcctggaacaggagggctctaactccgtgaggaccccagcattatttctataattgtttgtgagaaggactgaatcccagagcattgccttgttgctgacctttcagtatggggaggtaagtgatgggcctaatcaccatgaaacatgaaatcttggtgatgcaaaaacaggtcttgagagaaaaaaaatctaaatcgcaagtgaaaaatgtgaagttgtgctgtgcttctgtttaagaccttttttcttccagggcccagtgaggtattttaatgcatgaagcactcttcaaggtgaagagtaaagaaattaactgtaaaataatagaatttatcccaaaggcagtgaaatttttttaaatcctaatcatatttctagaatgagcctctcattcttgacataaactgaggggaaaagttcttgattatttgcagaaatgtcttgtgggaatatttctaaaagtacaggacatagaaaactcatttattgactttgttatggggatgttgttaaaatgctgttttctcccattactcaagtcatctgggagaaatttgccttggacttcagtgttgagaaaatttgttcctcctgagctatttgtatatttctggtgtaatgggcaatgagctcagtcgtatttgcagcaggcccagcttacgacatgcctttctccatactgcattcccgtttggtctcatcatccttacactcgatttcatgatcgatttatatatttatgttattgaagttattctcgtaagcagtctctaattctgtatctatgttggagcaaagcagggtaaaattaaaaatctacataatactgtcaagagaaggggaaaacccagaagtgtcgtaaccttcagggcctgattctcattcagatgattttatgataaggggtttgtagctgttgtgtagcatatgcaagatgccagtatacagatacctacagttagggaaatccaggtagctcaagccaaatatcttattttaggatcactttaggtgaaggaagcctcattggagcagattgctttaaaatctttttccttctaatttcaggattggcatctcctgtctttttcctgcttcttggcattttagcatatctccagtagggtgtcctcgaattctgaataccaatttacgccaaattatggtcattagtgtcctggctgctgctgtttcacttttatatttttctgttgtcataatccgaaataagtatgggcgactaaccagagacaagaaatttcaaaggtaagagataaaaacatttgctttctagaccagaagccttaccttctgtcttacctgttttaggctgctggaacagaattccatagactgggtggcttataaacaacagcaatttgtttctaactgttctagaggttgggaaatccacgatcaaggtgccataggttttgtgtgtggtgagggcctgattcctggttctgagatgaggaggtcttcttgctgtttcctcacatgatggaaagggggtgagggggctccctgaagtttctgccctcatgaactaatcatccccctgaggccccacctcctaatagcatcgcattggtgattaggtctccaacatacgaattttggggggccccagacattcagaccataacaccatcatttcatggcttcacgacgtttggctttagattggaatttaaggaactgtaggaactagattctgtgccatgttcatcatggcatgaacagttaaaccatttgaagctagttaactgctaactaccaaatccatatcataagaggtcctggaataattatttatacataagcgtctcgtgtaatatgttttaagctgatttttgagttggtagtttagaaatagaattttgcattttggaatttgtttgaacttctgtaatggagtgtgtgtctgatttagatgatctttatcatcatcacttgttttgttttcttttgactcttcaattattcaacagttgtattgatgttatagtggtgctgctacatagcttagaaattactgacttggtatttgctgcattttctctgttagacttcaggtgatattctttgtctaaatcaaagcatacgtgtgtttctatacaaggtacctggcacgagttaccgacattgaagctacagacaccaataaccccaatgtgaactatgggatcgtggtggactgtggtagcagtgggtctcgagtatttgtttactgctggccaaggcataatggcaatccacatgatctgttggatatcaggcaaatgagggataaaaaccgaaagccagtggtcatgaagataaaaccgggtatgtaaatgagaacatctgcctggtaaccagggtgtgtaccttcattctctgtggcgtctttcatatcgttccctttctacaccatggccctgagtcaaacctcacaccaggacctgatgggtctccttgtttcactttcttttcccttttctgtccattttgcaaagggtgactaacaccttgataaaacatccaaacagacatgtctttttgtctcccatagcattttaaatagtgccttactcatggtatctacgcagatgttgctggttggcattaattatggagagttttttcctatttagtaaccattggtctctatccttaatgacaaggtaatttcagataactcatgaaaatctgtaatatattggcatatatttgtcacttttaaaaattgctggccacatgtagttctagtcatctagattatttggtgagtgtgaccacagaacttagagctaatcataattatgtatagtttttaaagatactgtaatttctaagccagtgtgacatgtaaaagtttaggtttggcttccttattaggtaatttacatcagtgatgctcttttttctgtatcatcaccatttccatggacagcagcttctgtcaggagcatttagaatgggagataccgggagtgccttgaaacaagttttatgtcttgatagttgatcactgatttcaaacagttgaccacagatcttaatagagatgcagcacttttatgtcatcttactaatgtattaaaatagtaaaatatcaaatgcaaacaatccaagaaatttatctggtaaattattagagaatattgataaataataattattatagcttattatccccatttcagaaataaaatttaaaagaatattcagtttaacatgagaaaaatacatatcctcatagaagagtctccaaccatgtagaatggtgacccctcgagtcctcattctttacggaataattcagaccccacctcctccttcaggcagccctcaacaagttgattatcctttgatgtatgggcagctaggaaccagcatattactcagaaaatctaaagtctgtacctcacttttcaggttaaagagagacaacctactgtgtgtctgtataccagcattattttatcagagtacatttccatgaacaaagattaattttttagtgagtgtcttctaagttttagttttatgtatttctaccccttaaatttttatgtatccctaacctagaaacattttcagttaaagtaatattgatcaaataaaaaacttacgagaagactgaaaaaataaagcattttacatttcatctagcttcacgtaccaggtcccatcagtgactaaacagatctcatggaataagatgaaaacttccatgccttggagttgtccttttagaacaaagggtcaactacattatcatcctagagtatacattagaatctcattaaaatcaggcttaacattggtctgtcttgcactatacaaagtgtatgaaatggaaatcaaaatacctttttattgcactactctgtcctgaagcatggacttccgtgtataacattgcagcaaggctctagaaatttcttaatagggtctggctagtttagggcttcgagtgcattgaaattgaattgtatgtgttgtcaaaaacttacagtttagtcaattttttgctaattcctttgatgaatcacttaatctttttgggtttgtaattttctaatgtgtgaaataaggtatttttagacttctaaagcgcccctcatttttaatattgtaggctaaatgacacctagaaatattcatttgtgtactcattcagcagatacatgctgggcacctgccatttgctaggcactgtgttaggtgctatgaatataagtttgaacagacacattttgtgcccttgagaagcttttagttgtaatgagacaggcaagtaaataggtaattttgatatggtgtaatgaatgtacatctagcaaaaggaagtaagcatggaatttaacaagagttgtcttcagggttctgttagggtgacttccatggaggctggagccaagtgggtgtgcaggaattaaccaggtgaaaaggggtagggaggtggatggagaagactcttcttggtggtggaggagcagggccctaaggccacagtaaggtgcattatggaaatgttagttcagtgtagctgaaggcaatggaaggaacatgggaagagataagggtgggtgagttatgcagagcagggtgttctagagttgagccttacctggaggacattgagccacaaaagaattggaagcctgaagaggcatcctttgggtagggaatggtggggagatggtcaggatcagagggtgggatgtgctgtggcaggctggcagagggcgtgtccaaagggatgaggagtaaagtcatgtgagaggaaccaaggagaggcgatctatgaaacccaggttgtgtgttgggatgagggagagggacttcatctaagaccctggcttgggctgctgggtgcccagcgctgatggcctcggagggaggtaaccagcagtgagagcaggtttgtagtgaaagttgagttcagattttgccatgatgcattgggggtggctgtgaggacaagcaagggcagtgtctggtggacagttaccccacgctcacctggaggctaatgagtgctgcatggctggtggcacagttcggagttcatggcatgctgatggtgatagcagcctcaggagggactgagctcacctgaggagagggggagcacgtttctcgagggcaggcaagagcccatgcgcatggcagtgacacacagcagatgctcagtcaggtctgtgtgctttgatgaagaagaaaaggacatagcactgaatagtgccaccaacatttaagtaaggtctgcagaagaagttgctagaaggataggaaaaactaaggaagtgtaatgtgtagcatgatttccctaaaattagccactctgaagaaacatcacatgttatagctaaaatatctgcttcttaactaaagtatcctgtttctctaggcatttcagaatttgctacctctccagagaaagtcagtgattacatttctccacttttgaactttgctgcagagcatgtgccacgggcaaaacacaaagagacacctctctacattctctgcacggctggaatgagaatcctccccgaaaggtgatcctccacagaagggcaagggtgagggtgggttcctggaggggagagggggtgttcttctcccccttcctccttctcctctccatcatcatcatcatcattgaaaggaaaatattcaaaattctttcttcaagtctgtaacagtaccagaactattcctttagccagaatccaccaaatagcctttaattgacttaggactataggcaacggtaaaggtgtcatttttaaaaacctaatctattttacgtagttaaggaatgcttgcagttgtagttttacatctagaaatcacataattcacacaacttgttcattttgaaaattcattcctaatataatctttccaacgaatttcttttttaaaaaaattaactgtttcatacaagatataccagatccctggttttgttttttgtttgtttatttttttccttttctaaacagaagataccaagctgtaatcttttgatttgtaaatgtttttattactttacagccagcagaaagctattctggaagaccttctgaccgatatccccgtgcactttgactttctgttttctgactctcatgcagaagtaatttctgggaaacaagaaggttggtatattggtcttcagtttaaaatttgggaagctgttcctttaaatcctccccattttcaccaatgtaccctttgttatactcctattgtcttaacatttgggaaataatagccttgaaatattacaatttttaaattactaaatcagtttcttatatgactagtctttgttgccctaacattaagccactgaaagataaccgtttgtcttcaccacatgtagtgacatagcttgatataaactcactttgatagaaaaggcttgtgtgccttgcctaagttgtgtggcttcctgggacgttgatcattattgagctgttggagcttcttctcgactttgatacactgagaaatatcaaatctttgttctattttcaaagaaatgattctccttgagaatgaaatgtcaagtcaatgaaattatttggggtatagcttgctagaaatgtataccaaaaagtatttcaaaagccgtctgtcatttcagcattaatacttcctatgtgaaagagactgtagagaatacagaaatggggtgaaatttacacattgctattcagctgcttacagacaattgagctacacagttagctgttctatgagggttttaggtaccagaaaaaagatgaggaaaaaatatcacaggagttcttaagagggaggcatttttttttttccagctagggccatgatggagaaagtgacatctgaactgcacctcaagggaagggatagttctaaatagaacatgccagagcatgggaagggtggggctctgagggaggggcaggaagcacacaccaggcagaagaaaggacttgactcaggacaggttggaaagagggcactgtggacagagaaacacaaatgttttagtttgactgggtggtggcccttctggaaggagtggcgggaatgttaacagttggctggctcttgaattgtcagtccaggaatttggacttctttctgtagatgagtccaatagcagagagtagagcaggttgcagcagaggaataggggcagggatggattagatggactacccaaggtgacaatgaaacccaggtgtagggaatgtgaaaatagaatcagacttggcagctgagtgaatggagggataaaggaaagagcagaagataccttgaattttttttttttttgagatggagtctcgctctgtcaccaggctggagtgcagtggcacgatcttgactcactgcaacctccacctcccgggttgaagtgattctcctgcctcagcttcccgaatagctgggactacaggcgccgccaccatgcccaactaatttttgtatttttagtagagacggggtttcaccatgttggccaggatggtctcaatctcttgacctcatgatctgcctgcctcggcctcacaaagtgctgggattacaggcatgagccattgcacccagctgataccttgaatttttaaaaccttggatttgacaggtttaacatcataaaagtgaaaattatagtattttgaaacataaatttcaaaagaaaactggcacctagcgtattgtatttccaacctgtgtagatggtataaaactataaacattaaagttgagagttcttggaaagccatttggagtaataaaaacatcagtagcaaggtgttatttcagatgattttacaggttatcagggagtgaaataagtgagacgtttgcacagactgcgcagataggagttacacaaaatgttttaaaactttttcttctcttcaccctgtaaaatgtctataggtgtgtatgcttggattggcattaattttgtccttggacgatttgagcatattgaagatggtaagtgtcatggttccaacaaatgtatctagttggaaattggtgcttttctgtttaatccaaaggctgaaaaaagagctaagctttgtgacactcctaagcgtgtaggagtagaatgagagcagctgcagttgaacgtaattcaacttgattttagttgggaggagtagactgggtttgcctgaatatgcttgaaatagaccatgaaaagaaggtgactcttcagaagagcccagttctctggattagttctgttccagtgaacactttctgttctttctagatgatgaggccgttgtggaagttaacattcctggaagtgaaagcagcgaagccattgtccgtaaaaggacagcgggcattctcgacatgggcggcgtgtcgactcagatagcgtacgaagtccccaaaactgtaagctttgcgtcctcacagcaggtcattatctgtacaaatttccttctgtttggtttggttttcatttaacgtgtgtccatcgttcttgttttgttttctgagtctgaacacatctttactgtgctggctgaggtgccgcctctcaacccaggagaaaggagacaggacgaacaaggcagacctcagctgagccgcttgtgtgtgttcattgaaatcagctggtttgttttctgaacgtagagtttttctttggtatatacgcagtcgcatgcttgagtttcagtttatattttctcttcaatcacgtcttttctcaacaggttttatgaaatgtaaaataataacatctgattttttaagttagaattgggggaaattcttttttttaatggttcagactttgagcttccttggggaagattgaggtttgtatccactgcttccacatctttcaactggtggtttactcgaactgttctccaccctgttctgtgccctctcagttgctgcctgggcagccttgtctagagaaccccggcacggtttccagatgtatttctgaattgctacacgtctttattactccatttgtgttcagctgtagattaacaccaaagcctagctttctggattttcccctcaaaggtgggcggcagcatagcgtggccggcgggggacggttcaaagtgagaccgtggagctagacaggcctgggtttcttcatcatcctcctcctcactagttgtgtgaccttgtgcaagtcatgtaccttctttaagctggtttcttcatctgtaaacgtgaacaaaagtacctacaacatggggttattagaaggtttaaatgagataatgcatccagtatatctaatgcactgccaggcagctagtatgttctcaataaatgttactgacatctttattaagttccttggaaaaatgctttgtaaattcaagtattacaatttgtttttcctacctcccattccagacatgcctctagagactgttacactctttgtaaaaaatcatgtttttccctctcaatataaagtaaaaaatacatagaaataacgtttggaataaatactgaaaaatcaagattaaaaatttcccatggattcatcacctaaaaaagccattgttagccttttagtgaatttctttttttttctactcatagttttaaaaaatatggttgttataatcttagtttatatgatttttgtcctttatttaacagtgcatgagcatgttcctccataagctattgattactgtaactaaccttcccttgctattatatatttagatgacatctagttttttctgtcacagaatgacaaaggacatctttgcatatagaaacatttccatgtttaggtgtatttccacagcataggattccagaaataaattatgtcagagggtatgaactattttgctgactttctctttcaaaaagtcataacagtatcacaaatttgcagcccatctgaaatttcctaaatcagaattgtcatattgaattatgagtgatgcttagaagggtccttgggaagtgcagaagcagacatttttgtcccttttagatgagactatttttagacttttctttttagtaggaggctaaagtagcttaagctattaaggtttgttatgcttatgtctgcaggaagaagtagctaaaaacttgttagctgaatttaacttgggatgtgatgttcaccaaactgagcatgtgtatcgagtctatgtggccacgtttcttgggtttggtggcaatgctgctcgacagagatacgaagacagaatatttgccaacaccattcaaaagaacaggtaaagcacctttcactacttggcagtcatttgcaaacctaggtctctcctcataaaaaacagacccaggcaaagtgggaagaactcaattagcaaaagtgtgttgcactgttagctttttattcccccactagctgagcagggagaagagatgaaagcacaccagggtcctgcctttggccctctgtcccaccgtgccctgaaggaggtgtgtgcgtgcgctctctcacccgcatctcaactgatggattagaaatttcaccatcaagctatagaatagtttggagccctgggtggtgctattcatgattcagagtccttgggaaacccagtatctggagcactcgtggtgtcctggaggcctcaggtagtgtgttctcttgttgctgaggagattgaaatatgtgatgttctggagactctgtggatgaagcagccagtgcagctagttagtggataagaaccatcgtgaagggaattattcaagagaaataaattatctagaagagtcagagttagtggcttttgaatttagcaatgaagctttaaaaaatgagtgtatgaagaattgtggtatagaaaatatataaaacaaaacagcactctattggtttaaattgactgtataagtgtaagtatatagcacttatttatttgaaatttgtaagaacataaaagctatttggataaataaaaaaatctgaatctggggttatgtaagctatcctatttattactgtgttttatttgtttattttgatgaaacaattttgagggaaaaaaatcctagttcatagagctaagagattgtatacttccttgattaatgtaatcttaataaacctgtgaaggcctgaacttgaaaaaagaccaagttggagctattcagtacatttaccacaaagtcatgtgtgtaaataggaaaagcaataaaaaccttttcctgtgtctcttccaaaagttaactgaatagttttaattataagattggtagtcccatgattttgtatttttaattggtatttagcacattttggtataatcatttttatagtagtcttaaactagaaatattttatagacaacatttgtaacatattttttccgaaaccttaatttttactcattggttttaatgtcagaaagctttatataatggatagtttagtggtacttcttaatttagatataggacaactaaaaataatagcatgaaatatatatttgactactcttggacttttatagtaattacaggtgtttcatatgtcatgaattgagcattgaagtacacatttatctcttcgccatttgtagtggtgattaatttttttaaattaagcgaacatttttatggcaaagaccttaatttattacattcaactgcatgatgagtaaccctgatctgaggaatacacaacttgtgagttgagtgaaaagtgaaaacttgactgtcggtgatgaatattgaattctgaccatgcttaaccctttaacagttcaacacctgtcaggcccctgtgatttcacagtatccaacaccaacatcacttgagattttgtgagctcttctctgtttcttgttgcttgaaggcatgcacacacaataggatgacagatgttaactcccagaaatttcattagcaagtaataagcctagtgcctttcagttaacaaaattaatgtttattttctacagggcatctcagagcccattgtacaatggaaactgctgtctgctgcagttgggacccatagctgatcaaggaaagaaataagttgaaacagaatgataaaaatagagccaagccttagacattctgtcttaacttctgtattcatttgctaatcttttcctctgaaccaaggtctgtttttagactccatcctttctttggcatgcactgcacccctcattgagataccagtttgtctttgtttaaagaatactgaggacttaaaagagatttgcaaggcaatttgataccaaatccttctagatgtttgctaatttttcccagttttaaaaatcctacccacacctagtttgataattttctagtaacttttctaaagcatctaacctgctttgcccaggaccggatcttgtcacagtcacgttccttccatctgtattaggtaaaaccacaagcactagtgcaaaaatggggctggtaacacagttgccttgtgcccagcagctgggaacatcaggccttgttgccaggatcgtcggctaatcgggtaggttatccaactggactctggtagcctgtctgctgcaggcaagtttgtatcctgactctccaagaaagtctcaagtgtgtattttcctaactaattatctcggaacccttttctgttccacagacacggtcctgcaggtctcatgtcccacagagcgtattttgagaaacactggtttgcagccacttcctgaaaacacagttttctgtaggactcacgatgaagtttcttgttttgccataggctcctgggtaaacagactggtctgactcctgatatgccgtacttggacccctgcctacccctagacattaaagatgaaatccagcaaaatggacaaaccatatacctacgagggactggagactttgacctgtgtcgagagactatccagcctttcatgaataaaacaaacgagacccagacttccctcaatggggtctaccagcccccaattcacttccagaacagtgaattctatggcttctccgaattctactactgcaccgaggatgtgttacgaatggggggagactacaatgctgctaaatttactaaagctgcaaaggtacccttgagagacgccgtctgctctgcatgcttttgagagaccagtgtggacggtgacgggttatgtcctcctttcacattgacagggaaagacggagtatagaaggctgcactgcagcatgttgggatcctgttccctttgcttggagggaggttgaatagtcacagcagaagtaaaaaatgtactgtacgctgacttctgcaccactccattagctaccctggtcatcagttagctccaaattacagtcttttatgtcatttttgtgctttgctgcatgtgacaattctcctactagccttccccctccctgacctgccaggatactcctgttcttgtgttctctctgccttcctgacaccccttaaacttaggtgatgccagacttccacacttggcccctgatcttcaggttcttggatggtctcatccatattcagggtttgctgctgcctctcaagaagaggctccaatcctgacccctgcccggttgcctgctagattccacaactccagacaaacccaccatcctctctccattctgttcctgttcttctctcggttaatggcatcgccaaccatccagtccccttccctgcagcctaggagtcatggacttctccctctaaccatttcatctctccctatacaccccagtgtaatcagtcacaagtgtggtattttatcttccaagtatttctcaaacccatctcgaagcgcagagcactgtatgctgtaatcatgtcagacagctggcttccctcacgctctccgcgacttctctgtgtccatgtccatgttcctgaagtgcctatgccgagcccgttccccaggccaagtgctttttccttgtgctccctgtcacacacccaggcccatctcccacctctcagcagtgtcttcatcctttaaatagaggtcgggatggtagccacctcgaggagttaagtattacattgagaagacacacttacacaatgctcaataaaagttattataacaaataacttcaagaaaagtgggatctctttcccttctgttaaagacaaaaaccttttgcagttattatcccagtagcttgtactgtgtcctccacagatgtaggacttagtttgaagtagctaaaatactgcttcacttttccaaaaatgtatgcccgtaccatgcagtcatggagggagaaactaaacagttttggagaggttggttgtggacagcaaagctctctttaacaataccctggacagaattttaaggcaaggcattgtgtttgcgaatcagtaagtattccctgagtgtttgtgtgtcttgccatttgttgtataagttaagcttgtgtgtttcctaatgggaaggatatgcttgttacaaatataaatttggtaaaccatttttaaagtgagaattttaataagcctttactagtgatctattttggtgaatttgttttcaggattattgtgcaacaaagtggtccattttgcgggaacgctttgaccgaggactgtacgcctctcatgctgacctccacaggcttaagtaagtactagaaggtcaagcccagggcactcttaagaaccataatgcagtgttggccccactggcttgccacaccctggcctcagtccagcttcttctcactcactgttcttcccatctaccctgggcccctttcaaacgggacaaatacttgtgcccagacatattccgtatcttttttgttttggtcacttttactgtctcttacccctgaaattcccctgttcatacctttgcttgttcaagtcctgcccagacatcagagtccagccagaggctgtccctttccagtcttcctctgtcccctcaatcagacttcatccctttctctgagtctcaagaattcatcctacctcgccaatgcatttatcatgttctgctttttctgttgctttttaaaaatcccctttcattgtaagtcacttaagtgcagacactgtatcttactaattattgtatcttattacttgcttagcacagtgcttggcaaaaaataaacctctaataaatatttagagtcatagaatatcagagctgaagagaaccttcctaccatctcattttataataaactgaggtacaaagaggttggaacctgttcagtattcattcaaggagtacatggtgaaatgccagctggaaaagaaacctatctcagggatatatgacattatgccgagaccgggttcatgcactgattgatttgacaggtgaactgctccatgttgtgggaccagggatgtgaagcaagtacatcaaccttgaaacgcgcgcagttggtttgggagagccggcctgaggaagcccctgccccaaggctgcccacagagggaaggattgtgtgtgtgtgtgtgtgtgtgccatcttgacagagtgagtcagtctgacttgcctttgtgcttgccgtttgtaggtatcagtgcttcaaatcggcctggatgtttgaggtgtttcataggggcttttcgtttcctgtcaactataaaagcttaaagactgccttgcaagtttacgacaaggaggttcagtggacccttggagccatcctctacaggacccgctttctaccattaaggtagggctgtgaatttgggaacgagaatcaaaaagatgcttttctgcagttacagcacctcatggcagctgtggtctgtggctgtttggggcattgctgttagagccggccacggcagaattgtagggacagtgacgtttgcttttggtcttgccccctccccacaagtgcttcctcccttctcaccctaccatcccgtaatacacagcactcctgtcctactgccctgtgtttggttattctcaactgtctgttccccagccccggcaaaagggtcagttccggggttcttaacctttatgactcaggcctcttctccaaatactgtttaaatgcatgtataaatacataggattacagaagaaaccatcatattgaaataataccaaaatattacagaaaacaagtttgtgatactgtaatatgtgttcttctctattaacacattaaataacaggatctggcagcagaattagcactttctgtaatttcagtgtagtcaatgagcgtcaatgatattttgaggcattgatgataccataatgggacatgaaagatctgtgattttcgttagtaacaaagttgcaggtgctgccaacgctaatgatagtttgttgtctgcattcatggtcaaagaaatgctacatctcagtcagcgcttgggtagaacaaagatgtgcgtttttccccattcacgtttgcagatctgctgtcagttgacctgtgctaagaacctgagttacctgatagatgagacatttgctcttccccccaccccctccatttaattgagcatttctcagcaacccttttaactgggttaactgtaaaaatggtgagtcatgggtgttactgatcacaagcatgcagtttgtttacatgttgacttctttgtatcagcgaaaccttcacggctcttctaaattcctctgattttggttgcccaaattataatgaccgacttcagagtatactttcacatgttatctcactgatacttagaagccccctgcattgggctgttccgttctccatttcagaggtagggttgcagttcctaaagtgcagctctggggcctgggtcccgccgtccccctgtgcaccctttccacccctttccttgcttactgtcctgtttgttgtttggtgttcacatgggcagagacatccagcaggaggccttccgagccagtcacacccactggcggggcgtttcctttgtctacaaccactacctgttctctggctgcttcctggtggtgctgctggccatcctgctgtacctgctgcggctgcggcgcatccacaggcgcactccccggagcagctcggccgccgccctctggatggaggagggccttcccgcccagaatgccccggggaccttgtga

SEQ ID NO: 11856 - DNA, 2063 bp, Homo sapiens
gcaggcggtgacgtgttgccggcgggggccgggcgggggtgcggctccaggaaaggagcgcggcctccaggaagccggctggccgtgatgctgcccactggtggtcccccgctcccggggtccccggccggccaagcaggagggctctaactccgtgaggaccccagcattatttctataattgtttgtgagaaggactgaatcccagagcattgccttgttgctgacctttcagtatggggaggattggcatctcctgtctttttcctgcttcttggcattttagcatatctccagtagggtgtcctcgaattctgaataccaatttacgccaaattatggtcattagtgtcctggctgctgctgtttcacttttatatttttctgttgtcataatccgaaataagtatgggcgactaaccagagacaagaaatttcaaaggtacctggcacgagttaccgacattgaagctacagacaccaataaccccaatgtgaactatgggatcgtggtggactgtggtagcagtgggtctcgagtatttgtttactgctggccaaggcataatggcaatccacatgatctgttggatatcaggcaaatgagggataaaaaccgaaagccagtggtcatgaagataaaaccgggcatttcagaatttgctacctctccagagaaagtcagtgattacatttctccacttttgaactttgctgcagagcatgtgccacgggcaaaacacaaagagacacctctctacattctctgcacggctggaatgagaatcctccccgaaagccagcagaaagctattctggaagaccttctgaccgatatccccgtgcactttgactttctgttttctgactctcatgcagaagtaatttctgggaaacaagaaggtgtgtatgcttggattggcattaattttgtccttggacgatttgagcatattgaagatgatgatgaggccgttgtggaagttaacattcctggaagtgaaagcagcgaagccattgtccgtaaaaggacagcgggcattctcgacatgggcggcgtgtcgactcagatagcgtacgaagtccccaaaactgaagaagtagctaaaaacttgttagctgaatttaacttgggatgtgatgttcaccaaactgagcatgtgtatcgagtctatgtggccacgtttcttgggtttggtggcaatgctgctcgacagagatacgaagacagaatatttgccaacaccattcaaaagaacaggctcctgggtaaacagactggtctgactcctgatatgccgtacttggacccctgcctacccctagacattaaagatgaaatccagcaaaatggacaaaccatatacctacgagggactggagactttgacctgtgtcgagagactatccagcctttcatgaataaaacaaacgagacccagacttccctcaatggggtctaccagcccccaattcacttccagaacagtgaattctatggcttctccgaattctactactgcaccgaggatgtgttacgaatggggggagactacaatgctgctaaatttactaaagctgcaaaggattattgtgcaacaaagtggtccattttgcgggaacgctttgaccgaggactgtacgcctctcatgctgacctccacaggcttaagtatcagtgcttcaaatcggcctggatgtttgaggtgtttcataggggcttttcgtttcctgtcaactataaaagcttaaagactgccttgcaagtttacgacaaggaggttcagtggacccttggagccatcctctacaggacccgctttctaccattaagagacatccagcaggaggccttccgagccagtcacacccactggcggggcgtttcctttgtctacaaccactacctgttctctggctgcttcctggtggtgctgctggccatcctgctgtacctgctgcggctgcggcgcatccacaggcgcactccccggagcagctcggccgccgccctctggatggaggagggccttcccgcccagaatgccccggggaccttgtga

SEQ ID NO: 11857 - DNA, 790 bp, Homo sapiens
acaaacgagacccagacttccctcaatggggtctaccagcccccaattcacttccagaacagtgaattctatggcttctccgaattctactactgcaccgaggatgtgttacgaatggggggagactacaatgctgctaaatttactaaagctgcaaaggattattgtgcaacaaagtggtccattttgcgggaacgctttgaccgaggactgtacgcctctcatgctgacctccacaggcttaagtatcagtgcttcaaatcggcctggatgtttgaggtgtttcataggggcttttcgtttcctgtcaactataaaagcttaaagactgccttgcaagtttacgacaaggaggttcagtggacccttggagccatcctctacaggacccgctttctaccattaagccatcggagaccagagccgccccctctgctcgagaaaggggctcagcggcggcggaagcggagggggaccaccgtggagagcgcggtcccagcccggccactgcggatccctgaaaccaagaaaatagggatgctgataataccttgctcagggggttgtccaaagctgtgttgtgcagtatggcagccaccaccatatggggccaccaaacacttgcaatgtgctgcttggaattgagatgcgctgcaaacgcaaagtacgtgctggatttcaaagacttagtacaaaaagaaaaaagaacgcaaaacatctcattaataatttttgtattgattccatattgaaatatattgcatcaaataaaatatatctttaacattga

SEQ ID NO: 11858 - DNA, 13112 bp, Homo sapiens
aggaaaggagcgcggcctccaggaagccggctggccgtgatgctgcccactggtggtcccccgctcccggggtccccggccggccaagcaggtgaggttgccttccgagcgtgggtgaggggagggcgggcggccgaaggggccggcgagtgggttggagtgcgggggccggcggcgcggcgagcgggccgcggacgagcctctctgccccaggcccccacagccgcctgcttagccccgcggaccggttcccgcctcccctgccgcgcggccacatccgagcgccccgggaccaacccctgtgagccctggcggccggcgcgctcccccagcccctggcaggggacacctggcggtcgcgcgcctcgggtgaccgctcgggatccccccctcgaatgggcggagcttgaccgggcagcagggatgctgcacccgggacccagccggccctgcctgccgctttaaatgatgacattcgctcgtcttgtcgttttcgctttgctttgcttttgccagatttcatgttagatttcttcttggaaaaatggagcttattgggcagtaaagtgatgatgcacagcattgtttctgaacttgagtaatgcgcggaccccttttaaaggaacaattctctcatggtctagaatgtgtcccagaacccttagggtgcttcagaccccagttagatgaaccctagtgcagagcgttttcagagaacacttatcacgaaggaaactaaagagatcctttatgattcaggaactttcaggctagaaggtaaactagaggtaatggaagaattctaaattagacactcaaagcccaggctaatttcgcattgcagtctttgttgtctcctttttgtgatgaaaataccaaattatccagctttagagaggcctaaaagagttatattatttgtgttaccatatatttgatgtttttgtatcaggtttgttaattctgtttgacatagtagaattataaaatggaacactaattcgtgtagttgaatcgtttatttctctgtttaccttaacagaggtcttgtagttgttgcatgttgaatctatggcttatattcttctacctctaataggaaatgtgtgactgaggcccttgaggatatagtctaggaaggagacaaaaatgaacatttatctaaggatttatattctctacgtatttactcagcatgtttatttaaaatagactactcatgaataaagagacgattccaattgtaagaaaacatcaggatgtgtaacaggttaaatcttgacaaagaaacatgttgacttgtgccttgaaagaagtgtagtcttgagaggaggacacggtggtggctcggaggaagtgctgttagtaaatgcctgaggcaggcatggagacagcttgtgtgggagagaagagagagacctgctgcactggagctgagagatggtatctgggactgatgagaggataggttggtgagataaggtggaccagttgatggataaaaggtttcaggtgccacacaggaaacttggtgttgatccatggccttccagaaggttcttagctgatcatattttgaaggccgtgttttacaaagagttgcttgtaaagtgtggcgtgcacagtgaaggcagaaggtgggtgagtcgccaagagatctgtcttgaggtagtggtgcctgctgtggtcatcttagatatgagggatatctgaggaagaatcgactggcttggagaatgatagaagattgtcaacaccggatgtgggaatcaaagctgagaaccaggtaatccaggtcaatggggattggtggtacccgtcttagacctggagaatttggagggtggtattagagtttgcattagaagatttcaaccctagagttggactagttgagcttgcagtaacagggcttcaatgagcttggaacgtggaactggaacttgaggaaagtcagagttaattcaggaaaagtgaccagaaaaagactacttaaaatgggaaccagaattttgcaaattaatagagggaggaagaggttaagattttatattgaaaaataaaattaaaatgtgtaagataaatattgaacatacagatcataaatgcaactacatacatatcttcttaaagaatgaatcaagttgtcttcatgtatcttttgtcactactgagtaacggtgccacccggcagcctccacatcagcctctcactctcagaaagacagttgtttcttgcaaaacgctgccggaatggttgagagcatctttaatttttccaggttctcttgaatcctttgatattcaaatcattcttttctgaagtacccttccctgtggtacctttgcttattcagaagctgagctctcccagaggctgacttctctgtgattttgtttgcctgtgatttgagttcactaacatctgtttccttgcatcttgtgtttttccaccagaggaaccatttccctttgtggttgatttgcattgttttcgtcgttatctgtagaactgtcagtgagagactgacaaagacattgacacctgactgtaggctttattccaataatgttcagccaagtagggccccactagctgaaatcatgagaattaatgcatctctctggtgataggtctaacacaatttaggcttttttaaaacatgtcagttttatgtggtattactgaatttgcctcccagtgccctggtgcgaagattcttagctagaaggacaattggagtttacatttgaagatcaaattaccatttaactcttaggcaataatccattgtacttttgtcctgagttaaaattacagtgcttcagcagttataagctgtcctattttctctgcttttaaacacaagctttgtaacttaaaatatctgtttgtccttttgatcaaaatcatcacatatctcaaaaaaaaaaaattcctgagacaaacctcagatgacacaaagtttcctaagtgcgctgtgatcattctctcggtcaccttcctcttcgaagtgtgttctttctcaccccatctagaattgacctcccacctctaggaatcttttcctgctaaagctagccttctctgtgctcttctctgagctcttataacaagaatcccagtaatttaacattgcctttaattagtatcttgactattttctgggcattagtattttctctgtagcaatctgcaaactccatgaaatttggagttgggtttgttactcctcatgtcaccttcgtagtcctgactttcttcctcaaggaccagtttgcctttaaccatgactttaagctgttaaataaaactgtcttttctttggttctcagttcagctatcacacaactatcactgatgttttttttaaatgttcagattggaattcctgtgtcctgataggcttttaagataggctttctcaatatattcggaaaagtatttgatcctggaaacaaggtttcatccgtcaaaggtagcttgttaaaaattgttatttcctctgatgataaaattaatatatgtcctttgaaaaatataggcaagcctagggaagaaaataaagatgatacctgatctcattgcccagaaataactaagcactgttaatattttggtttctttcctaacattttatccccccatgcatggggacattttttcacttaatatatcatgaacttgttttcatgtcaataaatagatctatgtcatcacctttaatagtcacattgtattccattgcataaatgtaccccacagtggacattagtaacagtgttttgctgttccacacaatactatgatgaccatcctatagattttttagtgaattttcctgatgacttcctaaagatgaatttctggaagtgtgatgggtagagcagaggataggcatgcataagtgttcgtgtgtgtcaccccagtacccccagaaggttagtgatgtgcctgtccagagtctcacagcagtactcatcgaccttttccccttcccctgttagccaagtatcaccaggccttcatgtctgtcaatatgatagctgtttttatttctatttatctgaatactgattattttatcagccatttcaatgagatttatttcaataatctcaaattgtctttgctcatttttctgttcagtctttctcttatttctttataataactggctatgtaaaggttatttactctttgtcatgcactttacaagtacttttcccaagttgtgtgtattcatagcagggagggatttttttgtttgttttaagcacacagaagttttaaacttgtgtagctattttataaaaacattaaaatccatttaaacgtctagatcattgatttttttttctttttactttttgtgtaaacttttaaatcacagacattgtttgtcctaaatttggggtacatggtacaatatggacaccatattaaaacttgaactaattaaagtgattttttcccctttgtcaggtaggcattattaatactttttactctctaatatctttgtgtgtatgttttatttcctccactgccttatagattctttaaggtctgggcctatatctaattcatctttgtgtctcccatttccagccatttgtgaaacctgcaatagttactcatgatttgtgtggcaggcactggtcacgggggaaacagaagaataagaggctgtccctgccctagtggggcttgtcatgtaatgaggaagccaaccacacgtataatactttagcccactgctgtgataagcaaatactctggggatatgaggattagggaaactcaccgaggactcatgcttgatttgtgtcagcattgattcttaggaatgcaactgacaacacaaggaagaggttcattctgctaatgccaaggaatgcgaggcatttcagtgatctgtagcttgtgtttcatgtggctggagcctagggtacgtaggaggggtctgtcagggaatgagacagaaagataggccccagatcagtactgtgcaaagagctttctgcgatgatgtcagtgttttatgtgtggactggctaatgcagaagctatatgtggctattaagcacttcaaaggtggctagtacaactgaggaactcaatttttaattttatttaaatttaattactttaaataaccacacatggcaagtggctgcctcattggacagcaccggactaaatcatgagggacctcttttacaccctaaggagttgactgtttcctgagtgagagagaaaagttgggggatggggagttatgattccctgtttgttttggaaatgtcactctagtgtagagttcttaacccttttgggtcccagaactctaaaacttgacttcttgccagtccctttcctagggtctgcaaagctacaactgcagcactcaactgagcagaccaaaacctgggcctgggggagctcccattctgggggaagagacaaaaaagagaaacacaagacacgcattatgttagaggacaaggatgggtggattctcacacttgcatcccacctctccctcccaggagctgtgtgaccttagacaagttacttagcctctctgcctcatccataaagtgttgtgataatagtatctgtcttgtaagttgttaggggaatgaagttagtatttgtacaatgtttggaacaaggcctggtacataatgagcactataaaagcatttaataaataaataaatgctaaggagaaaagatcaatcagggaagggaattgctggggagggggtaggcattgcagttattgatcaggtgaccagggaagtcctccttgagaaggtgacattatttgagtaaagacctgaagggaatgaaaaagtgagccatacagattacttcctagtagagggggcaacaagttgagagaccctgagaccagagagtgcctggcatttttgaagaccactcggaacattggtgtggctggaatgcagtgtaaaggaggagagagcagacgatgaggtcagagccttaacaggtgttagatcctgtagggctttgtagattggagtctttggaggatttctgagtacagaagtaatctgatcggggtcctgagcaaggggtgggagtgtggagctatcaatttccaagaaagtatcattgcccgagggtgataaaggcgaggtcactggttgagactgccggtagaagactagttaggctgctctttagagcaggcaagagataagagcctgatctcaggcaaagatgataaggaaagggattttagataagctgaggttaaagaaattaaaggaatctgtaagaaattacatttggggccaggcacagtggctcacgcctgtaatcccagcactttgggaggctgaggccggcagatcaccgggtcaggggctcgagaccagcctggccaacgtggcgaaaccccgtctctactaaaagtacaaaaattcactgggagtggtgacgggcgcctgtagtcccagctactcgggaggctgaggcaggagaatcgctttaacctgggaggaggttgcagtgagctgagattgtgccattgcactccaccagcctgggcgacaagagcaagactctgtctcaaaaaaaaaaaaaaaagaaaagaaaaaaagaaattacatttggaagatgaaggaagagggatcacacgtgaatctggtttccgatttgtgtagcttggtgggatcaagattgggactgcgggggcagagcagattaggagaaaaaggggagaagattgcagttgttaggggtgcagttttagaattttctcatggttctgtgcaacattcagatagagatggctcataggctgttgaaaaagtgtagaagagaagcctggggtggagaaagaaaaatttgagttacctgatcattgaagcctcagtaatgattgtagttagaagagaatgaggctagacagagagcctggaaacataagagtagtcggggttggcagagaacaacgcttaaaggatcctgagcagcagttattccagagctcagaagcagaccagacgagacagctgtcttgagaggtcaagcagctttgtgagaccgaggaaagatagagaccgcttgtcctttggcttcagcagattggaaggaggccctggctaaaggcatctgtctgctctgcaatttgaggcctggaggctggaggaggagtgataatggtggagtcggagaactgactagggacaaagtgccttgcacagtactttgtacataaaagggcagtctaatagacatttatcaagtgaatggatatttcaggttcacattcagcttattctgcctttctcctacctccaccccaaatctcccttgtaccataaggtatttaaggcctatttgatatcctgatattttggggtcacagacactttaggttagacagcactaactagtaccagacgattatcatctcttttgatttaggtctatattggacagtatgaaattaacttagaagtgtgttgctcagaataaacccttccaacagcttcagtgcaaggatcatgtatagattatatgtggttggatttaagcacacacttaaagaacgtagatgttttctttgatgatgctatctttgtgatttgtctcacttcctggaacaggagggctctaactccgtgaggaccccagcattatttctataattgtttgtgagaaggactgaatcccagagcattgccttgttgctgacctttcagtatggggaggtaagtgatgggcctaatcaccatgaaacatgaaatcttggtgatgcaaaaacaggtcttgagagaaaaaaaatctaaatcgcaagtgaaaaatgtgaagttgtgctgtgcttctgtttaagaccttttttcttccagggcccagtgaggtattttaatgcatgaagcactcttcaaggtgaagagtaaagaaattaactgtaaaataatagaatttatcccaaaggcagtgaaatttttttaaatcctaatcatatttctagaatgagcctctcattcttgacataaactgaggggaaaagttcttgattatttgcagaaatgtcttgtgggaatatttctaaaagtacaggacatagaaaactcatttattgactttgttatggggatgttgttaaaatgctgttttctcccattactcaagtcatctgggagaaatttgccttggacttcagtgttgagaaaatttgttcctcctgagctatttgtatatttctggtgtaatgggcaatgagctcagtcgtatttgcagcaggcccagcttacgacatgcctttctccatactgcattcccgtttggtctcatcatccttacactcgatttcatgatcgatttatatatttatgttattgaagttattctcgtaagcagtctctaattctgtatctatgttggagcaaagcagggtaaaattaaaaatctacataatactgtcaagagaaggggaaaacccagaagtgtcgtaaccttcagggcctgattctcattcagatgattttatgataaggggtttgtagctgttgtgtagcatatgcaagatgccagtatacagatacctacagttagggaaatccaggtagctcaagccaaatatcttattttaggatcactttaggtgaaggaagcctcattggagcagattgctttaaaatctttttccttctaatttcaggattggcatctcctgtctttttcctgcttcttggcattttagcatatctccagtagggtgtcctcgaattctgaataccaatttacgccaaattatggtcattagtgtcctggctgctgctgtttcacttttatatttttctgttgtcataatccgaaataagtatgggcgactaaccagagacaagaaatttcaaaggtaagagataaaaacatttgctttctagaccagaagccttaccttctgtcttacctgttttaggctgctggaacagaattccatagactgggtggcttataaacaacagcaatttgtttctaactgttctagaggttgggaaatccacgatcaaggtgccataggttttgtgtgtggtgagggcctgattcctggttctgagatgaggaggtcttcttgctgtttcctcacatgatggaaagggggtgagggggctccctgaagtttctgccctcatgaactaatcatccccctgaggccccacctcctaatagcatcgcattggtgattaggtctccaacatacgaattttggggggccccagacattcagaccataacaccatcatttcatggcttcacgacgtttggctttagattggaatttaaggaactgtaggaactagattctgtgccatgttcatcatggcatgaacagttaaaccatttgaagctagttaactgctaactaccaaatccatatcataagaggtcctggaataattatttatacataagcgtctcgtgtaatatgttttaagctgatttttgagttggtagtttagaaatagaattttgcattttggaatttgtttgaacttctgtaatggagtgtgtgtctgatttagatgatctttatcatcatcacttgttttgttttcttttgactcttcaattattcaacagttgtattgatgttatagtggtgctgctacatagcttagaaattactgacttggtatttgctgcattttctctgttagacttcaggtgatattctttgtctaaatcaaagcatacgtgtgtttctatacaaggtacctggcacgagttaccgacattgaagctacagacaccaataaccccaatgtgaactatgggatcgtggtggactgtggtagcagtgggtctcgagtatttgtttactgctggccaaggcataatggcaatccacatgatctgttggatatcaggcaaatgagggataaaaaccgaaagccagtggtcatgaagataaaaccgggtatgtaaatgagaacatctgcctggtaaccagggtgtgtaccttcattctctgtggcgtctttcatatcgttccctttctacaccatggccctgagtcaaacctcacaccaggacctgatgggtctccttgtttcactttcttttcccttttctgtccattttgcaaagggtgactaacaccttgataaaacatccaaacagacatgtctttttgtctcccatagcattttaaatagtgccttactcatggtatctacgcagatgttgctggttggcattaattatggagagttttttcctatttagtaaccattggtctctatccttaatgacaaggtaatttcagataactcatgaaaatctgtaatatattggcatatatttgtcacttttaaaaattgctggccacatgtagttctagtcatctagattatttggtgagtgtgaccacagaacttagagctaatcataattatgtatagtttttaaagatactgtaatttctaagccagtgtgacatgtaaaagtttaggtttggcttccttattaggtaatttacatcagtgatgctcttttttctgtatcatcaccatttccatggacagcagcttctgtcaggagcatttagaatgggagataccgggagtgccttgaaacaagttttatgtcttgatagttgatcactgatttcaaacagttgaccacagatcttaatagagatgcagcacttttatgtcatcttactaatgtattaaaatagtaaaatatcaaatgcaaacaatccaagaaatttatctggtaaattattagagaatattgataaataataattattatagcttattatccccatttcagaaataaaatttaaaagaatattcagtttaacatgagaaaaatacatatcctcatagaagagtctccaaccatgtagaatggtgacccctcgagtcctcattctttacggaataattcagaccccacctcctccttcaggcagccctcaacaagttgattatcctttgatgtatgggcagctaggaaccagcatattactcagaaaatctaaagtctgtacctcacttttcaggttaaagagagacaacctactgtgtgtctgtataccagcattattttatcagagtacatttccatgaacaaagattaattttttagtgagtgtcttctaagttttagttttatgtatttctaccccttaaatttttatgtatccctaacctagaaacattttcagttaaagtaatattgatcaaataaaaaacttacgagaagactgaaaaaataaagcattttacatttcatctagcttcacgtaccaggtcccatcagtgactaaacagatctcatggaataagatgaaaacttccatgccttggagttgtccttttagaacaaagggtcaactacattatcatcctagagtatacattagaatctcattaaaatcaggcttaacattggtctgtcttgcactatacaaagtgtatgaaatggaaatcaaaatacctttttattgcactactctgtcctgaagcatggacttccgtgtataacattgcagcaaggctctagaaatttcttaatagggtctggctagtttagggcttcgagtgcattgaaattgaattgtatgtgttgtcaaaaacttacagtttagtcaattttttgctaattcctttgatgaatcacttaatctttttgggtttgtaattttctaatgtgtgaaataaggtatttttagacttctaaagcgcccctcatttttaatattgtaggctaaatgacacctagaaatattcatttgtgtactcattcagcagatacatgctgggcacctgccatttgctaggcactgtgttaggtgctatgaatataagtttgaacagacacattttgtgcccttgagaagcttttagttgtaatgagacaggcaagtaaataggtaattttgatatggtgtaatgaatgtacatctagcaaaaggaagtaagcatggaatttaacaagagttgtcttcagggttctgttagggtgacttccatggaggctggagccaagtgggtgtgcaggaattaaccaggtgaaaaggggtagggaggtggatggagaagactcttcttggtggtggaggagcagggccctaaggccacagtaaggtgcattatggaaatgttagttcagtgtagctgaaggcaatggaaggaacatgggaagagataagggtgggtgagttatgcagagcagggtgttctagagttgagccttacctggaggacattgagccacaaaagaattggaagcctgaagaggcatcctttgggtagggaatggtggggagatggtcaggatcagagggtgggatgtgctgtggcaggctggcagagggcgtgtccaaagggatgaggagtaaagtcatgtgagaggaaccaaggagaggcgatctatgaaacccaggttgtgtgttgggatgagggagagggacttcatctaagaccctggcttgggctgctgggtgcccagcgctgatggcctcggagggaggtaaccagcagtgagagcaggtttgtagtgaaagttgagttcagattttgccatgatgcattgggggtggctgtgaggacaagcaagggcagtgtctggtggacagttaccccacgctcacctggaggctaatgagtgctgcatggctggtggcacagttcggagttcatggcatgctgatggtgatagcagcctcaggagggactgagctcacctgaggagagggggagcacgtttctcgagggcaggcaagagcccatgcgcatggcagtgacacacagcagatgctcagtcaggtctgtgtgctttgatgaagaagaaaaggacatagcactgaatagtgccaccaacatttaagtaaggtctgcagaagaagttgctagaaggataggaaaaactaaggaagtgtaatgtgtagcatgatttccctaaaattagccactctgaagaaacatcacatgttatagctaaaatatctgcttcttaactaaagtatcctgtttctctaggcatttcagaatttgctacctctccagagaaagtcagtgattacatttctccacttttgaactttgctgca

SEQ ID NO: 11859 - DNA, 566 bp, Homo sapiens
aggaaaggagcgcggcctccaggaagccggctggccgtgatgctgcccactggtggtcccccgctcccggggtccccggccggccaagcaggattggcatctcctgtctttttcctgcttcttggcattttagcatatctccagtagggtgtcctcgaattctgaataccaatttacgccaaattatggtcattagtgtcctggctgctgctgtttcacttttatatttttctgttgtcataatccgaaataagtatgggcgactaaccagagacaagaaatttcaaaggtacctggcacgagttaccgacattgaagctacagacaccaataaccccaatgtgaactatgggatcgtggtggactgtggtagcagtgggtctcgagtatttgtttactgctggccaaggcataatggcaatccacatgatctgttggatatcaggcaaatgagggataaaaaccgaaagccagtggtcatgaagataaaaccgggcatttcagaatttgctacctctccagagaaagtcagtgattacatttctccacttttgaactttgctgca

SEQ ID NO: 11860 - DNA, 5781 bp, Homo sapiens
tatttgtttactgctggccaaggcataatggcaatccacatgatctgttggatatcaggcaaatgagggataaaaaccgaaagccagtggtcatgaagataaaaccgggtatgtaaatgagaacatctgcctggtaaccagggtgtgtaccttcattctctgtggcgtctttcatatcgttccctttctacaccatggccctgagtcaaacctcacaccaggacctgatgggtctccttgtttcactttcttttcccttttctgtccattttgcaaagggtgactaacaccttgataaaacatccaaacagacatgtctttttgtctcccatagcattttaaatagtgccttactcatggtatctacgcagatgttgctggttggcattaattatggagagttttttcctatttagtaaccattggtctctatccttaatgacaaggtaatttcagataactcatgaaaatctgtaatatattggcatatatttgtcacttttaaaaattgctggccacatgtagttctagtcatctagattatttggtgagtgtgaccacagaacttagagctaatcataattatgtatagtttttaaagatactgtaatttctaagccagtgtgacatgtaaaagtttaggtttggcttccttattaggtaatttacatcagtgatgctcttttttctgtatcatcaccatttccatggacagcagcttctgtcaggagcatttagaatgggagataccgggagtgccttgaaacaagttttatgtcttgatagttgatcactgatttcaaacagttgaccacagatcttaatagagatgcagcacttttatgtcatcttactaatgtattaaaatagtaaaatatcaaatgcaaacaatccaagaaatttatctggtaaattattagagaatattgataaataataattattatagcttattatccccatttcagaaataaaatttaaaagaatattcagtttaacatgagaaaaatacatatcctcatagaagagtctccaaccatgtagaatggtgacccctcgagtcctcattctttacggaataattcagaccccacctcctccttcaggcagccctcaacaagttgattatcctttgatgtatgggcagctaggaaccagcatattactcagaaaatctaaagtctgtacctcacttttcaggttaaagagagacaacctactgtgtgtctgtataccagcattattttatcagagtacatttccatgaacaaagattaattttttagtgagtgtcttctaagttttagttttatgtatttctaccccttaaatttttatgtatccctaacctagaaacattttcagttaaagtaatattgatcaaataaaaaacttacgagaagactgaaaaaataaagcattttacatttcatctagcttcacgtaccaggtcccatcagtgactaaacagatctcatggaataagatgaaaacttccatgccttggagttgtccttttagaacaaagggtcaactacattatcatcctagagtatacattagaatctcattaaaatcaggcttaacattggtctgtcttgcactatacaaagtgtatgaaatggaaatcaaaatacctttttattgcactactctgtcctgaagcatggacttccgtgtataacattgcagcaaggctctagaaatttcttaatagggtctggctagtttagggcttcgagtgcattgaaattgaattgtatgtgttgtcaaaaacttacagtttagtcaattttttgctaattcctttgatgaatcacttaatctttttgggtttgtaattttctaatgtgtgaaataaggtatttttagacttctaaagcgcccctcatttttaatattgtaggctaaatgacacctagaaatattcatttgtgtactcattcagcagatacatgctgggcacctgccatttgctaggcactgtgttaggtgctatgaatataagtttgaacagacacattttgtgcccttgagaagcttttagttgtaatgagacaggcaagtaaataggtaattttgatatggtgtaatgaatgtacatctagcaaaaggaagtaagcatggaatttaacaagagttgtcttcagggttctgttagggtgacttccatggaggctggagccaagtgggtgtgcaggaattaaccaggtgaaaaggggtagggaggtggatggagaagactcttcttggtggtggaggagcagggccctaaggccacagtaaggtgcattatggaaatgttagttcagtgtagctgaaggcaatggaaggaacatgggaagagataagggtgggtgagttatgcagagcagggtgttctagagttgagccttacctggaggacattgagccacaaaagaattggaagcctgaagaggcatcctttgggtagggaatggtggggagatggtcaggatcagagggtgggatgtgctgtggcaggctggcagagggcgtgtccaaagggatgaggagtaaagtcatgtgagaggaaccaaggagaggcgatctatgaaacccaggttgtgtgttgggatgagggagagggacttcatctaagaccctggcttgggctgctgggtgcccagcgctgatggcctcggagggaggtaaccagcagtgagagcaggtttgtagtgaaagttgagttcagattttgccatgatgcattgggggtggctgtgaggacaagcaagggcagtgtctggtggacagttaccccacgctcacctggaggctaatgagtgctgcatggctggtggcacagttcggagttcatggcatgctgatggtgatagcagcctcaggagggactgagctcacctgaggagagggggagcacgtttctcgagggcaggcaagagcccatgcgcatggcagtgacacacagcagatgctcagtcaggtctgtgtgctttgatgaagaagaaaaggacatagcactgaatagtgccaccaacatttaagtaaggtctgcagaagaagttgctagaaggataggaaaaactaaggaagtgtaatgtgtagcatgatttccctaaaattagccactctgaagaaacatcacatgttatagctaaaatatctgcttcttaactaaagtatcctgtttctctaggcatttcagaatttgctacctctccagagaaagtcagtgattacatttctccacttttgaactttgctgcagagcatgtgccacgggcaaaacacaaagagacacctctctacattctctgcacggctggaatgagaatcctccccgaaaggtgatcctccacagaagggcaagggtgagggtgggttcctggaggggagagggggtgttcttctcccccttcctccttctcctctccatcatcatcatcatcattgaaaggaaaatattcaaaattctttcttcaagtctgtaacagtaccagaactattcctttagccagaatccaccaaatagcctttaattgacttaggactataggcaacggtaaaggtgtcatttttaaaaacctaatctattttacgtagttaaggaatgcttgcagttgtagttttacatctagaaatcacataattcacacaacttgttcattttgaaaattcattcctaatataatctttccaacgaatttcttttttaaaaaaattaactgtttcatacaagatataccagatccctggttttgttttttgtttgtttatttttttccttttctaaacagaagataccaagctgtaatcttttgatttgtaaatgtttttattactttacagccagcagaaagctattctggaagaccttctgaccgatatccccgtgcactttgactttctgttttctgactctcatgcagaagtaatttctgggaaacaagaaggttggtatattggtcttcagtttaaaatttgggaagctgttcctttaaatcctccccattttcaccaatgtaccctttgttatactcctattgtcttaacatttgggaaataatagccttgaaatattacaatttttaaattactaaatcagtttcttatatgactagtctttgttgccctaacattaagccactgaaagataaccgtttgtcttcaccacatgtagtgacatagcttgatataaactcactttgatagaaaaggcttgtgtgccttgcctaagttgtgtggcttcctgggacgttgatcattattgagctgttggagcttcttctcgactttgatacactgagaaatatcaaatctttgttctattttcaaagaaatgattctccttgagaatgaaatgtcaagtcaatgaaattatttggggtatagcttgctagaaatgtataccaaaaagtatttcaaaagccgtctgtcatttcagcattaatacttcctatgtgaaagagactgtagagaatacagaaatggggtgaaatttacacattgctattcagctgcttacagacaattgagctacacagttagctgttctatgagggttttaggtaccagaaaaaagatgaggaaaaaatatcacaggagttcttaagagggaggcatttttttttttccagctagggccatgatggagaaagtgacatctgaactgcacctcaagggaagggatagttctaaatagaacatgccagagcatgggaagggtggggctctgagggaggggcaggaagcacacaccaggcagaagaaaggacttgactcaggacaggttggaaagagggcactgtggacagagaaacacaaatgttttagtttgactgggtggtggcccttctggaaggagtggcgggaatgttaacagttggctggctcttgaattgtcagtccaggaatttggacttctttctgtagatgagtccaatagcagagagtagagcaggttgcagcagaggaataggggcagggatggattagatggactacccaaggtgacaatgaaacccaggtgtagggaatgtgaaaatagaatcagacttggcagctgagtgaatggagggataaaggaaagagcagaagataccttgaattttttttttttttgagatggagtctcgctctgtcaccaggctggagtgcagtggcacgatcttgactcactgcaacctccacctcccgggttgaagtgattctcctgcctcagcttcccgaatagctgggactacaggcgccgccaccatgcccaactaatttttgtatttttagtagagacggggtttcaccatgttggccaggatggtctcaatctcttgacctcatgatctgcctgcctcggcctcacaaagtgctgggattacaggcatgagccattgcacccagctgataccttgaatttttaaaaccttggatttgacaggtttaacatcataaaagtgaaaattatagtattttgaaacataaatttcaaaagaaaactggcacctagcgtattgtatttccaacctgtgtagatggtataaaactataaacattaaagttgagagttcttggaaagccatttggagtaataaaaacatcagtagcaaggtgttatttcagatgattttacaggttatcagggagtgaaataagtgagacgtttgcacagactgcgcagataggagttacacaaaatgttttaaaactttttcttctcttcaccctgtaaaatgtctataggtgtgtatgcttggattggcattaattttgtccttggacgatttgagcatattgaagatg

SEQ ID NO: 11861 - DNA, 351 bp, Homo sapiens
tatttgtttactgctggccaaggcataatggcaatccacatgatctgttggatatcaggcaaatgagggataaaaaccgaaagccagtggtcatgaagataaaaccggagcatgtgccacgggcaaaacacaaagagacacctctctacattctctgcacggctggaatgagaatcctccccgaaagccagcagaaagctattctggaagaccttctgaccgatatccccgtgcactttgactttctgttttctgactctcatgcagaagtaatttctgggaaacaagaaggtgtgtatgcttggattggcattaattttgtccttggacgatttgagcatattgaagatg

SEQ ID NO: 11862 - DNA, 3051 bp, Homo sapiens
taaatcagaattgtcatattgaattatgagtgatgcttagaagggtccttgggaagtgcagaagcagacatttttgtcccttttagatgagactatttttagacttttctttttagtaggaggctaaagtagcttaagctattaaggtttgttatgcttatgtctgcaggaagaagtagctaaaaacttgttagctgaatttaacttgggatgtgatgttcaccaaactgagcatgtgtatcgagtctatgtggccacgtttcttgggtttggtggcaatgctgctcgacagagatacgaagacagaatatttgccaacaccattcaaaagaacaggtaaagcacctttcactacttggcagtcatttgcaaacctaggtctctcctcataaaaaacagacccaggcaaagtgggaagaactcaattagcaaaagtgtgttgcactgttagctttttattcccccactagctgagcagggagaagagatgaaagcacaccagggtcctgcctttggccctctgtcccaccgtgccctgaaggaggtgtgtgcgtgcgctctctcacccgcatctcaactgatggattagaaatttcaccatcaagctatagaatagtttggagccctgggtggtgctattcatgattcagagtccttgggaaacccagtatctggagcactcgtggtgtcctggaggcctcaggtagtgtgttctcttgttgctgaggagattgaaatatgtgatgttctggagactctgtggatgaagcagccagtgcagctagttagtggataagaaccatcgtgaagggaattattcaagagaaataaattatctagaagagtcagagttagtggcttttgaatttagcaatgaagctttaaaaaatgagtgtatgaagaattgtggtatagaaaatatataaaacaaaacagcactctattggtttaaattgactgtataagtgtaagtatatagcacttatttatttgaaatttgtaagaacataaaagctatttggataaataaaaaaatctgaatctggggttatgtaagctatcctatttattactgtgttttatttgtttattttgatgaaacaattttgagggaaaaaaatcctagttcatagagctaagagattgtatacttccttgattaatgtaatcttaataaacctgtgaaggcctgaacttgaaaaaagaccaagttggagctattcagtacatttaccacaaagtcatgtgtgtaaataggaaaagcaataaaaaccttttcctgtgtctcttccaaaagttaactgaatagttttaattataagattggtagtcccatgattttgtatttttaattggtatttagcacattttggtataatcatttttatagtagtcttaaactagaaatattttatagacaacatttgtaacatattttttccgaaaccttaatttttactcattggttttaatgtcagaaagctttatataatggatagtttagtggtacttcttaatttagatataggacaactaaaaataatagcatgaaatatatatttgactactcttggacttttatagtaattacaggtgtttcatatgtcatgaattgagcattgaagtacacatttatctcttcgccatttgtagtggtgattaatttttttaaattaagcgaacatttttatggcaaagaccttaatttattacattcaactgcatgatgagtaaccctgatctgaggaatacacaacttgtgagttgagtgaaaagtgaaaacttgactgtcggtgatgaatattgaattctgaccatgcttaaccctttaacagttcaacacctgtcaggcccctgtgatttcacagtatccaacaccaacatcacttgagattttgtgagctcttctctgtttcttgttgcttgaaggcatgcacacacaataggatgacagatgttaactcccagaaatttcattagcaagtaataagcctagtgcctttcagttaacaaaattaatgtttattttctacagggcatctcagagcccattgtacaatggaaactgctgtctgctgcagttgggacccatagctgatcaaggaaagaaataagttgaaacagaatgataaaaatagagccaagccttagacattctgtcttaacttctgtattcatttgctaatcttttcctctgaaccaaggtctgtttttagactccatcctttctttggcatgcactgcacccctcattgagataccagtttgtctttgtttaaagaatactgaggacttaaaagagatttgcaaggcaatttgataccaaatccttctagatgtttgctaatttttcccagttttaaaaatcctacccacacctagtttgataattttctagtaacttttctaaagcatctaacctgctttgcccaggaccggatcttgtcacagtcacgttccttccatctgtattaggtaaaaccacaagcactagtgcaaaaatggggctggtaacacagttgccttgtgcccagcagctgggaacatcaggccttgttgccaggatcgtcggctaatcgggtaggttatccaactggactctggtagcctgtctgctgcaggcaagtttgtatcctgactctccaagaaagtctcaagtgtgtattttcctaactaattatctcggaacccttttctgttccacagacacggtcctgcaggtctcatgtcccacagagcgtattttgagaaacactggtttgcagccacttcctgaaaacacagttttctgtaggactcacgatgaagtttcttgttttgccataggctcctgggtaaacagactggtctgactcctgatatgccgtacttggacccctgcctacccctagacattaaagatgaaatccagcaaaatggacaaaccatatacctacgagggactggagactttgacctgtgtcgagagactatccagcctttcatgaataaaacaaacgagacccagacttccctcaatggggtctaccagcccccaattcacttccagaa

SEQ ID NO: 11863 - DNA, 561 bp, Homo sapiens
taaatcagaattgtcatattgaattatgagtgatgcttagaagggtccttgggaagtgcagaagcagacatttttgtcccttttagatgagactatttttagacttttctttttagtaggaggctaaagtagcttaagctattaaggtttgttatgcttatgtctgcaggaagaagtagctaaaaacttgttagctgaatttaacttgggatgtgatgttcaccaaactgagcatgtgtatcgagtctatgtggccacgtttcttgggtttggtggcaatgctgctcgacagagatacgaagacagaatatttgccaacaccattcaaaagaacaggctcctgggtaaacagactggtctgactcctgatatgccgtacttggacccctgcctacccctagacattaaagatgaaatccagcaaaatggacaaaccatatacctacgagggactggagactttgacctgtgtcgagagactatccagcctttcatgaataaaacaaacgagacccagacttccctcaatggggtctaccagcccccaattcacttccagaa

SEQ ID NO: 11864 - DNA, 579 bp, Homo sapiens
tggggggagactacaatgctgctaaatttactaaagctgcaaaggattattgtgcaacaaagtggtccattttgcgggaacgctttgaccgaggactgtacgcctctcatgctgacctccacaggcttaagtatcagtgcttcaaatcggcctggatgtttgaggtgtttcataggggcttttcgtttcctgtcaactataaaagcttaaagactgccttgcaagtttacgacaaggaggttcagtggacccttggagccatcctctacaggacccgctttctaccattaagccatcggagaccagagccgccccctctgctcgagaaaggggctcagcggcggcggaagcggagggggaccaccgtggagagcgcggtcccagcccggccactgcggatccctgaaaccaaaggaagaaaaacgctgaggctcacggtcactgagttagtcaatgtggggactgaaacccatacctcttactccaggcccctcccctacaccactgctagcctgtccgtcctggaaccccaaaacaacatttgtcatctttggtggaatgaattagttattgatggtg

SEQ ID NO: 11865 - DNA, 2093 bp, Homo sapiens
ctcagggatatatgacattatgccgagaccgggttcatgcactgattgatttgacaggtgaactgctccatgttgtgggaccagggatgtgaagcaagtacatcaaccttgaaacgcgcgcagttggtttgggagagccggcctgaggaagcccctgccccaaggctgcccacagagggaaggattgtgtgtgtgtgtgtgtgtgtgccatcttgacagagtgagtcagtctgacttgcctttgtgcttgccgtttgtaggtatcagtgcttcaaatcggcctggatgtttgaggtgtttcataggggcttttcgtttcctgtcaactataaaagcttaaagactgccttgcaagtttacgacaaggaggttcagtggacccttggagccatcctctacaggacccgctttctaccattaaggtagggctgtgaatttgggaacgagaatcaaaaagatgcttttctgcagttacagcacctcatggcagctgtggtctgtggctgtttggggcattgctgttagagccggccacggcagaattgtagggacagtgacgtttgcttttggtcttgccccctccccacaagtgcttcctcccttctcaccctaccatcccgtaatacacagcactcctgtcctactgccctgtgtttggttattctcaactgtctgttccccagccccggcaaaagggtcagttccggggttcttaacctttatgactcaggcctcttctccaaatactgtttaaatgcatgtataaatacataggattacagaagaaaccatcatattgaaataataccaaaatattacagaaaacaagtttgtgatactgtaatatgtgttcttctctattaacacattaaataacaggatctggcagcagaattagcactttctgtaatttcagtgtagtcaatgagcgtcaatgatattttgaggcattgatgataccataatgggacatgaaagatctgtgattttcgttagtaacaaagttgcaggtgctgccaacgctaatgatagtttgttgtctgcattcatggtcaaagaaatgctacatctcagtcagcgcttgggtagaacaaagatgtgcgtttttccccattcacgtttgcagatctgctgtcagttgacctgtgctaagaacctgagttacctgatagatgagacatttgctcttccccccaccccctccatttaattgagcatttctcagcaacccttttaactgggttaactgtaaaaatggtgagtcatgggtgttactgatcacaagcatgcagtttgtttacatgttgacttctttgtatcagcgaaaccttcacggctcttctaaattcctctgattttggttgcccaaattataatgaccgacttcagagtatactttcacatgttatctcactgatacttagaagccccctgcattgggctgttccgttctccatttcagaggtagggttgcagttcctaaagtgcagctctggggcctgggtcccgccgtccccctgtgcaccctttccacccctttccttgcttactgtcctgtttgttgtttggtgttcacatgggcagagacatccagcaggaggccttccgagccagtcacacccactggcggggcgtttcctttgtctacaaccactacctgttctctggctgcttcctggtggtgctgctggccatcctgctgtacctgctgcggctgcggcgcatccacaggcgcactccccggagcagctcggccgccgccctctggatggaggagggccttcccgcccagaatgccccggggaccttgtgatccagctcacagctccacgaagactcaaaaggaaaagccatttttgcctcagggtttctcctctttattttcctgtggttttgttttttctttcccttttttgttcctccaaacaaaaacaaaatgcaggccgagcgcggtggctcacgcctgtaatcccagcactttgggaggccgaggcgggcggatcatgaggtcaggagatcgagaccatcctggctaacacggtgaaaccccgtctctactaaaaatacaaaaaattagctgggtgtggtggcgg

SEQ ID NO: 11866 - DNA, 931 bp, Homo sapiens
ctcagggatatatgacattatgccgagaccgggttcatgcactgattgatttgacaggtgaactgctccatgttgtgggaccagggatgtgaagcaagtacatcaaccttgaaacgcgcgcagttggtttgggagagccggcctgaggaagcccctgccccaaggctgcccacagagggaaggattgtgtgtgtgtgtgtgtgtgtgccatcttgacagagtgagtcagtctgacttgcctttgtgcttgccgtttgtaggtatcagtgcttcaaatcggcctggatgtttgaggtgtttcataggggcttttcgtttcctgtcaactataaaagcttaaagactgccttgcaagtttacgacaaggaggttcagtggacccttggagccatcctctacaggacccgctttctaccattaagagacatccagcaggaggccttccgagccagtcacacccactggcggggcgtttcctttgtctacaaccactacctgttctctggctgcttcctggtggtgctgctggccatcctgctgtacctgctgcggctgcggcgcatccacaggcgcactccccggagcagctcggccgccgccctctggatggaggagggccttcccgcccagaatgccccggggaccttgtgatccagctcacagctccacgaagactcaaaaggaaaagccatttttgcctcagggtttctcctctttattttcctgtggttttgttttttctttcccttttttgttcctccaaacaaaaacaaaatgcaggccgagcgcggtggctcacgcctgtaatcccagcactttgggaggccgaggcgggcggatcatgaggtcaggagatcgagaccatcctggctaacacggtgaaaccccgtctctactaaaaatacaaaaaattagctgggtgtggtggcgg

SEQ ID NO: 11867 - DNA, 2739 bp, Homo sapiens
cctacgagggactggagactttgacctgtgtcgagagactatccagcctttcatgaataaaacaaacgagacccagacttccctcaatggggtctaccagcccccaattcacttccagaacagtgaattctatggcttctccgaattctactactgcaccgaggatgtgttacgaatggggggagactacaatgctgctaaatttactaaagctgcaaaggtacccttgagagacgccgtctgctctgcatgcttttgagagaccagtgtggacggtgacgggttatgtcctcctttcacattgacagggaaagacggagtatagaaggctgcactgcagcatgttgggatcctgttccctttgcttggagggaggttgaatagtcacagcagaagtaaaaaatgtactgtacgctgacttctgcaccactccattagctaccctggtcatcagttagctccaaattacagtcttttatgtcatttttgtgctttgctgcatgtgacaattctcctactagccttccccctccctgacctgccaggatactcctgttcttgtgttctctctgccttcctgacaccccttaaacttaggtgatgccagacttccacacttggcccctgatcttcaggttcttggatggtctcatccatattcagggtttgctgctgcctctcaagaagaggctccaatcctgacccctgcccggttgcctgctagattccacaactccagacaaacccaccatcctctctccattctgttcctgttcttctctcggttaatggcatcgccaaccatccagtccccttccctgcagcctaggagtcatggacttctccctctaaccatttcatctctccctatacaccccagtgtaatcagtcacaagtgtggtattttatcttccaagtatttctcaaacccatctcgaagcgcagagcactgtatgctgtaatcatgtcagacagctggcttccctcacgctctccgcgacttctctgtgtccatgtccatgttcctgaagtgcctatgccgagcccgttccccaggccaagtgctttttccttgtgctccctgtcacacacccaggcccatctcccacctctcagcagtgtcttcatcctttaaatagaggtcgggatggtagccacctcgaggagttaagtattacattgagaagacacacttacacaatgctcaataaaagttattataacaaataacttcaagaaaagtgggatctctttcccttctgttaaagacaaaaaccttttgcagttattatcccagtagcttgtactgtgtcctccacagatgtaggacttagtttgaagtagctaaaatactgcttcacttttccaaaaatgtatgcccgtaccatgcagtcatggagggagaaactaaacagttttggagaggttggttgtggacagcaaagctctctttaacaataccctggacagaattttaaggcaaggcattgtgtttgcgaatcagtaagtattccctgagtgtttgtgtgtcttgccatttgttgtataagttaagcttgtgtgtttcctaatgggaaggatatgcttgttacaaatataaatttggtaaaccatttttaaagtgagaattttaataagcctttactagtgatctattttggtgaatttgttttcaggattattgtgcaacaaagtggtccattttgcgggaacgctttgaccgaggactgtacgcctctcatgctgacctccacaggcttaagtaagtactagaaggtcaagcccagggcactcttaagaaccataatgcagtgttggccccactggcttgccacaccctggcctcagtccagcttcttctcactcactgttcttcccatctaccctgggcccctttcaaacgggacaaatacttgtgcccagacatattccgtatcttttttgttttggtcacttttactgtctcttacccctgaaattcccctgttcatacctttgcttgttcaagtcctgcccagacatcagagtccagccagaggctgtccctttccagtcttcctctgtcccctcaatcagacttcatccctttctctgagtctcaagaattcatcctacctcgccaatgcatttatcatgttctgctttttctgttgctttttaaaaatcccctttcattgtaagtcacttaagtgcagacactgtatcttactaattattgtatcttattacttgcttagcacagtgcttggcaaaaaataaacctctaataaatatttagagtcatagaatatcagagctgaagagaaccttcctaccatctcattttataataaactgaggtacaaagaggttggaacctgttcagtattcattcaaggagtacatggtgaaatgccagctggaaaagaaacctatctcagggatatatgacattatgccgagaccgggttcatgcactgattgatttgacaggtgaactgctccatgttgtgggaccagggatgtgaagcaagtacatcaaccttgaaacgcgcgcagttggtttgggagagccggcctgaggaagcccctgccccaaggctgcccacagagggaaggattgtgtgtgtgtgtgtgtgtgtgccatcttgacagagtgagtcagtctgacttgcctttgtgcttgccgtttgtaggtatcagtgcttcaaatcggcctggatgtttgaggtgtttcataggggcttttcgtttcctgtc

SEQ ID NO: 11868 - DNA, 573 bp, Homo sapiens
cctacgagggactggagactttgacctgtgtcgagagactatccagcctttcatgaataaaacaaacgagacccagacttccctcaatggggtctaccagcccccaattcacttccagaacagtgaattctatggcttctccgaattctactactgcaccgaggatgtgttacgaatggggggagactacaatgctgctaaatttactaaagctgcaaaggattattgtgcaacaaagtggtccattttgcgggaacgctttgaccgaggactgtacgcctctcatgctgacctccacaggcttaagtgaactgctccatgttgtgggaccagggatgtgaagcaagtacatcaaccttgaaacgcgcgcagttggtttgggagagccggcctgaggaagcccctgccccaaggctgcccacagagggaaggattgtgtgtgtgtgtgtgtgtgtgccatcttgacagagtgagtcagtctgacttgcctttgtgcttgccgtttgtaggtatcagtgcttcaaatcggcctggatgtttgaggtgtttcataggggcttttcgtttcctgtc

SEQ ID NO: 11869 - DNA, 23547 bp, Homo sapiens
agcgcggcctccaggaagccggctggccgtgatgctgcccactggtggtcccccgctcccggggtccccggccggccaagcaggtgaggttgccttccgagcgtgggtgaggggagggcgggcggccgaaggggccggcgagtgggttggagtgcgggggccggcggcgcggcgagcgggccgcggacgagcctctctgccccaggcccccacagccgcctgcttagccccgcggaccggttcccgcctcccctgccgcgcggccacatccgagcgccccgggaccaacccctgtgagccctggcggccggcgcgctcccccagcccctggcaggggacacctggcggtcgcgcgcctcgggtgaccgctcgggatccccccctcgaatgggcggagcttgaccgggcagcagggatgctgcacccgggacccagccggccctgcctgccgctttaaatgatgacattcgctcgtcttgtcgttttcgctttgctttgcttttgccagatttcatgttagatttcttcttggaaaaatggagcttattgggcagtaaagtgatgatgcacagcattgtttctgaacttgagtaatgcgcggaccccttttaaaggaacaattctctcatggtctagaatgtgtcccagaacccttagggtgcttcagaccccagttagatgaaccctagtgcagagcgttttcagagaacacttatcacgaaggaaactaaagagatcctttatgattcaggaactttcaggctagaaggtaaactagaggtaatggaagaattctaaattagacactcaaagcccaggctaatttcgcattgcagtctttgttgtctcctttttgtgatgaaaataccaaattatccagctttagagaggcctaaaagagttatattatttgtgttaccatatatttgatgtttttgtatcaggtttgttaattctgtttgacatagtagaattataaaatggaacactaattcgtgtagttgaatcgtttatttctctgtttaccttaacagaggtcttgtagttgttgcatgttgaatctatggcttatattcttctacctctaataggaaatgtgtgactgaggcccttgaggatatagtctaggaaggagacaaaaatgaacatttatctaaggatttatattctctacgtatttactcagcatgtttatttaaaatagactactcatgaataaagagacgattccaattgtaagaaaacatcaggatgtgtaacaggttaaatcttgacaaagaaacatgttgacttgtgccttgaaagaagtgtagtcttgagaggaggacacggtggtggctcggaggaagtgctgttagtaaatgcctgaggcaggcatggagacagcttgtgtgggagagaagagagagacctgctgcactggagctgagagatggtatctgggactgatgagaggataggttggtgagataaggtggaccagttgatggataaaaggtttcaggtgccacacaggaaacttggtgttgatccatggccttccagaaggttcttagctgatcatattttgaaggccgtgttttacaaagagttgcttgtaaagtgtggcgtgcacagtgaaggcagaaggtgggtgagtcgccaagagatctgtcttgaggtagtggtgcctgctgtggtcatcttagatatgagggatatctgaggaagaatcgactggcttggagaatgatagaagattgtcaacaccggatgtgggaatcaaagctgagaaccaggtaatccaggtcaatggggattggtggtacccgtcttagacctggagaatttggagggtggtattagagtttgcattagaagatttcaaccctagagttggactagttgagcttgcagtaacagggcttcaatgagcttggaacgtggaactggaacttgaggaaagtcagagttaattcaggaaaagtgaccagaaaaagactacttaaaatgggaaccagaattttgcaaattaatagagggaggaagaggttaagattttatattgaaaaataaaattaaaatgtgtaagataaatattgaacatacagatcataaatgcaactacatacatatcttcttaaagaatgaatcaagttgtcttcatgtatcttttgtcactactgagtaacggtgccacccggcagcctccacatcagcctctcactctcagaaagacagttgtttcttgcaaaacgctgccggaatggttgagagcatctttaatttttccaggttctcttgaatcctttgatattcaaatcattcttttctgaagtacccttccctgtggtacctttgcttattcagaagctgagctctcccagaggctgacttctctgtgattttgtttgcctgtgatttgagttcactaacatctgtttccttgcatcttgtgtttttccaccagaggaaccatttccctttgtggttgatttgcattgttttcgtcgttatctgtagaactgtcagtgagagactgacaaagacattgacacctgactgtaggctttattccaataatgttcagccaagtagggccccactagctgaaatcatgagaattaatgcatctctctggtgataggtctaacacaatttaggcttttttaaaacatgtcagttttatgtggtattactgaatttgcctcccagtgccctggtgcgaagattcttagctagaaggacaattggagtttacatttgaagatcaaattaccatttaactcttaggcaataatccattgtacttttgtcctgagttaaaattacagtgcttcagcagttataagctgtcctattttctctgcttttaaacacaagctttgtaacttaaaatatctgtttgtccttttgatcaaaatcatcacatatctcaaaaaaaaaaaattcctgagacaaacctcagatgacacaaagtttcctaagtgcgctgtgatcattctctcggtcaccttcctcttcgaagtgtgttctttctcaccccatctagaattgacctcccacctctaggaatcttttcctgctaaagctagccttctctgtgctcttctctgagctcttataacaagaatcccagtaatttaacattgcctttaattagtatcttgactattttctgggcattagtattttctctgtagcaatctgcaaactccatgaaatttggagttgggtttgttactcctcatgtcaccttcgtagtcctgactttcttcctcaaggaccagtttgcctttaaccatgactttaagctgttaaataaaactgtcttttctttggttctcagttcagctatcacacaactatcactgatgttttttttaaatgttcagattggaattcctgtgtcctgataggcttttaagataggctttctcaatatattcggaaaagtatttgatcctggaaacaaggtttcatccgtcaaaggtagcttgttaaaaattgttatttcctctgatgataaaattaatatatgtcctttgaaaaatataggcaagcctagggaagaaaataaagatgatacctgatctcattgcccagaaataactaagcactgttaatattttggtttctttcctaacattttatccccccatgcatggggacattttttcacttaatatatcatgaacttgttttcatgtcaataaatagatctatgtcatcacctttaatagtcacattgtattccattgcataaatgtaccccacagtggacattagtaacagtgttttgctgttccacacaatactatgatgaccatcctatagattttttagtgaattttcctgatgacttcctaaagatgaatttctggaagtgtgatgggtagagcagaggataggcatgcataagtgttcgtgtgtgtcaccccagtacccccagaaggttagtgatgtgcctgtccagagtctcacagcagtactcatcgaccttttccccttcccctgttagccaagtatcaccaggccttcatgtctgtcaatatgatagctgtttttatttctatttatctgaatactgattattttatcagccatttcaatgagatttatttcaataatctcaaattgtctttgctcatttttctgttcagtctttctcttatttctttataataactggctatgtaaaggttatttactctttgtcatgcactttacaagtacttttcccaagttgtgtgtattcatagcagggagggatttttttgtttgttttaagcacacagaagttttaaacttgtgtagctattttataaaaacattaaaatccatttaaacgtctagatcattgatttttttttctttttactttttgtgtaaacttttaaatcacagacattgtttgtcctaaatttggggtacatggtacaatatggacaccatattaaaacttgaactaattaaagtgattttttcccctttgtcaggtaggcattattaatactttttactctctaatatctttgtgtgtatgttttatttcctccactgccttatagattctttaaggtctgggcctatatctaattcatctttgtgtctcccatttccagccatttgtgaaacctgcaatagttactcatgatttgtgtggcaggcactggtcacgggggaaacagaagaataagaggctgtccctgccctagtggggcttgtcatgtaatgaggaagccaaccacacgtataatactttagcccactgctgtgataagcaaatactctggggatatgaggattagggaaactcaccgaggactcatgcttgatttgtgtcagcattgattcttaggaatgcaactgacaacacaaggaagaggttcattctgctaatgccaaggaatgcgaggcatttcagtgatctgtagcttgtgtttcatgtggctggagcctagggtacgtaggaggggtctgtcagggaatgagacagaaagataggccccagatcagtactgtgcaaagagctttctgcgatgatgtcagtgttttatgtgtggactggctaatgcagaagctatatgtggctattaagcacttcaaaggtggctagtacaactgaggaactcaatttttaattttatttaaatttaattactttaaataaccacacatggcaagtggctgcctcattggacagcaccggactaaatcatgagggacctcttttacaccctaaggagttgactgtttcctgagtgagagagaaaagttgggggatggggagttatgattccctgtttgttttggaaatgtcactctagtgtagagttcttaacccttttgggtcccagaactctaaaacttgacttcttgccagtccctttcctagggtctgcaaagctacaactgcagcactcaactgagcagaccaaaacctgggcctgggggagctcccattctgggggaagagacaaaaaagagaaacacaagacacgcattatgttagaggacaaggatgggtggattctcacacttgcatcccacctctccctcccaggagctgtgtgaccttagacaagttacttagcctctctgcctcatccataaagtgttgtgataatagtatctgtcttgtaagttgttaggggaatgaagttagtatttgtacaatgtttggaacaaggcctggtacataatgagcactataaaagcatttaataaataaataaatgctaaggagaaaagatcaatcagggaagggaattgctggggagggggtaggcattgcagttattgatcaggtgaccagggaagtcctccttgagaaggtgacattatttgagtaaagacctgaagggaatgaaaaagtgagccatacagattacttcctagtagagggggcaacaagttgagagaccctgagaccagagagtgcctggcatttttgaagaccactcggaacattggtgtggctggaatgcagtgtaaaggaggagagagcagacgatgaggtcagagccttaacaggtgttagatcctgtagggctttgtagattggagtctttggaggatttctgagtacagaagtaatctgatcggggtcctgagcaaggggtgggagtgtggagctatcaatttccaagaaagtatcattgcccgagggtgataaaggcgaggtcactggttgagactgccggtagaagactagttaggctgctctttagagcaggcaagagataagagcctgatctcaggcaaagatgataaggaaagggattttagataagctgaggttaaagaaattaaaggaatctgtaagaaattacatttggggccaggcacagtggctcacgcctgtaatcccagcactttgggaggctgaggccggcagatcaccgggtcaggggctcgagaccagcctggccaacgtggcgaaaccccgtctctactaaaagtacaaaaattcactgggagtggtgacgggcgcctgtagtcccagctactcgggaggctgaggcaggagaatcgctttaacctgggaggaggttgcagtgagctgagattgtgccattgcactccaccagcctgggcgacaagagcaagactctgtctcaaaaaaaaaaaaaaaagaaaagaaaaaaagaaattacatttggaagatgaaggaagagggatcacacgtgaatctggtttccgatttgtgtagcttggtgggatcaagattgggactgcgggggcagagcagattaggagaaaaaggggagaagattgcagttgttaggggtgcagttttagaattttctcatggttctgtgcaacattcagatagagatggctcataggctgttgaaaaagtgtagaagagaagcctggggtggagaaagaaaaatttgagttacctgatcattgaagcctcagtaatgattgtagttagaagagaatgaggctagacagagagcctggaaacataagagtagtcggggttggcagagaacaacgcttaaaggatcctgagcagcagttattccagagctcagaagcagaccagacgagacagctgtcttgagaggtcaagcagctttgtgagaccgaggaaagatagagaccgcttgtcctttggcttcagcagattggaaggaggccctggctaaaggcatctgtctgctctgcaatttgaggcctggaggctggaggaggagtgataatggtggagtcggagaactgactagggacaaagtgccttgcacagtactttgtacataaaagggcagtctaatagacatttatcaagtgaatggatatttcaggttcacattcagcttattctgcctttctcctacctccaccccaaatctcccttgtaccataaggtatttaaggcctatttgatatcctgatattttggggtcacagacactttaggttagacagcactaactagtaccagacgattatcatctcttttgatttaggtctatattggacagtatgaaattaacttagaagtgtgttgctcagaataaacccttccaacagcttcagtgcaaggatcatgtatagattatatgtggttggatttaagcacacacttaaagaacgtagatgttttctttgatgatgctatctttgtgatttgtctcacttcctggaacaggagggctctaactccgtgaggaccccagcattatttctataattgtttgtgagaaggactgaatcccagagcattgccttgttgctgacctttcagtatggggaggtaagtgatgggcctaatcaccatgaaacatgaaatcttggtgatgcaaaaacaggtcttgagagaaaaaaaatctaaatcgcaagtgaaaaatgtgaagttgtgctgtgcttctgtttaagaccttttttcttccagggcccagtgaggtattttaatgcatgaagcactcttcaaggtgaagagtaaagaaattaactgtaaaataatagaatttatcccaaaggcagtgaaatttttttaaatcctaatcatatttctagaatgagcctctcattcttgacataaactgaggggaaaagttcttgattatttgcagaaatgtcttgtgggaatatttctaaaagtacaggacatagaaaactcatttattgactttgttatggggatgttgttaaaatgctgttttctcccattactcaagtcatctgggagaaatttgccttggacttcagtgttgagaaaatttgttcctcctgagctatttgtatatttctggtgtaatgggcaatgagctcagtcgtatttgcagcaggcccagcttacgacatgcctttctccatactgcattcccgtttggtctcatcatccttacactcgatttcatgatcgatttatatatttatgttattgaagttattctcgtaagcagtctctaattctgtatctatgttggagcaaagcagggtaaaattaaaaatctacataatactgtcaagagaaggggaaaacccagaagtgtcgtaaccttcagggcctgattctcattcagatgattttatgataaggggtttgtagctgttgtgtagcatatgcaagatgccagtatacagatacctacagttagggaaatccaggtagctcaagccaaatatcttattttaggatcactttaggtgaaggaagcctcattggagcagattgctttaaaatctttttccttctaatttcaggattggcatctcctgtctttttcctgcttcttggcattttagcatatctccagtagggtgtcctcgaattctgaataccaatttacgccaaattatggtcattagtgtcctggctgctgctgtttcacttttatatttttctgttgtcataatccgaaataagtatgggcgactaaccagagacaagaaatttcaaaggtaagagataaaaacatttgctttctagaccagaagccttaccttctgtcttacctgttttaggctgctggaacagaattccatagactgggtggcttataaacaacagcaatttgtttctaactgttctagaggttgggaaatccacgatcaaggtgccataggttttgtgtgtggtgagggcctgattcctggttctgagatgaggaggtcttcttgctgtttcctcacatgatggaaagggggtgagggggctccctgaagtttctgccctcatgaactaatcatccccctgaggccccacctcctaatagcatcgcattggtgattaggtctccaacatacgaattttggggggccccagacattcagaccataacaccatcatttcatggcttcacgacgtttggctttagattggaatttaaggaactgtaggaactagattctgtgccatgttcatcatggcatgaacagttaaaccatttgaagctagttaactgctaactaccaaatccatatcataagaggtcctggaataattatttatacataagcgtctcgtgtaatatgttttaagctgatttttgagttggtagtttagaaatagaattttgcattttggaatttgtttgaacttctgtaatggagtgtgtgtctgatttagatgatctttatcatcatcacttgttttgttttcttttgactcttcaattattcaacagttgtattgatgttatagtggtgctgctacatagcttagaaattactgacttggtatttgctgcattttctctgttagacttcaggtgatattctttgtctaaatcaaagcatacgtgtgtttctatacaaggtacctggcacgagttaccgacattgaagctacagacaccaataaccccaatgtgaactatgggatcgtggtggactgtggtagcagtgggtctcgagtatttgtttactgctggccaaggcataatggcaatccacatgatctgttggatatcaggcaaatgagggataaaaaccgaaagccagtggtcatgaagataaaaccgggtatgtaaatgagaacatctgcctggtaaccagggtgtgtaccttcattctctgtggcgtctttcatatcgttccctttctacaccatggccctgagtcaaacctcacaccaggacctgatgggtctccttgtttcactttcttttcccttttctgtccattttgcaaagggtgactaacaccttgataaaacatccaaacagacatgtctttttgtctcccatagcattttaaatagtgccttactcatggtatctacgcagatgttgctggttggcattaattatggagagttttttcctatttagtaaccattggtctctatccttaatgacaaggtaatttcagataactcatgaaaatctgtaatatattggcatatatttgtcacttttaaaaattgctggccacatgtagttctagtcatctagattatttggtgagtgtgaccacagaacttagagctaatcataattatgtatagtttttaaagatactgtaatttctaagccagtgtgacatgtaaaagtttaggtttggcttccttattaggtaatttacatcagtgatgctcttttttctgtatcatcaccatttccatggacagcagcttctgtcaggagcatttagaatgggagataccgggagtgccttgaaacaagttttatgtcttgatagttgatcactgatttcaaacagttgaccacagatcttaatagagatgcagcacttttatgtcatcttactaatgtattaaaatagtaaaatatcaaatgcaaacaatccaagaaatttatctggtaaattattagagaatattgataaataataattattatagcttattatccccatttcagaaataaaatttaaaagaatattcagtttaacatgagaaaaatacatatcctcatagaagagtctccaaccatgtagaatggtgacccctcgagtcctcattctttacggaataattcagaccccacctcctccttcaggcagccctcaacaagttgattatcctttgatgtatgggcagctaggaaccagcatattactcagaaaatctaaagtctgtacctcacttttcaggttaaagagagacaacctactgtgtgtctgtataccagcattattttatcagagtacatttccatgaacaaagattaattttttagtgagtgtcttctaagttttagttttatgtatttctaccccttaaatttttatgtatccctaacctagaaacattttcagttaaagtaatattgatcaaataaaaaacttacgagaagactgaaaaaataaagcattttacatttcatctagcttcacgtaccaggtcccatcagtgactaaacagatctcatggaataagatgaaaacttccatgccttggagttgtccttttagaacaaagggtcaactacattatcatcctagagtatacattagaatctcattaaaatcaggcttaacattggtctgtcttgcactatacaaagtgtatgaaatggaaatcaaaatacctttttattgcactactctgtcctgaagcatggacttccgtgtataacattgcagcaaggctctagaaatttcttaatagggtctggctagtttagggcttcgagtgcattgaaattgaattgtatgtgttgtcaaaaacttacagtttagtcaattttttgctaattcctttgatgaatcacttaatctttttgggtttgtaattttctaatgtgtgaaataaggtatttttagacttctaaagcgcccctcatttttaatattgtaggctaaatgacacctagaaatattcatttgtgtactcattcagcagatacatgctgggcacctgccatttgctaggcactgtgttaggtgctatgaatataagtttgaacagacacattttgtgcccttgagaagcttttagttgtaatgagacaggcaagtaaataggtaattttgatatggtgtaatgaatgtacatctagcaaaaggaagtaagcatggaatttaacaagagttgtcttcagggttctgttagggtgacttccatggaggctggagccaagtgggtgtgcaggaattaaccaggtgaaaaggggtagggaggtggatggagaagactcttcttggtggtggaggagcagggccctaaggccacagtaaggtgcattatggaaatgttagttcagtgtagctgaaggcaatggaaggaacatgggaagagataagggtgggtgagttatgcagagcagggtgttctagagttgagccttacctggaggacattgagccacaaaagaattggaagcctgaagaggcatcctttgggtagggaatggtggggagatggtcaggatcagagggtgggatgtgctgtggcaggctggcagagggcgtgtccaaagggatgaggagtaaagtcatgtgagaggaaccaaggagaggcgatctatgaaacccaggttgtgtgttgggatgagggagagggacttcatctaagaccctggcttgggctgctgggtgcccagcgctgatggcctcggagggaggtaaccagcagtgagagcaggtttgtagtgaaagttgagttcagattttgccatgatgcattgggggtggctgtgaggacaagcaagggcagtgtctggtggacagttaccccacgctcacctggaggctaatgagtgctgcatggctggtggcacagttcggagttcatggcatgctgatggtgatagcagcctcaggagggactgagctcacctgaggagagggggagcacgtttctcgagggcaggcaagagcccatgcgcatggcagtgacacacagcagatgctcagtcaggtctgtgtgctttgatgaagaagaaaaggacatagcactgaatagtgccaccaacatttaagtaaggtctgcagaagaagttgctagaaggataggaaaaactaaggaagtgtaatgtgtagcatgatttccctaaaattagccactctgaagaaacatcacatgttatagctaaaatatctgcttcttaactaaagtatcctgtttctctaggcatttcagaatttgctacctctccagagaaagtcagtgattacatttctccacttttgaactttgctgcagagcatgtgccacgggcaaaacacaaagagacacctctctacattctctgcacggctggaatgagaatcctccccgaaaggtgatcctccacagaagggcaagggtgagggtgggttcctggaggggagagggggtgttcttctcccccttcctccttctcctctccatcatcatcatcatcattgaaaggaaaatattcaaaattctttcttcaagtctgtaacagtaccagaactattcctttagccagaatccaccaaatagcctttaattgacttaggactataggcaacggtaaaggtgtcatttttaaaaacctaatctattttacgtagttaaggaatgcttgcagttgtagttttacatctagaaatcacataattcacacaacttgttcattttgaaaattcattcctaatataatctttccaacgaatttcttttttaaaaaaattaactgtttcatacaagatataccagatccctggttttgttttttgtttgtttatttttttccttttctaaacagaagataccaagctgtaatcttttgatttgtaaatgtttttattactttacagccagcagaaagctattctggaagaccttctgaccgatatccccgtgcactttgactttctgttttctgactctcatgcagaagtaatttctgggaaacaagaaggttggtatattggtcttcagtttaaaatttgggaagctgttcctttaaatcctccccattttcaccaatgtaccctttgttatactcctattgtcttaacatttgggaaataatagccttgaaatattacaatttttaaattactaaatcagtttcttatatgactagtctttgttgccctaacattaagccactgaaagataaccgtttgtcttcaccacatgtagtgacatagcttgatataaactcactttgatagaaaaggcttgtgtgccttgcctaagttgtgtggcttcctgggacgttgatcattattgagctgttggagcttcttctcgactttgatacactgagaaatatcaaatctttgttctattttcaaagaaatgattctccttgagaatgaaatgtcaagtcaatgaaattatttggggtatagcttgctagaaatgtataccaaaaagtatttcaaaagccgtctgtcatttcagcattaatacttcctatgtgaaagagactgtagagaatacagaaatggggtgaaatttacacattgctattcagctgcttacagacaattgagctacacagttagctgttctatgagggttttaggtaccagaaaaaagatgaggaaaaaatatcacaggagttcttaagagggaggcatttttttttttccagctagggccatgatggagaaagtgacatctgaactgcacctcaagggaagggatagttctaaatagaacatgccagagcatgggaagggtggggctctgagggaggggcaggaagcacacaccaggcagaagaaaggacttgactcaggacaggttggaaagagggcactgtggacagagaaacacaaatgttttagtttgactgggtggtggcccttctggaaggagtggcgggaatgttaacagttggctggctcttgaattgtcagtccaggaatttggacttctttctgtagatgagtccaatagcagagagtagagcaggttgcagcagaggaataggggcagggatggattagatggactacccaaggtgacaatgaaacccaggtgtagggaatgtgaaaatagaatcagacttggcagctgagtgaatggagggataaaggaaagagcagaagataccttgaattttttttttttttgagatggagtctcgctctgtcaccaggctggagtgcagtggcacgatcttgactcactgcaacctccacctcccgggttgaagtgattctcctgcctcagcttcccgaatagctgggactacaggcgccgccaccatgcccaactaatttttgtatttttagtagagacggggtttcaccatgttggccaggatggtctcaatctcttgacctcatgatctgcctgcctcggcctcacaaagtgctgggattacaggcatgagccattgcacccagctgataccttgaatttttaaaaccttggatttgacaggtttaacatcataaaagtgaaaattatagtattttgaaacataaatttcaaaagaaaactggcacctagcgtattgtatttccaacctgtgtagatggtataaaactataaacattaaagttgagagttcttggaaagccatttggagtaataaaaacatcagtagcaaggtgttatttcagatgattttacaggttatcagggagtgaaataagtgagacgtttgcacagactgcgcagataggagttacacaaaatgttttaaaactttttcttctcttcaccctgtaaaatgtctataggtgtgtatgcttggattggcattaattttgtccttggacgatttgagcatattgaagatggtaagtgtcatggttccaacaaatgtatctagttggaaattggtgcttttctgtttaatccaaaggctgaaaaaagagctaagctttgtgacactcctaagcgtgtaggagtagaatgagagcagctgcagttgaacgtaattcaacttgattttagttgggaggagtagactgggtttgcctgaatatgcttgaaatagaccatgaaaagaaggtgactcttcagaagagcccagttctctggattagttctgttccagtgaacactttctgttctttctagatgatgaggccgttgtggaagttaacattcctggaagtgaaagcagcgaagccattgtccgtaaaaggacagcgggcattctcgacatgggcggcgtgtcgactcagatagcgtacgaagtccccaaaactgtaagctttgcgtcctcacagcaggtcattatctgtacaaatttccttctgtttggtttggttttcatttaacgtgtgtccatcgttcttgttttgttttctgagtctgaacacatctttactgtgctggctgaggtgccgcctctcaacccaggagaaaggagacaggacgaacaaggcagacctcagctgagccgcttgtgtgtgttcattgaaatcagctggtttgttttctgaacgtagagtttttctttggtatatacgcagtcgcatgcttgagtttcagtttatattttctcttcaatcacgtcttttctcaacaggttttatgaaatgtaaaataataacatctgattttttaagttagaattgggggaaattcttttttttaatggttcagactttgagcttccttggggaagattgaggtttgtatccactgcttccacatctttcaactggtggtttactcgaactgttctccaccctgttctgtgccctctcagttgctgcctgggcagccttgtctagagaaccccggcacggtttccagatgtatttctgaattgctacacgtctttattactccatttgtgttcagctgtagattaacaccaaagcctagctttctggattttcccctcaaaggtgggcggcagcatagcgtggccggcgggggacggttcaaagtgagaccgtggagctagacaggcctgggtttcttcatcatcctcctcctcactagttgtgtgaccttgtgcaagtcatgtaccttctttaagctggtttcttcatctgtaaacgtgaacaaaagtacctacaacatggggttattagaaggtttaaatgagataatgcatccagtatatctaatgcactgccaggcagctagtatgttctcaataaatgttactgacatctttattaagttccttggaaaaatgctttgtaaattcaagtattacaatttgtttttcctacctcccattccagacatgcctctagagactgttacactctttgtaaaaaatcatgtttttccctctcaatataaagtaaaaaatacatagaaataacgtttggaataaatactgaaaaatcaagattaaaaatttcccatggattcatcacctaaaaaagccattgttagccttttagtgaatttctttttttttctactcatagttttaaaaaatatggttgttataatcttagtttatatgatttttgtcctttatttaacagtgcatgagcatgttcctccataagctattgattactgtaactaaccttcccttgctattatatatttagatgacatctagttttttctgtcacagaatgacaaaggacatctttgcatatagaaacatttccatgtttaggtgtatttccacagcataggattccagaaataaattatgtcagagggtatgaactattttgctgactttctctttcaaaaagtcataacagtatcacaaatttgcagcccatctgaaatttcctaaatcagaattgtcatattgaattatgagtgatgcttagaagggtccttgggaagtgcagaagcagacatttttgtcccttttagatgagactatttttagacttttctttttagtaggaggctaaagtagcttaagctattaaggtttgttatgcttatgtctgcaggaagaagtagctaaaaacttgttagctgaatttaacttgggatgtgatgttcaccaaactgagcatgtgtatcgagtctatgtggccacgtttcttgggtttggtggcaatgctgctcgacagagatacgaagacagaatatttgccaacaccattcaaaagaacaggtaaagcacctttcactacttggcagtcatttgcaaacctaggtctctcctcataaaaaacagacccaggcaaagtgggaagaactcaattagcaaaagtgtgttgcactgttagctttttattcccccactagctgagcagggagaagagatgaaagcacaccagggtcctgcctttggccctctgtcccaccgtgccctgaaggaggtgtgtgcgtgcgctctctcacccgcatctcaactgatggattagaaatttcaccatcaagctatagaatagtttggagccctgggtggtgctattcatgattcagagtccttgggaaacccagtatctggagcactcgtggtgtcctggaggcctcaggtagtgtgttctcttgttgctgaggagattgaaatatgtgatgttctggagactctgtggatgaagcagccagtgcagctagttagtggataagaaccatcgtgaagggaattattcaagagaaataaattatctagaagagtcagagttagtggcttttgaatttagcaatgaagctttaaaaaatgagtgtatgaagaattgtggtatagaaaatatataaaacaaaacagcactctattggtttaaattgactgtataagtgtaagtatatagcacttatttatttgaaatttgtaagaacataaaagctatttggataaataaaaaaatctgaatctggggttatgtaagctatcctatttattactgtgttttatttgtttattttgatgaaacaattttgagggaaaaaaatcctagttcatagagctaagagattgtatacttccttgattaatgtaatcttaataaacctgtgaaggcctgaacttgaaaaaagaccaagttggagctattcagtacatttaccacaaagtcatgtgtgtaaataggaaaagcaataaaaaccttttcctgtgtctcttccaaaagttaactgaatagttttaattataagattggtagtcccatgattttgtatttttaattggtatttagcacattttggtataatcatttttatagtagtcttaaactagaaatattttatagacaacatttgtaacatattttttccgaaaccttaatttttactcattggttttaatgtcagaaagctttatataatggatagtttagtggtacttcttaatttagatataggacaactaaaaataatagcatgaaatatatatttgactactcttggacttttatagtaattacaggtgtttcatatgtcatgaattgagcattgaagtacacatttatctcttcgccatttgtagtggtgattaatttttttaaattaagcgaacatttttatggcaaagaccttaatttattacattcaactgcatgatgagtaaccctgatctgaggaatacacaacttgtgagttgagtgaaaagtgaaaacttgactgtcggtgatgaatattgaattctgaccatgcttaaccctttaacagttcaacacctgtcaggcccctgtgatttcacagtatccaacaccaacatcacttgagattttgtgagctcttctctgtttcttgttgcttgaaggcatgcacacacaataggatgacagatgttaactcccagaaatttcattagcaagtaataagcctagtgcctttcagttaacaaaattaatgtttattttctacagggcatctcagagcccattgtacaatggaaactgctgtctgctgcagttgggacccatagctgatcaaggaaagaaataagttgaaacagaatgataaaaatagagccaagccttagacattctgtcttaacttctgtattcatttgctaatcttttcctctgaaccaaggtctgtttttagactccatcctttctttggcatgcactgcacccctcattgagataccagtttgtctttgtttaaagaatactgaggacttaaaagagatttgcaaggcaatttgataccaaatccttctagatgtttgctaatttttcccagttttaaaaatcctacccacacctagtttgataattttctagtaacttttctaaagcatctaacctgctttgcccaggaccggatcttgtcacagtcacgttccttccatctgtattaggtaaaaccacaagcactagtgcaaaaatggggctggtaacacagttgccttgtgcccagcagctgggaacatcaggccttgttgccaggatcgtcggctaatcgggtaggttatccaactggactctggtagcctgtctgctgcaggcaagtttgtatcctgactctccaagaaagtctcaagtgtgtattttcctaactaattatctcggaacccttttctgttccacagacacggtcctgcaggtctcatgtcccacagagcgtattttgagaaacactggtttgcagccacttcctgaaaacacagttttctgtaggactcacgatgaagtttcttgttttgccataggctcctgggtaaacagactggtctgactcctgatatgccgtacttggacccctgcctacccctagacattaaagatgaaatccagcaaaatggacaaaccatatacctacgagggactggagactttgacctgtgtcgagagactatccagcctttcatgaataaaacaaacgagacccagacttccctcaatggggtctaccagcccccaattcacttccagaacagtgaattctatggcttctccgaattctactactgcaccgaggatgtgttacgaatggggggagactacaatgctgctaaatttactaaagctgcaaaggtacccttgagagacgccgtctgctctgcatgcttttgagagaccagtgtggacggtgacgggttatgtcctcctttcacattgacagggaaagacggagtatagaaggctgcactgcagcatgttgggatcctgttccctttgcttggagggaggttgaatagtcacagcagaagtaaaaaatgtactgtacgctgacttctgcaccactccattagctaccctggtcatcagttagctccaaattacagtcttttatgtcatttttgtgctttgctgcatgtgacaattctcctactagccttccccctccctgacctgccaggatactcctgttcttgtgttctctctgccttcctgacaccccttaaacttaggtgatgccagacttccacacttggcccctgatcttcaggttcttggatggtctcatccatattcagggtttgctgctgcctctcaagaagaggctccaatcctgacccctgcccggttgcctgctagattccacaactccagacaaacccaccatcctctctccattctgttcctgttcttctctcggttaatggcatcgccaaccatccagtccccttccctgcagcctaggagtcatggacttctccctctaaccatttcatctctccctatacaccccagtgtaatcagtcacaagtgtggtattttatcttccaagtatttctcaaacccatctcgaagcgcagagcactgtatgctgtaatcatgtcagacagctggcttccctcacgctctccgcgacttctctgtgtccatgtccatgttcctgaagtgcctatgccgagcccgttccccaggccaagtgctttttccttgtgctccctgtcacacacccaggcccatctcccacctctcagcagtgtcttcatcctttaaatagaggtcgggatggtagccacctcgaggagttaagtattacattgagaagacacacttacacaatgctcaataaaagttattataacaaataacttcaagaaaagtgggatctctttcccttctgttaaagacaaaaaccttttgcagttattatcccagtagcttgtactgtgtcctccacagatgtaggacttagtttgaagtagctaaaatactgcttcacttttccaaaaatgtatgcccgtaccatgcagtcatggagggagaaactaaacagttttggagaggttggttgtggacagcaaagctctctttaacaataccctggacagaattttaaggcaaggcattgtgtttgcgaatcagtaagtattccctgagtgtttgtgtgtcttgccatttgttgtataagttaagcttgtgtgtttcctaatgggaaggatatgcttgttacaaatataaatttggtaaaccatttttaaagtgagaattttaataagcctttactagtgatctattttggtgaatttgttttcaggattattgtgcaacaaagtggtccattttgcgggaacgctttgaccgaggactgtacgcctctcatgctgacctccacaggcttaagtaagtactagaaggtcaagcccagggcactcttaagaaccataatgcagtgttggccccactggcttgccacaccctggcctcagtccagcttcttctcactcactgttcttcccatctaccctgggcccctttcaaacgggacaaatacttgtgcccagacatattccgtatcttttttgttttggtcacttttactgtctcttacccctgaaattcccctgttcatacctttgcttgttcaagtcctgcccagacatcagagtccagccagaggctgtccctttccagtcttcctctgtcccctcaatcagacttcatccctttctctgagtctcaagaattcatcctacctcgccaatgcatttatcatgttctgctttttctgttgctttttaaaaatcccctttcattgtaagtcacttaagtgcagacactgtatcttactaattattgtatcttattacttgcttagcacagtgcttggcaaaaaataaacctctaataaatatttagagtcatagaatatcagagctgaagagaaccttcctaccatctcattttataataaactgaggtacaaagaggttggaacctgttcagtattcattcaaggagtacatggtgaaatgccagctggaaaagaaacctatctcagggatatatgacattatgccgagaccgggttcatgcactgattgatttgacaggtgaactgctccatgttgtgggaccagggatgtgaagcaagtacatcaaccttgaaacgcgcgcagttggtttgggagagccggcctgaggaagcccctgccccaaggctgcccacagagggaaggattgtgtgtgtgtgtgtgtgtgtgccatcttgacagagtgagtcagtctgacttgcctttgtgcttgccgtttgtaggtatcagtgcttcaaatcggcctggatgtttgaggtgtttcataggggcttttcgtttcctgtcaactataaaagcttaaagactgccttgcaagtttacgacaaggaggttcagtggacccttggagccatcctctacaggacccgctttctaccattaaggtagggctgtgaatttgggaacgagaatcaaaaagatgcttttctgcagttacagcacctcatggcagctgtggtctgtggctgtttggggcattgctgttagagccggccacggcagaattgtagggacagtgacgtttgcttttggtcttgccccctccccacaagtgcttcctcccttctcaccctaccatcccgtaatacacagcactcctgtcctactg

SEQ ID NO: 11870 - DNA, 2026 bp, Homo sapiens
agcgcggcctccaggaagccggctggccgtgatgctgcccactggtggtcccccgctcccggggtccccggccggccaagcaggagggctctaactccgtgaggaccccagcattatttctataattgtttgtgagaaggactgaatcccagagcattgccttgttgctgacctttcagtatggggaggattggcatctcctgtctttttcctgcttcttggcattttagcatatctccagtagggtgtcctcgaattctgaataccaatttacgccaaattatggtcattagtgtcctggctgctgctgtttcacttttatatttttctgttgtcataatccgaaataagtatgggcgactaaccagagacaagaaatttcaaaggtacctggcacgagttaccgacattgaagctacagacaccaataaccccaatgtgaactatgggatcgtggtggactgtggtagcagtgggtctcgagtatttgtttactgctggccaaggcataatggcaatccacatgatctgttggatatcaggcaaatgagggataaaaaccgaaagccagtggtcatgaagataaaaccgggcatttcagaatttgctacctctccagagaaagtcagtgattacatttctccacttttgaactttgctgcagagcatgtgccacgggcaaaacacaaagagacacctctctacattctctgcacggctggaatgagaatcctccccgaaagccagcagaaagctattctggaagaccttctgaccgatatccccgtgcactttgactttctgttttctgactctcatgcagaagtaatttctgggaaacaagaaggtgtgtatgcttggattggcattaattttgtccttggacgatttgagcatattgaagatgatgatgaggccgttgtggaagttaacattcctggaagtgaaagcagcgaagccattgtccgtaaaaggacagcgggcattctcgacatgggcggcgtgtcgactcagatagcgtacgaagtccccaaaactgtaagctttgcgtcctcacagcaggaagaagtagctaaaaacttgttagctgaatttaacttgggatgtgatgttcaccaaactgagcatgtgtatcgagtctatgtggccacgtttcttgggtttggtggcaatgctgctcgacagagatacgaagacagaatatttgccaacaccattcaaaagaacaggctcctgggtaaacagactggtctgactcctgatatgccgtacttggacccctgcctacccctagacattaaagatgaaatccagcaaaatggacaaaccatatacctacgagggactggagactttgacctgtgtcgagagactatccagcctttcatgaataaaacaaacgagacccagacttccctcaatggggtctaccagcccccaattcacttccagaacagtgaattctatggcttctccgaattctactactgcaccgaggatgtgttacgaatggggggagactacaatgctgctaaatttactaaagctgcaaaggattattgtgcaacaaagtggtccattttgcgggaacgctttgaccgaggactgtacgcctctcatgctgacctccacaggcttaagtatcagtgcttcaaatcggcctggatgtttgaggtgtttcataggggcttttcgtttcctgtcaactataaaagcttaaagactgccttgcaagtttacgacaaggaggttcagtggacccttggagccatcctctacaggacccgctttctaccattaaggtagggctgtgaatttgggaacgagaatcaaaaagatgcttttctgcagttacagcacctcatggcagctgtggtctgtggctgtttggggcattgctgttagagccggccacggcagaattgtagggacagtgacgtttgcttttggtcttgccccctccccacaagtgcttcctcccttctcaccctaccatcccgtaatacacagcactcctgtcctactg

SEQ ID NO: 11871 - DNA, 11220 bp, Homo sapiens
gtcagctggaggaagcggagtaggaagcggccgcgatgtccttttgtgtcctacaagcagccggcggcgccgccgagtgaggggacgcggcgcggtggggcggcgcggcccgaggaggcggcggaggaggggccgcccgcggcccccggctcactccggcactccgggccgctcggcccccatgcctgcccgaccgcgctgccggagccccaggtccgggggcggaggggagcgctgccgcgggggtgggcgggcggggcgcgggggccatgtgcgagcgcggcagggaggcgggcggggcgggctgcaggcggggtccgactctggggccagtccgggccacggttgggacccagtcgagggtcggactggtcagggttcaggcgggatccggcgtccgagtcctggtgggccggcctggggcaggatctggctctggctgcgggtcctgactcgggtcagggttgggcctccgatccagcccgctccggggcagggttcaatcccgcatttgccgaagtccctggggctggccggggtggaagacggggagggctctatgtctgggaaggggctctgaagaccacgtgggggcgctcgaaggggcctggggccaccctcctctctgggtcaaaggtcatcgcaccggcaggggagaacttcctcctccttggctctccccacttacttcctgataacctggtagaggtctcccgcgggcggggagggggaggcgtagcaactttaggcaacttcccaaaggtgtgcgcaggttgggggcgggacgcggcgccccgggaggtggcggcctctgcgacagcgggagtataagagtggacctgcaggctggtcgcgaggaggtggagcggcgcccgccgtgtgcctgggaccggcatgctggggcaggagggcagccgcgtgtcaggtgtgaaaagctctggaggtgttttcatgagtccgtgcctgtgcgtgtggatgtggggagacctagtgagagtgtgtgtgatcatgagccttgactgagttcgtggatggggtgtgcgctccaggagaagtgtgtgagcacaagtgtgagcaggagtgagcacgggtttgggaaggccggtgcaagtgtgaaagccctcagcagagagcgagcctgcgtgggcttgtggggctcctgagcaccccggtgagtggagtgtgtgaactcggtgtgagcacgtccactggccttgggtctgctctccaatgcagaatacccagatgagggcagggtctcagaggtccccccaacatctggagaaaactgggaagtatcctgctcctggctagggattccaggtggggttgaaggttgcctgggggctacggttaccctgctccctggcctgggtgggagtaggggctttctaagcctcccccaggttcccaagggggagacctgctgtcagttactggccctgaagactctgtttccatggcaacagctaggagggggcagtgttcctgggcagtccttccttggactctgccccccttcttccccacttgctgggcttggaagcctggccctaggcccgaggttgggcaacccgtgtggcagggtgtctcccatcccccataccagtgctttcctgcgaacctatgggtctctccgtgcaggtgaccagcgccatgtccagccaggtggtgggcattgagcctctctacatcaaggcagagccggccagccctgacagtccaaagggttcctcggagacagagaccgagcctcctgtggccctggcccctggtccagctcccactcgctgcctcccaggccacaaggaagaggaggatggggagggggctgggcctggcgagcagggcggtgggaagctggtgctcagctccctgcccaagcgcctctgcctggtctgtggggacgtggcctccggctaccactatggtgtggcatcctgtgaggcctgcaaagccttcttcaagaggaccatccagggtgagcccccagcccactcccctgtcctttgccctgcaccctctgggtacactgctgggtgcaataggccccctgatggctgtggcaccgcttgaggctaacaatctggtgtttccagtccctctacctcccagagacactctttccctgagaagtatggtaaaagcaccgggtgtgctgatgcattgcagtggatgtgagtgagttcagggtaccacctgggtactctaggcccagcaccttctacagtggctctgaaagagtccaaggcagcctctgtctgttcctaagctttgttcttgtttctggcagcttctgacctctccccagcatagaacatgtcccctttttgttaattttcccaaagcagcaccaacacaaggcagattttaatttttttttttttgagacagagtctcactctgttgttcaggctagagtgcagtggcacaatctctgctcactgcaacctttgcccctgggttcaagagattctcctgcctcagcctcctgagtagctgagactgcaggtgtgcaccaccacgcccagctaatttttgtatttttagtagagacgacgtttcaccatgtcggccaggctggtctggaattcctgaccacaaatgatccacctgcctcggcctcccaaaacaaggcagatttttatcagtacttgagaggggctacatcatagtttagcacccaactttaaaaagactaacaggcaaggccggacacagttgctcacacctgtaatcccagcactttgggaggccaaggtgggcggatcacctgaggtcaggagatcgagaccagcctggccagggtggtgaaaccgcatctctactaaaaatgcaaaaaattagctgggcatggtggctcgcgcctgtaatctcagctacttgctacttgagaggctgaggcaggagaattgcttgaacccaggaggcagaggttgcagtgagccaagatcacaccactgtactccagcctgggtgacagagcgagattccatctcaaaaaaaaaaaaaaaaggccgggcactgtggctcatgtaatcccagcactttgggaggccgaggcgggcggatcatgaggtcaggagattgagaacatcctggctaacacggtgaaacactgtctctactaaaaatacaaaaaattagctgggcatggtggcgggcgcctgtaatcccagctacttgggaggctgaggcaggagaatggcgtgaacccaggaggcggaggttgcagtgagccaagatcacgccactgcactccagcctgggcgacagagtgagactccgtctcaaaaaaaaaaaaaaaaaggctgggcgcggtggctcatgcctgtaatcccagcactttgggaggccgagacgggcggatcacctgaggtcaggagtttgagaccagcctgaccaatgtgatgaaaccccgtctctactgaaaatacaaaaattagccaagcatggtggcatgcgcctgtcatcccactcaagaggctgagacaggagaattgcttgaacctgggaggcagaggttgcaatgagcccagatcgcgccattgcactctagcctgcgcaacaaaagtgaaactccacctcaaaaaacaaaaacaaaaacaaaaacaaaaaaacccaaaaacgctgggcttggtggctcatggcctgtaatcccagcactttgggaggctgaggcagacggatcacgaggtcaggagttcgagaccagcctggccaacatggtaaaaccccgtctctactaaaaatacaaaaattagccgggcgtggtggtgagtgcctgtaatcccactacttgggaggctgaggcaggagaattgcttgaacccgggaggcagaggttgcagtgagctgagatcatgccacagcactctagtctgggcaacagaatgagacactctcatctcaaaaaaaaaaaaaaaaggacttacaggcatgtctgctcttaaaagtcactaatttttttctcactcaggaaagcttatcagaatttgggggaatgagcaagatgctgacattaagcattgcctgggaagggcctattatttccgttatttctgcttttatgtaaccattggttactttgggggctataacacgtataattaaaaaaaaaaaaaaaaaggccaagtgtggtggctcacacctgtaatctcagcactttcggaggctaagatgggaggatcacaaggtcaggagttcgagaccagcctggccaacatggtgaaaccctgtctgtactagaaatacaaaaattagccaggtgtcgtggtgggtgcctgtagtcccagctactcaggaggctgaggcaggagaattgctggaacccaggaggcagaggttggagttagccaagatcgtgccactgcactcccagcctgggtgacagagtgagagttcgtatcaaaaaaaaaaaaaaaaaaaaaatcttgagtgcttaccttgtgctaggcactgtattcttttatgatctcagttagtccccacagcaaccctataaggtgtcagtactgttataactgaaactaagagaggcatttgaaactttgttgaagtctcacaactaggaaatggcagaaccaagatttgaacttgggtcagtataggtccagagctgagctcttcaatgttagactgcttcctctgcttattactaataacaccgaactttggacagacgctgaatgactgattgtgacattccagcacgtttttttttttttttttgagacagtctcgtgtggtcgcccaggctggagtgcagtggcacgatctcggctcactgcaagctccgcctcccgggttcacaccattctcctgcctcagcctcctgagtagctgggactacaggtgcccgccaccacgcctggctaattttttgtacttttagtagagacggggtttcagcgtgttagccaagatggtcttgatttcctgacctcgagatccacctgccttggactcccaaagtgctgggattacaggcgtgagccactgctcctggccaggttttttttttttttttttttttttttgagatggagttttgctcttgttgtccaggctggagtgcaacggcctgcagtcgtggttcactgcaacctctgcctcccgggttcaagccattcacctgcctcagcctcccaagtagctgggattacaggcgcctgccaccatgcccggctaatttttgtgtttttagtagggatggggtttcaccatgttggccaggctggcctcaaactcctgacctcaggcgatctgccctcctcgggcttccaaagtgctgggattataggtgtgagccactgcaccccgccaatccagcaagttttaacttggccaaaatccaccaatcttaaactttgtgcacccttcccactctgaagaacagtgagccagccggccagggtgcgggtatctcctacctaccctggggcccctcactgtatgttgactattgacaaatatttattgtgtgctggctgtgaataggacttgtatattgagcacttaggtgtcatgaaccatgctggatgttttgaccatattatcccctttaattctcacgacccaactctgtggggcacttttacagctgggaaactgagggttcaaggggttaggtatgggacttgcccaaggtcataaaggtatgtggtagccagagtccctgttcggcacagacctgttctttgctgtcctggccagtgttccaggccttggggacatagctggggctgaagcagggctgtttctgccctcaggcagtttacatcctggcagaggggagagctgggcaacagtgagttgcacagacttgtcttattaccgctgtggtatgtgcaggaaggggaggtgctggttctgaggctccagagggcttgtctttttttttttttttttgagacggagtctcgctttgttgcccaggctagagtccagtggcgcgatctcggctcagtgcaagctccgcctcccgggttcaagcgattctcctgcctcagcctccccaatagctgggattacaggcgcatggcaccacgcacggctaattttggtatttttagtagagactgggtttcaccatgttagccaggatggtctcgatctcctgacctcgtgatccacccgcctcggcctcccaaagtgctgggattacgctcccggcctctttttttttttagacagagtctcactctgttgccaggctatagtacagtggcacgatctcagcttactgcaacctccgcctcccaggttcaagcgattgttctccctcagcctcccgagtagctgggactacaggcacacgcccagctaatttttgtatttttagtagagacagggtttcaccgtgttggtcaggctggtctcaaactcctcacctcgtgatctgcctgcctcggcctcccaaagtgctgggattataggcgtgagccactgcgcctggcctttttttttttttggtacagagtttcgctctggttgcccaggctggagtgcaatggcacgatcttggctcactgcagcctctgcctcccgggttcaagcgattctcctgcctcagcctccggagcagctgggattacagacatgcaccaccatgtccggctaatttttttttttcgagatggagtctcactgtgtcacccaggctggagtgcagtggcacaatctcggctcactgcaacctctgcctcccgggttcaagcgattctcctgcctcagcctcctgagtagctgggactacaggtgcctgccaccacacccagctaatttttgtacttttagtagagacggggttttaccatgttggccaggctggtcttgaacttctgacctcaggtgatccacccacctcggtctcccaaagtgctgggattacaggcgtgagccaccgtgcccggccgtggtgtcttgagctgagtgcagaagcgcaaatagggggtaggagaaaatgcaccgcgaggagaaatgtgctgcgggcctgctgtctagctgtgtcatttggtcgttgcggggccctgtgaggccgggagggctgccagcacccaccatgtgccaggcctcgttgctagtgctggggccagttcctgccccggtggagctgccactgaagggggaggcgtaataaacaagataggtgagtgcatatgcagcgtggtctgttgtgctgagggctgaagagaaaccagaagcagggctcagaggccaggaggactctgcaaagggatttggcattatcacagggtggccagggaagatcttcaaggtgacagtgagcagagggaggtgagggagcctgtgtggacttcaggactagagctccaggcagggcctgtttgaggaacatggaggaggcgagagcaaggagtagaggtcaaaaggaggcaagaagcaggggcgtaggcctaggaggacataggttcgctttggcttggactcagagaagggaaatccccagagggttttgagaagaggaggtacaggatgtaatggaggcttaataggaccctcttggctgctgagtcgagaacagactggagcaagcagggacagccaagcgaggggcgaggtgacagtgactatcaggtcaagggtggaagtagttgccaggggcaggaggcggattctggaccttggaggaggtaaagcccaccagaatgtgtcggtggcttggatgtggggtgtgagaggaaccagagattctgcctaggtttcttcttgggcaagtgaacacgtggagtccacgtaggctgtgttcggtccgagatgccttctagacatgcaggatgtcaaggaggcagctggagagatgggtctggagctcacagcaagtccaggctagaggtagaaacgtgagagccccacggctggggaagattgccatgggattggagatgagctccaaggacagccctggcagtctggatggaagagcttgggaagatgctcagaaaccacaaagtggctggtgcggtgggaggaaaaccagagtgtatgctgtcctagaagcaaaagaagaaagtgtttcagtgtttctaggagcaggaagtgatcaacagccttagatcctccttttaggccaagtaacatgaggactaagaattgaccactggatttagcaatgcagaggtccttgtggcccttgatgtcggcagatgagggcagtgtggtccagagatgaggcttggggctgagatgcagccccgctgcctggtccagctcctccctcatccaggcagggctcccccgcccagcagccactcccctccctgcctgctcatggccccctgctctccctttcctccccatacccccagacctgtgcttgcccggggagagtcagggctctcctgtcagctgggtcccctcccagccccgggaggccgccactggagccctgcctcttcctggcagggagcatcgagtacagctgtccggcctccaacgagtgtgagatcaccaagcggagacgcaaggcctgccaggcctgccgcttcaccaagtgcctgcgggtgggcatgctcaaggagggtgagcgctgggcaggggctgggcgagggctgggggagtcggggacccgggccaggtgggggtgaggcctgggagttctggtgagtggactcggggaggacagctctggagagcaagccccaccctgcccacagcaccacagtcacagtcctatctgtcccacaattcaaggagtgcgcctggaccgcgtccggggtgggcggcagaagtacaagcggcggccggaggtggacccactgcccttcccgggccccttccctgctgggcccctggcagtcgctggaggcccccggaagacaggtgagagcactgtgggtacctggggctacgaaaccggaggcctatgtgtggcatcatagttaccttgggcactgggacctgtatttccccttcgtctcttcactcactcatttccccaagacatgtgaaactgccttttcctgcatcaggaaaagtagtagaactgggaacagggacgattttccaacactcacagcctgtccacaaacacacgggctttccctgggagacagttagcgctcttccctggagggaagtcactggacagctgctactgaggaaggccacagggggagccactgtgggaagatgcttgacccctgaggcctgacagattcgagtgctcctgactcttgtcctctaattgtcacagcagccccagtgaatgcactggtgtctcatctgctggtggttgagcctgagaagctctatgccatgcctgaccccgcaggccctgatgggcacctcccagccgtggctaccctctgtgacctctttgaccgagagattgtggtcaccatcagctgggccaagagcatcccaggtaaagggcccaggtgacccggggctgccctgaacgggcccggctctggtgcgcttgctcagccaggcccgctccccgctgccccctaggcttctcatcgctgtcgctgtctgaccagatgtcagtactgcagagcgtgtggatggaggtgctggtgctgggtgtggcccagcgctcactgccactgcaggatgagctggccttcgctgaggacttagtcctggatgaagagggggcacgggcagctggcctgggggaactgggggctgccctgctgcaactagtgcggcggctgcaggccctgcggctggagcgagaggagtatgttctactaaaggccttggcccttgccaattcaggtgagtctggggcaggcactgacaggtgaggtgtctccgtaaggtcttcaggttaactcagtgacggtagcacagccccattttgcagataacgaaaactgaggcttagggaagaacaatgacttgctagaagtcaaaaagcaagccaagtgcaggctccaaactgcacacaggattttgagccctagtgccacactaatgcagaaaggtcatttagtgggagggaaggtggggagggtacaaggtggccacagttgagggagagagggtggggtcctggcccacgagccgcagcaatgagtggtgcctctcagtcagccaatcaacaaatcctcgtttggctcttccttaggccccatccagcagtgctcaagatacggggagtgcccttgccagagatagcccaggccaacaccacattcctctcttcttgcagactctgtgcacatcgaagatgccgaggctgtggagcagctgcgagaagctctgcacgaggccctgctggagtatgaagccggccgggctggccccggagggggtgctgagcggcggcgggcgggcaggctgctgctcacgctaccgctcctccgccagacagcgggcaaagtgctggcccatttctatggggtgaagctggagggcaaggtgcccatgcacaagctgttcttggagatgctcgaggccatgatggactgaggcaaggggtgggactggtgggggttctggcaggacctgcctagcatggggtcagccccaagggctggggcggagctggggtctgggcagtgccacagcctgctggcagggccagggcaatgccatcagcccctgggaacaggccccacgccctctcctccccctcctagggggtgtcagaagctgggaacgtgtgtccaggctctgggcacagtgctgccccttgcaagccataacgtgcccccagagtgtagggggccttgcggaagccatagggggctgcacgggatgcgtgggaggcagaaacctatctcagggagggaaggggatggaggccagagtctcccagtgggtgatgcttttgctgctgcttaatcctaccccctcttcaaagcagagtgggacttggagagcaaaggcccatgcccccttcgctcctcctctcatcatttgcattgggcattagtgtccccccttgaagcaataactccaagcagactccagcccctggacccctggggtggccagggcttccccatcagctcccaacgagcctcctcagggggtaggagagcactgcctctatgccctgcagagcaataacactatatttatttttgggtttggccagggaggcgcagggacatggggcaagccagggcccagagcccttggctgtacagagactctattttaatgtatatttgctgcaaagagaaaccgcttttggttttaaacctttaatgagaaaaaaatatataataccgagctcaaaaa

SEQ ID NO: 11872 - DNA, 2274 bp, Homo sapiens
gtcagctggaggaagcggagtaggaagcggccgcgatgtccttttgtgtcctacaagcagccggcggcgccgccgagtgaggggacgcggcgcggtggggcggcgcggcccgaggaggcggcggaggaggggccgcccgcggcccccggctcactccggcactccgggccgctcggcccccatgcctgcccgaccgcgctgccggagccccaggtgaccagcgccatgtccagccaggtggtgggcattgagcctctctacatcaaggcagagccggccagccctgacagtccaaagggttcctcggagacagagaccgagcctcctgtggccctggcccctggtccagctcccactcgctgcctcccaggccacaaggaagaggaggatggggagggggctgggcctggcgagcagggcggtgggaagctggtgctcagctccctgcccaagcgcctctgcctggtctgtggggacgtggcctccggctaccactatggtgtggcatcctgtgaggcctgcaaagccttcttcaagaggaccatccaggggagcatcgagtacagctgtccggcctccaacgagtgtgagatcaccaagcggagacgcaaggcctgccaggcctgccgcttcaccaagtgcctgcgggtgggcatgctcaaggagggagtgcgcctggaccgcgtccggggtgggcggcagaagtacaagcggcggccggaggtggacccactgcccttcccgggccccttccctgctgggcccctggcagtcgctggaggcccccggaagacagcagccccagtgaatgcactggtgtctcatctgctggtggttgagcctgagaagctctatgccatgcctgaccccgcaggccctgatgggcacctcccagccgtggctaccctctgtgacctctttgaccgagagattgtggtcaccatcagctgggccaagagcatcccaggcttctcatcgctgtcgctgtctgaccagatgtcagtactgcagagcgtgtggatggaggtgctggtgctgggtgtggcccagcgctcactgccactgcaggatgagctggccttcgctgaggacttagtcctggatgaagagggggcacgggcagctggcctgggggaactgggggctgccctgctgcaactagtgcggcggctgcaggccctgcggctggagcgagaggagtatgttctactaaaggccttggcccttgccaattcagactctgtgcacatcgaagatgccgaggctgtggagcagctgcgagaagctctgcacgaggccctgctggagtatgaagccggccgggctggccccggagggggtgctgagcggcggcgggcgggcaggctgctgctcacgctaccgctcctccgccagacagcgggcaaagtgctggcccatttctatggggtgaagctggagggcaaggtgcccatgcacaagctgttcttggagatgctcgaggccatgatggactgaggcaaggggtgggactggtgggggttctggcaggacctgcctagcatggggtcagccccaagggctggggcggagctggggtctgggcagtgccacagcctgctggcagggccagggcaatgccatcagcccctgggaacaggccccacgccctctcctccccctcctagggggtgtcagaagctgggaacgtgtgtccaggctctgggcacagtgctgccccttgcaagccataacgtgcccccagagtgtagggggccttgcggaagccatagggggctgcacgggatgcgtgggaggcagaaacctatctcagggagggaaggggatggaggccagagtctcccagtgggtgatgcttttgctgctgcttaatcctaccccctcttcaaagcagagtgggacttggagagcaaaggcccatgcccccttcgctcctcctctcatcatttgcattgggcattagtgtccccccttgaagcaataactccaagcagactccagcccctggacccctggggtggccagggcttccccatcagctcccaacgagcctcctcagggggtaggagagcactgcctctatgccctgcagagcaataacactatatttatttttgggtttggccagggaggcgcagggacatggggcaagccagggcccagagcccttggctgtacagagactctattttaatgtatatttgctgcaaagagaaaccgcttttggttttaaacctttaatgagaaaaaaatatataataccgagctcaaaaa

SEQ ID NO: 11873 - DNA, 10517 bp, Homo sapiens
tagaggtctcccgcgggcggggagggggaggcgtagcaactttaggcaacttcccaaaggtgtgcgcaggttgggggcgggacgcggcgccccgggaggtggcggcctctgcgacagcgggagtataagagtggacctgcaggctggtcgcgaggaggtggagcggcgcccgccgtgtgcctgggaccggcatgctggggcaggagggcagccgcgtgtcaggtgtgaaaagctctggaggtgttttcatgagtccgtgcctgtgcgtgtggatgtggggagacctagtgagagtgtgtgtgatcatgagccttgactgagttcgtggatggggtgtgcgctccaggagaagtgtgtgagcacaagtgtgagcaggagtgagcacgggtttgggaaggccggtgcaagtgtgaaagccctcagcagagagcgagcctgcgtgggcttgtggggctcctgagcaccccggtgagtggagtgtgtgaactcggtgtgagcacgtccactggccttgggtctgctctccaatgcagaatacccagatgagggcagggtctcagaggtccccccaacatctggagaaaactgggaagtatcctgctcctggctagggattccaggtggggttgaaggttgcctgggggctacggttaccctgctccctggcctgggtgggagtaggggctttctaagcctcccccaggttcccaagggggagacctgctgtcagttactggccctgaagactctgtttccatggcaacagctaggagggggcagtgttcctgggcagtccttccttggactctgccccccttcttccccacttgctgggcttggaagcctggccctaggcccgaggttgggcaacccgtgtggcagggtgtctcccatcccccataccagtgctttcctgcgaacctatgggtctctccgtgcaggtgaccagcgccatgtccagccaggtggtgggcattgagcctctctacatcaaggcagagccggccagccctgacagtccaaagggttcctcggagacagagaccgagcctcctgtggccctggcccctggtccagctcccactcgctgcctcccaggccacaaggaagaggaggatggggagggggctgggcctggcgagcagggcggtgggaagctggtgctcagctccctgcccaagcgcctctgcctggtctgtggggacgtggcctccggctaccactatggtgtggcatcctgtgaggcctgcaaagccttcttcaagaggaccatccagggtgagcccccagcccactcccctgtcctttgccctgcaccctctgggtacactgctgggtgcaataggccccctgatggctgtggcaccgcttgaggctaacaatctggtgtttccagtccctctacctcccagagacactctttccctgagaagtatggtaaaagcaccgggtgtgctgatgcattgcagtggatgtgagtgagttcagggtaccacctgggtactctaggcccagcaccttctacagtggctctgaaagagtccaaggcagcctctgtctgttcctaagctttgttcttgtttctggcagcttctgacctctccccagcatagaacatgtcccctttttgttaattttcccaaagcagcaccaacacaaggcagattttaatttttttttttttgagacagagtctcactctgttgttcaggctagagtgcagtggcacaatctctgctcactgcaacctttgcccctgggttcaagagattctcctgcctcagcctcctgagtagctgagactgcaggtgtgcaccaccacgcccagctaatttttgtatttttagtagagacgacgtttcaccatgtcggccaggctggtctggaattcctgaccacaaatgatccacctgcctcggcctcccaaaacaaggcagatttttatcagtacttgagaggggctacatcatagtttagcacccaactttaaaaagactaacaggcaaggccggacacagttgctcacacctgtaatcccagcactttgggaggccaaggtgggcggatcacctgaggtcaggagatcgagaccagcctggccagggtggtgaaaccgcatctctactaaaaatgcaaaaaattagctgggcatggtggctcgcgcctgtaatctcagctacttgctacttgagaggctgaggcaggagaattgcttgaacccaggaggcagaggttgcagtgagccaagatcacaccactgtactccagcctgggtgacagagcgagattccatctcaaaaaaaaaaaaaaaaggccgggcactgtggctcatgtaatcccagcactttgggaggccgaggcgggcggatcatgaggtcaggagattgagaacatcctggctaacacggtgaaacactgtctctactaaaaatacaaaaaattagctgggcatggtggcgggcgcctgtaatcccagctacttgggaggctgaggcaggagaatggcgtgaacccaggaggcggaggttgcagtgagccaagatcacgccactgcactccagcctgggcgacagagtgagactccgtctcaaaaaaaaaaaaaaaaaggctgggcgcggtggctcatgcctgtaatcccagcactttgggaggccgagacgggcggatcacctgaggtcaggagtttgagaccagcctgaccaatgtgatgaaaccccgtctctactgaaaatacaaaaattagccaagcatggtggcatgcgcctgtcatcccactcaagaggctgagacaggagaattgcttgaacctgggaggcagaggttgcaatgagcccagatcgcgccattgcactctagcctgcgcaacaaaagtgaaactccacctcaaaaaacaaaaacaaaaacaaaaacaaaaaaacccaaaaacgctgggcttggtggctcatggcctgtaatcccagcactttgggaggctgaggcagacggatcacgaggtcaggagttcgagaccagcctggccaacatggtaaaaccccgtctctactaaaaatacaaaaattagccgggcgtggtggtgagtgcctgtaatcccactacttgggaggctgaggcaggagaattgcttgaacccgggaggcagaggttgcagtgagctgagatcatgccacagcactctagtctgggcaacagaatgagacactctcatctcaaaaaaaaaaaaaaaaggacttacaggcatgtctgctcttaaaagtcactaatttttttctcactcaggaaagcttatcagaatttgggggaatgagcaagatgctgacattaagcattgcctgggaagggcctattatttccgttatttctgcttttatgtaaccattggttactttgggggctataacacgtataattaaaaaaaaaaaaaaaaaggccaagtgtggtggctcacacctgtaatctcagcactttcggaggctaagatgggaggatcacaaggtcaggagttcgagaccagcctggccaacatggtgaaaccctgtctgtactagaaatacaaaaattagccaggtgtcgtggtgggtgcctgtagtcccagctactcaggaggctgaggcaggagaattgctggaacccaggaggcagaggttggagttagccaagatcgtgccactgcactcccagcctgggtgacagagtgagagttcgtatcaaaaaaaaaaaaaaaaaaaaaatcttgagtgcttaccttgtgctaggcactgtattcttttatgatctcagttagtccccacagcaaccctataaggtgtcagtactgttataactgaaactaagagaggcatttgaaactttgttgaagtctcacaactaggaaatggcagaaccaagatttgaacttgggtcagtataggtccagagctgagctcttcaatgttagactgcttcctctgcttattactaataacaccgaactttggacagacgctgaatgactgattgtgacattccagcacgtttttttttttttttttgagacagtctcgtgtggtcgcccaggctggagtgcagtggcacgatctcggctcactgcaagctccgcctcccgggttcacaccattctcctgcctcagcctcctgagtagctgggactacaggtgcccgccaccacgcctggctaattttttgtacttttagtagagacggggtttcagcgtgttagccaagatggtcttgatttcctgacctcgagatccacctgccttggactcccaaagtgctgggattacaggcgtgagccactgctcctggccaggttttttttttttttttttttttttttgagatggagttttgctcttgttgtccaggctggagtgcaacggcctgcagtcgtggttcactgcaacctctgcctcccgggttcaagccattcacctgcctcagcctcccaagtagctgggattacaggcgcctgccaccatgcccggctaatttttgtgtttttagtagggatggggtttcaccatgttggccaggctggcctcaaactcctgacctcaggcgatctgccctcctcgggcttccaaagtgctgggattataggtgtgagccactgcaccccgccaatccagcaagttttaacttggccaaaatccaccaatcttaaactttgtgcacccttcccactctgaagaacagtgagccagccggccagggtgcgggtatctcctacctaccctggggcccctcactgtatgttgactattgacaaatatttattgtgtgctggctgtgaataggacttgtatattgagcacttaggtgtcatgaaccatgctggatgttttgaccatattatcccctttaattctcacgacccaactctgtggggcacttttacagctgggaaactgagggttcaaggggttaggtatgggacttgcccaaggtcataaaggtatgtggtagccagagtccctgttcggcacagacctgttctttgctgtcctggccagtgttccaggccttggggacatagctggggctgaagcagggctgtttctgccctcaggcagtttacatcctggcagaggggagagctgggcaacagtgagttgcacagacttgtcttattaccgctgtggtatgtgcaggaaggggaggtgctggttctgaggctccagagggcttgtctttttttttttttttttgagacggagtctcgctttgttgcccaggctagagtccagtggcgcgatctcggctcagtgcaagctccgcctcccgggttcaagcgattctcctgcctcagcctccccaatagctgggattacaggcgcatggcaccacgcacggctaattttggtatttttagtagagactgggtttcaccatgttagccaggatggtctcgatctcctgacctcgtgatccacccgcctcggcctcccaaagtgctgggattacgctcccggcctctttttttttttagacagagtctcactctgttgccaggctatagtacagtggcacgatctcagcttactgcaacctccgcctcccaggttcaagcgattgttctccctcagcctcccgagtagctgggactacaggcacacgcccagctaatttttgtatttttagtagagacagggtttcaccgtgttggtcaggctggtctcaaactcctcacctcgtgatctgcctgcctcggcctcccaaagtgctgggattataggcgtgagccactgcgcctggcctttttttttttttggtacagagtttcgctctggttgcccaggctggagtgcaatggcacgatcttggctcactgcagcctctgcctcccgggttcaagcgattctcctgcctcagcctccggagcagctgggattacagacatgcaccaccatgtccggctaatttttttttttcgagatggagtctcactgtgtcacccaggctggagtgcagtggcacaatctcggctcactgcaacctctgcctcccgggttcaagcgattctcctgcctcagcctcctgagtagctgggactacaggtgcctgccaccacacccagctaatttttgtacttttagtagagacggggttttaccatgttggccaggctggtcttgaacttctgacctcaggtgatccacccacctcggtctcccaaagtgctgggattacaggcgtgagccaccgtgcccggccgtggtgtcttgagctgagtgcagaagcgcaaatagggggtaggagaaaatgcaccgcgaggagaaatgtgctgcgggcctgctgtctagctgtgtcatttggtcgttgcggggccctgtgaggccgggagggctgccagcacccaccatgtgccaggcctcgttgctagtgctggggccagttcctgccccggtggagctgccactgaagggggaggcgtaataaacaagataggtgagtgcatatgcagcgtggtctgttgtgctgagggctgaagagaaaccagaagcagggctcagaggccaggaggactctgcaaagggatttggcattatcacagggtggccagggaagatcttcaaggtgacagtgagcagagggaggtgagggagcctgtgtggacttcaggactagagctccaggcagggcctgtttgaggaacatggaggaggcgagagcaaggagtagaggtcaaaaggaggcaagaagcaggggcgtaggcctaggaggacataggttcgctttggcttggactcagagaagggaaatccccagagggttttgagaagaggaggtacaggatgtaatggaggcttaataggaccctcttggctgctgagtcgagaacagactggagcaagcagggacagccaagcgaggggcgaggtgacagtgactatcaggtcaagggtggaagtagttgccaggggcaggaggcggattctggaccttggaggaggtaaagcccaccagaatgtgtcggtggcttggatgtggggtgtgagaggaaccagagattctgcctaggtttcttcttgggcaagtgaacacgtggagtccacgtaggctgtgttcggtccgagatgccttctagacatgcaggatgtcaaggaggcagctggagagatgggtctggagctcacagcaagtccaggctagaggtagaaacgtgagagccccacggctggggaagattgccatgggattggagatgagctccaaggacagccctggcagtctggatggaagagcttgggaagatgctcagaaaccacaaagtggctggtgcggtgggaggaaaaccagagtgtatgctgtcctagaagcaaaagaagaaagtgtttcagtgtttctaggagcaggaagtgatcaacagccttagatcctccttttaggccaagtaacatgaggactaagaattgaccactggatttagcaatgcagaggtccttgtggcccttgatgtcggcagatgagggcagtgtggtccagagatgaggcttggggctgagatgcagccccgctgcctggtccagctcctccctcatccaggcagggctcccccgcccagcagccactcccctccctgcctgctcatggccccctgctctccctttcctccccatacccccagacctgtgcttgcccggggagagtcagggctctcctgtcagctgggtcccctcccagccccgggaggccgccactggagccctgcctcttcctggcagggagcatcgagtacagctgtccggcctccaacgagtgtgagatcaccaagcggagacgcaaggcctgccaggcctgccgcttcaccaagtgcctgcgggtgggcatgctcaaggagggtgagcgctgggcaggggctgggcgagggctgggggagtcggggacccgggccaggtgggggtgaggcctgggagttctggtgagtggactcggggaggacagctctggagagcaagccccaccctgcccacagcaccacagtcacagtcctatctgtcccacaattcaaggagtgcgcctggaccgcgtccggggtgggcggcagaagtacaagcggcggccggaggtggacccactgcccttcccgggccccttccctgctgggcccctggcagtcgctggaggcccccggaagacaggtgagagcactgtgggtacctggggctacgaaaccggaggcctatgtgtggcatcatagttaccttgggcactgggacctgtatttccccttcgtctcttcactcactcatttccccaagacatgtgaaactgccttttcctgcatcaggaaaagtagtagaactgggaacagggacgattttccaacactcacagcctgtccacaaacacacgggctttccctgggagacagttagcgctcttccctggagggaagtcactggacagctgctactgaggaaggccacagggggagccactgtgggaagatgcttgacccctgaggcctgacagattcgagtgctcctgactcttgtcctctaattgtcacagcagccccagtgaatgcactggtgtctcatctgctggtggttgagcctgagaagctctatgccatgcctgaccccgcaggccctgatgggcacctcccagccgtggctaccctctgtgacctctttgaccgagagattgtggtcaccatcagctgggccaagagcatcccaggtaaagggcccaggtgacccggggctgccctgaacgggcccggctctggtgcgcttgctcagccaggcccgctccccgctgccccctaggcttctcatcgctgtcgctgtctgaccagatgtcagtactgcagagcgtgtggatggaggtgctggtgctgggtgtggcccagcgctcactgccactgcaggatgagctggccttcgctgaggacttagtcctggatgaagagggggcacgggcagctggcctgggggaactgggggctgccctgctgcaactagtgcggcggctgcaggccctgcggctggagcgagaggagtatgttctactaaaggccttggcccttgccaattcaggtgagtctggggcaggcactgacaggtgaggtgtctccgtaaggtcttcaggttaactcagtgacggtagcacagccccattttgcagataacgaaaactgaggcttagggaagaacaatgacttgctagaagtcaaaaagcaagccaagtgcaggctccaaactgcacacaggattttgagccctagtgccacactaatgcagaaaggtcatttagtgggagggaaggtggggagggtacaaggtggccacagttgagggagagagggtggggtcctggcccacgagccgcagcaatgagtggtgcctctcagtcagccaatcaacaaatcctcgtttggctcttccttaggccccatccagcagtgctcaagatacggggagtgcccttgccagagatagcccaggccaacaccacattcctctcttcttgcagactctgtgcacatcgaagatgccgaggctgtggagcagctgcgagaagctctgcacgaggccctgctggagtatgaagccggccgggctggccccggagggggtgctgagcggcggcgggcgggcaggctgctgctcacgctaccgctcctccgccagacagcgggcaaagtgctggcccatttctatggggtgaagctggagggcaaggtgcccatgcacaagctgttcttggagatgctcgaggccatgatggactgaggcaaggggtgggactggtgggggttctggcaggacctgcctagcatggggtcagccccaagggctggggcggagctggggtctgggcagtgccacagcctgctggcagggccagggcaatgccatcagcccctgggaacaggccccacgccctctcctccccctcctagggggtgtcagaagctgggaacgtgtgtccaggctctgggcacagtgctgccccttgcaagccataacgtgcccccagagtgtagggggccttgcggaagccatagggggctgcacgggatgcgtgggaggcagaaacctatctcagggagggaaggggatggaggccagagtctcccagtgggtgatgcttttgctgctgcttaatcctaccccctcttcaaagcagagtgggacttggagagcaaaggcccatgcccccttcgctcctcctctcatcatttgcattgggcattagtgtccccccttgaagcaataactccaagcagactccagcccctggacccctggggtggccagggcttccccatcagctcccaacgagcctcctcagggggtaggagagcactgcctctatgccctgcagagcaataacactatatttatttttgggtttggccagggaggcgcagggacatggggcaagccagggcccagagcccttggctgtacagagactctattttaatgtatatttgctgcaaagagaaaccgcttttggttttaaacctttaatgagaaaaaaatatataataccgagctcaaaaa

SEQ ID NO: 11874 - DNA, 2283 bp, Homo sapiens
tagaggtctcccgcgggcggggagggggaggcgtagcaactttaggcaacttcccaaaggtgtgcgcaggttgggggcgggacgcggcgccccgggaggtggcggcctctgcgacagcgggagtataagagtggacctgcaggctggtcgcgaggaggtggagcggcgcccgccgtgtgcctgggaccggcatgctggggcaggagggcagccgcgtgtcaggtgaccagcgccatgtccagccaggtggtgggcattgagcctctctacatcaaggcagagccggccagccctgacagtccaaagggttcctcggagacagagaccgagcctcctgtggccctggcccctggtccagctcccactcgctgcctcccaggccacaaggaagaggaggatggggagggggctgggcctggcgagcagggcggtgggaagctggtgctcagctccctgcccaagcgcctctgcctggtctgtggggacgtggcctccggctaccactatggtgtggcatcctgtgaggcctgcaaagccttcttcaagaggaccatccaggggagcatcgagtacagctgtccggcctccaacgagtgtgagatcaccaagcggagacgcaaggcctgccaggcctgccgcttcaccaagtgcctgcgggtgggcatgctcaaggagggagtgcgcctggaccgcgtccggggtgggcggcagaagtacaagcggcggccggaggtggacccactgcccttcccgggccccttccctgctgggcccctggcagtcgctggaggcccccggaagacagcagccccagtgaatgcactggtgtctcatctgctggtggttgagcctgagaagctctatgccatgcctgaccccgcaggccctgatgggcacctcccagccgtggctaccctctgtgacctctttgaccgagagattgtggtcaccatcagctgggccaagagcatcccaggcttctcatcgctgtcgctgtctgaccagatgtcagtactgcagagcgtgtggatggaggtgctggtgctgggtgtggcccagcgctcactgccactgcaggatgagctggccttcgctgaggacttagtcctggatgaagagggggcacgggcagctggcctgggggaactgggggctgccctgctgcaactagtgcggcggctgcaggccctgcggctggagcgagaggagtatgttctactaaaggccttggcccttgccaattcagactctgtgcacatcgaagatgccgaggctgtggagcagctgcgagaagctctgcacgaggccctgctggagtatgaagccggccgggctggccccggagggggtgctgagcggcggcgggcgggcaggctgctgctcacgctaccgctcctccgccagacagcgggcaaagtgctggcccatttctatggggtgaagctggagggcaaggtgcccatgcacaagctgttcttggagatgctcgaggccatgatggactgaggcaaggggtgggactggtgggggttctggcaggacctgcctagcatggggtcagccccaagggctggggcggagctggggtctgggcagtgccacagcctgctggcagggccagggcaatgccatcagcccctgggaacaggccccacgccctctcctccccctcctagggggtgtcagaagctgggaacgtgtgtccaggctctgggcacagtgctgccccttgcaagccataacgtgcccccagagtgtagggggccttgcggaagccatagggggctgcacgggatgcgtgggaggcagaaacctatctcagggagggaaggggatggaggccagagtctcccagtgggtgatgcttttgctgctgcttaatcctaccccctcttcaaagcagagtgggacttggagagcaaaggcccatgcccccttcgctcctcctctcatcatttgcattgggcattagtgtccccccttgaagcaataactccaagcagactccagcccctggacccctggggtggccagggcttccccatcagctcccaacgagcctcctcagggggtaggagagcactgcctctatgccctgcagagcaataacactatatttatttttgggtttggccagggaggcgcagggacatggggcaagccagggcccagagcccttggctgtacagagactctattttaatgtatatttgctgcaaagagaaaccgcttttggttttaaacctttaatgagaaaaaaatatataataccgagctcaaaaa

SEQ ID NO: 11875 - DNA, 11242 bp, Homo sapiens
atgcgcacggccggccccacccccgctgtcagctggaggaagcggagtaggaagcggccgcgatgtccttttgtgtcctacaagcagccggcggcgccgccgagtgaggggacgcggcgcggtggggcggcgcggcccgaggaggcggcggaggaggggccgcccgcggcccccggctcactccggcactccgggccgctcggcccccatgcctgcccgaccgcgctgccggagccccaggtccgggggcggaggggagcgctgccgcgggggtgggcgggcggggcgcgggggccatgtgcgagcgcggcagggaggcgggcggggcgggctgcaggcggggtccgactctggggccagtccgggccacggttgggacccagtcgagggtcggactggtcagggttcaggcgggatccggcgtccgagtcctggtgggccggcctggggcaggatctggctctggctgcgggtcctgactcgggtcagggttgggcctccgatccagcccgctccggggcagggttcaatcccgcatttgccgaagtccctggggctggccggggtggaagacggggagggctctatgtctgggaaggggctctgaagaccacgtgggggcgctcgaaggggcctggggccaccctcctctctgggtcaaaggtcatcgcaccggcaggggagaacttcctcctccttggctctccccacttacttcctgataacctggtagaggtctcccgcgggcggggagggggaggcgtagcaactttaggcaacttcccaaaggtgtgcgcaggttgggggcgggacgcggcgccccgggaggtggcggcctctgcgacagcgggagtataagagtggacctgcaggctggtcgcgaggaggtggagcggcgcccgccgtgtgcctgggaccggcatgctggggcaggagggcagccgcgtgtcaggtgtgaaaagctctggaggtgttttcatgagtccgtgcctgtgcgtgtggatgtggggagacctagtgagagtgtgtgtgatcatgagccttgactgagttcgtggatggggtgtgcgctccaggagaagtgtgtgagcacaagtgtgagcaggagtgagcacgggtttgggaaggccggtgcaagtgtgaaagccctcagcagagagcgagcctgcgtgggcttgtggggctcctgagcaccccggtgagtggagtgtgtgaactcggtgtgagcacgtccactggccttgggtctgctctccaatgcagaatacccagatgagggcagggtctcagaggtccccccaacatctggagaaaactgggaagtatcctgctcctggctagggattccaggtggggttgaaggttgcctgggggctacggttaccctgctccctggcctgggtgggagtaggggctttctaagcctcccccaggttcccaagggggagacctgctgtcagttactggccctgaagactctgtttccatggcaacagctaggagggggcagtgttcctgggcagtccttccttggactctgccccccttcttccccacttgctgggcttggaagcctggccctaggcccgaggttgggcaacccgtgtggcagggtgtctcccatcccccataccagtgctttcctgcgaacctatgggtctctccgtgcaggtgaccagcgccatgtccagccaggtggtgggcattgagcctctctacatcaaggcagagccggccagccctgacagtccaaagggttcctcggagacagagaccgagcctcctgtggccctggcccctggtccagctcccactcgctgcctcccaggccacaaggaagaggaggatggggagggggctgggcctggcgagcagggcggtgggaagctggtgctcagctccctgcccaagcgcctctgcctggtctgtggggacgtggcctccggctaccactatggtgtggcatcctgtgaggcctgcaaagccttcttcaagaggaccatccagggtgagcccccagcccactcccctgtcctttgccctgcaccctctgggtacactgctgggtgcaataggccccctgatggctgtggcaccgcttgaggctaacaatctggtgtttccagtccctctacctcccagagacactctttccctgagaagtatggtaaaagcaccgggtgtgctgatgcattgcagtggatgtgagtgagttcagggtaccacctgggtactctaggcccagcaccttctacagtggctctgaaagagtccaaggcagcctctgtctgttcctaagctttgttcttgtttctggcagcttctgacctctccccagcatagaacatgtcccctttttgttaattttcccaaagcagcaccaacacaaggcagattttaatttttttttttttgagacagagtctcactctgttgttcaggctagagtgcagtggcacaatctctgctcactgcaacctttgcccctgggttcaagagattctcctgcctcagcctcctgagtagctgagactgcaggtgtgcaccaccacgcccagctaatttttgtatttttagtagagacgacgtttcaccatgtcggccaggctggtctggaattcctgaccacaaatgatccacctgcctcggcctcccaaaacaaggcagatttttatcagtacttgagaggggctacatcatagtttagcacccaactttaaaaagactaacaggcaaggccggacacagttgctcacacctgtaatcccagcactttgggaggccaaggtgggcggatcacctgaggtcaggagatcgagaccagcctggccagggtggtgaaaccgcatctctactaaaaatgcaaaaaattagctgggcatggtggctcgcgcctgtaatctcagctacttgctacttgagaggctgaggcaggagaattgcttgaacccaggaggcagaggttgcagtgagccaagatcacaccactgtactccagcctgggtgacagagcgagattccatctcaaaaaaaaaaaaaaaaggccgggcactgtggctcatgtaatcccagcactttgggaggccgaggcgggcggatcatgaggtcaggagattgagaacatcctggctaacacggtgaaacactgtctctactaaaaatacaaaaaattagctgggcatggtggcgggcgcctgtaatcccagctacttgggaggctgaggcaggagaatggcgtgaacccaggaggcggaggttgcagtgagccaagatcacgccactgcactccagcctgggcgacagagtgagactccgtctcaaaaaaaaaaaaaaaaaggctgggcgcggtggctcatgcctgtaatcccagcactttgggaggccgagacgggcggatcacctgaggtcaggagtttgagaccagcctgaccaatgtgatgaaaccccgtctctactgaaaatacaaaaattagccaagcatggtggcatgcgcctgtcatcccactcaagaggctgagacaggagaattgcttgaacctgggaggcagaggttgcaatgagcccagatcgcgccattgcactctagcctgcgcaacaaaagtgaaactccacctcaaaaaacaaaaacaaaaacaaaaacaaaaaaacccaaaaacgctgggcttggtggctcatggcctgtaatcccagcactttgggaggctgaggcagacggatcacgaggtcaggagttcgagaccagcctggccaacatggtaaaaccccgtctctactaaaaatacaaaaattagccgggcgtggtggtgagtgcctgtaatcccactacttgggaggctgaggcaggagaattgcttgaacccgggaggcagaggttgcagtgagctgagatcatgccacagcactctagtctgggcaacagaatgagacactctcatctcaaaaaaaaaaaaaaaaggacttacaggcatgtctgctcttaaaagtcactaatttttttctcactcaggaaagcttatcagaatttgggggaatgagcaagatgctgacattaagcattgcctgggaagggcctattatttccgttatttctgcttttatgtaaccattggttactttgggggctataacacgtataattaaaaaaaaaaaaaaaaaggccaagtgtggtggctcacacctgtaatctcagcactttcggaggctaagatgggaggatcacaaggtcaggagttcgagaccagcctggccaacatggtgaaaccctgtctgtactagaaatacaaaaattagccaggtgtcgtggtgggtgcctgtagtcccagctactcaggaggctgaggcaggagaattgctggaacccaggaggcagaggttggagttagccaagatcgtgccactgcactcccagcctgggtgacagagtgagagttcgtatcaaaaaaaaaaaaaaaaaaaaaatcttgagtgcttaccttgtgctaggcactgtattcttttatgatctcagttagtccccacagcaaccctataaggtgtcagtactgttataactgaaactaagagaggcatttgaaactttgttgaagtctcacaactaggaaatggcagaaccaagatttgaacttgggtcagtataggtccagagctgagctcttcaatgttagactgcttcctctgcttattactaataacaccgaactttggacagacgctgaatgactgattgtgacattccagcacgtttttttttttttttttgagacagtctcgtgtggtcgcccaggctggagtgcagtggcacgatctcggctcactgcaagctccgcctcccgggttcacaccattctcctgcctcagcctcctgagtagctgggactacaggtgcccgccaccacgcctggctaattttttgtacttttagtagagacggggtttcagcgtgttagccaagatggtcttgatttcctgacctcgagatccacctgccttggactcccaaagtgctgggattacaggcgtgagccactgctcctggccaggttttttttttttttttttttttttttgagatggagttttgctcttgttgtccaggctggagtgcaacggcctgcagtcgtggttcactgcaacctctgcctcccgggttcaagccattcacctgcctcagcctcccaagtagctgggattacaggcgcctgccaccatgcccggctaatttttgtgtttttagtagggatggggtttcaccatgttggccaggctggcctcaaactcctgacctcaggcgatctgccctcctcgggcttccaaagtgctgggattataggtgtgagccactgcaccccgccaatccagcaagttttaacttggccaaaatccaccaatcttaaactttgtgcacccttcccactctgaagaacagtgagccagccggccagggtgcgggtatctcctacctaccctggggcccctcactgtatgttgactattgacaaatatttattgtgtgctggctgtgaataggacttgtatattgagcacttaggtgtcatgaaccatgctggatgttttgaccatattatcccctttaattctcacgacccaactctgtggggcacttttacagctgggaaactgagggttcaaggggttaggtatgggacttgcccaaggtcataaaggtatgtggtagccagagtccctgttcggcacagacctgttctttgctgtcctggccagtgttccaggccttggggacatagctggggctgaagcagggctgtttctgccctcaggcagtttacatcctggcagaggggagagctgggcaacagtgagttgcacagacttgtcttattaccgctgtggtatgtgcaggaaggggaggtgctggttctgaggctccagagggcttgtctttttttttttttttttgagacggagtctcgctttgttgcccaggctagagtccagtggcgcgatctcggctcagtgcaagctccgcctcccgggttcaagcgattctcctgcctcagcctccccaatagctgggattacaggcgcatggcaccacgcacggctaattttggtatttttagtagagactgggtttcaccatgttagccaggatggtctcgatctcctgacctcgtgatccacccgcctcggcctcccaaagtgctgggattacgctcccggcctctttttttttttagacagagtctcactctgttgccaggctatagtacagtggcacgatctcagcttactgcaacctccgcctcccaggttcaagcgattgttctccctcagcctcccgagtagctgggactacaggcacacgcccagctaatttttgtatttttagtagagacagggtttcaccgtgttggtcaggctggtctcaaactcctcacctcgtgatctgcctgcctcggcctcccaaagtgctgggattataggcgtgagccactgcgcctggcctttttttttttttggtacagagtttcgctctggttgcccaggctggagtgcaatggcacgatcttggctcactgcagcctctgcctcccgggttcaagcgattctcctgcctcagcctccggagcagctgggattacagacatgcaccaccatgtccggctaatttttttttttcgagatggagtctcactgtgtcacccaggctggagtgcagtggcacaatctcggctcactgcaacctctgcctcccgggttcaagcgattctcctgcctcagcctcctgagtagctgggactacaggtgcctgccaccacacccagctaatttttgtacttttagtagagacggggttttaccatgttggccaggctggtcttgaacttctgacctcaggtgatccacccacctcggtctcccaaagtgctgggattacaggcgtgagccaccgtgcccggccgtggtgtcttgagctgagtgcagaagcgcaaatagggggtaggagaaaatgcaccgcgaggagaaatgtgctgcgggcctgctgtctagctgtgtcatttggtcgttgcggggccctgtgaggccgggagggctgccagcacccaccatgtgccaggcctcgttgctagtgctggggccagttcctgccccggtggagctgccactgaagggggaggcgtaataaacaagataggtgagtgcatatgcagcgtggtctgttgtgctgagggctgaagagaaaccagaagcagggctcagaggccaggaggactctgcaaagggatttggcattatcacagggtggccagggaagatcttcaaggtgacagtgagcagagggaggtgagggagcctgtgtggacttcaggactagagctccaggcagggcctgtttgaggaacatggaggaggcgagagcaaggagtagaggtcaaaaggaggcaagaagcaggggcgtaggcctaggaggacataggttcgctttggcttggactcagagaagggaaatccccagagggttttgagaagaggaggtacaggatgtaatggaggcttaataggaccctcttggctgctgagtcgagaacagactggagcaagcagggacagccaagcgaggggcgaggtgacagtgactatcaggtcaagggtggaagtagttgccaggggcaggaggcggattctggaccttggaggaggtaaagcccaccagaatgtgtcggtggcttggatgtggggtgtgagaggaaccagagattctgcctaggtttcttcttgggcaagtgaacacgtggagtccacgtaggctgtgttcggtccgagatgccttctagacatgcaggatgtcaaggaggcagctggagagatgggtctggagctcacagcaagtccaggctagaggtagaaacgtgagagccccacggctggggaagattgccatgggattggagatgagctccaaggacagccctggcagtctggatggaagagcttgggaagatgctcagaaaccacaaagtggctggtgcggtgggaggaaaaccagagtgtatgctgtcctagaagcaaaagaagaaagtgtttcagtgtttctaggagcaggaagtgatcaacagccttagatcctccttttaggccaagtaacatgaggactaagaattgaccactggatttagcaatgcagaggtccttgtggcccttgatgtcggcagatgagggcagtgtggtccagagatgaggcttggggctgagatgcagccccgctgcctggtccagctcctccctcatccaggcagggctcccccgcccagcagccactcccctccctgcctgctcatggccccctgctctccctttcctccccatacccccagacctgtgcttgcccggggagagtcagggctctcctgtcagctgggtcccctcccagccccgggaggccgccactggagccctgcctcttcctggcagggagcatcgagtacagctgtccggcctccaacgagtgtgagatcaccaagcggagacgcaaggcctgccaggcctgccgcttcaccaagtgcctgcgggtgggcatgctcaaggagggtgagcgctgggcaggggctgggcgagggctgggggagtcggggacccgggccaggtgggggtgaggcctgggagttctggtgagtggactcggggaggacagctctggagagcaagccccaccctgcccacagcaccacagtcacagtcctatctgtcccacaattcaaggagtgcgcctggaccgcgtccggggtgggcggcagaagtacaagcggcggccggaggtggacccactgcccttcccgggccccttccctgctgggcccctggcagtcgctggaggcccccggaagacaggtgagagcactgtgggtacctggggctacgaaaccggaggcctatgtgtggcatcatagttaccttgggcactgggacctgtatttccccttcgtctcttcactcactcatttccccaagacatgtgaaactgccttttcctgcatcaggaaaagtagtagaactgggaacagggacgattttccaacactcacagcctgtccacaaacacacgggctttccctgggagacagttagcgctcttccctggagggaagtcactggacagctgctactgaggaaggccacagggggagccactgtgggaagatgcttgacccctgaggcctgacagattcgagtgctcctgactcttgtcctctaattgtcacagcagccccagtgaatgcactggtgtctcatctgctggtggttgagcctgagaagctctatgccatgcctgaccccgcaggccctgatgggcacctcccagccgtggctaccctctgtgacctctttgaccgagagattgtggtcaccatcagctgggccaagagcatcccaggtaaagggcccaggtgacccggggctgccctgaacgggcccggctctggtgcgcttgctcagccaggcccgctccccgctgccccctaggcttctcatcgctgtcgctgtctgaccagatgtcagtactgcagagcgtgtggatggaggtgctggtgctgggtgtggcccagcgctcactgccactgcaggatgagctggccttcgctgaggacttagtcctggatgaagagggggcacgggcagctggcctgggggaactgggggctgccctgctgcaactagtgcggcggctgcaggccctgcggctggagcgagaggagtatgttctactaaaggccttggcccttgccaattcaggtgagtctggggcaggcactgacaggtgaggtgtctccgtaaggtcttcaggttaactcagtgacggtagcacagccccattttgcagataacgaaaactgaggcttagggaagaacaatgacttgctagaagtcaaaaagcaagccaagtgcaggctccaaactgcacacaggattttgagccctagtgccacactaatgcagaaaggtcatttagtgggagggaaggtggggagggtacaaggtggccacagttgagggagagagggtggggtcctggcccacgagccgcagcaatgagtggtgcctctcagtcagccaatcaacaaatcctcgtttggctcttccttaggccccatccagcagtgctcaagatacggggagtgcccttgccagagatagcccaggccaacaccacattcctctcttcttgcagactctgtgcacatcgaagatgccgaggctgtggagcagctgcgagaagctctgcacgaggccctgctggagtatgaagccggccgggctggccccggagggggtgctgagcggcggcgggcgggcaggctgctgctcacgctaccgctcctccgccagacagcgggcaaagtgctggcccatttctatggggtgaagctggagggcaaggtgcccatgcacaagctgttcttggagatgctcgaggccatgatggactgaggcaaggggtgggactggtgggggttctggcaggacctgcctagcatggggtcagccccaagggctggggcggagctggggtctgggcagtgccacagcctgctggcagggccagggcaatgccatcagcccctgggaacaggccccacgccctctcctccccctcctagggggtgtcagaagctgggaacgtgtgtccaggctctgggcacagtgctgccccttgcaagccataacgtgcccccagagtgtagggggccttgcggaagccatagggggctgcacgggatgcgtgggaggcagaaacctatctcagggagggaaggggatggaggccagagtctcccagtgggtgatgcttttgctgctgcttaatcctaccccctcttcaaagcagagtgggacttggagagcaaaggcccatgcccccttcgctcctcctctcatcatttgcattgggcattagtgtccccccttgaagcaataactccaagcagactccagcccctggacccctggggtggccagggcttccccatcagctcccaacgagcctcctcagggggtaggagagcactgcctctatgccctgcagagcaataacactatatttatttttgggtttggccagggaggcgcagggacatggggcaagccagggcccagagcccttggctgtacagagactctattttaatgtatatttgctgcaaagagaaaccgcttttggttttaaacctttaatgagaaaaaaatatataataccgagctc

SEQ ID NO: 11876 - DNA, 2293 bp, Homo sapiens
atgcgcacggccggccccacccccgctgtcagctggaggaagcggagtaggaagcggccgcgatgtccttttgtgtcctacaagcagccggcggcgccgccgagtgaggggacgcggcgcggtggggcggcgcggcccgaggaggcggcggaggaggggccgcccgcggcccccggctcactccggcactccgggccgctcggcccccatgcctgcccgaccgcgctgccggagccccaggtgaccagcgccatgtccagccaggtggtgggcattgagcctctctacatcaaggcagagccggccagccctgacagtccaaagggttcctcggagacagagaccgagcctcctgtggccctggcccctggtccagctcccactcgctgcctcccaggccacaaggaagaggaggatggggagggggctgggcctggcgagcagggcggtgggaagctggtgctcagctccctgcccaagcgcctctgcctggtctgtggggacgtggcctccggctaccactatggtgtggcatcctgtgaggcctgcaaagccttcttcaagaggaccatccaggggagcatcgagtacagctgtccggcctccaacgagtgtgagatcaccaagcggagacgcaaggcctgccaggcctgccgcttcaccaagtgcctgcgggtgggcatgctcaaggagggagtgcgcctggaccgcgtccggggtgggcggcagaagtacaagcggcggccggaggtggacccactgcccttcccgggccccttccctgctgggcccctggcagtcgctggaggcccccggaagacagccccagtgaatgcactggtgtctcatctgctggtggttgagcctgagaagctctatgccatgcctgaccccgcaggccctgatgggcacctcccagccgtggctaccctctgtgacctctttgaccgagagattgtggtcaccatcagctgggccaagagcatcccaggcttctcatcgctgtcgctgtctgaccagatgtcagtactgcagagcgtgtggatggaggtgctggtgctgggtgtggcccagcgctcactgccactgcaggatgagctggccttcgctgaggacttagtcctggatgaagagggggcacgggcagctggcctgggggaactgggggctgccctgctgcaactagtgcggcggctgcaggccctgcggctggagcgagaggagtatgttctactaaaggccttggcccttgccaattcagactctgtgcacatcgaagatgccgaggctgtggagcagctgcgagaagctctgcacgaggccctgctggagtatgaagccggccgggctggccccggagggggtgctgagcggcggcgggcgggcaggctgctgctcacgctaccgctcctccgccagacagcgggcaaagtgctggcccatttctatggggtgaagctggagggcaaggtgcccatgcacaagctgttcttggagatgctcgaggccatgatggactgaggcaaggggtgggactggtgggggttctggcaggacctgcctagcatggggtcagccccaagggctggggcggagctggggtctgggcagtgccacagcctgctggcagggccagggcaatgccatcagcccctgggaacaggccccacgccctctcctccccctcctagggggtgtcagaagctgggaacgtgtgtccaggctctgggcacagtgctgccccttgcaagccataacgtgcccccagagtgtagggggccttgcggaagccatagggggctgcacgggatgcgtgggaggcagaaacctatctcagggagggaaggggatggaggccagagtctcccagtgggtgatgcttttgctgctgcttaatcctaccccctcttcaaagcagagtgggacttggagagcaaaggcccatgcccccttcgctcctcctctcatcatttgcattgggcattagtgtccccccttgaagcaataactccaagcagactccagcccctggacccctggggtggccagggcttccccatcagctcccaacgagcctcctcagggggtaggagagcactgcctctatgccctgcagagcaataacactatatttatttttgggtttggccagggaggcgcagggacatggggcaagccagggcccagagcccttggctgtacagagactctattttaatgtatatttgctgcaaagagaaaccgcttttggttttaaacctttaatgagaaaaaaatatataataccgagctc

SEQ ID NO: 11877 - DNA, 2120 bp, Homo sapiens
ggcagggctcccccgcccagcagccactcccctccctgcctgctcatggccccctgctctccctttcctccccatacccccagacctgtgcttgcccggggagagtcagggctctcctgtcagctgggtcccctcccagccccgggaggccgccactggagccctgcctcttcctggcagggagcatcgagtacagctgtccggcctccaacgagtgtgagatcaccaagcggagacgcaaggcctgccaggcctgccgcttcaccaagtgcctgcgggtgggcatgctcaaggagggtgagcgctgggcaggggctgggcgagggctgggggagtcggggacccgggccaggtgggggtgaggcctgggagttctggtgagtggactcggggaggacagctctggagagcaagccccaccctgcccacagcaccacagtcacagtcctatctgtcccacaattcaaggagtgcgcctggaccgcgtccggggtgggcggcagaagtacaagcggcggccggaggtggacccactgcccttcccgggccccttccctgctgggcccctggcagtcgctggaggcccccggaagacaggtgagagcactgtgggtacctggggctacgaaaccggaggcctatgtgtggcatcatagttaccttgggcactgggacctgtatttccccttcgtctcttcactcactcatttccccaagacatgtgaaactgccttttcctgcatcaggaaaagtagtagaactgggaacagggacgattttccaacactcacagcctgtccacaaacacacgggctttccctgggagacagttagcgctcttccctggagggaagtcactggacagctgctactgaggaaggccacagggggagccactgtgggaagatgcttgacccctgaggcctgacagattcgagtgctcctgactcttgtcctctaattgtcacagcagccccagtgaatgcactggtgtctcatctgctggtggttgagcctgagaagctctatgccatgcctgaccccgcaggccctgatgggcacctcccagccgtggctaccctctgtgacctctttgaccgagagattgtggtcaccatcagctgggccaagagcatcccaggtaaagggcccaggtgacccggggctgccctgaacgggcccggctctggtgcgcttgctcagccaggcccgctccccgctgccccctaggcttctcatcgctgtcgctgtctgaccagatgtcagtactgcagagcgtgtggatggaggtgctggtgctgggtgtggcccagcgctcactgccactgcaggatgagctggccttcgctgaggacttagtcctggatgaagagggggcacgggcagctggcctgggggaactgggggctgccctgctgcaactagtgcggcggctgcaggccctgcggctggagcgagaggagtatgttctactaaaggccttggcccttgccaattcaggtgagtctggggcaggcactgacaggtgaggtgtctccgtaaggtcttcaggttaactcagtgacggtagcacagccccattttgcagataacgaaaactgaggcttagggaagaacaatgacttgctagaagtcaaaaagcaagccaagtgcaggctccaaactgcacacaggattttgagccctagtgccacactaatgcagaaaggtcatttagtgggagggaaggtggggagggtacaaggtggccacagttgagggagagagggtggggtcctggcccacgagccgcagcaatgagtggtgcctctcagtcagccaatcaacaaatcctcgtttggctcttccttaggccccatccagcagtgctcaagatacggggagtgcccttgccagagatagcccaggccaacaccacattcctctcttcttgcagactctgtgcacatcgaagatgccgaggctgtggagcagctgcgagaagctctgcacgaggccctgctggagtatgaagccggccgggctggccccggagggggtgctgagcggcggcgggcgggcaggctgctgctcacgctaccgctcctccgccagacagcgggcaaagtgctggcccattt

SEQ ID NO: 11878 - DNA, 610 bp, Homo sapiens
ggcagggctcccccgcccagcagccactcccctccctgcctgctcatggccccctgctctccctttcctccccatacccccagacctgtgcttgcccggggagagtcagggctctcctgtcagctgggtcccctcccagccccgggaggccgccactggagccctgcctcttcctggcagggagcatcgagtacagctgtccggcctccaacgagtgtgagatcaccaagcggagacgcaaggcctgccaggcctgccgcttcaccaagtgcctgcgggtgggcatgctcaaggagggagtgcgcctggaccgcgtccggggtgggcggcagaagtacaagcggcggccggaggtggacccactgcccttcccgggccccttccctgctgggcccctggcagtcgctggaggcccccggaagacagactctgtgcacatcgaagatgccgaggctgtggagcagctgcgagaagctctgcacgaggccctgctggagtatgaagccggccgggctggccccggagggggtgctgagcggcggcgggcgggcaggctgctgctcacgctaccgctcctccgccagacagcgggcaaagtgctggcccattt

SEQ ID NO: 11879 - DNA, 1063 bp, Homo sapiens
caggtgtgaaaagctctggaggtgttttcatgagtccgtgcctgtgcgtgtggatgtggggagacctagtgagagtgtgtgtgatcatgagccttgactgagttcgtggatggggtgtgcgctccaggagaagtgtgtgagcacaagtgtgagcaggagtgagcacgggtttgggaaggccggtgcaagtgtgaaagccctcagcagagagcgagcctgcgtgggcttgtggggctcctgagcaccccggtgagtggagtgtgtgaactcggtgtgagcacgtccactggccttgggtctgctctccaatgcagaatacccagatgagggcagggtctcagaggtccccccaacatctggagaaaactgggaagtatcctgctcctggctagggattccaggtggggttgaaggttgcctgggggctacggttaccctgctccctggcctgggtgggagtaggggctttctaagcctcccccaggttcccaagggggagacctgctgtcagttactggccctgaagactctgtttccatggcaacagctaggagggggcagtgttcctgggcagtccttccttggactctgccccccttcttccccacttgctgggcttggaagcctggccctaggcccgaggttgggcaacccgtgtggcagggtgtctcccatcccccataccagtgctttcctgcgaacctatgggtctctccgtgcaggtgaccagcgccatgtccagccaggtggtgggcattgagcctctctacatcaaggcagagccggccagccctgacagtccaaagggttcctcggagacagagaccgagcctcctgtggccctggcccctggtccagctcccactcgctgcctcccaggccacaaggaagaggaggatggggagggggctgggcctggcgagcagggcggtgggaagctggtgctcagctccctgcccaagcgcctctgcctggtctgtggggacgtggcctccggctaccactatggtgtggcatcctgtgaggcctgcaaagccttcttcaagaggaccatccagggtga

SEQ ID NO: 11880 - DNA, 742 bp, Homo sapiens
caggtgtgaaaagctctggaggtgttttcatgagtccgtgcctgtgcgtgtggatgtggggagacctagtgagagtgtgtgtgatcatgagccttgactgagttcgtggatggggtgtgcgctccaggagaagtgtgtgagcacaagtgtgagcaggagtgagcacgggtttgggaaggccggtgcaagtgtgaaagccctcagcagagagcgagcctgcgtgggcttgtggggctcctgagcaccccggtgagtggagtgtgtgaactcggtgtgagcacgtccactggccttgggtctgctctccaatgcagaatacccagatgagggcagggtctcagaggtccccccaacatctggagaaaactgggaagtatcctgctcctggctagggattccaggtgaccagcgccatgtccagccaggtggtgggcattgagcctctctacatcaaggcagagccggccagccctgacagtccaaagggttcctcggagacagagaccgagcctcctgtggccctggcccctggtccagctcccactcgctgcctcccaggccacaaggaagaggaggatggggagggggctgggcctggcgagcagggcggtgggaagctggtgctcagctccctgcccaagcgcctctgcctggtctgtggggacgtggcctccggctaccactatggtgtggcatcctgtgaggcctgcaaagccttcttcaagaggaccatccagggtga

SEQ ID NO: 11881 - DNA, 9594 bp, Homo sapiens
gcagccggcggcgccgccgagtgaggggacgcggcgcggtggggcggcgcggcccgaggaggcggcggaggaggggccgcccgcggcccccggctcactccggcactccgggccgctcggcccccatgcctgcccgaccgcgctgccggagccccaggtccgggggcggaggggagcgctgccgcgggggtgggcgggcggggcgcgggggccatgtgcgagcgcggcagggaggcgggcggggcgggctgcaggcggggtccgactctggggccagtccgggccacggttgggacccagtcgagggtcggactggtcagggttcaggcgggatccggcgtccgagtcctggtgggccggcctggggcaggatctggctctggctgcgggtcctgactcgggtcagggttgggcctccgatccagcccgctccggggcagggttcaatcccgcatttgccgaagtccctggggctggccggggtggaagacggggagggctctatgtctgggaaggggctctgaagaccacgtgggggcgctcgaaggggcctggggccaccctcctctctgggtcaaaggtcatcgcaccggcaggggagaacttcctcctccttggctctccccacttacttcctgataacctggtagaggtctcccgcgggcggggagggggaggcgtagcaactttaggcaacttcccaaaggtgtgcgcaggttgggggcgggacgcggcgccccgggaggtggcggcctctgcgacagcgggagtataagagtggacctgcaggctggtcgcgaggaggtggagcggcgcccgccgtgtgcctgggaccggcatgctggggcaggagggcagccgcgtgtcaggtgtgaaaagctctggaggtgttttcatgagtccgtgcctgtgcgtgtggatgtggggagacctagtgagagtgtgtgtgatcatgagccttgactgagttcgtggatggggtgtgcgctccaggagaagtgtgtgagcacaagtgtgagcaggagtgagcacgggtttgggaaggccggtgcaagtgtgaaagccctcagcagagagcgagcctgcgtgggcttgtggggctcctgagcaccccggtgagtggagtgtgtgaactcggtgtgagcacgtccactggccttgggtctgctctccaatgcagaatacccagatgagggcagggtctcagaggtccccccaacatctggagaaaactgggaagtatcctgctcctggctagggattccaggtggggttgaaggttgcctgggggctacggttaccctgctccctggcctgggtgggagtaggggctttctaagcctcccccaggttcccaagggggagacctgctgtcagttactggccctgaagactctgtttccatggcaacagctaggagggggcagtgttcctgggcagtccttccttggactctgccccccttcttccccacttgctgggcttggaagcctggccctaggcccgaggttgggcaacccgtgtggcagggtgtctcccatcccccataccagtgctttcctgcgaacctatgggtctctccgtgcaggtgaccagcgccatgtccagccaggtggtgggcattgagcctctctacatcaaggcagagccggccagccctgacagtccaaagggttcctcggagacagagaccgagcctcctgtggccctggcccctggtccagctcccactcgctgcctcccaggccacaaggaagaggaggatggggagggggctgggcctggcgagcagggcggtgggaagctggtgctcagctccctgcccaagcgcctctgcctggtctgtggggacgtggcctccggctaccactatggtgtggcatcctgtgaggcctgcaaagccttcttcaagaggaccatccagggtgagcccccagcccactcccctgtcctttgccctgcaccctctgggtacactgctgggtgcaataggccccctgatggctgtggcaccgcttgaggctaacaatctggtgtttccagtccctctacctcccagagacactctttccctgagaagtatggtaaaagcaccgggtgtgctgatgcattgcagtggatgtgagtgagttcagggtaccacctgggtactctaggcccagcaccttctacagtggctctgaaagagtccaaggcagcctctgtctgttcctaagctttgttcttgtttctggcagcttctgacctctccccagcatagaacatgtcccctttttgttaattttcccaaagcagcaccaacacaaggcagattttaatttttttttttttgagacagagtctcactctgttgttcaggctagagtgcagtggcacaatctctgctcactgcaacctttgcccctgggttcaagagattctcctgcctcagcctcctgagtagctgagactgcaggtgtgcaccaccacgcccagctaatttttgtatttttagtagagacgacgtttcaccatgtcggccaggctggtctggaattcctgaccacaaatgatccacctgcctcggcctcccaaaacaaggcagatttttatcagtacttgagaggggctacatcatagtttagcacccaactttaaaaagactaacaggcaaggccggacacagttgctcacacctgtaatcccagcactttgggaggccaaggtgggcggatcacctgaggtcaggagatcgagaccagcctggccagggtggtgaaaccgcatctctactaaaaatgcaaaaaattagctgggcatggtggctcgcgcctgtaatctcagctacttgctacttgagaggctgaggcaggagaattgcttgaacccaggaggcagaggttgcagtgagccaagatcacaccactgtactccagcctgggtgacagagcgagattccatctcaaaaaaaaaaaaaaaaggccgggcactgtggctcatgtaatcccagcactttgggaggccgaggcgggcggatcatgaggtcaggagattgagaacatcctggctaacacggtgaaacactgtctctactaaaaatacaaaaaattagctgggcatggtggcgggcgcctgtaatcccagctacttgggaggctgaggcaggagaatggcgtgaacccaggaggcggaggttgcagtgagccaagatcacgccactgcactccagcctgggcgacagagtgagactccgtctcaaaaaaaaaaaaaaaaaggctgggcgcggtggctcatgcctgtaatcccagcactttgggaggccgagacgggcggatcacctgaggtcaggagtttgagaccagcctgaccaatgtgatgaaaccccgtctctactgaaaatacaaaaattagccaagcatggtggcatgcgcctgtcatcccactcaagaggctgagacaggagaattgcttgaacctgggaggcagaggttgcaatgagcccagatcgcgccattgcactctagcctgcgcaacaaaagtgaaactccacctcaaaaaacaaaaacaaaaacaaaaacaaaaaaacccaaaaacgctgggcttggtggctcatggcctgtaatcccagcactttgggaggctgaggcagacggatcacgaggtcaggagttcgagaccagcctggccaacatggtaaaaccccgtctctactaaaaatacaaaaattagccgggcgtggtggtgagtgcctgtaatcccactacttgggaggctgaggcaggagaattgcttgaacccgggaggcagaggttgcagtgagctgagatcatgccacagcactctagtctgggcaacagaatgagacactctcatctcaaaaaaaaaaaaaaaaggacttacaggcatgtctgctcttaaaagtcactaatttttttctcactcaggaaagcttatcagaatttgggggaatgagcaagatgctgacattaagcattgcctgggaagggcctattatttccgttatttctgcttttatgtaaccattggttactttgggggctataacacgtataattaaaaaaaaaaaaaaaaaggccaagtgtggtggctcacacctgtaatctcagcactttcggaggctaagatgggaggatcacaaggtcaggagttcgagaccagcctggccaacatggtgaaaccctgtctgtactagaaatacaaaaattagccaggtgtcgtggtgggtgcctgtagtcccagctactcaggaggctgaggcaggagaattgctggaacccaggaggcagaggttggagttagccaagatcgtgccactgcactcccagcctgggtgacagagtgagagttcgtatcaaaaaaaaaaaaaaaaaaaaaatcttgagtgcttaccttgtgctaggcactgtattcttttatgatctcagttagtccccacagcaaccctataaggtgtcagtactgttataactgaaactaagagaggcatttgaaactttgttgaagtctcacaactaggaaatggcagaaccaagatttgaacttgggtcagtataggtccagagctgagctcttcaatgttagactgcttcctctgcttattactaataacaccgaactttggacagacgctgaatgactgattgtgacattccagcacgtttttttttttttttttgagacagtctcgtgtggtcgcccaggctggagtgcagtggcacgatctcggctcactgcaagctccgcctcccgggttcacaccattctcctgcctcagcctcctgagtagctgggactacaggtgcccgccaccacgcctggctaattttttgtacttttagtagagacggggtttcagcgtgttagccaagatggtcttgatttcctgacctcgagatccacctgccttggactcccaaagtgctgggattacaggcgtgagccactgctcctggccaggttttttttttttttttttttttttttgagatggagttttgctcttgttgtccaggctggagtgcaacggcctgcagtcgtggttcactgcaacctctgcctcccgggttcaagccattcacctgcctcagcctcccaagtagctgggattacaggcgcctgccaccatgcccggctaatttttgtgtttttagtagggatggggtttcaccatgttggccaggctggcctcaaactcctgacctcaggcgatctgccctcctcgggcttccaaagtgctgggattataggtgtgagccactgcaccccgccaatccagcaagttttaacttggccaaaatccaccaatcttaaactttgtgcacccttcccactctgaagaacagtgagccagccggccagggtgcgggtatctcctacctaccctggggcccctcactgtatgttgactattgacaaatatttattgtgtgctggctgtgaataggacttgtatattgagcacttaggtgtcatgaaccatgctggatgttttgaccatattatcccctttaattctcacgacccaactctgtggggcacttttacagctgggaaactgagggttcaaggggttaggtatgggacttgcccaaggtcataaaggtatgtggtagccagagtccctgttcggcacagacctgttctttgctgtcctggccagtgttccaggccttggggacatagctggggctgaagcagggctgtttctgccctcaggcagtttacatcctggcagaggggagagctgggcaacagtgagttgcacagacttgtcttattaccgctgtggtatgtgcaggaaggggaggtgctggttctgaggctccagagggcttgtctttttttttttttttttgagacggagtctcgctttgttgcccaggctagagtccagtggcgcgatctcggctcagtgcaagctccgcctcccgggttcaagcgattctcctgcctcagcctccccaatagctgggattacaggcgcatggcaccacgcacggctaattttggtatttttagtagagactgggtttcaccatgttagccaggatggtctcgatctcctgacctcgtgatccacccgcctcggcctcccaaagtgctgggattacgctcccggcctctttttttttttagacagagtctcactctgttgccaggctatagtacagtggcacgatctcagcttactgcaacctccgcctcccaggttcaagcgattgttctccctcagcctcccgagtagctgggactacaggcacacgcccagctaatttttgtatttttagtagagacagggtttcaccgtgttggtcaggctggtctcaaactcctcacctcgtgatctgcctgcctcggcctcccaaagtgctgggattataggcgtgagccactgcgcctggcctttttttttttttggtacagagtttcgctctggttgcccaggctggagtgcaatggcacgatcttggctcactgcagcctctgcctcccgggttcaagcgattctcctgcctcagcctccggagcagctgggattacagacatgcaccaccatgtccggctaatttttttttttcgagatggagtctcactgtgtcacccaggctggagtgcagtggcacaatctcggctcactgcaacctctgcctcccgggttcaagcgattctcctgcctcagcctcctgagtagctgggactacaggtgcctgccaccacacccagctaatttttgtacttttagtagagacggggttttaccatgttggccaggctggtcttgaacttctgacctcaggtgatccacccacctcggtctcccaaagtgctgggattacaggcgtgagccaccgtgcccggccgtggtgtcttgagctgagtgcagaagcgcaaatagggggtaggagaaaatgcaccgcgaggagaaatgtgctgcgggcctgctgtctagctgtgtcatttggtcgttgcggggccctgtgaggccgggagggctgccagcacccaccatgtgccaggcctcgttgctagtgctggggccagttcctgccccggtggagctgccactgaagggggaggcgtaataaacaagataggtgagtgcatatgcagcgtggtctgttgtgctgagggctgaagagaaaccagaagcagggctcagaggccaggaggactctgcaaagggatttggcattatcacagggtggccagggaagatcttcaaggtgacagtgagcagagggaggtgagggagcctgtgtggacttcaggactagagctccaggcagggcctgtttgaggaacatggaggaggcgagagcaaggagtagaggtcaaaaggaggcaagaagcaggggcgtaggcctaggaggacataggttcgctttggcttggactcagagaagggaaatccccagagggttttgagaagaggaggtacaggatgtaatggaggcttaataggaccctcttggctgctgagtcgagaacagactggagcaagcagggacagccaagcgaggggcgaggtgacagtgactatcaggtcaagggtggaagtagttgccaggggcaggaggcggattctggaccttggaggaggtaaagcccaccagaatgtgtcggtggcttggatgtggggtgtgagaggaaccagagattctgcctaggtttcttcttgggcaagtgaacacgtggagtccacgtaggctgtgttcggtccgagatgccttctagacatgcaggatgtcaaggaggcagctggagagatgggtctggagctcacagcaagtccaggctagaggtagaaacgtgagagccccacggctggggaagattgccatgggattggagatgagctccaaggacagccctggcagtctggatggaagagcttgggaagatgctcagaaaccacaaagtggctggtgcggtgggaggaaaaccagagtgtatgctgtcctagaagcaaaagaagaaagtgtttcagtgtttctaggagcaggaagtgatcaacagccttagatcctccttttaggccaagtaacatgaggactaagaattgaccactggatttagcaatgcagaggtccttgtggcccttgatgtcggcagatgagggcagtgtggtccagagatgaggcttggggctgagatgcagccccgctgcctggtccagctcctccctcatccaggcagggctcccccgcccagcagccactcccctccctgcctgctcatggccccctgctctccctttcctccccatacccccagacctgtgcttgcccggggagagtcagggctctcctgtcagctgggtcccctcccagccccgggaggccgccactggagccctgcctcttcctggcagggagcatcgagtacagctgtccggcctccaacgagtgtgagatcaccaagcggagacgcaaggcctgccaggcctgccgcttcaccaagtgcctgcgggtgggcatgctcaaggagggtgagcgctgggcaggggctgggcgagggctgggggagtcggggacccgggccaggtgggggtgaggcctgggagttctggtgagtggactcggggaggacagctctggagagcaagccccaccctgcccacagcaccacagtcacagtcctatctgtcccacaattcaaggagtgcgcctggaccgcgtccggggtgggcggcagaagtacaagcggcggccggaggtggacccactgcccttcccgggccccttccctgctgggcccctggcagtcgctggaggcccccggaagacaggtgagagcactgtgggtacctggggctacgaaaccggaggcctatgtgtggcatcatagttaccttgggcactgggacctgtatttccccttcgtctcttcactcactcatttccccaagacatgtgaaactgccttttcctgcatcaggaaaagtagtagaactgggaacagggacgattttccaacactcacagcctgtccacaaacacacgggctttccctgggagacagttagcgctcttccctggagggaagtcactggacagctgctactgaggaaggccacagggggagccactgtgggaagatgcttgacccctgaggcctgacagattcgagtgctcctgactcttgtcctctaattgtcacagcagccccagtgaatgcactggtgtctcatctgctggtggttgagcctgagaagctctatgccatgcctgaccccgcaggccctgatgggcacctcccagccgtggctaccctctgtgacctctttgaccgagagattgtggtcaccatcagctgggccaagagcatcccaggtaaagggcccaggtgacccggggctgccctgaacgggcccggctctggtgcgcttgctcagccaggcccgctccccgctgccccctaggcttctcatcgctgtcgctgtctgaccagatgtcagtactgcagagcgtgtggatggaggtgctggtgctgggtgtggcccagcgctcactgccactgcaggatgagctggccttcgctgaggacttagtcctggatgaagagggggcacgggcagctggcctgggggaactg

SEQ ID NO: 11882 - DNA, 747 bp, Homo sapiens
gcagccggcggcgccgccgagtgaggggacgcggcgcggtggggcggcgcggcccgaggaggcggcggaggaggggccgcccgcggcccccggctcactccggcactccgggccgctcggcccccatgcctgcccgaccgcgctgccggagccccagggagcatcgagtacagctgtccggcctccaacgagtgtgagatcaccaagcggagacgcaaggcctgccaggcctgccgcttcaccaagtgcctgcgggtgggcatgctcaaggagggagtgcgcctggaccgcgtccggggtgggcggcagaagtacaagcggcggccggaggtggacccactgcccttcccgggccccttccctgctgggcccctggcagtcgctggaggcccccggaagacagcagccccagtgaatgcactggtgtctcatctgctggtggttgagcctgagaagctctatgccatgcctgaccccgcaggccctgatgggcacctcccagccgtggctaccctctgtgacctctttgaccgagagattgtggtcaccatcagctgggccaagagcatcccaggcttctcatcgctgtcgctgtctgaccagatgtcagtactgcagagcgtgtggatggaggtgctggtgctgggtgtggcccagcgctcactgccactgcaggatgagctggccttcgctgaggacttagtcctggatgaagagggggcacgggcagctggcctgggggaactg

SEQ ID NO: 11883 - DNA, 1746 bp, Homo sapiens
ggcggccggaggtggacccactgcccttcccgggccccttccctgctgggcccctggcagtcgctggaggcccccggaagacaggtgagagcactgtgggtacctggggctacgaaaccggaggcctatgtgtggcatcatagttaccttgggcactgggacctgtatttccccttcgtctcttcactcactcatttccccaagacatgtgaaactgccttttcctgcatcaggaaaagtagtagaactgggaacagggacgattttccaacactcacagcctgtccacaaacacacgggctttccctgggagacagttagcgctcttccctggagggaagtcactggacagctgctactgaggaaggccacagggggagccactgtgggaagatgcttgacccctgaggcctgacagattcgagtgctcctgactcttgtcctctaattgtcacagcagccccagtgaatgcactggtgtctcatctgctggtggttgagcctgagaagctctatgccatgcctgaccccgcaggccctgatgggcacctcccagccgtggctaccctctgtgacctctttgaccgagagattgtggtcaccatcagctgggccaagagcatcccaggtaaagggcccaggtgacccggggctgccctgaacgggcccggctctggtgcgcttgctcagccaggcccgctccccgctgccccctaggcttctcatcgctgtcgctgtctgaccagatgtcagtactgcagagcgtgtggatggaggtgctggtgctgggtgtggcccagcgctcactgccactgcaggatgagctggccttcgctgaggacttagtcctggatgaagagggggcacgggcagctggcctgggggaactgggggctgccctgctgcaactagtgcggcggctgcaggccctgcggctggagcgagaggagtatgttctactaaaggccttggcccttgccaattcaggtgagtctggggcaggcactgacaggtgaggtgtctccgtaaggtcttcaggttaactcagtgacggtagcacagccccattttgcagataacgaaaactgaggcttagggaagaacaatgacttgctagaagtcaaaaagcaagccaagtgcaggctccaaactgcacacaggattttgagccctagtgccacactaatgcagaaaggtcatttagtgggagggaaggtggggagggtacaaggtggccacagttgagggagagagggtggggtcctggcccacgagccgcagcaatgagtggtgcctctcagtcagccaatcaacaaatcctcgtttggctcttccttaggccccatccagcagtgctcaagatacggggagtgcccttgccagagatagcccaggccaacaccacattcctctcttcttgcagactctgtgcacatcgaagatgccgaggctgtggagcagctgcgagaagctctgcacgaggccctgctggagtatgaagccggccgggctggccccggagggggtgctgagcggcggcgggcgggcaggctgctgctcacgctaccgctcctccgccagacagcgggcaaagtgctggcccatttctatggggtgaagctggagggcaaggtgcccatgcacaagctgttcttggagatgctcgaggccatgatggactgaggcaaggggtgggactggtgggggttctggcaggacctgcctagcatggggtcagccccaagg

SEQ ID NO: 11884 - DNA, 677 bp, Homo sapiens
ggcggccggaggtggacccactgcccttcccgggccccttccctgctgggcccctggcagtcgctggaggcccccggaagacaggcttctcatcgctgtcgctgtctgaccagatgtcagtactgcagagcgtgtggatggaggtgctggtgctgggtgtggcccagcgctcactgccactgcaggatgagctggccttcgctgaggacttagtcctggatgaagagggggcacgggcagctggcctgggggaactgggggctgccctgctgcaactagtgcggcggctgcaggccctgcggctggagcgagaggagtatgttctactaaaggccttggcccttgccaattcagactctgtgcacatcgaagatgccgaggctgtggagcagctgcgagaagctctgcacgaggccctgctggagtatgaagccggccgggctggccccggagggggtgctgagcggcggcgggcgggcaggctgctgctcacgctaccgctcctccgccagacagcgggcaaagtgctggcccatttctatggggtgaagctggagggcaaggtgcccatgcacaagctgttcttggagatgctcgaggccatgatggactgaggcaaggggtgggactggtgggggttctggcaggacctgcctagcatggggtcagccccaagg

SEQ ID NO: 11885 - DNA, 8787 bp, Homo sapiens
atgtccagccaggtggtgggcattgagcctctctacatcaaggcagagccggccagccctgacagtccaaagggttcctcggagacagagaccgagcctcctgtggccctggcccctggtccagctcccactcgctgcctcccaggccacaaggaagaggaggatggggagggggctgggcctggcgagcagggcggtgggaagctggtgctcagctccctgcccaagcgcctctgcctggtctgtggggacgtggcctccggctaccactatggtgtggcatcctgtgaggcctgcaaagccttcttcaagaggaccatccagggtgagcccccagcccactcccctgtcctttgccctgcaccctctgggtacactgctgggtgcaataggccccctgatggctgtggcaccgcttgaggctaacaatctggtgtttccagtccctctacctcccagagacactctttccctgagaagtatggtaaaagcaccgggtgtgctgatgcattgcagtggatgtgagtgagttcagggtaccacctgggtactctaggcccagcaccttctacagtggctctgaaagagtccaaggcagcctctgtctgttcctaagctttgttcttgtttctggcagcttctgacctctccccagcatagaacatgtcccctttttgttaattttcccaaagcagcaccaacacaaggcagattttaatttttttttttttgagacagagtctcactctgttgttcaggctagagtgcagtggcacaatctctgctcactgcaacctttgcccctgggttcaagagattctcctgcctcagcctcctgagtagctgagactgcaggtgtgcaccaccacgcccagctaatttttgtatttttagtagagacgacgtttcaccatgtcggccaggctggtctggaattcctgaccacaaatgatccacctgcctcggcctcccaaaacaaggcagatttttatcagtacttgagaggggctacatcatagtttagcacccaactttaaaaagactaacaggcaaggccggacacagttgctcacacctgtaatcccagcactttgggaggccaaggtgggcggatcacctgaggtcaggagatcgagaccagcctggccagggtggtgaaaccgcatctctactaaaaatgcaaaaaattagctgggcatggtggctcgcgcctgtaatctcagctacttgctacttgagaggctgaggcaggagaattgcttgaacccaggaggcagaggttgcagtgagccaagatcacaccactgtactccagcctgggtgacagagcgagattccatctcaaaaaaaaaaaaaaaaggccgggcactgtggctcatgtaatcccagcactttgggaggccgaggcgggcggatcatgaggtcaggagattgagaacatcctggctaacacggtgaaacactgtctctactaaaaatacaaaaaattagctgggcatggtggcgggcgcctgtaatcccagctacttgggaggctgaggcaggagaatggcgtgaacccaggaggcggaggttgcagtgagccaagatcacgccactgcactccagcctgggcgacagagtgagactccgtctcaaaaaaaaaaaaaaaaaggctgggcgcggtggctcatgcctgtaatcccagcactttgggaggccgagacgggcggatcacctgaggtcaggagtttgagaccagcctgaccaatgtgatgaaaccccgtctctactgaaaatacaaaaattagccaagcatggtggcatgcgcctgtcatcccactcaagaggctgagacaggagaattgcttgaacctgggaggcagaggttgcaatgagcccagatcgcgccattgcactctagcctgcgcaacaaaagtgaaactccacctcaaaaaacaaaaacaaaaacaaaaacaaaaaaacccaaaaacgctgggcttggtggctcatggcctgtaatcccagcactttgggaggctgaggcagacggatcacgaggtcaggagttcgagaccagcctggccaacatggtaaaaccccgtctctactaaaaatacaaaaattagccgggcgtggtggtgagtgcctgtaatcccactacttgggaggctgaggcaggagaattgcttgaacccgggaggcagaggttgcagtgagctgagatcatgccacagcactctagtctgggcaacagaatgagacactctcatctcaaaaaaaaaaaaaaaaggacttacaggcatgtctgctcttaaaagtcactaatttttttctcactcaggaaagcttatcagaatttgggggaatgagcaagatgctgacattaagcattgcctgggaagggcctattatttccgttatttctgcttttatgtaaccattggttactttgggggctataacacgtataattaaaaaaaaaaaaaaaaaggccaagtgtggtggctcacacctgtaatctcagcactttcggaggctaagatgggaggatcacaaggtcaggagttcgagaccagcctggccaacatggtgaaaccctgtctgtactagaaatacaaaaattagccaggtgtcgtggtgggtgcctgtagtcccagctactcaggaggctgaggcaggagaattgctggaacccaggaggcagaggttggagttagccaagatcgtgccactgcactcccagcctgggtgacagagtgagagttcgtatcaaaaaaaaaaaaaaaaaaaaaatcttgagtgcttaccttgtgctaggcactgtattcttttatgatctcagttagtccccacagcaaccctataaggtgtcagtactgttataactgaaactaagagaggcatttgaaactttgttgaagtctcacaactaggaaatggcagaaccaagatttgaacttgggtcagtataggtccagagctgagctcttcaatgttagactgcttcctctgcttattactaataacaccgaactttggacagacgctgaatgactgattgtgacattccagcacgtttttttttttttttttgagacagtctcgtgtggtcgcccaggctggagtgcagtggcacgatctcggctcactgcaagctccgcctcccgggttcacaccattctcctgcctcagcctcctgagtagctgggactacaggtgcccgccaccacgcctggctaattttttgtacttttagtagagacggggtttcagcgtgttagccaagatggtcttgatttcctgacctcgagatccacctgccttggactcccaaagtgctgggattacaggcgtgagccactgctcctggccaggttttttttttttttttttttttttttgagatggagttttgctcttgttgtccaggctggagtgcaacggcctgcagtcgtggttcactgcaacctctgcctcccgggttcaagccattcacctgcctcagcctcccaagtagctgggattacaggcgcctgccaccatgcccggctaatttttgtgtttttagtagggatggggtttcaccatgttggccaggctggcctcaaactcctgacctcaggcgatctgccctcctcgggcttccaaagtgctgggattataggtgtgagccactgcaccccgccaatccagcaagttttaacttggccaaaatccaccaatcttaaactttgtgcacccttcccactctgaagaacagtgagccagccggccagggtgcgggtatctcctacctaccctggggcccctcactgtatgttgactattgacaaatatttattgtgtgctggctgtgaataggacttgtatattgagcacttaggtgtcatgaaccatgctggatgttttgaccatattatcccctttaattctcacgacccaactctgtggggcacttttacagctgggaaactgagggttcaaggggttaggtatgggacttgcccaaggtcataaaggtatgtggtagccagagtccctgttcggcacagacctgttctttgctgtcctggccagtgttccaggccttggggacatagctggggctgaagcagggctgtttctgccctcaggcagtttacatcctggcagaggggagagctgggcaacagtgagttgcacagacttgtcttattaccgctgtggtatgtgcaggaaggggaggtgctggttctgaggctccagagggcttgtctttttttttttttttttgagacggagtctcgctttgttgcccaggctagagtccagtggcgcgatctcggctcagtgcaagctccgcctcccgggttcaagcgattctcctgcctcagcctccccaatagctgggattacaggcgcatggcaccacgcacggctaattttggtatttttagtagagactgggtttcaccatgttagccaggatggtctcgatctcctgacctcgtgatccacccgcctcggcctcccaaagtgctgggattacgctcccggcctctttttttttttagacagagtctcactctgttgccaggctatagtacagtggcacgatctcagcttactgcaacctccgcctcccaggttcaagcgattgttctccctcagcctcccgagtagctgggactacaggcacacgcccagctaatttttgtatttttagtagagacagggtttcaccgtgttggtcaggctggtctcaaactcctcacctcgtgatctgcctgcctcggcctcccaaagtgctgggattataggcgtgagccactgcgcctggcctttttttttttttggtacagagtttcgctctggttgcccaggctggagtgcaatggcacgatcttggctcactgcagcctctgcctcccgggttcaagcgattctcctgcctcagcctccggagcagctgggattacagacatgcaccaccatgtccggctaatttttttttttcgagatggagtctcactgtgtcacccaggctggagtgcagtggcacaatctcggctcactgcaacctctgcctcccgggttcaagcgattctcctgcctcagcctcctgagtagctgggactacaggtgcctgccaccacacccagctaatttttgtacttttagtagagacggggttttaccatgttggccaggctggtcttgaacttctgacctcaggtgatccacccacctcggtctcccaaagtgctgggattacaggcgtgagccaccgtgcccggccgtggtgtcttgagctgagtgcagaagcgcaaatagggggtaggagaaaatgcaccgcgaggagaaatgtgctgcgggcctgctgtctagctgtgtcatttggtcgttgcggggccctgtgaggccgggagggctgccagcacccaccatgtgccaggcctcgttgctagtgctggggccagttcctgccccggtggagctgccactgaagggggaggcgtaataaacaagataggtgagtgcatatgcagcgtggtctgttgtgctgagggctgaagagaaaccagaagcagggctcagaggccaggaggactctgcaaagggatttggcattatcacagggtggccagggaagatcttcaaggtgacagtgagcagagggaggtgagggagcctgtgtggacttcaggactagagctccaggcagggcctgtttgaggaacatggaggaggcgagagcaaggagtagaggtcaaaaggaggcaagaagcaggggcgtaggcctaggaggacataggttcgctttggcttggactcagagaagggaaatccccagagggttttgagaagaggaggtacaggatgtaatggaggcttaataggaccctcttggctgctgagtcgagaacagactggagcaagcagggacagccaagcgaggggcgaggtgacagtgactatcaggtcaagggtggaagtagttgccaggggcaggaggcggattctggaccttggaggaggtaaagcccaccagaatgtgtcggtggcttggatgtggggtgtgagaggaaccagagattctgcctaggtttcttcttgggcaagtgaacacgtggagtccacgtaggctgtgttcggtccgagatgccttctagacatgcaggatgtcaaggaggcagctggagagatgggtctggagctcacagcaagtccaggctagaggtagaaacgtgagagccccacggctggggaagattgccatgggattggagatgagctccaaggacagccctggcagtctggatggaagagcttgggaagatgctcagaaaccacaaagtggctggtgcggtgggaggaaaaccagagtgtatgctgtcctagaagcaaaagaagaaagtgtttcagtgtttctaggagcaggaagtgatcaacagccttagatcctccttttaggccaagtaacatgaggactaagaattgaccactggatttagcaatgcagaggtccttgtggcccttgatgtcggcagatgagggcagtgtggtccagagatgaggcttggggctgagatgcagccccgctgcctggtccagctcctccctcatccaggcagggctcccccgcccagcagccactcccctccctgcctgctcatggccccctgctctccctttcctccccatacccccagacctgtgcttgcccggggagagtcagggctctcctgtcagctgggtcccctcccagccccgggaggccgccactggagccctgcctcttcctggcagggagcatcgagtacagctgtccggcctccaacgagtgtgagatcaccaagcggagacgcaaggcctgccaggcctgccgcttcaccaagtgcctgcgggtgggcatgctcaaggagggtgagcgctgggcaggggctgggcgagggctgggggagtcggggacccgggccaggtgggggtgaggcctgggagttctggtgagtggactcggggaggacagctctggagagcaagccccaccctgcccacagcaccacagtcacagtcctatctgtcccacaattcaaggagtgcgcctggaccgcgtccggggtgggcggcagaagtacaagcggcggccggaggtggacccactgcccttcccgggccccttccctgctgggcccctggcagtcgctggaggcccccggaagacaggtgagagcactgtgggtacctggggctacgaaaccggaggcctatgtgtggcatcatagttaccttgggcactgggacctgtatttccccttcgtctcttcactcactcatttccccaagacatgtgaaactgccttttcctgcatcaggaaaagtagtagaactgggaacagggacgattttccaacactcacagcctgtccacaaacacacgggctttccctgggagacagttagcgctcttccctggagggaagtcactggacagctgctactgaggaaggccacagggggagccactgtgggaagatgcttgacccctgaggcctgacagattcgagtgctcctgactcttgtcctctaattgtcacagcagccccagtgaatgcactggtgtctcatctgctggtggttgagcctgagaagctctatgccatgcctgaccccgcaggccctgatgggcacctcccagccgtggctaccctctgtgacctctttgaccgagagattgtggtcaccatcagctgggccaagagcatcccaggtaaagggcccaggtgacccggggctgccctgaacgggcccggctctggtgcgcttgctcagccaggcccgctccccgctgccccctaggcttctcatcgctgtcgctgtctgaccagatgtcagtactgcagagcgtgtggatggaggtgctggtgctgggtgtggcccagcgctcactgccactgcaggatgagctggccttcgctgaggacttagtcctggatgaagagggggcacgggcagctggcctgggggaactgggggctgccctgctgcaactagtgcggcggctgcaggccctgcggctggagcgagaggagtatgttctactaaaggccttggcccttgccaattcaggtgagtctggggcaggcactgacaggtgaggtgtctccgtaaggtcttcaggttaactcagtgacggtagcacagccccattttgcagataacgaaaactgaggcttagggaagaacaatgacttgctagaagtcaaaaagcaagccaagtgcaggctccaaactgcacacaggattttgagccctagtgccacactaatgcagaaaggtcatttagtgggagggaaggtggggagggtacaaggtggccacagttgagggagagagggtggggtcctggcccacgagccgcagcaatgagtggtgcctctcagtcagccaatcaacaaatcctcgtttggctcttccttaggccccatccagcagtgctcaagatacggggagtgcccttgccagagatagcccaggccaacaccacattcctctcttcttgcagactctgtgcacatcgaagatgccgaggctgtggagcagctgcgagaagctctgcacgaggccctgctggagtatgaagccggccgggctggccccggagggggtgctgagcggcggcgggcgggcaggctgctgctcacgctaccgctcctccgccagacagcgggcaaagtgctggcccatttctatggggtgaagctggagggcaaggtgcccatgcacaagctgttcttggagatgctcgaggccatgatggactga

SEQ ID NO: 11886 - DNA, 1269 bp, Homo sapiens
atgtccagccaggtggtgggcattgagcctctctacatcaaggcagagccggccagccctgacagtccaaagggttcctcggagacagagaccgagcctcctgtggccctggcccctggtccagctcccactcgctgcctcccaggccacaaggaagaggaggatggggagggggctgggcctggcgagcagggcggtgggaagctggtgctcagctccctgcccaagcgcctctgcctggtctgtggggacgtggcctccggctaccactatggtgtggcatcctgtgaggcctgcaaagccttcttcaagaggaccatccaggggagcatcgagtacagctgtccggcctccaacgagtgtgagatcaccaagcggagacgcaaggcctgccaggcctgccgcttcaccaagtgcctgcgggtgggcatgctcaaggagggagtgcgcctggaccgcgtccggggtgggcggcagaagtacaagcggcggccggaggtggacccactgcccttcccgggccccttccctgctgggcccctggcagtcgctggaggcccccggaagacagccccagtgaatgcactggtgtctcatctgctggtggttgagcctgagaagctctatgccatgcctgaccccgcaggccctgatgggcacctcccagccgtggctaccctctgtgacctctttgaccgagagattgtggtcaccatcagctgggccaagagcatcccaggcttctcatcgctgtcgctgtctgaccagatgtcagtactgcagagcgtgtggatggaggtgctggtgctgggtgtggcccagcgctcactgccactgcaggatgagctggccttcgctgaggacttagtcctggatgaagagggggcacgggcagctggcctgggggaactgggggctgccctgctgcaactagtgcggcggctgcaggccctgcggctggagcgagaggagtatgttctactaaaggccttggcccttgccaattcagactctgtgcacatcgaagatgccgaggctgtggagcagctgcgagaagctctgcacgaggccctgctggagtatgaagccggccgggctggccccggagggggtgctgagcggcggcgggcgggcaggctgctgctcacgctaccgctcctccgccagacagcgggcaaagtgctggcccatttctatggggtgaagctggagggcaaggtgcccatgcacaagctgttcttggagatgctcgaggccatgatggactga

SEQ ID NO: 11887 - DNA, 14373 bp, Homo sapiens
ctgggatagcgatggagacgccgggcgcatcagcgtcgtccttgttgcttcccgccgcgtccaggcccccgaggaagcgcgaggcgggagaggctggggctgcgacgagcaagcagcgggtcctggacgaggaagagtatatcgaggtacgacctcggtgcggacgccggcgacttctgggcccatcctctgcttcaagctcctctcaggttccctctctcgggtgttgacactccgtctcctcgtggaagtggaggagccgggtgtggacggtcccacgagtcaagtaaacagggcagaggaagacgtctgtggtggaagaggctgtagtagtgttgtcagggaaaagagagagcggctctctttgtatgggacgggggtcagggaaagaagattttctgttaaagtgtgagtaggagtttgacaaactggaaggatggtggcaaagagggctttctaaagagcggtggcagcaagtgtgaatgctggggttcctggaaagagaccgcagttgtgacagcatctcgagtgagtggacctgcgtcgccccaccacacgcacacagaaggaggagctgaaacggggattggcggaagtcagtttggttttagacctgtttaattcgggacaccttttgggatatgtagatggatggctttaacggacggttgggtgcccagatatgcagctcgggagcaaggtctggctggaggtgcagacttgggaatctcaacttgtggtagtgactggctgaagttactcaggaaaaaggtttatttttattttattttttgagacggagtctcgctcgtcgtccaggctggagtgcagtggcgcgatctcggcttactgtaaccaacctctgcctcctgggttcaagccattctcctgcctcagcctgccgagtagctgtgactacaggtgcccgccaccacgcccggctaatttttgtatttttagtagtggtggggtttcaccatgttggccaggctggtctcgaactcctgacctcaggtgatccgcccgccttggcctctcaaagtgctgggattacaggcgtgagctaccatgccccgccaggagaaaggtttagattggaaatagaaagtcatgtgtggaatgaaagtgacaacacccacattggtctggcttgtggggagccagcaatggagaatgagaatgaccagttagcaagggcgagagagaagggtttcacggacttcagaagagtgtttagtaatgttagaggttgcagcatggctaccatatgggatgctcaaccccactagaaagtgccctcaagctccctcaatccagccccagtcattggggaagtagaatttgaaggaggttcagcaagttccttagcatgtacagcagtggacctgtgaggcaggagcacccagactgcagctccgactttcttttttcttttttttttttttttttgagacggtctcgctctgtcgcccaggctggagtgcaggggtgtgatcttggctcactgcaacctccgcctcccgagtttaagcgattcttctgcttcagcctcccacgtagctggaattacaggtgcctgccaccacgcccggctaatttttgtatttctagtagagactgggtttcaccatgttggccaggctggtcttgaacttctgacctcatgatccacctcccttggcctcccaaagtgttgggattacaggtgtgagccaccgcgcctggcctctgactttcattctgatctctccttgcagggcctccagacggtcatccaaagggatttctttcctgatgtggagaagctccaggcacagaaggagtacctggaagccgaggagaatggagacttggaacggatgcgccagattgccatcaagtttggctctgccttgggcaagatgtcccgggagcccccgccaccctgtatgaggaccctgtgggtggcggagaggggaaagcctgctgaactgtcgcttcaggctcactctaattcttatccccctctcttcccctagatgtgactccagccacatttgaaacccctgaggtgcatgcaggcactggagtggtgggcaacaagcccaggccccgcggccgaggcctggaggatggtgagtgagggtgccctctttaagtcacatggtcaggattgcctgggaatcttagcctgtgaggccctgagggggtggtccagagggctgcaggccacatcttgttcctgaggggtcttgcgtaaatagcagcctgtgaagtcaaaggacattggtctaggtggtagaacatctgggtccagctcccacacatggctcgcctctgtgaaatgggactctcaccagctcttgctggcttttctgctgtgttccagccctgccctgtgggcttcatggatgttggaaggccccttttgttactatcctgaagatgcctcagggcctctccatttgtttccttcatgttggtcacttcccagataactgcatggctcactgtgtttcttcctgtagatctctgcataggtgttacctgttcagagaaacttttcttgacctgccagtgtgaagtcacaacaccactggtgctctgtggcttccagcctggctttggtttttcatcacaagacattttattttatttaatttcattttatttttaattttttgacacagagtctcgctctgtcacccaggctggagtaaaatggtgtgatcccggctcactgcaacctccacctcccaggttcaagcaattctccctgccttagcctcccaaatagctgggattacaggcgcctgccaccactcctggctaatttttgtattttgtagtagagacgaggttttgccatgttgtcccggctagtcttgaactcctgacctcaggtgatctgtctgcctcggccccccaaagtgctggtattacaggtgtgagccaccgcgcctggccaagacataacgttttaaaggcatttctgtttatggtctctttccctaattggcatcccttgcacaagagcagaagctttgttttgctttcatctgtatgctccgtgttgggaacagcacatgtggtgttgtgggccttgcacagatacacatggaacagatgaaagagttgtcatcttcagcatgtttgctgggacacacagctctatatggtaacatcgtgacttgatgggggagtcggtttaggaaagggcactccgagtcctgttgaatgcaagtgttctgcacgccatgggacttctgcgttgtcaggccctcttttcatcagtagtagaatgtcagtgcatgtatagacaaacgagacactctttcttatcagtttgtagactccactgtgctggagtagcacagatgtgttgtgtgtttgcacaaacatgcaaacatgatactttttgctttacaatccagctttttcggccattaacacagtccttgttgtccttgaagcttgattatctgttgaaatgtagcttgtgcatcacagggcaatttgtagatttttttcttctccttttttttttttttcctatagagatgaggtttcattatgttgcccaggctggttttaaacttctgagctcaagtgatcctcccaccttggcctcccgaagtgctaggattacaagtgtgagccatcatgcctagccagtttgcagattttcaatacctgtacacctacatgccagtaaatataggaatccttttcagaacctaagtggtaggaaccatcatcatgtttacaggtgaggaaactgaggctcagaaaggcagtcacttctgcaggtctcagagatggtcagggtttcacttcttatctctctgagatgaatagagtttctgacccctgtcctcatcccgtgggtcttgagcttgtagccactgtgccttgtgcatagcctcacgtgtagcaggtggtcaggactgtcactagacttgaaggcagagctctccaggtggccccaccgaagtttgcaccaccacacgcagcaccagggcaccacctcagtgggagtaccactttccatggtggcagggttggtcggaggggggggtgtttggggttgtggcttagcacctgtgaggccccatccagaggactaagtcatatgagatccctggaattggggctcgctctcaggtcaggatgattaggcgatgaccacccacctgtagtacaggtaccaggaagagaagagtgggtaaggtaaggaaatcctagggagtgagggagagccccagggatttggaggcctggcacccacaggcctggcaccactttggtgggggaggagcctgcctgtgatcacgagctcttgctctaacacctgtattgctttctccagtctgaatcagaccacgtaattcccttggcatccagcacatgagcagagctggccctgaatctgtagggtaccacctgagggctctctgggcagtcagggtgggtggattctgcccccgtggggagtccttggcagtgtgggctttcatgggcagaagccaggaccaggggagaggattccagccctgcatgttgggggctatgattcctgggcctgggtgtcctcctctttcctgactgcaaagggtgctgtgttcctcctcccgcaacccctaagcaggagaggctggagaggaggaggagaaggagccgctgcccagcctagatgtcttcctgagccgctacacgagtgaggacaatgcctccttccaggagatcatggaggtggccaaggagagaagccgggcacgccacgcttggctctaccaggctgaggaagagtttgagaaggtgtctctggggtctggggtgtcacataggcgtaggcaccctctgtggtggttggggagccccagggccatgggtacaatgcccaggggcatctctgaccatcacttttccccatgtgattgcagaggcagaaagataatctcgaactcccgtcagcagagcaccaggccatcgagagcagccaggccagtgtggagacctggaagtacaaggccaagaattccctcatgtactatccagagggtaagtggcgggcctcgcagccaaatggggaggtgttgggtagagctgtgtgtgtctggctgtgtttggagcagccttccaggtgtgtatggccgtgcccccttgcagtttgggcttctgatgggtactggtctgtctaagggtggacaggtctgtgtgaggtcagcagtgagtgagaccctctccagcggcactggggcctgcgttctgctcaatgcttttgttcatctgggagtgacttggccgagaagcgagctcctcatgctccttaggctgctgcccttctgacacctgctgctacctttgcttcgtctgccaggtgtccctgacgaggagcagctgtttaagaagccccggcaggtggtacataagaacacgcgcttccttagggaccccttcagccaagccctgagcaggtgccagctccagcaggcagccgccctcaatgcccaggtgagcaggcgggtcagcagggccgcatgggccaggttggacagggctgcctgggggcaggcatgatctctcccatctctttgagcttggcagagctcagtgagtggaaccatctggggccctgtgcggcaggatcctgagtctttccttggccccagtgggcttccattgaacactgccttggtcacacacgttctgtaggtccagatctgtgccagctcccttgatggcaggggcaggagagaaaagggactgctgggagtgagcccaggctggcagctgcacgcccacacaccgggcagggaagccagagagccgcagagggagcccagccccagggggtggctggggtgggacaggccctgggttggcagagagcagaggctttctgagtctgggagcaagacgagtagatactctctgatggtgactgtggcagtcacagggttgaagtggggaaggcaggaagagactagagcataagcattgcctgtcatcagcattgcctgtcatcagcattgccccctgcaggggcctggcgtcagcatcctctggagttgctgggataggcgcagctcgagtggaggccctggcacctccctggatgggaggagggggctttccttgcttgggtacccactttgacaggccctcaaggtcttttggggggttggggcaggggccctccctctctttctccaagaaggctgccaaccccagagccccagccttgccctgaggagaggaagtgtttccagcatgttcccacgtgtttgcccaccggccagctgtcgagcgtgggctgcggtccccctgatgccagcctctctgcttgttccagcacaaacagggcaaggtgggccccgatggcaaggagctgatcccccaggagtcccctcgagtgggtggatttggatttgttgccactccttcccctgcccctggtgagaaaagtgcccactggcaagtgggtctactgctgggactccctgggggaggtgggcttctcagtcggccctggccactcctggcctctacctggcctgccccacaccttgtgtaactcagggacctggtctcctgtctgtacaaggccctagaggccaggtgtccaggctgcttggggccgtgggtgggctggactctcaggcagacctggcctgagacatcctgggatgacgtgtcctgtcctggtccttactgtgatgtcagtgggtgggggtgtgtgcacagtgcttatgagtctaagtctacctagcactgcagggagggaggcccagcacctcagtggaggtgaaactcaggtggtcttgtggcatgcgtgggtgtccctctgcactctggcctctgtgctcttgggtgctggtgctgtgtcacacgccagggcatgtgaaggcaccacaggtttgcctggggttctaggaggtttgggagccctggaaggcctgagtgtctcctcctgcgtggctgggggagacctcccagaggcttgtaggctaagcacatggctgtagggccttgagcctgcctcgggcctgctgggagcttggcatttccctttcggaggatggaggtgccagggttccagagtcctggggaaggagagagggctagctgcctgccttcgtattagctgggatgcacattgggtgaacaagctgtgactggaggggagggtggtggggagtcctctggcctgaggtggttttgggctctttgtctgcaggtgtgaacgagtccccgatgatgacctggggggaggttgagaacacacccttgagagttgaagggtcggaaacgccctacgtggacaggacacccggcccagcttttaaggtgggttgtggtgatgggggaactgtgtgcgaccggggtggacacctctggagccctgagtgcctgtggctcaggactgagcactgggatcggcccccagctgctgacgggcagagtgctggcttttctgaatgccagggtgctgaaggcaggtgtgggtgggtggacctgtcacagagggatttgggggtgtaagggctgagacaccaaggcagggagtggcttgggccctctggatcctggaggccgggtgctgttcatgaatgaggcaggatggtcacagacacgtgaggagctctgcaggcctgagggccataggacgaggctgtgtgcttgtagagaaggcccctggttacagaacacgattgggacacgctggattacacggctcaagcctggtgttgtaggagtggtcagggtggagtgtgtgaggcccggcacagaccaggggaggctcttcgtgggctgggtcagatacaacaggcctccccataccactgcgggcctttccccagaatacttagtacaggtaacccatgtccagacaaaacatggggagaggttctggttaccttggttctaaattgtctgggacacaaggataaccaaggcaaacgtgcgagagggataatgaagaggatgccgtgctgtccaatgtgagagcgcaaggcaagggctgaggtgcttctgaggtatgcctgccactgcttcccgagtctccaggccaacagtaaacagataaattctgaaacaaaccatgatccaagtcagaatttggggcccgataaagatggcaactcagattgcactgaatagcagagtatttagaaatgaagggagctgggtcctcaggatgtgtagcagcatacattgtggaaaggtgaaaaggttacatgtaaaaacaataaccataaaacaaccagaagaaaatagtggcgaatatttagtttgatttttgggttcaagtgattctcctgcctcaacctcccaagtaactgggactagaaaatagtggcgaatatttagtttgatttttgggttcaagtgattctcctgcctcaacctcccaagtaactgggactacaggcgcgtgccaccacgcccggcttatttttgtatttttagtagagatggggtttcaccatgttggccagactggtctcgaactccttggccagactggtttcgaactcctgacctcgtgatccacccacctcagcctcccaaagtgctgggattacaggcgtgagccactgtgcctcgcctcttttttttttttttttttttttttaacagatagggtttcactctgttgcccaggctggagaacagtggtgcaatcatagctgattgtaacattgagctcctgggctcaaatgaccttccagcctcagcctcctgtgtagctgggactaacagcatacaccaccatgcccagctaattttgtgtgtgtgtgtgtagaaatgaggtcttgtcattttgctcaggctggtctccaatgcctgagctcaagtgatcctcccaccttggcctcccaaagtgctgaggttccaggtgtgagccaccactcccagcctgtagtctaatcttaagttaggagggactttctaaacataaaagcaaaggaagaaatcacaaatgaaaataacaaatacagcagaaaatgttataaatgaaacaaatgtaaatgagtgaaaaaacatgtgcacagcgtagcacagttgacttgacacaaggtcttggcaagggtcttctgagtaacagcagcagaaaaggaaaatgagccccttgagagcaaaataggccacaggcacacggggaagcgcccgaaatacagagcgccgataaagacagagatgttcactctgataatcagggaaacactaaaacagactgctttttcctgagagattgtcagaggtcatggttttgggaggaacacgaagacaggtgaggagtgctgcgccttgggcaggtcaggtggggtttggggctttccaggggcttttagtgggaggtgatgggttgtgggggttttgtaggcaacaaagagaggctggcacccaccacagtggctttctgtgtgaggggctgcctggcgtgtggcaggcctggcgcagctacccacacacctgctaccttgtagatcctggagccaggccgcagggagcggctgggtctgaagatggccaacgaggccgctgccaagaaccgggccaagaagcaggaagccttgcggagagtgacggagaatctggccaggtgaggggccgcctggctggtggggaagtgcgagggtggctctggcctgctcctgttcggcccctgccctgaccgtgtggaggcatggcccacgcggcagagtccagggcaggtccgcggggttctgcagtgggtactgtggcagctcctctatccagagcatggccgcacatggacaggatgagaggccccctccatcttctctttcctccacgtcctctttgacccgtccctaagaggcatctttaggcgtgtggtcctgctgggagctttcatcagccctgtggagagagtcatcgttccccttggagaggggtggggactccaactctcagaggcctgggggtgcaccccagcccccacagccaagggcggtgctgctgtttgacctcaggtttgacctgagcgctgctgtttgacctcagggatcccccgcatttgctgccatgctggcagtaccatcctcctcagctcagagtgactgtgtctctgcccaggctcttcctgggagccaagggaggccctgctgccggcagctctcagcccacctaaccctgcctctctcacccattcctccaccccagcctcacccccaaaggcctgagcccagccatgtcgccagccctacagcgccttgtgagcaggacggccagcaagtacacagaccgggccctgcgggccagctacacaccatccccagcacgctccacccacctcaagaccccggccagtgggctgcagacccccacaagcacaccggcgcctggctctgccacacgcacccctctcacacaggacccggcctccatcacggacaacctgctgcagctccctgcccggcgcaaagcttcggacttcttttagagccaggcctgggctgggctcatagacgcttcacagagcctgcagggcagctgtacacccagcagaggactccagccttctcggggcccaggcctgggccagaagctgttgaccataccaggagtcactggagaaaggggctgtgctggggccagactggcacaaggcactcgtgcccacaccacaccccagggccttgccaagctgtttgctgtttaattggccccttgaactgtcattaaagaacacctaggtacagtctggggggttgcctctccatcttgctccccacacgagccctagccttgccctggggcctgcatcacgtctcaggactgcggggcttgaagcgaggggccccccaggtgaggaagctgcaggtggggcggctgtgggagcaccgggtgactggcgttgctttctgcggcactcggaacctgtgttctgagttgagctcacatcctgcagtgctttctgcttctctggggggatatgaaggagaaacggagcccttggaagttgtacccttaggttcccctgcggttctgggcccaggtctgcagcctccactctgggcttgccggctgtgaggtgcgctggttataggactgtgtgggggctgcatatcaggtgatctcagctatcaccttctcccagcacctggcttccagctcatggggtgggactatcccactcacccctctgctataggcactgcccatcttatgctgctggccctggcctcacctggtcacttccaccaacaggagctcccagataacagtgggttgctggacagatcaggctgggactcttaaggggtgggggacgtggggccttcagtgctttatcccctaggaaagggtgcacgttatcccaagggagcccccaggaagtggggagggaggggggaggagcatgtctaggtgctgaccacctggagcacttggccagcaagtgggccgcatgctttgggagcaatgggtgacccagcaggaagcacaaaagaccggccagtgtgccatcatcaagggctgctgagcagcttgaagagccactgggtggggagggcacacggggaggtctcagctggggctgcccctggaggacagggcagggaacttgagggctgaggacagaaatctcacatgactccaggaaatagaggaagaggaggatgctgagcgagggattgtgagggagtgggggtaggtcagagggggctgaactgcaggaagccagggggagtcgtggaccactggagctggccagccccagggcattggggacaaggccaggtcagagggagacagtgtgggcctggtgggtggaccctggcagaggccctcttgtcccccacaaggccaggccacactgtgattctgcctgtacctgagcatctgtcctgtgctcctaggccggagaccactgtgtgtcaggtggggcggttggctgagtcccagagaaaaacactcctcactgggcactcttgatgcttgcacacaccctgtggtttatttggtggtcagtaaggaacgtctttgctgctaagtggaagaaagctaatggaacgtaatcaaaatagtggtttaattgacgaattttacttgcacctgtgccttcttcagatcctacctgcctacttagtttacgtgaaggccgactgcaccatgccccccaaccccgacccccaccacacacaacggggccattgtcatgctaggtgcttgctttccccacctcagctccggagatgtgatggtctttggccctggaggtctcggccagcctgtcctccatcctgttctcgttctcgggcaccaccagcagccggtgctgggttttggctccaagcttgtggtcgggccggtggtcgggcctcaagcctgtcttggtgtccagtttgcactcagcgcggtacttgccctccccctccctcttgaaggaggcagaagacgtggctttgggcttggggggctgcagccacgagtggctgaggatctcatcgatgtggagccgctggctgacgtcgggctgcagcatgcggtagatgaggtccttgcactcgcaggtcaggttcttggagcgcgggaagtccacacggtgctccttctggatacgcagcatcttcctgatgtcggagtcgtcatagggcatggagccgcagaccatgatgtacaggatcacgcccaggctccagatgtcatacaccttgggctggtaggggatgctctgcagcacctcgggggctgcatatgctgccgacccgcagaaggtcttgctgaggatgatgcgcccattgctgtcccgcaggcagcgcttggagaagccaaagtcagacagcttgatgttgaagtccttgtcgaggagaaggttctcgcacttgaggtcccggtggacgatgtccaggtcgtggcagtacttgacggcggaggagagctgtcggaacatcttgcgtgccacgtcctcatgcagggctccctggcacttgatgaactcgaggaggtcgccctggacgccaagctccatgatgatgtagatccgtccgtcagaggtctcaaagatctcgtaagtcttgatgatggagccgtggttgacagttgccaggatgtccatctcccgaggaaggaatctctccacaaagtcagtaggtgttttcttgcggtcgatgatcttgacagccacattgaacttgaggcgctcagagtaggcagatttgacttttgcgtaggaacccttgccaagattgatgcctacgatgtaacccttcttccttaggactgtggcatcgtccatggtgccaggagcgactggcgccgctgccgtctacatccccccgtcatgtgggccagcaggcattgtcctcatttacactaccggaggcgtctggctgggctgccctgggctgggcttcgactcaggggtggaacactcagcattgtctccgggtgacttcagccaatgaactcataaagccaaggagtgggggcggggactgggctgagggagaacagggtctctggaaccgtggaagccaggctggtctggcaggagcacccactccccgcccgctggaaggaagcctgtccccaggacaggactctggtggccctgctgctgctgcattggtttccctgtcacaagtcaagctggaggggaggcggcccacgtccagcctgtttgcatcacctggctgtggggactgaccctgcattggtctttgtcccactagggtgggtttcctgcagcttctttggctatgaagaaaagcacccccagggctgtgtccttggtgtggtaggacagttgtccctgacagtcacccagacaggcctgcatagcaccccagttacacagacagatttccacagcactgccttaccattgagcacatagttaaatctagggaaatcagtgcccagacatcaaagctagaaatgaaacatggtcagcaggagccttgcatgggcttctcttttgctggagcaagccaaaataataggaacggttttacattcctagtgccaggacccatctcgggtcgacaaaatctgaagacaagttaagggaacaggcagctgtttgaatagatcaattggatagtctaaggcagctctctggaccaagctgtaaaggagatacaatcgaaataatcactccggtaccacagtagacaggccttgaaggcactgggccccttttaatcggacttagcaagcattttttttgcctctgaccttctccttggaacaaaattagttaccagtagacttaggtgattgctgtactgcatgtaggcacataaccccaacctatataaacagtaagaaaattgtagcactttgagttggtctgctggaattatctccagccttctccctgtatccagttacagtgataaactcccttctttccta

SEQ ID NO: 11888 - DNA, 5359 bp, Homo sapiens
ctgggatagcgatggagacgccgggcgcatcagcgtcgtccttgttgcttcccgccgcgtccaggcccccgaggaagcgcgaggcgggagaggctggggctgcgacgagcaagcagcgggtcctggacgaggaagagtatatcgagggcctccagacggtcatccaaagggatttctttcctgatgtggagaagctccaggcacagaaggagtacctggaagccgaggagaatggagacttggaacggatgcgccagattgccatcaagtttggctctgccttgggcaagatgtcccgggagcccccgccaccctatgtgactccagccacatttgaaacccctgaggtgcatgcaggcactggagtggtgggcaacaagcccaggccccgcggccgaggcctggaggatggagaggctggagaggaggaggagaaggagccgctgcccagcctagatgtcttcctgagccgctacacgagtgaggacaatgcctccttccaggagatcatggaggtggccaaggagagaagccgggcacgccacgcttggctctaccaggctgaggaagagtttgagaagaggcagaaagataatctcgaactcccgtcagcagagcaccaggccatcgagagcagccaggccagtgtggagacctggaagtacaaggccaagaattccctcatgtactatccagagggtgtccctgacgaggagcagctgtttaagaagccccggcaggtggtacataagaacacgcgcttccttagggaccccttcagccaagccctgagcaggtgccagctccagcaggcagccgccctcaatgcccagcacaaacagggcaaggtgggccccgatggcaaggagctgatcccccaggagtcccctcgagtgggtggatttggatttgttgccactccttcccctgcccctggtgtgaacgagtccccgatgatgacctggggggaggttgagaacacacccttgagagttgaagggtcggaaacgccctacgtggacaggacacccggcccagcttttaagatcctggagccaggccgcagggagcggctgggtctgaagatggccaacgaggccgctgccaagaaccgggccaagaagcaggaagccttgcggagagtgacggagaatctggccagcctcacccccaaaggcctgagcccagccatgtcgccagccctacagcgccttgtgagcaggacggccagcaagtacacagaccgggccctgcgggccagctacacaccatccccagcacgctccacccacctcaagaccccggccagtgggctgcagacccccacaagcacaccggcgcctggctctgccacacgcacccctctcacacaggacccggcctccatcacggacaacctgctgcagctccctgcccggcgcaaagcttcggacttcttttagagccaggcctgggctgggctcatagacgcttcacagagcctgcagggcagctgtacacccagcagaggactccagccttctcggggcccaggcctgggccagaagctgttgaccataccaggagtcactggagaaaggggctgtgctggggccagactggcacaaggcactcgtgcccacaccacaccccagggccttgccaagctgtttgctgtttaattggccccttgaactgtcattaaagaacacctaggtacagtctggggggttgcctctccatcttgctccccacacgagccctagccttgccctggggcctgcatcacgtctcaggactgcggggcttgaagcgaggggccccccaggtgaggaagctgcaggtggggcggctgtgggagcaccgggtgactggcgttgctttctgcggcactcggaacctgtgttctgagttgagctcacatcctgcagtgctttctgcttctctggggggatatgaaggagaaacggagcccttggaagttgtacccttaggttcccctgcggttctgggcccaggtctgcagcctccactctgggcttgccggctgtgaggtgcgctggttataggactgtgtgggggctgcatatcaggtgatctcagctatcaccttctcccagcacctggcttccagctcatggggtgggactatcccactcacccctctgctataggcactgcccatcttatgctgctggccctggcctcacctggtcacttccaccaacaggagctcccagataacagtgggttgctggacagatcaggctgggactcttaaggggtgggggacgtggggccttcagtgctttatcccctaggaaagggtgcacgttatcccaagggagcccccaggaagtggggagggaggggggaggagcatgtctaggtgctgaccacctggagcacttggccagcaagtgggccgcatgctttgggagcaatgggtgacccagcaggaagcacaaaagaccggccagtgtgccatcatcaagggctgctgagcagcttgaagagccactgggtggggagggcacacggggaggtctcagctggggctgcccctggaggacagggcagggaacttgagggctgaggacagaaatctcacatgactccaggaaatagaggaagaggaggatgctgagcgagggattgtgagggagtgggggtaggtcagagggggctgaactgcaggaagccagggggagtcgtggaccactggagctggccagccccagggcattggggacaaggccaggtcagagggagacagtgtgggcctggtgggtggaccctggcagaggccctcttgtcccccacaaggccaggccacactgtgattctgcctgtacctgagcatctgtcctgtgctcctaggccggagaccactgtgtgtcaggtggggcggttggctgagtcccagagaaaaacactcctcactgggcactcttgatgcttgcacacaccctgtggtttatttggtggtcagtaaggaacgtctttgctgctaagtggaagaaagctaatggaacgtaatcaaaatagtggtttaattgacgaattttacttgcacctgtgccttcttcagatcctacctgcctacttagtttacgtgaaggccgactgcaccatgccccccaaccccgacccccaccacacacaacggggccattgtcatgctaggtgcttgctttccccacctcagctccggagatgtgatggtctttggccctggaggtctcggccagcctgtcctccatcctgttctcgttctcgggcaccaccagcagccggtgctgggttttggctccaagcttgtggtcgggccggtggtcgggcctcaagcctgtcttggtgtccagtttgcactcagcgcggtacttgccctccccctccctcttgaaggaggcagaagacgtggctttgggcttggggggctgcagccacgagtggctgaggatctcatcgatgtggagccgctggctgacgtcgggctgcagcatgcggtagatgaggtccttgcactcgcaggtcaggttcttggagcgcgggaagtccacacggtgctccttctggatacgcagcatcttcctgatgtcggagtcgtcatagggcatggagccgcagaccatgatgtacaggatcacgcccaggctccagatgtcatacaccttgggctggtaggggatgctctgcagcacctcgggggctgcatatgctgccgacccgcagaaggtcttgctgaggatgatgcgcccattgctgtcccgcaggcagcgcttggagaagccaaagtcagacagcttgatgttgaagtccttgtcgaggagaaggttctcgcacttgaggtcccggtggacgatgtccaggtcgtggcagtacttgacggcggaggagagctgtcggaacatcttgcgtgccacgtcctcatgcagggctccctggcacttgatgaactcgaggaggtcgccctggacgccaagctccatgatgatgtagatccgtccgtcagaggtctcaaagatctcgtaagtcttgatgatggagccgtggttgacagttgccaggatgtccatctcccgaggaaggaatctctccacaaagtcagtaggtgttttcttgcggtcgatgatcttgacagccacattgaacttgaggcgctcagagtaggcagatttgacttttgcgtaggaacccttgccaagattgatgcctacgatgtaacccttcttccttaggactgtggcatcgtccatggtgccaggagcgactggcgccgctgccgtctacatccccccgtcatgtgggccagcaggcattgtcctcatttacactaccggaggcgtctggctgggctgccctgggctgggcttcgactcaggggtggaacactcagcattgtctccgggtgacttcagccaatgaactcataaagccaaggagtgggggcggggactgggctgagggagaacagggtctctggaaccgtggaagccaggctggtctggcaggagcacccactccccgcccgctggaaggaagcctgtccccaggacaggactctggtggccctgctgctgctgcattggtttccctgtcacaagtcaagctggaggggaggcggcccacgtccagcctgtttgcatcacctggctgtggggactgaccctgcattggtctttgtcccactagggtgggtttcctgcagcttctttggctatgaagaaaagcacccccagggctgtgtccttggtgtggtaggacagttgtccctgacagtcacccagacaggcctgcatagcaccccagttacacagacagatttccacagcactgccttaccattgagcacatagttaaatctagggaaatcagtgcccagacatcaaagctagaaatgaaacatggtcagcaggagccttgcatgggcttctcttttgctggagcaagccaaaataataggaacggttttacattcctagtgccaggacccatctcgggtcgacaaaatctgaagacaagttaagggaacaggcagctgtttgaatagatcaattggatagtctaaggcagctctctggaccaagctgtaaaggagatacaatcgaaataatcactccggtaccacagtagacaggccttgaaggcactgggccccttttaatcggacttagcaagcattttttttgcctctgaccttctccttggaacaaaattagttaccagtagacttaggtgattgctgtactgcatgtaggcacataaccccaacctatataaacagtaagaaaattgtagcactttgagttggtctgctggaattatctccagccttctccctgtatccagttacagtgataaactcccttctttccta

SEQ ID NO: 11889 - DNA, 10748 bp, Homo sapiens
cctgtgacgcgcctgctgggcccgagctttttcctgggatagcgatggagacgccgggcgcatcagcgtcgtccttgttgcttcccgccgcgtccaggcccccgaggaagcgcgaggcgggagaggctggggctgcgacgagcaagcagcgggtcctggacgaggaagagtatatcgaggtacgacctcggtgcggacgccggcgacttctgggcccatcctctgcttcaagctcctctcaggttccctctctcgggtgttgacactccgtctcctcgtggaagtggaggagccgggtgtggacggtcccacgagtcaagtaaacagggcagaggaagacgtctgtggtggaagaggctgtagtagtgttgtcagggaaaagagagagcggctctctttgtatgggacgggggtcagggaaagaagattttctgttaaagtgtgagtaggagtttgacaaactggaaggatggtggcaaagagggctttctaaagagcggtggcagcaagtgtgaatgctggggttcctggaaagagaccgcagttgtgacagcatctcgagtgagtggacctgcgtcgccccaccacacgcacacagaaggaggagctgaaacggggattggcggaagtcagtttggttttagacctgtttaattcgggacaccttttgggatatgtagatggatggctttaacggacggttgggtgcccagatatgcagctcgggagcaaggtctggctggaggtgcagacttgggaatctcaacttgtggtagtgactggctgaagttactcaggaaaaaggtttatttttattttattttttgagacggagtctcgctcgtcgtccaggctggagtgcagtggcgcgatctcggcttactgtaaccaacctctgcctcctgggttcaagccattctcctgcctcagcctgccgagtagctgtgactacaggtgcccgccaccacgcccggctaatttttgtatttttagtagtggtggggtttcaccatgttggccaggctggtctcgaactcctgacctcaggtgatccgcccgccttggcctctcaaagtgctgggattacaggcgtgagctaccatgccccgccaggagaaaggtttagattggaaatagaaagtcatgtgtggaatgaaagtgacaacacccacattggtctggcttgtggggagccagcaatggagaatgagaatgaccagttagcaagggcgagagagaagggtttcacggacttcagaagagtgtttagtaatgttagaggttgcagcatggctaccatatgggatgctcaaccccactagaaagtgccctcaagctccctcaatccagccccagtcattggggaagtagaatttgaaggaggttcagcaagttccttagcatgtacagcagtggacctgtgaggcaggagcacccagactgcagctccgactttcttttttcttttttttttttttttttgagacggtctcgctctgtcgcccaggctggagtgcaggggtgtgatcttggctcactgcaacctccgcctcccgagtttaagcgattcttctgcttcagcctcccacgtagctggaattacaggtgcctgccaccacgcccggctaatttttgtatttctagtagagactgggtttcaccatgttggccaggctggtcttgaacttctgacctcatgatccacctcccttggcctcccaaagtgttgggattacaggtgtgagccaccgcgcctggcctctgactttcattctgatctctccttgcagggcctccagacggtcatccaaagggatttctttcctgatgtggagaagctccaggcacagaaggagtacctggaagccgaggagaatggagacttggaacggatgcgccagattgccatcaagtttggctctgccttgggcaagatgtcccgggagcccccgccaccctgtatgaggaccctgtgggtggcggagaggggaaagcctgctgaactgtcgcttcaggctcactctaattcttatccccctctcttcccctagatgtgactccagccacatttgaaacccctgaggtgcatgcaggcactggagtggtgggcaacaagcccaggccccgcggccgaggcctggaggatggtgagtgagggtgccctctttaagtcacatggtcaggattgcctgggaatcttagcctgtgaggccctgagggggtggtccagagggctgcaggccacatcttgttcctgaggggtcttgcgtaaatagcagcctgtgaagtcaaaggacattggtctaggtggtagaacatctgggtccagctcccacacatggctcgcctctgtgaaatgggactctcaccagctcttgctggcttttctgctgtgttccagccctgccctgtgggcttcatggatgttggaaggccccttttgttactatcctgaagatgcctcagggcctctccatttgtttccttcatgttggtcacttcccagataactgcatggctcactgtgtttcttcctgtagatctctgcataggtgttacctgttcagagaaacttttcttgacctgccagtgtgaagtcacaacaccactggtgctctgtggcttccagcctggctttggtttttcatcacaagacattttattttatttaatttcattttatttttaattttttgacacagagtctcgctctgtcacccaggctggagtaaaatggtgtgatcccggctcactgcaacctccacctcccaggttcaagcaattctccctgccttagcctcccaaatagctgggattacaggcgcctgccaccactcctggctaatttttgtattttgtagtagagacgaggttttgccatgttgtcccggctagtcttgaactcctgacctcaggtgatctgtctgcctcggccccccaaagtgctggtattacaggtgtgagccaccgcgcctggccaagacataacgttttaaaggcatttctgtttatggtctctttccctaattggcatcccttgcacaagagcagaagctttgttttgctttcatctgtatgctccgtgttgggaacagcacatgtggtgttgtgggccttgcacagatacacatggaacagatgaaagagttgtcatcttcagcatgtttgctgggacacacagctctatatggtaacatcgtgacttgatgggggagtcggtttaggaaagggcactccgagtcctgttgaatgcaagtgttctgcacgccatgggacttctgcgttgtcaggccctcttttcatcagtagtagaatgtcagtgcatgtatagacaaacgagacactctttcttatcagtttgtagactccactgtgctggagtagcacagatgtgttgtgtgtttgcacaaacatgcaaacatgatactttttgctttacaatccagctttttcggccattaacacagtccttgttgtccttgaagcttgattatctgttgaaatgtagcttgtgcatcacagggcaatttgtagatttttttcttctccttttttttttttttcctatagagatgaggtttcattatgttgcccaggctggttttaaacttctgagctcaagtgatcctcccaccttggcctcccgaagtgctaggattacaagtgtgagccatcatgcctagccagtttgcagattttcaatacctgtacacctacatgccagtaaatataggaatccttttcagaacctaagtggtaggaaccatcatcatgtttacaggtgaggaaactgaggctcagaaaggcagtcacttctgcaggtctcagagatggtcagggtttcacttcttatctctctgagatgaatagagtttctgacccctgtcctcatcccgtgggtcttgagcttgtagccactgtgccttgtgcatagcctcacgtgtagcaggtggtcaggactgtcactagacttgaaggcagagctctccaggtggccccaccgaagtttgcaccaccacacgcagcaccagggcaccacctcagtgggagtaccactttccatggtggcagggttggtcggaggggggggtgtttggggttgtggcttagcacctgtgaggccccatccagaggactaagtcatatgagatccctggaattggggctcgctctcaggtcaggatgattaggcgatgaccacccacctgtagtacaggtaccaggaagagaagagtgggtaaggtaaggaaatcctagggagtgagggagagccccagggatttggaggcctggcacccacaggcctggcaccactttggtgggggaggagcctgcctgtgatcacgagctcttgctctaacacctgtattgctttctccagtctgaatcagaccacgtaattcccttggcatccagcacatgagcagagctggccctgaatctgtagggtaccacctgagggctctctgggcagtcagggtgggtggattctgcccccgtggggagtccttggcagtgtgggctttcatgggcagaagccaggaccaggggagaggattccagccctgcatgttgggggctatgattcctgggcctgggtgtcctcctctttcctgactgcaaagggtgctgtgttcctcctcccgcaacccctaagcaggagaggctggagaggaggaggagaaggagccgctgcccagcctagatgtcttcctgagccgctacacgagtgaggacaatgcctccttccaggagatcatggaggtggccaaggagagaagccgggcacgccacgcttggctctaccaggctgaggaagagtttgagaaggtgtctctggggtctggggtgtcacataggcgtaggcaccctctgtggtggttggggagccccagggccatgggtacaatgcccaggggcatctctgaccatcacttttccccatgtgattgcagaggcagaaagataatctcgaactcccgtcagcagagcaccaggccatcgagagcagccaggccagtgtggagacctggaagtacaaggccaagaattccctcatgtactatccagagggtaagtggcgggcctcgcagccaaatggggaggtgttgggtagagctgtgtgtgtctggctgtgtttggagcagccttccaggtgtgtatggccgtgcccccttgcagtttgggcttctgatgggtactggtctgtctaagggtggacaggtctgtgtgaggtcagcagtgagtgagaccctctccagcggcactggggcctgcgttctgctcaatgcttttgttcatctgggagtgacttggccgagaagcgagctcctcatgctccttaggctgctgcccttctgacacctgctgctacctttgcttcgtctgccaggtgtccctgacgaggagcagctgtttaagaagccccggcaggtggtacataagaacacgcgcttccttagggaccccttcagccaagccctgagcaggtgccagctccagcaggcagccgccctcaatgcccaggtgagcaggcgggtcagcagggccgcatgggccaggttggacagggctgcctgggggcaggcatgatctctcccatctctttgagcttggcagagctcagtgagtggaaccatctggggccctgtgcggcaggatcctgagtctttccttggccccagtgggcttccattgaacactgccttggtcacacacgttctgtaggtccagatctgtgccagctcccttgatggcaggggcaggagagaaaagggactgctgggagtgagcccaggctggcagctgcacgcccacacaccgggcagggaagccagagagccgcagagggagcccagccccagggggtggctggggtgggacaggccctgggttggcagagagcagaggctttctgagtctgggagcaagacgagtagatactctctgatggtgactgtggcagtcacagggttgaagtggggaaggcaggaagagactagagcataagcattgcctgtcatcagcattgcctgtcatcagcattgccccctgcaggggcctggcgtcagcatcctctggagttgctgggataggcgcagctcgagtggaggccctggcacctccctggatgggaggagggggctttccttgcttgggtacccactttgacaggccctcaaggtcttttggggggttggggcaggggccctccctctctttctccaagaaggctgccaaccccagagccccagccttgccctgaggagaggaagtgtttccagcatgttcccacgtgtttgcccaccggccagctgtcgagcgtgggctgcggtccccctgatgccagcctctctgcttgttccagcacaaacagggcaaggtgggccccgatggcaaggagctgatcccccaggagtcccctcgagtgggtggatttggatttgttgccactccttcccctgcccctggtgagaaaagtgcccactggcaagtgggtctactgctgggactccctgggggaggtgggcttctcagtcggccctggccactcctggcctctacctggcctgccccacaccttgtgtaactcagggacctggtctcctgtctgtacaaggccctagaggccaggtgtccaggctgcttggggccgtgggtgggctggactctcaggcagacctggcctgagacatcctgggatgacgtgtcctgtcctggtccttactgtgatgtcagtgggtgggggtgtgtgcacagtgcttatgagtctaagtctacctagcactgcagggagggaggcccagcacctcagtggaggtgaaactcaggtggtcttgtggcatgcgtgggtgtccctctgcactctggcctctgtgctcttgggtgctggtgctgtgtcacacgccagggcatgtgaaggcaccacaggtttgcctggggttctaggaggtttgggagccctggaaggcctgagtgtctcctcctgcgtggctgggggagacctcccagaggcttgtaggctaagcacatggctgtagggccttgagcctgcctcgggcctgctgggagcttggcatttccctttcggaggatggaggtgccagggttccagagtcctggggaaggagagagggctagctgcctgccttcgtattagctgggatgcacattgggtgaacaagctgtgactggaggggagggtggtggggagtcctctggcctgaggtggttttgggctctttgtctgcaggtgtgaacgagtccccgatgatgacctggggggaggttgagaacacacccttgagagttgaagggtcggaaacgccctacgtggacaggacacccggcccagcttttaaggtgggttgtggtgatgggggaactgtgtgcgaccggggtggacacctctggagccctgagtgcctgtggctcaggactgagcactgggatcggcccccagctgctgacgggcagagtgctggcttttctgaatgccagggtgctgaaggcaggtgtgggtgggtggacctgtcacagagggatttgggggtgtaagggctgagacaccaaggcagggagtggcttgggccctctggatcctggaggccgggtgctgttcatgaatgaggcaggatggtcacagacacgtgaggagctctgcaggcctgagggccataggacgaggctgtgtgcttgtagagaaggcccctggttacagaacacgattgggacacgctggattacacggctcaagcctggtgttgtaggagtggtcagggtggagtgtgtgaggcccggcacagaccaggggaggctcttcgtgggctgggtcagatacaacaggcctccccataccactgcgggcctttccccagaatacttagtacaggtaacccatgtccagacaaaacatggggagaggttctggttaccttggttctaaattgtctgggacacaaggataaccaaggcaaacgtgcgagagggataatgaagaggatgccgtgctgtccaatgtgagagcgcaaggcaagggctgaggtgcttctgaggtatgcctgccactgcttcccgagtctccaggccaacagtaaacagataaattctgaaacaaaccatgatccaagtcagaatttggggcccgataaagatggcaactcagattgcactgaatagcagagtatttagaaatgaagggagctgggtcctcaggatgtgtagcagcatacattgtggaaaggtgaaaaggttacatgtaaaaacaataaccataaaacaaccagaagaaaatagtggcgaatatttagtttgatttttgggttcaagtgattctcctgcctcaacctcccaagtaactgggactagaaaatagtggcgaatatttagtttgatttttgggttcaagtgattctcctgcctcaacctcccaagtaactgggactacaggcgcgtgccaccacgcccggcttatttttgtatttttagtagagatggggtttcaccatgttggccagactggtctcgaactccttggccagactggtttcgaactcctgacctcgtgatccacccacctcagcctcccaaagtgctgggattacaggcgtgagccactgtgcctcgcctcttttttttttttttttttttttttaacagatagggtttcactctgttgcccaggctggagaacagtggtgcaatcatagctgattgtaacattgagctcctgggctcaaatgaccttccagcctcagcctcctgtgtagctgggactaacagcatacaccaccatgcccagctaattttgtgtgtgtgtgtgtagaaatgaggtcttgtcattttgctcaggctggtctccaatgcctgagctcaagtgatcctcccaccttggcctcccaaagtgctgaggttccaggtgtgagccaccactcccagcctgtagtctaatcttaagttaggagggactttctaaacataaaagcaaaggaagaaatcacaaatgaaaataacaaatacagcagaaaatgttataaatgaaacaaatgtaaatgagtgaaaaaacatgtgcacagcgtagcacagttgacttgacacaaggtcttggcaagggtcttctgagtaacagcagcagaaaaggaaaatgagccccttgagagcaaaataggccacaggcacacggggaagcgcccgaaatacagagcgccgataaagacagagatgttcactctgataatcagggaaacactaaaacagactgctttttcctgagagattgtcagaggtcatggttttgggaggaacacgaagacaggtgaggagtgctgcgccttgggcaggtcaggtggggtttggggctttccaggggcttttagtgggaggtgatgggttgtgggggttttgtaggcaacaaagagaggctggcacccaccacagtggctttctgtgtgaggggctgcctggcgtgtggcaggcctggcgcagctacccacacacctgctaccttgtagatcctggagccaggccgcagggagcggctgggtctgaagatggccaacgaggccgctgccaagaaccgggccaagaagcaggaagccttgcggagagtgacggagaatctggccaggtgaggggccgcctggctggtggggaagtgcgagggtggctctggcctgctcctgttcggcccctgccctgaccgtgtggaggcatggcccacgcggcagagtccagggcaggtccgcggggttctgcagtgggtactgtggcagctcctctatccagagcatggccgcacatggacaggatgagaggccccctccatcttctctttcctccacgtcctctttgacccgtccctaagaggcatctttaggcgtgtggtcctgctgggagctttcatcagccctgtggagagagtcatcgttccccttggagaggggtggggactccaactctcagaggcctgggggtgcaccccagcccccacagccaagggcggtgctgctgtttgacctcaggtttgacctgagcgctgctgtttgacctcagggatcccccgcatttgctgccatgctggcagtaccatcctcctcagctcagagtgactgtgtctctgcccaggctcttcctgggagccaagggaggccctgctgccggcagctctcagcccacctaaccctgcctctctcacccattcctccaccccagcctcacccccaaaggcctgagcccagccatgtcgccagccctacagcgccttgtgagcaggacggccagcaagtacacagaccgggccctgcgggccagctacacaccatccccagcacgctccacccacctcaagaccccggccagtgggctgcagacccccacaagcacaccggcgcctggctctgccacacgcacccctctcacacaggacccggcctccatcacggacaacctgctgcagctccctgcccggcgcaaagcttcggacttcttttagagccaggcctgggctgggctcatagacgcttcacagagcctgcagggcagctgtacacccagcagaggactccagccttctcggggcccaggcctgggccagaagctgttgaccataccaggagtcactggagaaaggggctgtgctggggccagactggcacaaggcactcgtgcccacaccacaccccagggccttgccaagctgtttgctgtttaattggccccttgaactgtcattaaagaacacctaggtacag

SEQ ID NO: 11890 - DNA, 1808 bp, Homo sapiens
cctgtgacgcgcctgctgggcccgagctttttcctgggatagcgatggagacgccgggcgcatcagcgtcgtccttgttgcttcccgccgcgtccaggcccccgaggaagcgcgaggcgggagaggctggggctgcgacgagcaagcagcgggtcctggacgaggaagagtatatcgagggcctccagacggtcatccaaagggatttctttcctgatgtggagaagctccaggcacagaaggagtacctggaagccgaggagaatggagacttggaacggatgcgccagattgccatcaagtttggctctgccttgggcaagatgtcccgggagcccccgccaccctatgtgactccagccacatttgaaacccctgaggtgcatgcaggcactggagtggtgggcaacaagcccaggccccgcggccgaggcctggaggatggagaggctggagaggaggaggagaaggagccgctgcccagcctagatgtcttcctgagccgctacacgagtgaggacaatgcctccttccaggagatcatggaggtggccaaggagagaagccgggcacgccacgcttggctctaccaggctgaggaagagtttgagaagaggcagaaagataatctcgaactcccgtcagcagagcaccaggccatcgagagcagccaggccagtgtggagacctggaagtacaaggccaagaattccctcatgtactatccagagggtgtccctgacgaggagcagctgtttaagaagccccggcaggtggtacataagaacacgcgcttccttagggaccccttcagccaagccctgagcaggtgccagctccagcaggcagccgccctcaatgcccaggggccctccctctctttctccaagaaggctgccaaccccagagccccagccttgccctgaggagaggaagtgtttccagcatgttcccacgtgtttgcccaccggccagctgtcgagcgtgggctgcggtccccctgatgccagcctctctgcttgttccagcacaaacagggcaaggtgtgaacgagtccccgatgatgacctggggggaggttgagaacacacccttgagagttgaagggtcggaaacgccctacgtggacaggacacccggcccagcttttaagatcctggagccaggccgcagggagcggctgggtctgaagatggccaacgaggccgctgccaagaaccgggccaagaagcaggaagccttgcggagagtgacggagaatctggccagcctcacccccaaaggcctgagcccagccatgtcgccagccctacagcgccttgtgagcaggacggccagcaagtacacagaccgggccctgcgggccagctacacaccatccccagcacgctccacccacctcaagaccccggccagtgggctgcagacccccacaagcacaccggcgcctggctctgccacacgcacccctctcacacaggacccggcctccatcacggacaacctgctgcagctccctgcccggcgcaaagcttcggacttcttttagagccaggcctgggctgggctcatagacgcttcacagagcctgcagggcagctgtacacccagcagaggactccagccttctcggggcccaggcctgggccagaagctgttgaccataccaggagtcactggagaaaggggctgtgctggggccagactggcacaaggcactcgtgcccacaccacaccccagggccttgccaagctgtttgctgtttaattggccccttgaactgtcattaaagaacacctaggtacag

SEQ ID NO: 11891 - DNA, 1810 bp, Homo sapiens
gctttttcctgggatagcgatggagacgccgggcgcatcagcgtcgtccttgttgcttcccgccgcgtccaggcccccgaggaagcgcgaggcgggagaggctggggctgcgacgagcaagcagcgggtcctggacgaggaagagtatatcgaggtacgacctcggtgcggacgccggcgacttctgggcccatcctctgcttcaagctcctctcaggttccctctctcgggtgttgacactccgtctcctcgtggaagtggaggagccgggtgtggacggtcccacgagtcaagtaaacagggcagaggaagacgtctgtggtggaagaggctgtagtagtgttgtcagggaaaagagagagcggctctctttgtatgggacgggggtcagggaaagaagattttctgttaaagtgtgagtaggagtttgacaaactggaaggatggtggcaaagagggctttctaaagagcggtggcagcaagtgtgaatgctggggttcctggaaagagaccgcagttgtgacagcatctcgagtgagtggacctgcgtcgccccaccacacgcacacagaaggaggagctgaaacggggattggcggaagtcagtttggttttagacctgtttaattcgggacaccttttgggatatgtagatggatggctttaacggacggttgggtgcccagatatgcagctcgggagcaaggtctggctggaggtgcagacttgggaatctcaacttgtggtagtgactggctgaagttactcaggaaaaaggtttatttttattttattttttgagacggagtctcgctcgtcgtccaggctggagtgcagtggcgcgatctcggcttactgtaaccaacctctgcctcctgggttcaagccattctcctgcctcagcctgccgagtagctgtgactacaggtgcccgccaccacgcccggctaatttttgtatttttagtagtggtggggtttcaccatgttggccaggctggtctcgaactcctgacctcaggtgatccgcccgccttggcctctcaaagtgctgggattacaggcgtgagctaccatgccccgccaggagaaaggtttagattggaaatagaaagtcatgtgtggaatgaaagtgacaacacccacattggtctggcttgtggggagccagcaatggagaatgagaatgaccagttagcaagggcgagagagaagggtttcacggacttcagaagagtgtttagtaatgttagaggttgcagcatggctaccatatgggatgctcaaccccactagaaagtgccctcaagctccctcaatccagccccagtcattggggaagtagaatttgaaggaggttcagcaagttccttagcatgtacagcagtggacctgtgaggcaggagcacccagactgcagctccgactttcttttttcttttttttttttttttttgagacggtctcgctctgtcgcccaggctggagtgcaggggtgtgatcttggctcactgcaacctccgcctcccgagtttaagcgattcttctgcttcagcctcccacgtagctggaattacaggtgcctgccaccacgcccggctaatttttgtatttctagtagagactgggtttcaccatgttggccaggctggtcttgaacttctgacctcatgatccacctcccttggcctcccaaagtgttgggattacaggtgtgagccaccgcgcctggcctctgactttcattctgatctctccttgcagggcctccagacggtcatccaaagggatttctttcctgatgtggag

SEQ ID NO: 11892 - DNA, 581 bp, Homo sapiens
gctttttcctgggatagcgatggagacgccgggcgcatcagcgtcgtccttgttgcttcccgccgcgtccaggcccccgaggaagcgcgaggcgggagaggctggggctgcgacgagcaagcagcgggtcctggacgaggaagagtatatcgaggtacgacctcggtgcggacgccggcgacttctgggcccatcctctgcttcaagctcctctcaggttccctctctcgggtgttgacactccgtctcctcgtggaagtggaggagccgggtgtggacggtcccacgagtcaagtaaacagggcagaggaagacgtctgtggtggaagaggctgtagtagtgttgtcagggaaaagagagagcggctctctttgtatgggacgggggtcagggaaagaagattttctgttaaagtgtgagtaggagtttgacaaactggaaggatggtggcaaagagggctttctaaagagcggtggcagcaagtgtgaatgctggggttcctggaaagagaccgcagttgtgacagcatctcgaggcctccagacggtcatccaaagggatttctttcctgatgtggag

SEQ ID NO: 11893 - DNA, 10666 bp, Homo sapiens
cgccgggcgcatcagcgtcgtccttgttgcttcccgccgcgtccaggcccccgaggaagcgcgaggcgggagaggctggggctgcgacgagcaagcagcgggtcctggacgaggaagagtatatcgaggtacgacctcggtgcggacgccggcgacttctgggcccatcctctgcttcaagctcctctcaggttccctctctcgggtgttgacactccgtctcctcgtggaagtggaggagccgggtgtggacggtcccacgagtcaagtaaacagggcagaggaagacgtctgtggtggaagaggctgtagtagtgttgtcagggaaaagagagagcggctctctttgtatgggacgggggtcagggaaagaagattttctgttaaagtgtgagtaggagtttgacaaactggaaggatggtggcaaagagggctttctaaagagcggtggcagcaagtgtgaatgctggggttcctggaaagagaccgcagttgtgacagcatctcgagtgagtggacctgcgtcgccccaccacacgcacacagaaggaggagctgaaacggggattggcggaagtcagtttggttttagacctgtttaattcgggacaccttttgggatatgtagatggatggctttaacggacggttgggtgcccagatatgcagctcgggagcaaggtctggctggaggtgcagacttgggaatctcaacttgtggtagtgactggctgaagttactcaggaaaaaggtttatttttattttattttttgagacggagtctcgctcgtcgtccaggctggagtgcagtggcgcgatctcggcttactgtaaccaacctctgcctcctgggttcaagccattctcctgcctcagcctgccgagtagctgtgactacaggtgcccgccaccacgcccggctaatttttgtatttttagtagtggtggggtttcaccatgttggccaggctggtctcgaactcctgacctcaggtgatccgcccgccttggcctctcaaagtgctgggattacaggcgtgagctaccatgccccgccaggagaaaggtttagattggaaatagaaagtcatgtgtggaatgaaagtgacaacacccacattggtctggcttgtggggagccagcaatggagaatgagaatgaccagttagcaagggcgagagagaagggtttcacggacttcagaagagtgtttagtaatgttagaggttgcagcatggctaccatatgggatgctcaaccccactagaaagtgccctcaagctccctcaatccagccccagtcattggggaagtagaatttgaaggaggttcagcaagttccttagcatgtacagcagtggacctgtgaggcaggagcacccagactgcagctccgactttcttttttcttttttttttttttttttgagacggtctcgctctgtcgcccaggctggagtgcaggggtgtgatcttggctcactgcaacctccgcctcccgagtttaagcgattcttctgcttcagcctcccacgtagctggaattacaggtgcctgccaccacgcccggctaatttttgtatttctagtagagactgggtttcaccatgttggccaggctggtcttgaacttctgacctcatgatccacctcccttggcctcccaaagtgttgggattacaggtgtgagccaccgcgcctggcctctgactttcattctgatctctccttgcagggcctccagacggtcatccaaagggatttctttcctgatgtggagaagctccaggcacagaaggagtacctggaagccgaggagaatggagacttggaacggatgcgccagattgccatcaagtttggctctgccttgggcaagatgtcccgggagcccccgccaccctgtatgaggaccctgtgggtggcggagaggggaaagcctgctgaactgtcgcttcaggctcactctaattcttatccccctctcttcccctagatgtgactccagccacatttgaaacccctgaggtgcatgcaggcactggagtggtgggcaacaagcccaggccccgcggccgaggcctggaggatggtgagtgagggtgccctctttaagtcacatggtcaggattgcctgggaatcttagcctgtgaggccctgagggggtggtccagagggctgcaggccacatcttgttcctgaggggtcttgcgtaaatagcagcctgtgaagtcaaaggacattggtctaggtggtagaacatctgggtccagctcccacacatggctcgcctctgtgaaatgggactctcaccagctcttgctggcttttctgctgtgttccagccctgccctgtgggcttcatggatgttggaaggccccttttgttactatcctgaagatgcctcagggcctctccatttgtttccttcatgttggtcacttcccagataactgcatggctcactgtgtttcttcctgtagatctctgcataggtgttacctgttcagagaaacttttcttgacctgccagtgtgaagtcacaacaccactggtgctctgtggcttccagcctggctttggtttttcatcacaagacattttattttatttaatttcattttatttttaattttttgacacagagtctcgctctgtcacccaggctggagtaaaatggtgtgatcccggctcactgcaacctccacctcccaggttcaagcaattctccctgccttagcctcccaaatagctgggattacaggcgcctgccaccactcctggctaatttttgtattttgtagtagagacgaggttttgccatgttgtcccggctagtcttgaactcctgacctcaggtgatctgtctgcctcggccccccaaagtgctggtattacaggtgtgagccaccgcgcctggccaagacataacgttttaaaggcatttctgtttatggtctctttccctaattggcatcccttgcacaagagcagaagctttgttttgctttcatctgtatgctccgtgttgggaacagcacatgtggtgttgtgggccttgcacagatacacatggaacagatgaaagagttgtcatcttcagcatgtttgctgggacacacagctctatatggtaacatcgtgacttgatgggggagtcggtttaggaaagggcactccgagtcctgttgaatgcaagtgttctgcacgccatgggacttctgcgttgtcaggccctcttttcatcagtagtagaatgtcagtgcatgtatagacaaacgagacactctttcttatcagtttgtagactccactgtgctggagtagcacagatgtgttgtgtgtttgcacaaacatgcaaacatgatactttttgctttacaatccagctttttcggccattaacacagtccttgttgtccttgaagcttgattatctgttgaaatgtagcttgtgcatcacagggcaatttgtagatttttttcttctccttttttttttttttcctatagagatgaggtttcattatgttgcccaggctggttttaaacttctgagctcaagtgatcctcccaccttggcctcccgaagtgctaggattacaagtgtgagccatcatgcctagccagtttgcagattttcaatacctgtacacctacatgccagtaaatataggaatccttttcagaacctaagtggtaggaaccatcatcatgtttacaggtgaggaaactgaggctcagaaaggcagtcacttctgcaggtctcagagatggtcagggtttcacttcttatctctctgagatgaatagagtttctgacccctgtcctcatcccgtgggtcttgagcttgtagccactgtgccttgtgcatagcctcacgtgtagcaggtggtcaggactgtcactagacttgaaggcagagctctccaggtggccccaccgaagtttgcaccaccacacgcagcaccagggcaccacctcagtgggagtaccactttccatggtggcagggttggtcggaggggggggtgtttggggttgtggcttagcacctgtgaggccccatccagaggactaagtcatatgagatccctggaattggggctcgctctcaggtcaggatgattaggcgatgaccacccacctgtagtacaggtaccaggaagagaagagtgggtaaggtaaggaaatcctagggagtgagggagagccccagggatttggaggcctggcacccacaggcctggcaccactttggtgggggaggagcctgcctgtgatcacgagctcttgctctaacacctgtattgctttctccagtctgaatcagaccacgtaattcccttggcatccagcacatgagcagagctggccctgaatctgtagggtaccacctgagggctctctgggcagtcagggtgggtggattctgcccccgtggggagtccttggcagtgtgggctttcatgggcagaagccaggaccaggggagaggattccagccctgcatgttgggggctatgattcctgggcctgggtgtcctcctctttcctgactgcaaagggtgctgtgttcctcctcccgcaacccctaagcaggagaggctggagaggaggaggagaaggagccgctgcccagcctagatgtcttcctgagccgctacacgagtgaggacaatgcctccttccaggagatcatggaggtggccaaggagagaagccgggcacgccacgcttggctctaccaggctgaggaagagtttgagaaggtgtctctggggtctggggtgtcacataggcgtaggcaccctctgtggtggttggggagccccagggccatgggtacaatgcccaggggcatctctgaccatcacttttccccatgtgattgcagaggcagaaagataatctcgaactcccgtcagcagagcaccaggccatcgagagcagccaggccagtgtggagacctggaagtacaaggccaagaattccctcatgtactatccagagggtaagtggcgggcctcgcagccaaatggggaggtgttgggtagagctgtgtgtgtctggctgtgtttggagcagccttccaggtgtgtatggccgtgcccccttgcagtttgggcttctgatgggtactggtctgtctaagggtggacaggtctgtgtgaggtcagcagtgagtgagaccctctccagcggcactggggcctgcgttctgctcaatgcttttgttcatctgggagtgacttggccgagaagcgagctcctcatgctccttaggctgctgcccttctgacacctgctgctacctttgcttcgtctgccaggtgtccctgacgaggagcagctgtttaagaagccccggcaggtggtacataagaacacgcgcttccttagggaccccttcagccaagccctgagcaggtgccagctccagcaggcagccgccctcaatgcccaggtgagcaggcgggtcagcagggccgcatgggccaggttggacagggctgcctgggggcaggcatgatctctcccatctctttgagcttggcagagctcagtgagtggaaccatctggggccctgtgcggcaggatcctgagtctttccttggccccagtgggcttccattgaacactgccttggtcacacacgttctgtaggtccagatctgtgccagctcccttgatggcaggggcaggagagaaaagggactgctgggagtgagcccaggctggcagctgcacgcccacacaccgggcagggaagccagagagccgcagagggagcccagccccagggggtggctggggtgggacaggccctgggttggcagagagcagaggctttctgagtctgggagcaagacgagtagatactctctgatggtgactgtggcagtcacagggttgaagtggggaaggcaggaagagactagagcataagcattgcctgtcatcagcattgcctgtcatcagcattgccccctgcaggggcctggcgtcagcatcctctggagttgctgggataggcgcagctcgagtggaggccctggcacctccctggatgggaggagggggctttccttgcttgggtacccactttgacaggccctcaaggtcttttggggggttggggcaggggccctccctctctttctccaagaaggctgccaaccccagagccccagccttgccctgaggagaggaagtgtttccagcatgttcccacgtgtttgcccaccggccagctgtcgagcgtgggctgcggtccccctgatgccagcctctctgcttgttccagcacaaacagggcaaggtgggccccgatggcaaggagctgatcccccaggagtcccctcgagtgggtggatttggatttgttgccactccttcccctgcccctggtgagaaaagtgcccactggcaagtgggtctactgctgggactccctgggggaggtgggcttctcagtcggccctggccactcctggcctctacctggcctgccccacaccttgtgtaactcagggacctggtctcctgtctgtacaaggccctagaggccaggtgtccaggctgcttggggccgtgggtgggctggactctcaggcagacctggcctgagacatcctgggatgacgtgtcctgtcctggtccttactgtgatgtcagtgggtgggggtgtgtgcacagtgcttatgagtctaagtctacctagcactgcagggagggaggcccagcacctcagtggaggtgaaactcaggtggtcttgtggcatgcgtgggtgtccctctgcactctggcctctgtgctcttgggtgctggtgctgtgtcacacgccagggcatgtgaaggcaccacaggtttgcctggggttctaggaggtttgggagccctggaaggcctgagtgtctcctcctgcgtggctgggggagacctcccagaggcttgtaggctaagcacatggctgtagggccttgagcctgcctcgggcctgctgggagcttggcatttccctttcggaggatggaggtgccagggttccagagtcctggggaaggagagagggctagctgcctgccttcgtattagctgggatgcacattgggtgaacaagctgtgactggaggggagggtggtggggagtcctctggcctgaggtggttttgggctctttgtctgcaggtgtgaacgagtccccgatgatgacctggggggaggttgagaacacacccttgagagttgaagggtcggaaacgccctacgtggacaggacacccggcccagcttttaaggtgggttgtggtgatgggggaactgtgtgcgaccggggtggacacctctggagccctgagtgcctgtggctcaggactgagcactgggatcggcccccagctgctgacgggcagagtgctggcttttctgaatgccagggtgctgaaggcaggtgtgggtgggtggacctgtcacagagggatttgggggtgtaagggctgagacaccaaggcagggagtggcttgggccctctggatcctggaggccgggtgctgttcatgaatgaggcaggatggtcacagacacgtgaggagctctgcaggcctgagggccataggacgaggctgtgtgcttgtagagaaggcccctggttacagaacacgattgggacacgctggattacacggctcaagcctggtgttgtaggagtggtcagggtggagtgtgtgaggcccggcacagaccaggggaggctcttcgtgggctgggtcagatacaacaggcctccccataccactgcgggcctttccccagaatacttagtacaggtaacccatgtccagacaaaacatggggagaggttctggttaccttggttctaaattgtctgggacacaaggataaccaaggcaaacgtgcgagagggataatgaagaggatgccgtgctgtccaatgtgagagcgcaaggcaagggctgaggtgcttctgaggtatgcctgccactgcttcccgagtctccaggccaacagtaaacagataaattctgaaacaaaccatgatccaagtcagaatttggggcccgataaagatggcaactcagattgcactgaatagcagagtatttagaaatgaagggagctgggtcctcaggatgtgtagcagcatacattgtggaaaggtgaaaaggttacatgtaaaaacaataaccataaaacaaccagaagaaaatagtggcgaatatttagtttgatttttgggttcaagtgattctcctgcctcaacctcccaagtaactgggactagaaaatagtggcgaatatttagtttgatttttgggttcaagtgattctcctgcctcaacctcccaagtaactgggactacaggcgcgtgccaccacgcccggcttatttttgtatttttagtagagatggggtttcaccatgttggccagactggtctcgaactccttggccagactggtttcgaactcctgacctcgtgatccacccacctcagcctcccaaagtgctgggattacaggcgtgagccactgtgcctcgcctcttttttttttttttttttttttttaacagatagggtttcactctgttgcccaggctggagaacagtggtgcaatcatagctgattgtaacattgagctcctgggctcaaatgaccttccagcctcagcctcctgtgtagctgggactaacagcatacaccaccatgcccagctaattttgtgtgtgtgtgtgtagaaatgaggtcttgtcattttgctcaggctggtctccaatgcctgagctcaagtgatcctcccaccttggcctcccaaagtgctgaggttccaggtgtgagccaccactcccagcctgtagtctaatcttaagttaggagggactttctaaacataaaagcaaaggaagaaatcacaaatgaaaataacaaatacagcagaaaatgttataaatgaaacaaatgtaaatgagtgaaaaaacatgtgcacagcgtagcacagttgacttgacacaaggtcttggcaagggtcttctgagtaacagcagcagaaaaggaaaatgagccccttgagagcaaaataggccacaggcacacggggaagcgcccgaaatacagagcgccgataaagacagagatgttcactctgataatcagggaaacactaaaacagactgctttttcctgagagattgtcagaggtcatggttttgggaggaacacgaagacaggtgaggagtgctgcgccttgggcaggtcaggtggggtttggggctttccaggggcttttagtgggaggtgatgggttgtgggggttttgtaggcaacaaagagaggctggcacccaccacagtggctttctgtgtgaggggctgcctggcgtgtggcaggcctggcgcagctacccacacacctgctaccttgtagatcctggagccaggccgcagggagcggctgggtctgaagatggccaacgaggccgctgccaagaaccgggccaagaagcaggaagccttgcggagagtgacggagaatctggccaggtgaggggccgcctggctggtggggaagtgcgagggtggctctggcctgctcctgttcggcccctgccctgaccgtgtggaggcatggcccacgcggcagagtccagggcaggtccgcggggttctgcagtgggtactgtggcagctcctctatccagagcatggccgcacatggacaggatgagaggccccctccatcttctctttcctccacgtcctctttgacccgtccctaagaggcatctttaggcgtgtggtcctgctgggagctttcatcagccctgtggagagagtcatcgttccccttggagaggggtggggactccaactctcagaggcctgggggtgcaccccagcccccacagccaagggcggtgctgctgtttgacctcaggtttgacctgagcgctgctgtttgacctcagggatcccccgcatttgctgccatgctggcagtaccatcctcctcagctcagagtgactgtgtctctgcccaggctcttcctgggagccaagggaggccctgctgccggcagctctcagcccacctaaccctgcctctctcacccattcctccaccccagcctcacccccaaaggcctgagcccagccatgtcgccagccctacagcgccttgtgagcaggacggccagcaagtacacagaccgggccctgcgggccagctacacaccatccccagcacgctccacccacctcaagaccccggccagtgggctgcagacccccacaagcacaccggcgcctggctctgccacacgcacccctctcacacaggacccggcctccatcacggacaacctgctgcagctccctgcccggcgcaaagcttcggacttcttttagagccaggcctgggctgggctcatagacgcttcacagagcctgcagggcagctgtacacccagcagaggactccagccttctcggggcccaggcctgggccagaagctgttgaccataccaggagtcactggagaaaggggctgtgctggggccagactggcacaaggcactcgtgcccacaccacaccccagggccttgccaagctgtttgctgtttaattggcccct

SEQ ID NO: 11894 - DNA, 2101 bp, Homo sapiens
cgccgggcgcatcagcgtcgtccttgttgcttcccgccgcgtccaggcccccgaggaagcgcgaggcgggagaggctggggctgcgacgagcaagcagcgggtcctggacgaggaagagtatatcgaggtacgacctcggtgcggacgccggcgacttctgggcccatcctctgcttcaagctcctctcaggttccctctctcgggtgttgacactccgtctcctcgtggaagtggaggagccgggtgtggacggtcccacgagtcaagtaaacagggcagaggaagacgtctgtggtggaagaggctgtagtagtgttgtcagggaaaagagagagcggctctctttgtatgggacgggggtcagggaaagaagattttctgttaaagtgtgagtaggagtttgacaaactggaaggatggtggcaaagagggctttctaaagagcggtggcagcaagtgtgaatgctggggttcctggaaagagaccgcagttgtgacagcatctcgagtgagtggacctgcgtcgccccaccacacgcacacagaaggaggagctgaaacggggattggcggaaggcctccagacggtcatccaaagggatttctttcctgatgtggagaagctccaggcacagaaggagtacctggaagccgaggagaatggagacttggaacggatgcgccagattgccatcaagtttggctctgccttgggcaagatgtcccgggagcccccgccaccctatgtgactccagccacatttgaaacccctgaggtgcatgcaggcactggagtggtgggcaacaagcccaggccccgcggccgaggcctggaggatggagaggctggagaggaggaggagaaggagccgctgcccagcctagatgtcttcctgagccgctacacgagtgaggacaatgcctccttccaggagatcatggaggtggccaaggagagaagccgggcacgccacgcttggctctaccaggctgaggaagagtttgagaagaggcagaaagataatctcgaactcccgtcagcagagcaccaggccatcgagagcagccaggccagtgtggagacctggaagtacaaggccaagaattccctcatgtactatccagagggtgtccctgacgaggagcagctgtttaagaagccccggcaggtggtacataagaacacgcgcttccttagggaccccttcagccaagccctgagcaggtgccagctccagcaggcagccgccctcaatgcccagcacaaacagggcaaggtgggccccgatggcaaggagctgatcccccaggagtcccctcgagtgggtggatttggatttgttgccactccttcccctgcccctggtgtgaacgagtccccgatgatgacctggggggaggttgagaacacacccttgagagttgaagggtcggaaacgccctacgtggacaggacacccggcccagcttttaagatcctggagccaggccgcagggagcggctgggtctgaagatggccaacgaggccgctgccaagaaccgggccaagaagcaggaagccttgcggagagtgacggagaatctggccagcctcacccccaaaggcctgagcccagccatgtcgccagccctacagcgccttgtgagcaggacggccagcaagtacacagaccgggccctgcgggccagctacacaccatccccagcacgctccacccacctcaagaccccggccagtgggctgcagacccccacaagcacaccggcgcctggctctgccacacgcacccctctcacacaggacccggcctccatcacggacaacctgctgcagctccctgcccggcgcaaagcttcggacttcttttagagccaggcctgggctgggctcatagacgcttcacagagcctgcagggcagctgtacacccagcagaggactccagccttctcggggcccaggcctgggccagaagctgttgaccataccaggagtcactggagaaaggggctgtgctggggccagactggcacaaggcactcgtgcccacaccacaccccagggccttgccaagctgtttgctgtttaattggcccct

SEQ ID NO: 11895 - DNA, 14757 bp, Homo sapiens
accgaccaaaatggcggctgccgttggtgcggggtgcggtttgtagtgctgttgccctactcatccctttgcaaaatgtgaaagaagaagcggctggtggaggcgggccataggcaatgagtcggcgaaggaaacatgatgacagccctagcccgaagaaaacgccgcacaaaacagtggcggcggaggaatgcggctcggtggtcgagccagggaggaggcggctgagatcggcccgcggttcgtggccctgcggggctagagaggggcctcccgggccagtgcggcagcgagagcagcctccgaccgccgccctgtgcagtaaaagtaaccccgagggtgagacgtcggcagcgcggcctgccttggcttcggcgccgcatccccacatcccagcttgcaacagggaaatctggggtgggggtggagtctggagcgtgtattctgtctctgggattcacccctcgagagtccaaaaataatcctataccactccccgatgggcttttgtccccgaacttcagcactaccccgttaggtttgaccatccatttgcctccgccacaggaataggtaatgtggtttacctgtttgcgggagggcggctgctttccaggctgctcctccagtcagcagcagtggtggagtgagaagaaacagctgataggcccgctaacctcagtttttgcccggagaagttatttctctttaaaccctttttttccctgtgacctgctttagagaagagttcataggaaaagttaaagtttgtctcaaagcctggtagatgtctcacctcattgtgaataaaccggaagttcctgtgtgtaacatccctccaaataagatactaaggatctctttcgtctcgattagttttaggtgttactttttaaaagacttctagtaaatcttagttggaactgaaactcatacaaaagcctttattctggagcatgttcttgaaatagtgcttttttttttttttttttttttataccttacgtgtcttttttcttttgggaaagaatctcgccctgtcgcccaggctgcagtgcagtagcacaatctcggctcactgcaacctccgcctcccgggttcaagcgattctcctgcctcagcctcccaagtagctgggactacaggcgtgtgccacctcgcccggctaattttttgtatttttggtagagacaggggtttcaccgtgttagccaggatggtctcgatttcctgacctcgtgatccacccgcctcggcctcccaaagtgctgggattacagccaccgcgcccggccaccttacatgtctttaataatactcctataaagcaatttgggaatgaacaaaaatctttataaaaatttgaaagtgattctagacaaaaattcccaagcattggatcactaatggtttttgaagaatggcaattaatgtagattagatagagttggtgaaagggggctaaacatatttaggtttctgttgggttactttggatttttgaatgtacctataaattacagatggttccccaaagcctccaagactcaatggtaataaatagaatgacttaggttatacagtattgtattatgcattcataaagcttctggattatctagaagtgtttgctatttacaatgtgaagtttgcgaagtgccgcgtggatttttatgtgaaacaagcatttctgttacggttcaggtaattatctctgggaaaaaaaattatcttggactataaaagttagtctcagctatttgaccttggggtcttacgaagtaaggtaatgctttaaaatgcaacaattgttattttactcatattttatatagaaaggtatgaaacaccaaagagagcgctgaaaatggactcactgtcatcttccttcagttctcctaatgatccagatggacagaatgatatcttttgggatcagaattctccattgacaaagcagttaggtaattaattattaacattttttatgtgagtaaatatttgataaatgattcagatttaactagaattctagtcagataatagcatcgggaacctctgagaatgttatatgattttatctgtataagtatgtgatgtaaacacataatcctctaagctgcactaaataaaattactttctaagaagtgacagctgttttttaaaatggagggttttttgtttaaaatttatagaaatgtctttgtttctttaggtaaaggaagaaaaaaacagatttacaccacagatagtgatgagatttcacatattgttaatcgtattgctcctcaggtaaatatcactagttttacagtttgttttaaaacagtgaagaatgtgccactaagtttttgtagtttctttaaatgaaaagtattgtctattataattcttttttccaaaaataaggcagcaaagattactgttttgccttttctacttttgaaatacatattttgaaaaaaggaatataatataaaatacaagatattttcttaagtatatatcttgttttaattttttagagtaatttttgactagggcattgtgtttatctgtaatgttgtgcttaacaacatacgacatcatttttcaagttgctaaaataatagaataaggcagtgaaaaaagtttatacttctatgattgttttgtgattggtacttcctgtctgtaacatttccccattgaaactattaatactcatttccttataagattatcaagaaacacttacaaaagtggagagcactgaattcaaatttagtcctcattcaacctcctatgctgtgtgacccagtgcaagttatttaaactcccaccacttcagttcattcagccatgaactagaattattgtgttgctcttgctgtcttcattggatcattatgagaattaaactagataaaaattctttgtaaactatagagtgctataattgtaaggttacgttaaggttgttactgtaatagaaccatctccaaagcttttttttcttttcttggacaggcatggtgactcattcctgtaatctcagcattttgggaggaaggctgaggcaggaagattgcttgaggccaggagtttaagaccctgtctcttaaaaaaaatttttttttgagtgtttcgtttctttttttcatttctgttcttttattgtttgagtgaaatagaaatatgttcaagtcaatcatttgacacaaagcaatccagtaactctaatattataattactaagaagcaaaggctcaatacgtgaaactgttctgaacttctttactttttgttctctttttcttatttaacatttaaatccagagaacatttttgcttagtgtcttctctgaaggaagtatgccatttttccttaacctgcgcttgaatagttactatatgttgaccataaacaatagatggcactggcccaaaacatggtttgaagaattactgtcacccaggtggaagagacagaaaatgaagtttttcttagcagctataaaatatccaaaattacacctagcacagtcaaaacaactctgttgctactagctctacattccatttttagcatgtcatagaaattcattttacttacagttaattagttaaatagcatttatgccataatagtacttactctataagttaacaatagatcttcattaattgtgggtttcacatgaaagaagcataataaaatgtgtttgggtgggccagtctaaatagtgataaaaagatagttgtgaataaattattggactctttacctaagtgggctagaaataatagctcatataaagaaatgacaacagtacgcaagtggtaacttgtataaaagaaaaaaatatagtgaaattagtagctttaaaatgttaccctcttaaactgagtacttttaaagcatataaatctttagcagtttcaaggtctgtttgaaagcttgtcatgttctcagaatgacaaatacttatattgtttatttttaggtgagtcattctcaaatcatttagttttaacattttcagagatagcatttttttaaatatgcgcttttattttggttggacagtcagttcactttttgcagggatacttttatacaatgttgtttatttgaagatggtatgtatcttcatttatacagctttgcacagtatactttttataatgaaatgaagtaatgcatttagataccttatacagcacctggattatggttgaaaatcaataaattatgtaattattcatgaagaaatatgtaataacatgtataaatagtatacaaacatacataggacccatgtatatgtaaagttgggtacataaagtcataatttagttctctgaaaattgaatgaatttaaaattacttttgtaaatggcagagttcataattaagactatgattgtctttaaattcaagattgttgaaataaaagggaaaatatattgagtctgaaagtgaaattactgattttcttgagtatttgcaaagctaaaggcaactaggttcaagttgacattaagaaaacttttttgattcattgaggatttgaagtaccaaactgtagggatcttttcacctaaatcttctagtaaataaatgtatactgacactggtatgcccaatattgtgctggatgctgagttattctaagaagagtccttgcctttgagtagcctataatctagtagtaaaattattttttaaattgtgtgatatttatgttcattctaggtactataaaatagagtgaaaatggttacttgatttgatttgttggtttggtttgcaattaatgcctaaagctcattctgtaatttttttgtgtgatcaagtgactgaaaggtacagcaaaagtatccaggtctaaaatgccttttttctgtatattatctgggctaaacttttctgttttctctatttttttattcttattcctgtctcattcttagcatcagttctaaccttgctcttatctcttaattcattcctgatcttaattctgagtgttcttaatttaggtcaacatggattgtccaactttagataaagattataataaggataaagaaaatttggagaaacagatgatacagaaagaattccatatgtatctcctctcaattctgatgatttctgccacacagtttctgacactaatgtttttataagtatcttaggacaattaaaatgtcaattttcttttgataaaaacatgcttctgttattaaatgtacatttgataaatttaattcttaaaacaatatttttttaaaataagcaatttgtaattctgaatgttttcattctctgaaacataagtggatcaattattgtagcttattattgctatctcccaacttcctattgtttttgagtttggtaagtgttacctcaccagaatttaggaaattaattcaaaatcattagtttttattgtcttttttctttcttttgtttttttggaagacgggggatgctacactggtactttatacctctttttttccctatctgccaaaggatgaaaaaccaacaacaaattctatgctggacatgtggattggtgaaactgctattccttgtactcccagtgtagcaaaaggaaaatcaagagcaaaaatcagctgcacaaagtaagttaagacttttcagcttttctgaaattcagtgaagcaaatattttttgataatactccattttggttttgtgaatatatcaaaatttttgttaataaaatttccacagttttgatctatcaaattttggagttaaaataattataactgttaaaatcttagagctttaacatcaaaatatgttaaataacagttggatataatgtttcagaacatttttagttattttttaatcttgtttaataggttaaaaacacaaagtcaagaagaagaacttatgaaactggctaaacaatttgataaaaatatggaagagctagatgtgattcaagagcaaaacaagaggaattatgattttacccagatgatttcagaaacagagattttaagtaattataaagataatatacagatgtggtcattacataatatagttcccgaaatagataatgctacaaaaaagccaatcaaaggaaacaccaagatatctgtggcaaataatcaaaatagcagtcagaagccatttgaccaaattgctgaagcagcctttaatgctatttttgatggttctactcagaaatgtagcggacagttaagccaagaactgccagaggctttttggagcaccagtaatactacctttgtaaagacaaatgctttgaaagaggagaaaatcattactaatgaaactctggtcattgaaaaactgtcaaataaaaccccacgatcactttcttctcaagtagatacacccataatgacaaaatcatgtgtgacttcctgtactaaggagccagaaacttctaataagtacattgatgcatttactacaagtgattttgaggatgattgggaaaacttactaggtagtgaaccttttgctatgcaaaatatcgacatgcctgaactctttccttctaaaacagcccatgttactgatcaaaaggaaatttgtacctttaatagtaaaactgttaaaaatacgtcaagagcaaatacaagtccagatgccaggttaggagattcaaaagtattacaagatctttcttcaaagacatatgacagagaattaatagatgcagaatatagattttcaccaaattcaaataaatcaaacaaattatccactggaaataaaatgaaatttgagaactcttccaataaaattgttattcaagacgaaattcaaaattgtatagttacatctaatctgacaaaaataaaggaagatattcttactaactctactgaagcttctgaaaggaagtcagctttgaacacaaggtattctaatgaacagaaaaataagtgcattttaaatcagtctattaaagcccctgttaatactgatctttttggctctgcaaatctaggcagtaaaaccagtgttagtaacccaaatcagactagtgcatcaaaagtaggttctttctttgatgattggaatgatccctcatttgccaatgaaattattaaagcatgtcatcaattagataatacctgggaagcagatgatgtagatgatgatttgttgtaccaagcatgtgatgatattgaaagactaactcagcaacaagacattagaaaggacagtaagacatcagaaagtatatgtgagatcaataataattccgaacatggagccaaactaactcagcaacaagacattagaaaggacagtaagacatcagaaagtatatgtgagatcaataataattccgaacatggagccaaaaacatgtttgctatatctaaacaaggaagtaatttggtacaatcaaagcatttgaatccaggcagcatttcagtgcagacatctttgacaaatagctcacaaatagataagccaatgaagatggagaaaggggaaatgtatggaaattctccaagatttttaggtgccacaaatttgactatgtattctaagatctcaaactgtcagataaataatctgcatgtgtcttatactaacactgatgttccaatacaagtgaatagttccaaattggttcttccaggaagttcaagtttgaatgtaacttcagatcatatgaatacagaaattactacttataagaagaaattgagtactaatcagccatgccataagactgtaacagatgaagctcagagcaaccttaacacaacagttggattttcaaagtttacatttacaaggatgaaaaattctcagattctttctcagtttaatcaaaattgtataactggaagtatgtctgataccaaaattacacagggtgtggagaaaaagaaaggtgtcaacccattactggaggaagctgttggacagcaatctttggtgaaactttctgaatctttgaaacaatcttcaaaaggtatgtatgaaatatgaaatagttttctttgaaaagcatcttaaaaagtagtaaaataattatttgttgtttttgagtgtgagtaatgtataaggtaaaactattctatgactagttaattttaagaattaactagaattcttaaaatgatacttggaaataattatacggcattatacagagtagttggtttatttttcaaaatattacattgaattctttcccagcacttaatacaatgactggcatatagtaggtactcagtaaatattttttgaataacttattctttcttggaaaatcatacctttagatatatgtattatagtgttcattaagattgtatttactaaattgttttaaaacttgagtaatctgggaagcagatgatgaagcagtgaggtaaataatatttagaaatttagagcattctaattaaacgtctttactagtgtgatatttgatataaacgtgctagcggtgatggttaaaattatgatttacttatttgataacagctatcatttctgattcttccaatttctcttttccccaagtctccattctatcaataagtttcattctttcaaaaaccgtatccccagactccatttttctttctacaacaagttaacatttcttgatgagactactgcagttcttttatctatctcctttcaattcttatctccaaacagtggaatagccttttaaaattggatgggcaaaaatggcgtttctatgcttaaaacaaccttcaatggctgcccgtcatatttcaaataaaatccaaactgtatactgtgaccaacaaagctgtggattatctctctttaacctgcgtctcctcttttttccttacctactaagcttcagctataccagctatcttttagtttttcaaacagtgtatgtttttcttccttgtccaggaacttagaccgtgctcttccctttgactaaaactacttcttttcaacatgtgaccccttccccactcttttgttggtgctttcttacatctcagtataagtactactttctcacagaggccttccttgaagagtctataaatagatctccttgtttattttttatttcctaattgctttcatcacaagttgaaattaaatatttagtgactcttctctgtcttgttggcattactgttccaactttcctatctaagtgactttttttaaaaatttacaatagtaatatgctagttatttaaaaagaaaagtaaaacagtatagaataatttaaaggaaaaagttaagtcttctgtttctcctttctgataaccatcccttacggaaaaccactattaatagttggtatgatgtagcattttctatgaatataaaaagatatgtgtgtgtgtatgtacgtatatatgtgtatgcatatatatatacctatagatctatttaaatattaataaatctgtatacccactatttggcaacttgcttttgccttaatatattatagctgtcttttcctattagtacatataaatttattttagtcctgttaatgactatgtgatatatatggtggatgtatcataatttaactgtttctctgtgatggaagtttgggttggttgcagtcttttgcaattacaaacaatactccagtaaatatccttctgcataaatttccgcatgcttgtataattgtatctgttaattcctaaaaaattgctacaagaggaagttttaaaatttgatggataccaccaaatttctatccgaagcagttataccaatttatcttatcaaaacttacagtaaataattctctacacccaagggtgtccaatcttttggcttccctgggccacattggaagaattatcttggatcacacataagatacactgacactaacaacagctgatgaactaaaaaaaaaaaaaaaaaaaatcacaaaagaatctcataatgttgtaaaaaagtttatgaatttgtgttgggctgcattcaaagccatcctgggctgcgggtagcttgcgggctgcgggttggacaagcttgctttacatgatagcccaaactagatattttgaaatattaaaaattgttctcaatctataataattttaagtatttaaatttgtattaaagtgagcatattgtaactaaatcaagcatgttcctagcatgactttatttacagatagagttgacccttgaacagtgtgggggttagaggcgctgatctgatttgcagtcgaaagtctgtgtataacttttgatcccctaaaaacttaactgctaatagcctgctgttgaccagaaacctttccgataacataattaattaatacatattttgtatgctcttatatgtattatatactgtattcttacaataagctggaaaagtgttattaagaaaataaggaagagaaaataatatttactattcattaagtgaaagtggatcatcataaaggtcttcatcctcatgatcttcatgtctagtaggccgagaaggaagaagagtaggagttggtcttgctgtctcaggggtgtcagatgcagaaaacaacctacaaatgagtggacttgccagttcaagcccatgttgttcaagggtcaactatagttataattctataaaagactaaacctcctggagtatttgagttttcccaaaactcctatctaccaatctatctgcattttttatggataatctgcgttttagcttaccttatcaatattttctttaaacttattgatagtactgaatctcttaattactattaactttgttgatgttttctattgtttctacttccttttactttggtatgtagcaagctgctctccagggaagtatctctgaaacaaaactcacttaactcccacatttatttcaggcaggagttggcaaactatgatctgtccaaatccagcctgcagcttgtttatgtatagccagcacactaaaaatgatttttacattttaaatggttggaaaaaaattaaaaggagaataatatttcatgacatttgaaaattatatgaaatccagatttcattgtccataaacaggttttatttgaatacagctcatcagttatttatacattatccataactatttttgctacagtggtacaggtgagcagttgcaacaagatactcaaaggttaacattcttgctttctgactctttctttacaggaaaaaaaaaaattactgacccttgcactgtaagatcaagattaagaagagcagcttttgcttagtactttacaatattttaagacttcattgtgtatttttattatagattgagttaaaggaaagactgatgggaaaaatggatgagtccctaaatcaaattttcatggtgtgacctgattatcatttgaaattattttctataatattgccaagcaaattgtaagaccaactttaggaagttatgttttctgctgttacagattattaacctgttttctttccacacagtcaaattcagtgtaaagtctttggatgtgtagtctgagtttgttgtgtttctcagctttgagactaaaagtattagataattagtcaagctaattagaaagtatcttctggtgtctctctttaggaaaaaatatctacagtctgttaggtaaatagcttaggaaataaaagccatcaaaatcatctgggaaacttatttaaaatatgtatttcttagcctgaataccccctcccatttctgattataccaagaaaggaaagggaggcagattatatattttgaaaatgcctctgttagttaacaagagaaatgtctcataaattgtgtatctttttctaaatgtcagaataaatgatatacttaaatatgtattagggtgatagtcttaaacttaaaatatcatttaaatgagaaagtgatttctaatacaaagcctcaacttactaagttaattgagattattttaaagtttctccaaaatgcatcctccaaataaaaatataatttctgacagtgaatcacaggtaaccagtttgacatgacagatttcattttatcactctaaaatatatttcctcagtggatgaaatgaaaattttatagctctatagggaaaagtagatgtgaatattaatataacatcttatgtaaatatacactgtttgagattgataactaatttaattccttatattttgactattttccaattaaagtttacataacattttaaatcccaatgtatcctttttaaagatatatttattcgtgggtcatataaattagatgtcattgtccacaagaattatttggtgggtagtcagttttctatcaaactgaattttatcacactgtgaaaagaatgtatcaaatagagacagatccatcagtgcttgattttcttttgaactggagcattatatctgtattatgtacttagaattttatattcagtagtttagtttgatttaatagccaactaatatggcaaatctgggtgattaaaaaaagcaaaaattaaagcacatattgaatgactttataggctataaaagtaaaactcatcttttgttgaatttttagaggaagaagagaaaaatagaaagtgttctcctgaagaaattcagagaaaaagacaagaagcactggttcggagaatggctaaagcacgagcctcatctgtaaatgcagctcccacttcatttctttaatgaaatattagttggaagacttcacgaagactgctgataactatctgtgattgataggaaattttttttcttgatttctctgtgagaaatgtaatgctgacttttataaagcctggacttctactttatttaataaatcaatgtttgcaatggtaaatgaaacatttccttggacatgtatttgaaagtcattaaatacaaaagttttggaaattcaggaaagttagcaattatgtacggatattatacagaggaaagtagttatatttttaaatgctattattgcagaggatcatcaaaaaagaggtaatctacgttatttcctattctaatgtcttttcctaataaaaaacttcaactttctaagttagtagagactgtttttgtagttttactttcattaactgttgcttaaggtttttatacacttccagattttaattaatactttcatatttctaggaacatggttgatatgaaataaaggactttttatttgtaaggaaattatgttcagttcttagaagtggatttgaattttaataattctaaaatgtgacacattttggaaactttccaccatatttaggaaaactttgattttagaagtctaacatagaggaaaagaagtagtggattgtctacaaaagtaatgtggcatcattaacatttagaactggcagaaacttcatatgtcatctggtccagcttccttattgtatcggtgagaaaaagtaatactgttttcaaagtcataggcaagttaatgctgtgctacaattagaatgatttatttggacacctaaacaattatactatttgtttcaaagtatcagtacataaaataacttgagggagtattattttctagtataaaacaaaagatgtaattaaaagcacaataaggactgtttgataataatgctcattgttccttattttgctttaaagaattagtctttccaggatataaaaatgagaatcttttttcttttcagtttttctgtaactgtaattttcccctcaattaatttacttagttgactcatcttttcttctctattactgttttgtttttttctttttttgccattttgcctatttggaatttgctaaaccagtaatagaagtccaactagagggcgtaaggcagggaggatgctttattcctcttaaatggttttaggagatctagagaaagttagagatatgaaacacctgtcatggtgtggcatttatcactatcaagtgtctcaaagctgtgataatatggtagttactgccctatagctatacagatactcctcaacttaccgtgtagttacatcccaataaacccatcatgagttgaaaataccttaagttaaaaatgcatttactacacttaatctaccagacaacatagcttagcttagcctaccttaaacatgctcaaatcacttatattagcctagagttgggcacatcatctggcaatacggcacactgtagagtatcagttgagctgatgcccagcatcgtgagaatgttgtaccacatatctctagcctgggaaagaatcaaactttaaagtatggtttctattggacgcatatcacttttgcatcacgttagagttgaaaaattgtaagtcaaccattttaagttggagactgtacatcaaaaatggtattttcatatctacagtggagtactggagtttagctaacctatattatttttccaggaatatataataacctagataaatgcaagtagtttctatgtacaaaaataaagagctgagaatcttttactaaaagtggcttcactgtgttctgactatgctttggatatctctgtccttgcttaagctcctccctgcttactgcttgcttttttaagagtacttttagcctattctgttcattcatttagactcagcctaataagtctgtttgaacctcgtacctaaccatcttcactggaattgattgcttctctctgatcataatggtactaattattgtgtctttcattgagcaatactataatgcctttatgtgttgttt

SEQ ID NO: 11896 - DNA, 4948 bp, Homo sapiens
accgaccaaaatggcggctgccgttggtgcggggtgcggtttgtagtgctgttgccctactcatccctttgcaaaatgtgaaagaagaagcggctggtggaggcgggccataggcaatgagtcggcgaaggaaacatgatgacagccctagcccgaagaaaacgccgcacaaaacagtggcggcggaggaatgcggctcggtggtcgagccagggaggaggcggctgagatcggcccgcggttcgtggccctgcggggctagagaggggcctcccgggccagtgcggcagcgagagcagcctccgaccgccgccctgtgcagtaaaagtaaccccgaggaaaggtatgaaacaccaaagagagcgctgaaaatggactcactgtcatcttccttcagttctcctaatgatccagatggacagaatgatatcttttgggatcagaattctccattgacaaagcagttaggtaaaggaagaaaaaaacagatttacaccacagatagtgatgagatttcacatattgttaatcgtattgctcctcaggatgaaaaaccaacaacaaattctatgctggacatgtggattggtgaaactgctattccttgtactcccagtgtagcaaaaggaaaatcaagagcaaaaatcagctgcacaaagttaaaaacacaaagtcaagaagaagaacttatgaaactggctaaacaatttgataaaaatatggaagagctagatgtgattcaagagcaaaacaagaggaattatgattttacccagatgatttcagaaacagagattttaagtaattataaagataatatacagatgtggtcattacataatatagttcccgaaatagataatgctacaaaaaagccaatcaaaggaaacaccaagatatctgtggcaaataatcaaaatagcagtcagaagccatttgaccaaattgctgaagcagcctttaatgctatttttgatggttctactcagaaatgtagcggacagttaagccaagaactgccagaggctttttggagcaccagtaatactacctttgtaaagacaaatgctttgaaagaggagaaaatcattactaatgaaactctggtcattgaaaaactgtcaaataaaaccccacgatcactttcttctcaagtagatacacccataatgacaaaatcatgtgtgacttcctgtactaaggagccagaaacttctaataagtacattgatgcatttactacaagtgattttgaggatgattgggaaaacttactaggtagtgaaccttttgctatgcaaaatatcgacatgcctgaactctttccttctaaaacagcccatgttactgatcaaaaggaaatttgtacctttaatagtaaaactgttaaaaatacgtcaagagcaaatacaagtccagatgccaggttaggagattcaaaagtattacaagatctttcttcaaagacatatgacagagaattaatagatgcagaatatagattttcaccaaattcaaataaatcaaacaaattatccactggaaataaaatgaaatttgagaactcttccaataaaattgttattcaagacgaaattcaaaattgtatagttacatctaatctgacaaaaataaaggaagatattcttactaactctactgaagcttctgaaaggaagtcagctttgaacacaaggtattctaatgaacagaaaaataagtgcattttaaatcagtctattaaagcccctgttaatactgatctttttggctctgcaaatctaggcagtaaaaccagtgttagtaacccaaatcagactagtgcatcaaaagtaggttctttctttgatgattggaatgatccctcatttgccaatgaaattattaaagcatgtcatcaattagataatacctgggaagcagatgatgtagatgatgatttgttgtaccaagcatgtgatgatattgaaagactaactcagcaacaagacattagaaaggacagtaagacatcagaaagtatatgtgagatcaataataattccgaacatggagccaaactaactcagcaacaagacattagaaaggacagtaagacatcagaaagtatatgtgagatcaataataattccgaacatggagccaaaaacatgtttgctatatctaaacaaggaagtaatttggtacaatcaaagcatttgaatccaggcagcatttcagtgcagacatctttgacaaatagctcacaaatagataagccaatgaagatggagaaaggggaaatgtatggaaattctccaagatttttaggtgccacaaatttgactatgtattctaagatctcaaactgtcagataaataatctgcatgtgtcttatactaacactgatgttccaatacaagtgaatagttccaaattggttcttccaggaagttcaagtttgaatgtaacttcagatcatatgaatacagaaattactacttataagaagaaattgagtactaatcagccatgccataagactgtaacagatgaagctcagagcaaccttaacacaacagttggattttcaaagtttacatttacaaggatgaaaaattctcagattctttctcagtttaatcaaaattgtataactggaagtatgtctgataccaaaattacacagggtgtggagaaaaagaaaggtgtcaacccattactggaggaagctgttggacagcaatctttggtgaaactttctgaatctttgaaacaatcttcaaaagaggaagaagagaaaaatagaaagtgttctcctgaagaaattcagagaaaaagacaagaagcactggttcggagaatggctaaagcacgagcctcatctgtaaatgcagctcccacttcatttctttaatgaaatattagttggaagacttcacgaagactgctgataactatctgtgattgataggaaattttttttcttgatttctctgtgagaaatgtaatgctgacttttataaagcctggacttctactttatttaataaatcaatgtttgcaatggtaaatgaaacatttccttggacatgtatttgaaagtcattaaatacaaaagttttggaaattcaggaaagttagcaattatgtacggatattatacagaggaaagtagttatatttttaaatgctattattgcagaggatcatcaaaaaagaggtaatctacgttatttcctattctaatgtcttttcctaataaaaaacttcaactttctaagttagtagagactgtttttgtagttttactttcattaactgttgcttaaggtttttatacacttccagattttaattaatactttcatatttctaggaacatggttgatatgaaataaaggactttttatttgtaaggaaattatgttcagttcttagaagtggatttgaattttaataattctaaaatgtgacacattttggaaactttccaccatatttaggaaaactttgattttagaagtctaacatagaggaaaagaagtagtggattgtctacaaaagtaatgtggcatcattaacatttagaactggcagaaacttcatatgtcatctggtccagcttccttattgtatcggtgagaaaaagtaatactgttttcaaagtcataggcaagttaatgctgtgctacaattagaatgatttatttggacacctaaacaattatactatttgtttcaaagtatcagtacataaaataacttgagggagtattattttctagtataaaacaaaagatgtaattaaaagcacaataaggactgtttgataataatgctcattgttccttattttgctttaaagaattagtctttccaggatataaaaatgagaatcttttttcttttcagtttttctgtaactgtaattttcccctcaattaatttacttagttgactcatcttttcttctctattactgttttgtttttttctttttttgccattttgcctatttggaatttgctaaaccagtaatagaagtccaactagagggcgtaaggcagggaggatgctttattcctcttaaatggttttaggagatctagagaaagttagagatatgaaacacctgtcatggtgtggcatttatcactatcaagtgtctcaaagctgtgataatatggtagttactgccctatagctatacagatactcctcaacttaccgtgtagttacatcccaataaacccatcatgagttgaaaataccttaagttaaaaatgcatttactacacttaatctaccagacaacatagcttagcttagcctaccttaaacatgctcaaatcacttatattagcctagagttgggcacatcatctggcaatacggcacactgtagagtatcagttgagctgatgcccagcatcgtgagaatgttgtaccacatatctctagcctgggaaagaatcaaactttaaagtatggtttctattggacgcatatcacttttgcatcacgttagagttgaaaaattgtaagtcaaccattttaagttggagactgtacatcaaaaatggtattttcatatctacagtggagtactggagtttagctaacctatattatttttccaggaatatataataacctagataaatgcaagtagtttctatgtacaaaaataaagagctgagaatcttttactaaaagtggcttcactgtgttctgactatgctttggatatctctgtccttgcttaagctcctccctgcttactgcttgcttttttaagagtacttttagcctattctgttcattcatttagactcagcctaataagtctgtttgaacctcgtacctaaccatcttcactggaattgattgcttctctctgatcataatggtactaattattgtgtctttcattgagcaatactataatgcctttatgtgttgttt

SEQ ID NO: 11897 - DNA, 14754 bp, Homo sapiens
gaccaaaatggcggctgccgttggtgcggggtgcggtttgtagtgctgttgccctactcatccctttgcaaaatgtgaaagaagaagcggctggtggaggcgggccataggcaatgagtcggcgaaggaaacatgatgacagccctagcccgaagaaaacgccgcacaaaacagtggcggcggaggaatgcggctcggtggtcgagccagggaggaggcggctgagatcggcccgcggttcgtggccctgcggggctagagaggggcctcccgggccagtgcggcagcgagagcagcctccgaccgccgccctgtgcagtaaaagtaaccccgagggtgagacgtcggcagcgcggcctgccttggcttcggcgccgcatccccacatcccagcttgcaacagggaaatctggggtgggggtggagtctggagcgtgtattctgtctctgggattcacccctcgagagtccaaaaataatcctataccactccccgatgggcttttgtccccgaacttcagcactaccccgttaggtttgaccatccatttgcctccgccacaggaataggtaatgtggtttacctgtttgcgggagggcggctgctttccaggctgctcctccagtcagcagcagtggtggagtgagaagaaacagctgataggcccgctaacctcagtttttgcccggagaagttatttctctttaaaccctttttttccctgtgacctgctttagagaagagttcataggaaaagttaaagtttgtctcaaagcctggtagatgtctcacctcattgtgaataaaccggaagttcctgtgtgtaacatccctccaaataagatactaaggatctctttcgtctcgattagttttaggtgttactttttaaaagacttctagtaaatcttagttggaactgaaactcatacaaaagcctttattctggagcatgttcttgaaatagtgcttttttttttttttttttttttataccttacgtgtcttttttcttttgggaaagaatctcgccctgtcgcccaggctgcagtgcagtagcacaatctcggctcactgcaacctccgcctcccgggttcaagcgattctcctgcctcagcctcccaagtagctgggactacaggcgtgtgccacctcgcccggctaattttttgtatttttggtagagacaggggtttcaccgtgttagccaggatggtctcgatttcctgacctcgtgatccacccgcctcggcctcccaaagtgctgggattacagccaccgcgcccggccaccttacatgtctttaataatactcctataaagcaatttgggaatgaacaaaaatctttataaaaatttgaaagtgattctagacaaaaattcccaagcattggatcactaatggtttttgaagaatggcaattaatgtagattagatagagttggtgaaagggggctaaacatatttaggtttctgttgggttactttggatttttgaatgtacctataaattacagatggttccccaaagcctccaagactcaatggtaataaatagaatgacttaggttatacagtattgtattatgcattcataaagcttctggattatctagaagtgtttgctatttacaatgtgaagtttgcgaagtgccgcgtggatttttatgtgaaacaagcatttctgttacggttcaggtaattatctctgggaaaaaaaattatcttggactataaaagttagtctcagctatttgaccttggggtcttacgaagtaaggtaatgctttaaaatgcaacaattgttattttactcatattttatatagaaaggtatgaaacaccaaagagagcgctgaaaatggactcactgtcatcttccttcagttctcctaatgatccagatggacagaatgatatcttttgggatcagaattctccattgacaaagcagttaggtaattaattattaacattttttatgtgagtaaatatttgataaatgattcagatttaactagaattctagtcagataatagcatcgggaacctctgagaatgttatatgattttatctgtataagtatgtgatgtaaacacataatcctctaagctgcactaaataaaattactttctaagaagtgacagctgttttttaaaatggagggttttttgtttaaaatttatagaaatgtctttgtttctttaggtaaaggaagaaaaaaacagatttacaccacagatagtgatgagatttcacatattgttaatcgtattgctcctcaggtaaatatcactagttttacagtttgttttaaaacagtgaagaatgtgccactaagtttttgtagtttctttaaatgaaaagtattgtctattataattcttttttccaaaaataaggcagcaaagattactgttttgccttttctacttttgaaatacatattttgaaaaaaggaatataatataaaatacaagatattttcttaagtatatatcttgttttaattttttagagtaatttttgactagggcattgtgtttatctgtaatgttgtgcttaacaacatacgacatcatttttcaagttgctaaaataatagaataaggcagtgaaaaaagtttatacttctatgattgttttgtgattggtacttcctgtctgtaacatttccccattgaaactattaatactcatttccttataagattatcaagaaacacttacaaaagtggagagcactgaattcaaatttagtcctcattcaacctcctatgctgtgtgacccagtgcaagttatttaaactcccaccacttcagttcattcagccatgaactagaattattgtgttgctcttgctgtcttcattggatcattatgagaattaaactagataaaaattctttgtaaactatagagtgctataattgtaaggttacgttaaggttgttactgtaatagaaccatctccaaagcttttttttcttttcttggacaggcatggtgactcattcctgtaatctcagcattttgggaggaaggctgaggcaggaagattgcttgaggccaggagtttaagaccctgtctcttaaaaaaaatttttttttgagtgtttcgtttctttttttcatttctgttcttttattgtttgagtgaaatagaaatatgttcaagtcaatcatttgacacaaagcaatccagtaactctaatattataattactaagaagcaaaggctcaatacgtgaaactgttctgaacttctttactttttgttctctttttcttatttaacatttaaatccagagaacatttttgcttagtgtcttctctgaaggaagtatgccatttttccttaacctgcgcttgaatagttactatatgttgaccataaacaatagatggcactggcccaaaacatggtttgaagaattactgtcacccaggtggaagagacagaaaatgaagtttttcttagcagctataaaatatccaaaattacacctagcacagtcaaaacaactctgttgctactagctctacattccatttttagcatgtcatagaaattcattttacttacagttaattagttaaatagcatttatgccataatagtacttactctataagttaacaatagatcttcattaattgtgggtttcacatgaaagaagcataataaaatgtgtttgggtgggccagtctaaatagtgataaaaagatagttgtgaataaattattggactctttacctaagtgggctagaaataatagctcatataaagaaatgacaacagtacgcaagtggtaacttgtataaaagaaaaaaatatagtgaaattagtagctttaaaatgttaccctcttaaactgagtacttttaaagcatataaatctttagcagtttcaaggtctgtttgaaagcttgtcatgttctcagaatgacaaatacttatattgtttatttttaggtgagtcattctcaaatcatttagttttaacattttcagagatagcatttttttaaatatgcgcttttattttggttggacagtcagttcactttttgcagggatacttttatacaatgttgtttatttgaagatggtatgtatcttcatttatacagctttgcacagtatactttttataatgaaatgaagtaatgcatttagataccttatacagcacctggattatggttgaaaatcaataaattatgtaattattcatgaagaaatatgtaataacatgtataaatagtatacaaacatacataggacccatgtatatgtaaagttgggtacataaagtcataatttagttctctgaaaattgaatgaatttaaaattacttttgtaaatggcagagttcataattaagactatgattgtctttaaattcaagattgttgaaataaaagggaaaatatattgagtctgaaagtgaaattactgattttcttgagtatttgcaaagctaaaggcaactaggttcaagttgacattaagaaaacttttttgattcattgaggatttgaagtaccaaactgtagggatcttttcacctaaatcttctagtaaataaatgtatactgacactggtatgcccaatattgtgctggatgctgagttattctaagaagagtccttgcctttgagtagcctataatctagtagtaaaattattttttaaattgtgtgatatttatgttcattctaggtactataaaatagagtgaaaatggttacttgatttgatttgttggtttggtttgcaattaatgcctaaagctcattctgtaatttttttgtgtgatcaagtgactgaaaggtacagcaaaagtatccaggtctaaaatgccttttttctgtatattatctgggctaaacttttctgttttctctatttttttattcttattcctgtctcattcttagcatcagttctaaccttgctcttatctcttaattcattcctgatcttaattctgagtgttcttaatttaggtcaacatggattgtccaactttagataaagattataataaggataaagaaaatttggagaaacagatgatacagaaagaattccatatgtatctcctctcaattctgatgatttctgccacacagtttctgacactaatgtttttataagtatcttaggacaattaaaatgtcaattttcttttgataaaaacatgcttctgttattaaatgtacatttgataaatttaattcttaaaacaatatttttttaaaataagcaatttgtaattctgaatgttttcattctctgaaacataagtggatcaattattgtagcttattattgctatctcccaacttcctattgtttttgagtttggtaagtgttacctcaccagaatttaggaaattaattcaaaatcattagtttttattgtcttttttctttcttttgtttttttggaagacgggggatgctacactggtactttatacctctttttttccctatctgccaaaggatgaaaaaccaacaacaaattctatgctggacatgtggattggtgaaactgctattccttgtactcccagtgtagcaaaaggaaaatcaagagcaaaaatcagctgcacaaagtaagttaagacttttcagcttttctgaaattcagtgaagcaaatattttttgataatactccattttggttttgtgaatatatcaaaatttttgttaataaaatttccacagttttgatctatcaaattttggagttaaaataattataactgttaaaatcttagagctttaacatcaaaatatgttaaataacagttggatataatgtttcagaacatttttagttattttttaatcttgtttaataggttaaaaacacaaagtcaagaagaagaacttatgaaactggctaaacaatttgataaaaatatggaagagctagatgtgattcaagagcaaaacaagaggaattatgattttacccagatgatttcagaaacagagattttaagtaattataaagataatatacagatgtggtcattacataatatagttcccgaaatagataatgctacaaaaaagccaatcaaaggaaacaccaagatatctgtggcaaataatcaaaatagcagtcagaagccatttgaccaaattgctgaagcagcctttaatgctatttttgatggttctactcagaaatgtagcggacagttaagccaagaactgccagaggctttttggagcaccagtaatactacctttgtaaagacaaatgctttgaaagaggagaaaatcattactaatgaaactctggtcattgaaaaactgtcaaataaaaccccacgatcactttcttctcaagtagatacacccataatgacaaaatcatgtgtgacttcctgtactaaggagccagaaacttctaataagtacattgatgcatttactacaagtgattttgaggatgattgggaaaacttactaggtagtgaaccttttgctatgcaaaatatcgacatgcctgaactctttccttctaaaacagcccatgttactgatcaaaaggaaatttgtacctttaatagtaaaactgttaaaaatacgtcaagagcaaatacaagtccagatgccaggttaggagattcaaaagtattacaagatctttcttcaaagacatatgacagagaattaatagatgcagaatatagattttcaccaaattcaaataaatcaaacaaattatccactggaaataaaatgaaatttgagaactcttccaataaaattgttattcaagacgaaattcaaaattgtatagttacatctaatctgacaaaaataaaggaagatattcttactaactctactgaagcttctgaaaggaagtcagctttgaacacaaggtattctaatgaacagaaaaataagtgcattttaaatcagtctattaaagcccctgttaatactgatctttttggctctgcaaatctaggcagtaaaaccagtgttagtaacccaaatcagactagtgcatcaaaagtaggttctttctttgatgattggaatgatccctcatttgccaatgaaattattaaagcatgtcatcaattagataatacctgggaagcagatgatgtagatgatgatttgttgtaccaagcatgtgatgatattgaaagactaactcagcaacaagacattagaaaggacagtaagacatcagaaagtatatgtgagatcaataataattccgaacatggagccaaactaactcagcaacaagacattagaaaggacagtaagacatcagaaagtatatgtgagatcaataataattccgaacatggagccaaaaacatgtttgctatatctaaacaaggaagtaatttggtacaatcaaagcatttgaatccaggcagcatttcagtgcagacatctttgacaaatagctcacaaatagataagccaatgaagatggagaaaggggaaatgtatggaaattctccaagatttttaggtgccacaaatttgactatgtattctaagatctcaaactgtcagataaataatctgcatgtgtcttatactaacactgatgttccaatacaagtgaatagttccaaattggttcttccaggaagttcaagtttgaatgtaacttcagatcatatgaatacagaaattactacttataagaagaaattgagtactaatcagccatgccataagactgtaacagatgaagctcagagcaaccttaacacaacagttggattttcaaagtttacatttacaaggatgaaaaattctcagattctttctcagtttaatcaaaattgtataactggaagtatgtctgataccaaaattacacagggtgtggagaaaaagaaaggtgtcaacccattactggaggaagctgttggacagcaatctttggtgaaactttctgaatctttgaaacaatcttcaaaaggtatgtatgaaatatgaaatagttttctttgaaaagcatcttaaaaagtagtaaaataattatttgttgtttttgagtgtgagtaatgtataaggtaaaactattctatgactagttaattttaagaattaactagaattcttaaaatgatacttggaaataattatacggcattatacagagtagttggtttatttttcaaaatattacattgaattctttcccagcacttaatacaatgactggcatatagtaggtactcagtaaatattttttgaataacttattctttcttggaaaatcatacctttagatatatgtattatagtgttcattaagattgtatttactaaattgttttaaaacttgagtaatctgggaagcagatgatgaagcagtgaggtaaataatatttagaaatttagagcattctaattaaacgtctttactagtgtgatatttgatataaacgtgctagcggtgatggttaaaattatgatttacttatttgataacagctatcatttctgattcttccaatttctcttttccccaagtctccattctatcaataagtttcattctttcaaaaaccgtatccccagactccatttttctttctacaacaagttaacatttcttgatgagactactgcagttcttttatctatctcctttcaattcttatctccaaacagtggaatagccttttaaaattggatgggcaaaaatggcgtttctatgcttaaaacaaccttcaatggctgcccgtcatatttcaaataaaatccaaactgtatactgtgaccaacaaagctgtggattatctctctttaacctgcgtctcctcttttttccttacctactaagcttcagctataccagctatcttttagtttttcaaacagtgtatgtttttcttccttgtccaggaacttagaccgtgctcttccctttgactaaaactacttcttttcaacatgtgaccccttccccactcttttgttggtgctttcttacatctcagtataagtactactttctcacagaggccttccttgaagagtctataaatagatctccttgtttattttttatttcctaattgctttcatcacaagttgaaattaaatatttagtgactcttctctgtcttgttggcattactgttccaactttcctatctaagtgactttttttaaaaatttacaatagtaatatgctagttatttaaaaagaaaagtaaaacagtatagaataatttaaaggaaaaagttaagtcttctgtttctcctttctgataaccatcccttacggaaaaccactattaatagttggtatgatgtagcattttctatgaatataaaaagatatgtgtgtgtgtatgtacgtatatatgtgtatgcatatatatatacctatagatctatttaaatattaataaatctgtatacccactatttggcaacttgcttttgccttaatatattatagctgtcttttcctattagtacatataaatttattttagtcctgttaatgactatgtgatatatatggtggatgtatcataatttaactgtttctctgtgatggaagtttgggttggttgcagtcttttgcaattacaaacaatactccagtaaatatccttctgcataaatttccgcatgcttgtataattgtatctgttaattcctaaaaaattgctacaagaggaagttttaaaatttgatggataccaccaaatttctatccgaagcagttataccaatttatcttatcaaaacttacagtaaataattctctacacccaagggtgtccaatcttttggcttccctgggccacattggaagaattatcttggatcacacataagatacactgacactaacaacagctgatgaactaaaaaaaaaaaaaaaaaaaatcacaaaagaatctcataatgttgtaaaaaagtttatgaatttgtgttgggctgcattcaaagccatcctgggctgcgggtagcttgcgggctgcgggttggacaagcttgctttacatgatagcccaaactagatattttgaaatattaaaaattgttctcaatctataataattttaagtatttaaatttgtattaaagtgagcatattgtaactaaatcaagcatgttcctagcatgactttatttacagatagagttgacccttgaacagtgtgggggttagaggcgctgatctgatttgcagtcgaaagtctgtgtataacttttgatcccctaaaaacttaactgctaatagcctgctgttgaccagaaacctttccgataacataattaattaatacatattttgtatgctcttatatgtattatatactgtattcttacaataagctggaaaagtgttattaagaaaataaggaagagaaaataatatttactattcattaagtgaaagtggatcatcataaaggtcttcatcctcatgatcttcatgtctagtaggccgagaaggaagaagagtaggagttggtcttgctgtctcaggggtgtcagatgcagaaaacaacctacaaatgagtggacttgccagttcaagcccatgttgttcaagggtcaactatagttataattctataaaagactaaacctcctggagtatttgagttttcccaaaactcctatctaccaatctatctgcattttttatggataatctgcgttttagcttaccttatcaatattttctttaaacttattgatagtactgaatctcttaattactattaactttgttgatgttttctattgtttctacttccttttactttggtatgtagcaagctgctctccagggaagtatctctgaaacaaaactcacttaactcccacatttatttcaggcaggagttggcaaactatgatctgtccaaatccagcctgcagcttgtttatgtatagccagcacactaaaaatgatttttacattttaaatggttggaaaaaaattaaaaggagaataatatttcatgacatttgaaaattatatgaaatccagatttcattgtccataaacaggttttatttgaatacagctcatcagttatttatacattatccataactatttttgctacagtggtacaggtgagcagttgcaacaagatactcaaaggttaacattcttgctttctgactctttctttacaggaaaaaaaaaaattactgacccttgcactgtaagatcaagattaagaagagcagcttttgcttagtactttacaatattttaagacttcattgtgtatttttattatagattgagttaaaggaaagactgatgggaaaaatggatgagtccctaaatcaaattttcatggtgtgacctgattatcatttgaaattattttctataatattgccaagcaaattgtaagaccaactttaggaagttatgttttctgctgttacagattattaacctgttttctttccacacagtcaaattcagtgtaaagtctttggatgtgtagtctgagtttgttgtgtttctcagctttgagactaaaagtattagataattagtcaagctaattagaaagtatcttctggtgtctctctttaggaaaaaatatctacagtctgttaggtaaatagcttaggaaataaaagccatcaaaatcatctgggaaacttatttaaaatatgtatttcttagcctgaataccccctcccatttctgattataccaagaaaggaaagggaggcagattatatattttgaaaatgcctctgttagttaacaagagaaatgtctcataaattgtgtatctttttctaaatgtcagaataaatgatatacttaaatatgtattagggtgatagtcttaaacttaaaatatcatttaaatgagaaagtgatttctaatacaaagcctcaacttactaagttaattgagattattttaaagtttctccaaaatgcatcctccaaataaaaatataatttctgacagtgaatcacaggtaaccagtttgacatgacagatttcattttatcactctaaaatatatttcctcagtggatgaaatgaaaattttatagctctatagggaaaagtagatgtgaatattaatataacatcttatgtaaatatacactgtttgagattgataactaatttaattccttatattttgactattttccaattaaagtttacataacattttaaatcccaatgtatcctttttaaagatatatttattcgtgggtcatataaattagatgtcattgtccacaagaattatttggtgggtagtcagttttctatcaaactgaattttatcacactgtgaaaagaatgtatcaaatagagacagatccatcagtgcttgattttcttttgaactggagcattatatctgtattatgtacttagaattttatattcagtagtttagtttgatttaatagccaactaatatggcaaatctgggtgattaaaaaaagcaaaaattaaagcacatattgaatgactttataggctataaaagtaaaactcatcttttgttgaatttttagaggaagaagagaaaaatagaaagtgttctcctgaagaaattcagagaaaaagacaagaagcactggttcggagaatggctaaagcacgagcctcatctgtaaatgcagctcccacttcatttctttaatgaaatattagttggaagacttcacgaagactgctgataactatctgtgattgataggaaattttttttcttgatttctctgtgagaaatgtaatgctgacttttataaagcctggacttctactttatttaataaatcaatgtttgcaatggtaaatgaaacatttccttggacatgtatttgaaagtcattaaatacaaaagttttggaaattcaggaaagttagcaattatgtacggatattatacagaggaaagtagttatatttttaaatgctattattgcagaggatcatcaaaaaagaggtaatctacgttatttcctattctaatgtcttttcctaataaaaaacttcaactttctaagttagtagagactgtttttgtagttttactttcattaactgttgcttaaggtttttatacacttccagattttaattaatactttcatatttctaggaacatggttgatatgaaataaaggactttttatttgtaaggaaattatgttcagttcttagaagtggatttgaattttaataattctaaaatgtgacacattttggaaactttccaccatatttaggaaaactttgattttagaagtctaacatagaggaaaagaagtagtggattgtctacaaaagtaatgtggcatcattaacatttagaactggcagaaacttcatatgtcatctggtccagcttccttattgtatcggtgagaaaaagtaatactgttttcaaagtcataggcaagttaatgctgtgctacaattagaatgatttatttggacacctaaacaattatactatttgtttcaaagtatcagtacataaaataacttgagggagtattattttctagtataaaacaaaagatgtaattaaaagcacaataaggactgtttgataataatgctcattgttccttattttgctttaaagaattagtctttccaggatataaaaatgagaatcttttttcttttcagtttttctgtaactgtaattttcccctcaattaatttacttagttgactcatcttttcttctctattactgttttgtttttttctttttttgccattttgcctatttggaatttgctaaaccagtaatagaagtccaactagagggcgtaaggcagggaggatgctttattcctcttaaatggttttaggagatctagagaaagttagagatatgaaacacctgtcatggtgtggcatttatcactatcaagtgtctcaaagctgtgataatatggtagttactgccctatagctatacagatactcctcaacttaccgtgtagttacatcccaataaacccatcatgagttgaaaataccttaagttaaaaatgcatttactacacttaatctaccagacaacatagcttagcttagcctaccttaaacatgctcaaatcacttatattagcctagagttgggcacatcatctggcaatacggcacactgtagagtatcagttgagctgatgcccagcatcgtgagaatgttgtaccacatatctctagcctgggaaagaatcaaactttaaagtatggtttctattggacgcatatcacttttgcatcacgttagagttgaaaaattgtaagtcaaccattttaagttggagactgtacatcaaaaatggtattttcatatctacagtggagtactggagtttagctaacctatattatttttccaggaatatataataacctagataaatgcaagtagtttctatgtacaaaaataaagagctgagaatcttttactaaaagtggcttcactgtgttctgactatgctttggatatctctgtccttgcttaagctcctccctgcttactgcttgcttttttaagagtacttttagcctattctgttcattcatttagactcagcctaataagtctgtttgaacctcgtacctaaccatcttcactggaattgattgcttctctctgatcataatggtactaattattgtgtctttcattgagcaatactataatgcctttatgtgttgttt

SEQ ID NO: 11898 - DNA, 5687 bp, Homo sapiens
gaccaaaatggcggctgccgttggtgcggggtgcggtttgtagtgctgttgccctactcatccctttgcaaaatgtgaaagaagaagcggctggtggaggcgggccataggcaatgagtcggcgaaggaaacatgatgacagccctagcccgaagaaaacgccgcacaaaacagtggcggcggaggaatgcggctcggtggtcgagccagggaggaggcggctgagatcggcccgcggttcgtggccctgcggggctagagaggggcctcccgggccagtgcggcagcgagagcagcctccgaccgccgccctgtgcagtaaaagtaaccccgagggtatgaaacaccaaagagagcgctgaaaatggactcactgtcatcttccttcagttctcctaatgatccagatggacagaatgatatcttttgggatcagaattctccattgacaaagcagttaggtaaaggaagaaaaaaacagatttacaccacagatagtgatgagatttcacatattgttaatcgtattgctcctcaggcatggtgactcattcctgtaatctcagcattttgggaggaaggctgaggcaggaagattgcttgaggccaggagtttaagaccctgtctcttaaaaaaaatttttttttgagtgtttcgtttctttttttcatttctgttcttttattgtttgagtgaaatagaaatatgttcaagtcaatcatttgacacaaagcaatccagtaactctaatattataattactaagaagcaaaggctcaatacgtgaaactgttctgaacttctttactttttgttctctttttcttatttaacatttaaatccagagaacatttttgcttagtgtcttctctgaaggaagtatgccatttttccttaacctgcgcttgaatagttactatatgttgaccataaacaatagatggcactggcccaaaacatggtttgaagaattactgtcacccaggtggaagagacagaaaatgaagtttttcttagcagctataaaatatccaaaattacacctagcacagtcaaaacaactctgttgctactagctctacattccatttttagcatgtcatagaaattcattttacttacagttaattagttaaatagcatttatgccataatagtacttactctataagttaacaatagatcttcattaattgtgggtttcacatgaaagaagcataataaaatgtgtttgggtgggccagtctaaatagtgataaaaagatagttgtgaataaattattggactctttacctaagtgggctagaaataatagctcatataaagaaatgacaacagtacgcaagtggtaacttgtataaaagaaaaaaatatagtgaaattagtagctttaaaatgttaccctcttaaactgagtacttttaaagcatataaatctttagcagtttcaaggtctgtttgaaagcttgtcatgttctcagaatgacaaatacttatattgtttatttttaggtgagtcattctcaaatcatttagttttaacattttcagagatagcatttttttaaatatgcgcttttattttggttggacagtcagttcactttttgcagggatacttttatacaatgttgtttatttgaagatggtatgtatcttcatttatacagctttgcacagtatactttttataatgaaatgaagtaatgcatttagataccttatacagcacctggattatggttgaaaatcaataaattatgtaattattcatgaagaaatatgtaataacatgtataaatagtatacaaacatacataggacccatgtatatgtaaagttgggtacataaagtcataatttagttctctgaaaattgaatgaatttaaaattacttttgtaaatggcagagttcataattaagactatgattgtctttaaattcaagattgttgaaataaaagggaaaatatattgagtctgaaagtgaaattactgattttcttgagtatttgcaaagctaaaggcaactaggttcaagttgacattaagaaaacttttttgattcattgaggatttgaagtaccaaactgtagggatcttttcacctaaatcttctagtaaataaatgtatactgacactggtatgcccaatattgtgctggatgctgagttattctaagaagagtccttgcctttgagtagcctataatctagtagtaaaattattttttaaattgtgtgatatttatgttcattctaggtactataaaatagagtgaaaatggttacttgatttgatttgttggtttggtttgcaattaatgcctaaagctcattctgtaatttttttgtgtgatcaagtgactgaaaggtacagcaaaagtatccaggtctaaaatgccttttttctgtatattatctgggctaaacttttctgttttctctatttttttattcttattcctgtctcattcttagcatcagttctaaccttgctcttatctcttaattcattcctgatcttaattctgagtgttcttaatttaggtcaacatggattgtccaactttagataaagattataataaggataaagaaaatttggagaaacagatgatacagaaagaattccatatgtatctcctctcaattctgatgatttctgccacacagtttctgacactaatgtttttataagtatcttaggacaattaaaatgtcaattttcttttgataaaaacatgcttctgttattaaatgtacatttgataaatttaattcttaaaacaatatttttttaaaataagcaatttgtaattctgaatgttttcattctctgaaacataagtggatcaattattgtagcttattattgctatctcccaacttcctattgtttttgagtttggtaagtgttacctcaccagaatttaggaaattaattcaaaatcattagtttttattgtcttttttctttcttttgtttttttggaagacgggggatgctacactggtactttatacctctttttttccctatctgccaaaggatgaaaaaccaacaacaaattctatgctggacatgtggattggtgaaactgctattccttgtactcccagtgtagcaaaaggaaaatcaagagcaaaaatcagctgcacaaagaagttcaagtttgaatgtaacttcagatcatatgaatacagaaattactacttataagaagaaattgagtactaatcagccatgccataagactgtaacagatgaagctcagagcaaccttaacacaacagttggattttcaaagtttacatttacaaggatgaaaaattctcagattctttctcagtttaatcaaaattgtataactggaagtatgtctgataccaaaattacacagggtgtggagaaaaagaaaggtgtcaacccattactggaggaagctgttggacagcaatctttggtgaaactttctgaatctttgaaacaatcttcaaaagaggaagaagagaaaaatagaaagtgttctcctgaagaaattcagagaaaaagacaagaagcactggttcggagaatggctaaagcacgagcctcatctgtaaatgcagctcccacttcatttctttaatgaaatattagttggaagacttcacgaagactgctgataactatctgtgattgataggaaattttttttcttgatttctctgtgagaaatgtaatgctgacttttataaagcctggacttctactttatttaataaatcaatgtttgcaatggtaaatgaaacatttccttggacatgtatttgaaagtcattaaatacaaaagttttggaaattcaggaaagttagcaattatgtacggatattatacagaggaaagtagttatatttttaaatgctattattgcagaggatcatcaaaaaagaggtaatctacgttatttcctattctaatgtcttttcctaataaaaaacttcaactttctaagttagtagagactgtttttgtagttttactttcattaactgttgcttaaggtttttatacacttccagattttaattaatactttcatatttctaggaacatggttgatatgaaataaaggactttttatttgtaaggaaattatgttcagttcttagaagtggatttgaattttaataattctaaaatgtgacacattttggaaactttccaccatatttaggaaaactttgattttagaagtctaacatagaggaaaagaagtagtggattgtctacaaaagtaatgtggcatcattaacatttagaactggcagaaacttcatatgtcatctggtccagcttccttattgtatcggtgagaaaaagtaatactgttttcaaagtcataggcaagttaatgctgtgctacaattagaatgatttatttggacacctaaacaattatactatttgtttcaaagtatcagtacataaaataacttgagggagtattattttctagtataaaacaaaagatgtaattaaaagcacaataaggactgtttgataataatgctcattgttccttattttgctttaaagaattagtctttccaggatataaaaatgagaatcttttttcttttcagtttttctgtaactgtaattttcccctcaattaatttacttagttgactcatcttttcttctctattactgttttgtttttttctttttttgccattttgcctatttggaatttgctaaaccagtaatagaagtccaactagagggcgtaaggcagggaggatgctttattcctcttaaatggttttaggagatctagagaaagttagagatatgaaacacctgtcatggtgtggcatttatcactatcaagtgtctcaaagctgtgataatatggtagttactgccctatagctatacagatactcctcaacttaccgtgtagttacatcccaataaacccatcatgagttgaaaataccttaagttaaaaatgcatttactacacttaatctaccagacaacatagcttagcttagcctaccttaaacatgctcaaatcacttatattagcctagagttgggcacatcatctggcaatacggcacactgtagagtatcagttgagctgatgcccagcatcgtgagaatgttgtaccacatatctctagcctgggaaagaatcaaactttaaagtatggtttctattggacgcatatcacttttgcatcacgttagagttgaaaaattgtaagtcaaccattttaagttggagactgtacatcaaaaatggtattttcatatctacagtggagtactggagtttagctaacctatattatttttccaggaatatataataacctagataaatgcaagtagtttctatgtacaaaaataaagagctgagaatcttttactaaaagtggcttcactgtgttctgactatgctttggatatctctgtccttgcttaagctcctccctgcttactgcttgcttttttaagagtacttttagcctattctgttcattcatttagactcagcctaataagtctgtttgaacctcgtacctaaccatcttcactggaattgattgcttctctctgatcataatggtactaattattgtgtctttcattgagcaatactataatgcctttatgtgttgttt

SEQ ID NO: 11899 - DNA, 14766 bp, Homo sapiens
gcgcgccccaccgaccaaaatggcggctgccgttggtgcggggtgcggtttgtagtgctgttgccctactcatccctttgcaaaatgtgaaagaagaagcggctggtggaggcgggccataggcaatgagtcggcgaaggaaacatgatgacagccctagcccgaagaaaacgccgcacaaaacagtggcggcggaggaatgcggctcggtggtcgagccagggaggaggcggctgagatcggcccgcggttcgtggccctgcggggctagagaggggcctcccgggccagtgcggcagcgagagcagcctccgaccgccgccctgtgcagtaaaagtaaccccgagggtgagacgtcggcagcgcggcctgccttggcttcggcgccgcatccccacatcccagcttgcaacagggaaatctggggtgggggtggagtctggagcgtgtattctgtctctgggattcacccctcgagagtccaaaaataatcctataccactccccgatgggcttttgtccccgaacttcagcactaccccgttaggtttgaccatccatttgcctccgccacaggaataggtaatgtggtttacctgtttgcgggagggcggctgctttccaggctgctcctccagtcagcagcagtggtggagtgagaagaaacagctgataggcccgctaacctcagtttttgcccggagaagttatttctctttaaaccctttttttccctgtgacctgctttagagaagagttcataggaaaagttaaagtttgtctcaaagcctggtagatgtctcacctcattgtgaataaaccggaagttcctgtgtgtaacatccctccaaataagatactaaggatctctttcgtctcgattagttttaggtgttactttttaaaagacttctagtaaatcttagttggaactgaaactcatacaaaagcctttattctggagcatgttcttgaaatagtgcttttttttttttttttttttttataccttacgtgtcttttttcttttgggaaagaatctcgccctgtcgcccaggctgcagtgcagtagcacaatctcggctcactgcaacctccgcctcccgggttcaagcgattctcctgcctcagcctcccaagtagctgggactacaggcgtgtgccacctcgcccggctaattttttgtatttttggtagagacaggggtttcaccgtgttagccaggatggtctcgatttcctgacctcgtgatccacccgcctcggcctcccaaagtgctgggattacagccaccgcgcccggccaccttacatgtctttaataatactcctataaagcaatttgggaatgaacaaaaatctttataaaaatttgaaagtgattctagacaaaaattcccaagcattggatcactaatggtttttgaagaatggcaattaatgtagattagatagagttggtgaaagggggctaaacatatttaggtttctgttgggttactttggatttttgaatgtacctataaattacagatggttccccaaagcctccaagactcaatggtaataaatagaatgacttaggttatacagtattgtattatgcattcataaagcttctggattatctagaagtgtttgctatttacaatgtgaagtttgcgaagtgccgcgtggatttttatgtgaaacaagcatttctgttacggttcaggtaattatctctgggaaaaaaaattatcttggactataaaagttagtctcagctatttgaccttggggtcttacgaagtaaggtaatgctttaaaatgcaacaattgttattttactcatattttatatagaaaggtatgaaacaccaaagagagcgctgaaaatggactcactgtcatcttccttcagttctcctaatgatccagatggacagaatgatatcttttgggatcagaattctccattgacaaagcagttaggtaattaattattaacattttttatgtgagtaaatatttgataaatgattcagatttaactagaattctagtcagataatagcatcgggaacctctgagaatgttatatgattttatctgtataagtatgtgatgtaaacacataatcctctaagctgcactaaataaaattactttctaagaagtgacagctgttttttaaaatggagggttttttgtttaaaatttatagaaatgtctttgtttctttaggtaaaggaagaaaaaaacagatttacaccacagatagtgatgagatttcacatattgttaatcgtattgctcctcaggtaaatatcactagttttacagtttgttttaaaacagtgaagaatgtgccactaagtttttgtagtttctttaaatgaaaagtattgtctattataattcttttttccaaaaataaggcagcaaagattactgttttgccttttctacttttgaaatacatattttgaaaaaaggaatataatataaaatacaagatattttcttaagtatatatcttgttttaattttttagagtaatttttgactagggcattgtgtttatctgtaatgttgtgcttaacaacatacgacatcatttttcaagttgctaaaataatagaataaggcagtgaaaaaagtttatacttctatgattgttttgtgattggtacttcctgtctgtaacatttccccattgaaactattaatactcatttccttataagattatcaagaaacacttacaaaagtggagagcactgaattcaaatttagtcctcattcaacctcctatgctgtgtgacccagtgcaagttatttaaactcccaccacttcagttcattcagccatgaactagaattattgtgttgctcttgctgtcttcattggatcattatgagaattaaactagataaaaattctttgtaaactatagagtgctataattgtaaggttacgttaaggttgttactgtaatagaaccatctccaaagcttttttttcttttcttggacaggcatggtgactcattcctgtaatctcagcattttgggaggaaggctgaggcaggaagattgcttgaggccaggagtttaagaccctgtctcttaaaaaaaatttttttttgagtgtttcgtttctttttttcatttctgttcttttattgtttgagtgaaatagaaatatgttcaagtcaatcatttgacacaaagcaatccagtaactctaatattataattactaagaagcaaaggctcaatacgtgaaactgttctgaacttctttactttttgttctctttttcttatttaacatttaaatccagagaacatttttgcttagtgtcttctctgaaggaagtatgccatttttccttaacctgcgcttgaatagttactatatgttgaccataaacaatagatggcactggcccaaaacatggtttgaagaattactgtcacccaggtggaagagacagaaaatgaagtttttcttagcagctataaaatatccaaaattacacctagcacagtcaaaacaactctgttgctactagctctacattccatttttagcatgtcatagaaattcattttacttacagttaattagttaaatagcatttatgccataatagtacttactctataagttaacaatagatcttcattaattgtgggtttcacatgaaagaagcataataaaatgtgtttgggtgggccagtctaaatagtgataaaaagatagttgtgaataaattattggactctttacctaagtgggctagaaataatagctcatataaagaaatgacaacagtacgcaagtggtaacttgtataaaagaaaaaaatatagtgaaattagtagctttaaaatgttaccctcttaaactgagtacttttaaagcatataaatctttagcagtttcaaggtctgtttgaaagcttgtcatgttctcagaatgacaaatacttatattgtttatttttaggtgagtcattctcaaatcatttagttttaacattttcagagatagcatttttttaaatatgcgcttttattttggttggacagtcagttcactttttgcagggatacttttatacaatgttgtttatttgaagatggtatgtatcttcatttatacagctttgcacagtatactttttataatgaaatgaagtaatgcatttagataccttatacagcacctggattatggttgaaaatcaataaattatgtaattattcatgaagaaatatgtaataacatgtataaatagtatacaaacatacataggacccatgtatatgtaaagttgggtacataaagtcataatttagttctctgaaaattgaatgaatttaaaattacttttgtaaatggcagagttcataattaagactatgattgtctttaaattcaagattgttgaaataaaagggaaaatatattgagtctgaaagtgaaattactgattttcttgagtatttgcaaagctaaaggcaactaggttcaagttgacattaagaaaacttttttgattcattgaggatttgaagtaccaaactgtagggatcttttcacctaaatcttctagtaaataaatgtatactgacactggtatgcccaatattgtgctggatgctgagttattctaagaagagtccttgcctttgagtagcctataatctagtagtaaaattattttttaaattgtgtgatatttatgttcattctaggtactataaaatagagtgaaaatggttacttgatttgatttgttggtttggtttgcaattaatgcctaaagctcattctgtaatttttttgtgtgatcaagtgactgaaaggtacagcaaaagtatccaggtctaaaatgccttttttctgtatattatctgggctaaacttttctgttttctctatttttttattcttattcctgtctcattcttagcatcagttctaaccttgctcttatctcttaattcattcctgatcttaattctgagtgttcttaatttaggtcaacatggattgtccaactttagataaagattataataaggataaagaaaatttggagaaacagatgatacagaaagaattccatatgtatctcctctcaattctgatgatttctgccacacagtttctgacactaatgtttttataagtatcttaggacaattaaaatgtcaattttcttttgataaaaacatgcttctgttattaaatgtacatttgataaatttaattcttaaaacaatatttttttaaaataagcaatttgtaattctgaatgttttcattctctgaaacataagtggatcaattattgtagcttattattgctatctcccaacttcctattgtttttgagtttggtaagtgttacctcaccagaatttaggaaattaattcaaaatcattagtttttattgtcttttttctttcttttgtttttttggaagacgggggatgctacactggtactttatacctctttttttccctatctgccaaaggatgaaaaaccaacaacaaattctatgctggacatgtggattggtgaaactgctattccttgtactcccagtgtagcaaaaggaaaatcaagagcaaaaatcagctgcacaaagtaagttaagacttttcagcttttctgaaattcagtgaagcaaatattttttgataatactccattttggttttgtgaatatatcaaaatttttgttaataaaatttccacagttttgatctatcaaattttggagttaaaataattataactgttaaaatcttagagctttaacatcaaaatatgttaaataacagttggatataatgtttcagaacatttttagttattttttaatcttgtttaataggttaaaaacacaaagtcaagaagaagaacttatgaaactggctaaacaatttgataaaaatatggaagagctagatgtgattcaagagcaaaacaagaggaattatgattttacccagatgatttcagaaacagagattttaagtaattataaagataatatacagatgtggtcattacataatatagttcccgaaatagataatgctacaaaaaagccaatcaaaggaaacaccaagatatctgtggcaaataatcaaaatagcagtcagaagccatttgaccaaattgctgaagcagcctttaatgctatttttgatggttctactcagaaatgtagcggacagttaagccaagaactgccagaggctttttggagcaccagtaatactacctttgtaaagacaaatgctttgaaagaggagaaaatcattactaatgaaactctggtcattgaaaaactgtcaaataaaaccccacgatcactttcttctcaagtagatacacccataatgacaaaatcatgtgtgacttcctgtactaaggagccagaaacttctaataagtacattgatgcatttactacaagtgattttgaggatgattgggaaaacttactaggtagtgaaccttttgctatgcaaaatatcgacatgcctgaactctttccttctaaaacagcccatgttactgatcaaaaggaaatttgtacctttaatagtaaaactgttaaaaatacgtcaagagcaaatacaagtccagatgccaggttaggagattcaaaagtattacaagatctttcttcaaagacatatgacagagaattaatagatgcagaatatagattttcaccaaattcaaataaatcaaacaaattatccactggaaataaaatgaaatttgagaactcttccaataaaattgttattcaagacgaaattcaaaattgtatagttacatctaatctgacaaaaataaaggaagatattcttactaactctactgaagcttctgaaaggaagtcagctttgaacacaaggtattctaatgaacagaaaaataagtgcattttaaatcagtctattaaagcccctgttaatactgatctttttggctctgcaaatctaggcagtaaaaccagtgttagtaacccaaatcagactagtgcatcaaaagtaggttctttctttgatgattggaatgatccctcatttgccaatgaaattattaaagcatgtcatcaattagataatacctgggaagcagatgatgtagatgatgatttgttgtaccaagcatgtgatgatattgaaagactaactcagcaacaagacattagaaaggacagtaagacatcagaaagtatatgtgagatcaataataattccgaacatggagccaaactaactcagcaacaagacattagaaaggacagtaagacatcagaaagtatatgtgagatcaataataattccgaacatggagccaaaaacatgtttgctatatctaaacaaggaagtaatttggtacaatcaaagcatttgaatccaggcagcatttcagtgcagacatctttgacaaatagctcacaaatagataagccaatgaagatggagaaaggggaaatgtatggaaattctccaagatttttaggtgccacaaatttgactatgtattctaagatctcaaactgtcagataaataatctgcatgtgtcttatactaacactgatgttccaatacaagtgaatagttccaaattggttcttccaggaagttcaagtttgaatgtaacttcagatcatatgaatacagaaattactacttataagaagaaattgagtactaatcagccatgccataagactgtaacagatgaagctcagagcaaccttaacacaacagttggattttcaaagtttacatttacaaggatgaaaaattctcagattctttctcagtttaatcaaaattgtataactggaagtatgtctgataccaaaattacacagggtgtggagaaaaagaaaggtgtcaacccattactggaggaagctgttggacagcaatctttggtgaaactttctgaatctttgaaacaatcttcaaaaggtatgtatgaaatatgaaatagttttctttgaaaagcatcttaaaaagtagtaaaataattatttgttgtttttgagtgtgagtaatgtataaggtaaaactattctatgactagttaattttaagaattaactagaattcttaaaatgatacttggaaataattatacggcattatacagagtagttggtttatttttcaaaatattacattgaattctttcccagcacttaatacaatgactggcatatagtaggtactcagtaaatattttttgaataacttattctttcttggaaaatcatacctttagatatatgtattatagtgttcattaagattgtatttactaaattgttttaaaacttgagtaatctgggaagcagatgatgaagcagtgaggtaaataatatttagaaatttagagcattctaattaaacgtctttactagtgtgatatttgatataaacgtgctagcggtgatggttaaaattatgatttacttatttgataacagctatcatttctgattcttccaatttctcttttccccaagtctccattctatcaataagtttcattctttcaaaaaccgtatccccagactccatttttctttctacaacaagttaacatttcttgatgagactactgcagttcttttatctatctcctttcaattcttatctccaaacagtggaatagccttttaaaattggatgggcaaaaatggcgtttctatgcttaaaacaaccttcaatggctgcccgtcatatttcaaataaaatccaaactgtatactgtgaccaacaaagctgtggattatctctctttaacctgcgtctcctcttttttccttacctactaagcttcagctataccagctatcttttagtttttcaaacagtgtatgtttttcttccttgtccaggaacttagaccgtgctcttccctttgactaaaactacttcttttcaacatgtgaccccttccccactcttttgttggtgctttcttacatctcagtataagtactactttctcacagaggccttccttgaagagtctataaatagatctccttgtttattttttatttcctaattgctttcatcacaagttgaaattaaatatttagtgactcttctctgtcttgttggcattactgttccaactttcctatctaagtgactttttttaaaaatttacaatagtaatatgctagttatttaaaaagaaaagtaaaacagtatagaataatttaaaggaaaaagttaagtcttctgtttctcctttctgataaccatcccttacggaaaaccactattaatagttggtatgatgtagcattttctatgaatataaaaagatatgtgtgtgtgtatgtacgtatatatgtgtatgcatatatatatacctatagatctatttaaatattaataaatctgtatacccactatttggcaacttgcttttgccttaatatattatagctgtcttttcctattagtacatataaatttattttagtcctgttaatgactatgtgatatatatggtggatgtatcataatttaactgtttctctgtgatggaagtttgggttggttgcagtcttttgcaattacaaacaatactccagtaaatatccttctgcataaatttccgcatgcttgtataattgtatctgttaattcctaaaaaattgctacaagaggaagttttaaaatttgatggataccaccaaatttctatccgaagcagttataccaatttatcttatcaaaacttacagtaaataattctctacacccaagggtgtccaatcttttggcttccctgggccacattggaagaattatcttggatcacacataagatacactgacactaacaacagctgatgaactaaaaaaaaaaaaaaaaaaaatcacaaaagaatctcataatgttgtaaaaaagtttatgaatttgtgttgggctgcattcaaagccatcctgggctgcgggtagcttgcgggctgcgggttggacaagcttgctttacatgatagcccaaactagatattttgaaatattaaaaattgttctcaatctataataattttaagtatttaaatttgtattaaagtgagcatattgtaactaaatcaagcatgttcctagcatgactttatttacagatagagttgacccttgaacagtgtgggggttagaggcgctgatctgatttgcagtcgaaagtctgtgtataacttttgatcccctaaaaacttaactgctaatagcctgctgttgaccagaaacctttccgataacataattaattaatacatattttgtatgctcttatatgtattatatactgtattcttacaataagctggaaaagtgttattaagaaaataaggaagagaaaataatatttactattcattaagtgaaagtggatcatcataaaggtcttcatcctcatgatcttcatgtctagtaggccgagaaggaagaagagtaggagttggtcttgctgtctcaggggtgtcagatgcagaaaacaacctacaaatgagtggacttgccagttcaagcccatgttgttcaagggtcaactatagttataattctataaaagactaaacctcctggagtatttgagttttcccaaaactcctatctaccaatctatctgcattttttatggataatctgcgttttagcttaccttatcaatattttctttaaacttattgatagtactgaatctcttaattactattaactttgttgatgttttctattgtttctacttccttttactttggtatgtagcaagctgctctccagggaagtatctctgaaacaaaactcacttaactcccacatttatttcaggcaggagttggcaaactatgatctgtccaaatccagcctgcagcttgtttatgtatagccagcacactaaaaatgatttttacattttaaatggttggaaaaaaattaaaaggagaataatatttcatgacatttgaaaattatatgaaatccagatttcattgtccataaacaggttttatttgaatacagctcatcagttatttatacattatccataactatttttgctacagtggtacaggtgagcagttgcaacaagatactcaaaggttaacattcttgctttctgactctttctttacaggaaaaaaaaaaattactgacccttgcactgtaagatcaagattaagaagagcagcttttgcttagtactttacaatattttaagacttcattgtgtatttttattatagattgagttaaaggaaagactgatgggaaaaatggatgagtccctaaatcaaattttcatggtgtgacctgattatcatttgaaattattttctataatattgccaagcaaattgtaagaccaactttaggaagttatgttttctgctgttacagattattaacctgttttctttccacacagtcaaattcagtgtaaagtctttggatgtgtagtctgagtttgttgtgtttctcagctttgagactaaaagtattagataattagtcaagctaattagaaagtatcttctggtgtctctctttaggaaaaaatatctacagtctgttaggtaaatagcttaggaaataaaagccatcaaaatcatctgggaaacttatttaaaatatgtatttcttagcctgaataccccctcccatttctgattataccaagaaaggaaagggaggcagattatatattttgaaaatgcctctgttagttaacaagagaaatgtctcataaattgtgtatctttttctaaatgtcagaataaatgatatacttaaatatgtattagggtgatagtcttaaacttaaaatatcatttaaatgagaaagtgatttctaatacaaagcctcaacttactaagttaattgagattattttaaagtttctccaaaatgcatcctccaaataaaaatataatttctgacagtgaatcacaggtaaccagtttgacatgacagatttcattttatcactctaaaatatatttcctcagtggatgaaatgaaaattttatagctctatagggaaaagtagatgtgaatattaatataacatcttatgtaaatatacactgtttgagattgataactaatttaattccttatattttgactattttccaattaaagtttacataacattttaaatcccaatgtatcctttttaaagatatatttattcgtgggtcatataaattagatgtcattgtccacaagaattatttggtgggtagtcagttttctatcaaactgaattttatcacactgtgaaaagaatgtatcaaatagagacagatccatcagtgcttgattttcttttgaactggagcattatatctgtattatgtacttagaattttatattcagtagtttagtttgatttaatagccaactaatatggcaaatctgggtgattaaaaaaagcaaaaattaaagcacatattgaatgactttataggctataaaagtaaaactcatcttttgttgaatttttagaggaagaagagaaaaatagaaagtgttctcctgaagaaattcagagaaaaagacaagaagcactggttcggagaatggctaaagcacgagcctcatctgtaaatgcagctcccacttcatttctttaatgaaatattagttggaagacttcacgaagactgctgataactatctgtgattgataggaaattttttttcttgatttctctgtgagaaatgtaatgctgacttttataaagcctggacttctactttatttaataaatcaatgtttgcaatggtaaatgaaacatttccttggacatgtatttgaaagtcattaaatacaaaagttttggaaattcaggaaagttagcaattatgtacggatattatacagaggaaagtagttatatttttaaatgctattattgcagaggatcatcaaaaaagaggtaatctacgttatttcctattctaatgtcttttcctaataaaaaacttcaactttctaagttagtagagactgtttttgtagttttactttcattaactgttgcttaaggtttttatacacttccagattttaattaatactttcatatttctaggaacatggttgatatgaaataaaggactttttatttgtaaggaaattatgttcagttcttagaagtggatttgaattttaataattctaaaatgtgacacattttggaaactttccaccatatttaggaaaactttgattttagaagtctaacatagaggaaaagaagtagtggattgtctacaaaagtaatgtggcatcattaacatttagaactggcagaaacttcatatgtcatctggtccagcttccttattgtatcggtgagaaaaagtaatactgttttcaaagtcataggcaagttaatgctgtgctacaattagaatgatttatttggacacctaaacaattatactatttgtttcaaagtatcagtacataaaataacttgagggagtattattttctagtataaaacaaaagatgtaattaaaagcacaataaggactgtttgataataatgctcattgttccttattttgctttaaagaattagtctttccaggatataaaaatgagaatcttttttcttttcagtttttctgtaactgtaattttcccctcaattaatttacttagttgactcatcttttcttctctattactgttttgtttttttctttttttgccattttgcctatttggaatttgctaaaccagtaatagaagtccaactagagggcgtaaggcagggaggatgctttattcctcttaaatggttttaggagatctagagaaagttagagatatgaaacacctgtcatggtgtggcatttatcactatcaagtgtctcaaagctgtgataatatggtagttactgccctatagctatacagatactcctcaacttaccgtgtagttacatcccaataaacccatcatgagttgaaaataccttaagttaaaaatgcatttactacacttaatctaccagacaacatagcttagcttagcctaccttaaacatgctcaaatcacttatattagcctagagttgggcacatcatctggcaatacggcacactgtagagtatcagttgagctgatgcccagcatcgtgagaatgttgtaccacatatctctagcctgggaaagaatcaaactttaaagtatggtttctattggacgcatatcacttttgcatcacgttagagttgaaaaattgtaagtcaaccattttaagttggagactgtacatcaaaaatggtattttcatatctacagtggagtactggagtttagctaacctatattatttttccaggaatatataataacctagataaatgcaagtagtttctatgtacaaaaataaagagctgagaatcttttactaaaagtggcttcactgtgttctgactatgctttggatatctctgtccttgcttaagctcctccctgcttactgcttgcttttttaagagtacttttagcctattctgttcattcatttagactcagcctaataagtctgtttgaacctcgtacctaaccatcttcactggaattgattgcttctctctgatcataatggtactaattattgtgtctttcattgagcaatactataatgcctttatgtgttgttt

SEQ ID NO: 11900 - DNA, 2946 bp, Homo sapiens
gcgcgccccaccgaccaaaatggcggctgccgttggtgcggggtgcggtttgtagtgctgttgccctactcatccctttgcaaaatgtgaaagaagaagcggctggtggaggcgggccataggcaatgagtcggcgaaggaaacatgatgacagccctagcccgaagaaaacgccgcacaaaacagtggcggcggaggaatgcggctcggtggtcgagccagggaggaggcggctgagatcggcccgcggttcgtggccctgcggggctagagaggggcctcccgggccagtgcggcagcgagagcagcctccgaccgccgccctgtgcagtaaaagtaaccccgaggaaaggtatgaaacaccaaagagagcgctgaaaatggactcactgtcatcttccttcagttctcctaatgatccagatggacagaatgatatcttttgggatcagaattctccattgacaaagcagttaggtaaaggaagaaaaaaacagatttacaccacagatagtgatgagatttcacatattgttaatcgtattgctcctcaggatgaaaaaccaacaacaaattctatgctggacatgtggattggtgaaactgctattccttgtactcccagtgtagcaaaaggaaaatcaagagcaaaaatcagctgcacaaaggtgtggagaaaaagaaaggtgtcaacccattactggaggaagctgttggacagcaatctttggtgaaactttctgaatctttgaaacaatcttcaaaagaggaagaagagaaaaatagaaagtgttctcctgaagaaattcagagaaaaagacaagaagcactggttcggagaatggctaaagcacgagcctcatctgtaaatgcagctcccacttcatttctttaatgaaatattagttggaagacttcacgaagactgctgataactatctgtgattgataggaaattttttttcttgatttctctgtgagaaatgtaatgctgacttttataaagcctggacttctactttatttaataaatcaatgtttgcaatggtaaatgaaacatttccttggacatgtatttgaaagtcattaaatacaaaagttttggaaattcaggaaagttagcaattatgtacggatattatacagaggaaagtagttatatttttaaatgctattattgcagaggatcatcaaaaaagaggtaatctacgttatttcctattctaatgtcttttcctaataaaaaacttcaactttctaagttagtagagactgtttttgtagttttactttcattaactgttgcttaaggtttttatacacttccagattttaattaatactttcatatttctaggaacatggttgatatgaaataaaggactttttatttgtaaggaaattatgttcagttcttagaagtggatttgaattttaataattctaaaatgtgacacattttggaaactttccaccatatttaggaaaactttgattttagaagtctaacatagaggaaaagaagtagtggattgtctacaaaagtaatgtggcatcattaacatttagaactggcagaaacttcatatgtcatctggtccagcttccttattgtatcggtgagaaaaagtaatactgttttcaaagtcataggcaagttaatgctgtgctacaattagaatgatttatttggacacctaaacaattatactatttgtttcaaagtatcagtacataaaataacttgagggagtattattttctagtataaaacaaaagatgtaattaaaagcacaataaggactgtttgataataatgctcattgttccttattttgctttaaagaattagtctttccaggatataaaaatgagaatcttttttcttttcagtttttctgtaactgtaattttcccctcaattaatttacttagttgactcatcttttcttctctattactgttttgtttttttctttttttgccattttgcctatttggaatttgctaaaccagtaatagaagtccaactagagggcgtaaggcagggaggatgctttattcctcttaaatggttttaggagatctagagaaagttagagatatgaaacacctgtcatggtgtggcatttatcactatcaagtgtctcaaagctgtgataatatggtagttactgccctatagctatacagatactcctcaacttaccgtgtagttacatcccaataaacccatcatgagttgaaaataccttaagttaaaaatgcatttactacacttaatctaccagacaacatagcttagcttagcctaccttaaacatgctcaaatcacttatattagcctagagttgggcacatcatctggcaatacggcacactgtagagtatcagttgagctgatgcccagcatcgtgagaatgttgtaccacatatctctagcctgggaaagaatcaaactttaaagtatggtttctattggacgcatatcacttttgcatcacgttagagttgaaaaattgtaagtcaaccattttaagttggagactgtacatcaaaaatggtattttcatatctacagtggagtactggagtttagctaacctatattatttttccaggaatatataataacctagataaatgcaagtagtttctatgtacaaaaataaagagctgagaatcttttactaaaagtggcttcactgtgttctgactatgctttggatatctctgtccttgcttaagctcctccctgcttactgcttgcttttttaagagtacttttagcctattctgttcattcatttagactcagcctaataagtctgtttgaacctcgtacctaaccatcttcactggaattgattgcttctctctgatcataatggtactaattattgtgtctttcattgagcaatactataatgcctttatgtgttgttt

SEQ ID NO: 11901 - DNA, 14768 bp, Homo sapiens; identical to SEQ ID NO: 1180

SEQ ID NO: 11902 - DNA, 3110 bp, Homo sapiens
gcgcgcgccccaccgaccaaaatggcggctgccgttggtgcggggtgcggtttgtagtgctgttgccctactcatccctttgcaaaatgtgaaagaagaagcggctggtggaggcgggccataggcaatgagtcggcgaaggaaacatgatgacagccctagcccgaagaaaacgccgcacaaaacagtggcggcggaggaatgcggctcggtggtcgagccagggaggaggcggctgagatcggcccgcggttcgtggccctgcggggctagagaggggcctcccgggccagtgcggcagcgagagcagcctccgaccgccgccctgtgcagtaaaagtaaccccgaggaaaggtatgaaacaccaaagagagcgctgaaaatggactcactgtcatcttccttcagttctcctaatgatccagatggacagaatgatatcttttgggatcagaattctccattgacaaagcagttaggatgaaaaaccaacaacaaattctatgctggacatgtggattggtgaaactgctattccttgtactcccagtgtagcaaaaggaaaatcaagagcaaaaatcagctgcacaaagaagttcaagtttgaatgtaacttcagatcatatgaatacagaaattactacttataagaagaaattgagtactaatcagccatgccataagactgtaacagatgaagctcagagcaaccttaacacaacagttggattttcaaagtttacatttacaaggatgaaaaattctcagattctttctcagtttaatcaaaattgtataactggaagtatgtctgataccaaaattacacagggtgtggagaaaaagaaaggtgtcaacccattactggaggaagctgttggacagcaatctttggtgaaactttctgaatctttgaaacaatcttcaaaagaggaagaagagaaaaatagaaagtgttctcctgaagaaattcagagaaaaagacaagaagcactggttcggagaatggctaaagcacgagcctcatctgtaaatgcagctcccacttcatttctttaatgaaatattagttggaagacttcacgaagactgctgataactatctgtgattgataggaaattttttttcttgatttctctgtgagaaatgtaatgctgacttttataaagcctggacttctactttatttaataaatcaatgtttgcaatggtaaatgaaacatttccttggacatgtatttgaaagtcattaaatacaaaagttttggaaattcaggaaagttagcaattatgtacggatattatacagaggaaagtagttatatttttaaatgctattattgcagaggatcatcaaaaaagaggtaatctacgttatttcctattctaatgtcttttcctaataaaaaacttcaactttctaagttagtagagactgtttttgtagttttactttcattaactgttgcttaaggtttttatacacttccagattttaattaatactttcatatttctaggaacatggttgatatgaaataaaggactttttatttgtaaggaaattatgttcagttcttagaagtggatttgaattttaataattctaaaatgtgacacattttggaaactttccaccatatttaggaaaactttgattttagaagtctaacatagaggaaaagaagtagtggattgtctacaaaagtaatgtggcatcattaacatttagaactggcagaaacttcatatgtcatctggtccagcttccttattgtatcggtgagaaaaagtaatactgttttcaaagtcataggcaagttaatgctgtgctacaattagaatgatttatttggacacctaaacaattatactatttgtttcaaagtatcagtacataaaataacttgagggagtattattttctagtataaaacaaaagatgtaattaaaagcacaataaggactgtttgataataatgctcattgttccttattttgctttaaagaattagtctttccaggatataaaaatgagaatcttttttcttttcagtttttctgtaactgtaattttcccctcaattaatttacttagttgactcatcttttcttctctattactgttttgtttttttctttttttgccattttgcctatttggaatttgctaaaccagtaatagaagtccaactagagggcgtaaggcagggaggatgctttattcctcttaaatggttttaggagatctagagaaagttagagatatgaaacacctgtcatggtgtggcatttatcactatcaagtgtctcaaagctgtgataatatggtagttactgccctatagctatacagatactcctcaacttaccgtgtagttacatcccaataaacccatcatgagttgaaaataccttaagttaaaaatgcatttactacacttaatctaccagacaacatagcttagcttagcctaccttaaacatgctcaaatcacttatattagcctagagttgggcacatcatctggcaatacggcacactgtagagtatcagttgagctgatgcccagcatcgtgagaatgttgtaccacatatctctagcctgggaaagaatcaaactttaaagtatggtttctattggacgcatatcacttttgcatcacgttagagttgaaaaattgtaagtcaaccattttaagttggagactgtacatcaaaaatggtattttcatatctacagtggagtactggagtttagctaacctatattatttttccaggaatatataataacctagataaatgcaagtagtttctatgtacaaaaataaagagctgagaatcttttactaaaagtggcttcactgtgttctgactatgctttggatatctctgtccttgcttaagctcctccctgcttactgcttgcttttttaagagtacttttagcctattctgttcattcatttagactcagcctaataagtctgtttgaacctcgtacctaaccatcttcactggaattgattgcttctctctgatcataatggtactaattattgtgtctttcattgagcaatactataatgcctttatgtgttgttt

SEQ ID NO: 11903 - DNA, 20483 bp, Homo sapiens
attcctgaccccgcagtgggcgcgatggcggaggctgtactgagggtcgcccggcggcagctgagccagcgcggcgggtctggagcccccatcctcctgcggcaggtgcgggtggctggacctaggaggggactgctgggcactaggcggcagcaaggacggaactccggggtctcttaatagggagagatccggggggacccacgcctgcatcttgcggaaagcggggtggaggtttagggctggactcttgggtcctttaaaggtgagtggtctgggggcctctgggcttggggccagacccctgggtcctctatgaaagaacgtgctggggaccctgattttgggatgttaggaagttggaactcttttgttctgataggggaaggtagtggggctccggactcccgactcccggggaaagagtgggctggggtttctgcttctggatcttaggaagaggatagggtcagtctggactacttggcctccagtgggtggaagtccggttctgcgccctcacctgggtcccccgttcccagatgttcgagcctgtgagctgcaccttcacgtacctgctgggtgacagagagtcccgggaggccgttctgatcgacccagtcctggaaacagcgcctcgggatgcccagctgatcaaggagctggggctgcggctgctctatgctggtcagtccggggaccaaactcatggatcccagcggggctgggctgcagcgtcagtggaatgggaagctggggcccagaactcctgagtctgagggagaaggatctgggctgggactcccaggtcctttctgtaccctccggacctgtccctcctctctctcccagtgaatacccactgccacgcggaccacattacaggctcggggctgctccgttccctcctccctggctgccagtctgtcatctcccgccttagtggggcccaggctgacttacacattgaggatggagactccatccgcttcgggcgcttcgtgagttgggtgctgggtccccaagagggtggtggcctggacttcttaaacttaagggaagaggggactgggggcctgggatcctgagtccttggggaggagggacctcaggacctgggtttctgacccctgagctcatatttctgggaggggggcaccataaacccaggtggggcactggggcaagaggctctgggcaggtggggcactggcggaactcctaagtcaacagcatttaaggagtttccttcctaaagcttaggggcagccctttggcctggcatgcatctccataaaagttgattaggggctggaattctgagggcagggctgagaaggaaagagacccagtcctgtcttgcggaaacctccgtttgaggaaggagcatctgggtgcttagaacccggagcccaggactaggaaaaggacggtgaggaccctggagtgcaacatttaaggaggcactcgctctcagggtcctgtaagtgcagggtccgcacctgtgagtgagcgcctccttaaatcttgcaccaacagcctcaccctagtcctagccctgccgttgcctcacactgggaagtctaaaggttcctgccttcctcactttatttgccacaggcaccagcgggtttccggccagaattgcaaccaggccgaaggagggagggccaggggagttgccctcagagagagggaaacagctggcagggcattcttctgatcaattgctaaagatgtataataaagtttggctgactttggggacagaatgtcaggtgacagaagacagcctccaggttagagagttttgccaaatagggacagttcatttgagtcagagtgtttagaggaaatgagggctgtgtgtgggaagagagttcagctacaatggttacagaagctttatttcaagcctttctctggaagcaggcaaaaatgcattgtacatgtatgtacattgtacataataggtgctaacaaacatgtcttgaaatgaacgaagggtttagctatggtagatttagcttcagtgttttttttttttctttctttctttctttcttttttttttttatttgagactgggtctctgtcacctaggctggagtgcagtcagccttgacctcccaggctcaggtgatcctcccaccttagcctccctggtagctgggaccacaggcatgcaccagcacgcctggctgatttgtgtatgttcttgtagagacagggttttgttatgttgcccaggctggtcttgaactactgggcacaagtgatcctcctaccttggcctcctaaagtgctaggattacagggcttctgaaagtgctgggattacaggcatgagccactgcacccacccttttttgttgttgttgtttgtttgtttgtttttgagaaaaggtcttgctctgtcacccaggctggagtgcaatggtgggatcatagcttactgcagccttgaccttctgggctcaggtgatcctcatgcctcagcctcctaagtagctgggactacaagcacctgccaccatacctggctaattttttaattttttgttgagctgtaatctcactatgttgcccaggcttaatagctttattgatataacccacataccatataatttatctatttcgagtgcacaattcaatgacttttagtatattcagagttgtacatccattactaccattaattggaaaatgtttccattactccaaaaagaccccacaccccttagccatcacccctatccttcccttttcccccctcagccttaggcaacttttttttttttttttttttaatttgagacagggtctcactttgttgcccaagctagagtgcagtggtgcgatcttggtttactgcaacctccacctcccgggttcaagtgattctcttgtttcagcctcccaaatagcagggattacaggcgtgcgccaccaagcccagcaaatttttttgttttatttatttatttatttatttgagatggagttttgctcttgttgcgcaggctggagtgcaatggcgctatctcagcttagcgcaacctcagcctcccgagtagctgggattacaggcatgcgccaccatgcctagctaattttgtatttttagtagagacggggtttctccgtattggtcaggctggtctccaactccctatctcaggtgatccgcgcgccctggcctcccaaagtgttgggattacaggcatgagccactgcgcccaggcacatttttatttatttttttgagacagtcttgctctgtcacccaggctggagtgcaatggcaagctctcagttcactgcagcctctgcctcctgagcgcaagcgattctgctgtctcagcctcccaaatagctgggattccaggcatgtgccaccatgtctggctaatttttgtatttttagtagagatagggtttcaccatgttggccaggctggtctcaaactcctgacctcaggtgatctgcacaccttgacctccccaaagtgctgggattataggcgtgagccaccatggctggcttgtctgagattttggagatgggggtccatttttctctcctttatttttccttctactttaaaaaaatgaattgttagcctgggtgtggtggctcatgcctgtaattccagtacgttgagaggctgaggtgggcggatcacttgaggtcagaagttcgagatcagcctggccaacatggtgaaaccctgtctctactaaaaatacaaaaattaagcggtatggtggtgaggcacctgtaatcccagctactcaggaggctgaggaggcaggaggagaattgcttgaatccgggaggcagaggttgcagtgagccaagatcgcaccactgcactccagcctgggtgacaaagcgagattccatctcaacaaacaaacaaacaaacaaaaccgagttgttaacattcatggaatgaaaggagtccacatattatacatgtgtatgagtacttacccagatcccgatacagaacttgcccatcaccccagaagtcttccttgcctccctttctggccaatgaccgccctcctaaggcaccattcttctgatgcatttaaccacaggccggttttgcctgttctgacattataaacaggacttatacagtgtactcttttgtgtctggccttttttccactctacatgatgttggtttatacttggagttctttccttcttattgctatagagcagcagttggccacctttttctgtgaaggaccagatagtaaatattttcagtttttacaggtagtagggtctctgtgacagctactcagctctcttattgtggcatgaaagcagccacagacactgcataaatgaataggcatggctgtgttctaataagactttatttgtggcctctacatttggattttaggtcaggctcatgcctgtaatcccagcactttgggaagctgaggtgggtagatcacctgaggtcaggagttcgagaccagcctgaccaacatggtgaaaccccatctctactaaaaatacaaaataagctgggcgtggtggggtgtgcctgtattcccagctactcaggaggctgaggcaggggaatcgcttgaacctcccccgggaggtggaggttgcagtgagcccagatggtgccattgcactccagcatgagtgacaagagcaaaactccatttcaaaaaaaataaataaataaaataaaaaataaaatttggatttcatataggtttttttttaaatttgtttgagacaggctcttgttctattgcccaagctggtatgcactggcgtgagcatagctcattgcagcctccaactcctgggctcaagtgatcctcctaccgcagcctcctgagtagctgggactatgggcatgtgccaccatgcccagctaatttttaaacaattttttgtagagactgagtcttgctgtgttgctcagattggtctcaaactccaggcctcaagcaaccctcctgcctcggcctcccaaagtgttgggattacaggtgtgagccccatctagtttttacatgttactttgatagttttcaatgtgaaaaaaagttaaaatgattcttagcttacaggccttacaaaaactgatggcaggccaaatttggtccactggccataatttttgccctacaaaatgggcaggttgtggtggctcctaggctcaagcgatcctccttgcctcagcctcccaaagtacaaagtgaattacaggcatgagccactacaccctattttccttctgattattcagtttttggctaccacgaataatgctgctatgaagattcttctgctaatatcttagggaacattgtcatgaattctaaggactggattttctgggtcactgagtcgacaaatgtttaattttcatagaaactcccagtttcttgaactggttgttcatcttacataaaagatgggacaaatttaagtggtttcattgtagaatgagttttctttctttcttttttttttttttagagacagagtctcactctgtcccccaggttggagtgcagtggcacaatcttggctcactgcaatctctgcctccctctgggagcctcagttccctgcgctaaaacacagggtttatcacagcaccttcctcttgaggctgtttcaaggattagctggctgccttcaggatctccaacccagaggttccccttctaggtgtgaagcccagagacacccttgctcatgtgcacaaaagacagcaggggtgtagggcaggggacaaagtacacagcaggggactgtttaatacatgatgacgctacaaggcagtggatcgccaaaacaggagtaattcttttttttctgagacagagcctcactctgtcacccaggctagagtgcagtggcgcagtctcggctcactgcaacctccgcctttcggtgatccttctgcctcagcctctccagtagctgggattacaggtgcgcaccaccacatctggctaaattttatgtttttattagagatggggtttcgccatactgccaggctggtcgtgagcacctggcctcaagtgatctgcgtgcctcagcctcccaaaatgcagggattacaggagtgagccaccgcacctggcccaagttttctttttttaataaactgattgagaagtgaacatcttagctgccacagggtggccgaatcagaaagttaggtttgctgttaaatatgctggcttagagaagtactgctgaaaacactgatcccccaggtcccttagaatcagagagtctgatttaattgttctgggtggacacaaggaattggcatgttttaaaagctccaccattgattcttatgtggctcaagtgtgggtttcaatacttcctccttttaacattgtgaaacgagtaatttttcttccaacattttattatgaaaaatttcaagcatagagaaaagctgaaaaaaaatttttttttttttttgagacagggtctcactttgtcatccaggctggagtgcagtggtgcaatcatagctcactgcagcctcaacctcctggctcaagcgatcctcctgcctcaggcttccaaatagctggaactacaggtgtgcaccaccactcctggctagtttttgtgttttttgtaaagacagagttttgccacattgcccaggctggcctcgacctcctgggctcaggcaatcctccctccttggcctcccaaagtgctgggattagagtgagccactgcaccaggcttaaaatttttttttacagtgtacatctctaaccatccatcacttcatctttttttcttttgagatggagtctcactctgttgcccaggctggcgtacagtggcacaatcttggtttactgcaacctctgcctcctgggttcaagcgattctcttgcctcagcctcccgagtagcagtagctggatttacaggcgagtgccaccacacccagctaattgatttttaaaagatttttagtagcgatggggtttcaccatgttggccaggctggtctcgaactcctgacctcaagtgatccacctgccttgacctcccaaagtgctaagattacaggtttgagctgctgtgtccgacctattcttttttttttttttttgggtgggggtctcgctatgttgtccaggctggtattgaaccctggctaaggtgatcctcccgcctcagcctcccaagtagctgggcctacagacgtgcaccatcatgccttgctgtaattgttctattttattattagttattattgatttattaatgtgcctaatttataaattaaactctatcataggtgcgtatgtataggaaaaagcatagtgtgtagggttctgtactatctgcggttttaggcatccactccgggtcttgaaatgtatcccaggcagataagaggtgtttactatagttttgagtaatgaagggaaagaacttgggaaccaaatggaaaagaagctgagagcttacttgccaccagggggcagtgtaggccgtgggaactccaaggccagcaagctgaatgctttacaggattccttctgggttatgtttctttgatgggggtagtttcaggtttagctgctgcaggcaacagatgaaagaaaagctctggggatgtgtcacagacatgatgcatcatggaagggaagaatgaatttgttgaaagaatttggggttaggcaggctgggctgttgcggaaatcactcgacaagtttcagggacaatgaaggctgctttaggtcaagatgttatatgttccccacccacaatttcttattttgaattttttaaaatctacattgaaataatagtacaaaatataacaatacacaagcacaggccgggcgcggtggctcacgcctgtaatcctggcactttgggaagccgaggtgtgcggatcacccgaggtcaggagtttgagatcagcctggccaacatgatgaaaccccgtccctactaaaaatacaaaaattaaccgggcatggtggcacgctcctgtaatcccagctactcaggaggctgaagcatgagaatcacttgaacacccaggaggtagaggttgcagtgagacgagatcgcaccactgcactccagcctgggccacagagcaagactgtctcaaaaaaaaaaaaaaaaaaaaaaaaaaaaaacaagcacaaatttcatcagccatcagagcaattatgtcactataggtcatgaaacttttagaaccgcgcccctctcccccaaatgtttttggggaatgcgagtgaaaatgggcaaaaagtccaaaaatcgttttgattttgcagaatgtcagggttctctaggctatactttgagacttcctcttttacaaaacctttgtcacgtctaacaaaatatgcagtaactttttttttttttttttttttttgagacaagagtctcgctctgtcgcccaggctggagtgcagtggtgcgatctcggctcactgcaagctccgcctcccgggttcatgccattctcctgcctcagcctcccgagtagctgggactacagacgcccaccaccacgcccagctaatttttttttttgtatttttagtagagacggggtttcaccatgttagccaggatggtctcgatctcctgacctcgtgatccgcccgtctcggcctcccaaagtactgggattacaggcgtgagacaccacgcccggccaatatgcagtaactttatatcattattaaatattcagctgtgttcagatgtctccaattacccgaggaataatttttacagctttttttttcttttttctttctttttttggtagagataggatctcaccatgttgcccaggctggtctcaatctcctgggctcaaatgatcttcccctctcggtgactcaaagtgctgtaattataggtgtgagccacggtgcccagcctacggctgtttttaggaaccaggatacaattgagcttagtgtttggccattatgtctatttagtctcttttgtgtgtgtgtttgtgttttctttttccttcttttctttttgttttgttttcttttttattatttatttattattttttatttatcaaaaatctttttggatctagaacagtttcatatccttttgccccaggatattgacttttttttttgagacagtctcgctctgtcacccaagctgaggatattgacttttgttttttgttttttttttttgagacggagtgttgctctgtcactcaggctggaatgcagtggcatgatctctgctcactgtaacctctgcctcccaagttcaagcaattctactgcctcagcctccccagtagctgggactataggcatgtgccaccacgcttggcatgcttggctaattttttttttttttttgaggcggagtctcactctgtcacccagggtggagtgcagtggcgtgatctcagctcactgcagcctccgcttcctgggttcaagcaattctcctgcctcagcctcccgagtagctgggattacagacatcaccaccacgcctgactaatatttgtatgttttgtggagatggggtttcaccatgttggcgaggctgatcttgaactcctgacctcaggtcatccacctgccttggcctcccaaagtgtcgcgattaggcgagccaccgtgcctggcttcggctaatttttgtatttttagtatggatggggtttcaccatgttcaccagtctggtctcaaattcctgacctcaagtaatctacctgcctcggcctcccaaagtgctgggattacaggcgtgagccaccgtgcctggccgcatttaatacatttaacctactgaacattataggttagcctactttaccttaaagtggtcagaacatttacattagcctacagttgggcaaactcatctaacacaaagccttgtattttatacaagagtgttgaatatctcatgtaatttattgaatactgaattgaaagtgaaaaacagaatggctgtatgggtgcatggaatatgatttctattgaaagtgtatcacttttggcttggtgcagtggctcatgcctgtaatcccagcacattgagaggctgagatgggaggattgcttgaggccaggagttcaagaccaggctggtcaacatagtgagagcccatctttactgaagaaaaaaaaagacaaatgaaaaaaagaaataaaatgtatcactttcacattattgtaaagtcaataaattgttagtcatcgggcacatcacacctgtaatcccaacactttgggaggctagtgtgggcagattgcttgatgccaggagttcaagaccagcctggtcaacatgatgaaacctcgtctctactaaataacagtacaaaaattagctagacacagtgatgcgtgcctgttatcccagctactcagaaggctgagacacaagaatcacttcaacccaggaggccgaggttgcagtgagccgagatcatgccactgcactccgcagcctgggcgacagagagagactctatctcaaaaaaaaaaaaaaaaaagaaaaaaagaaagaaaaaaaagccaggcatggtggctgactcacacctgtaatcccagcattttgggaggatgaggcaggcggatcatttgaggtcaggagtttgagaccagcctggccaatgtggtgaaaccccatctctactaaaaagacaaaaattagccaggtgtgatggtgagtgcctgtaatcccagctactcaggaggctgaggcaggagaatcgcttgaacccgggaggcggaggttgcagtgagccgagatcgcaccactgcactccagcctgggtgacagagtgagactctggttaaaaaaaaaaaaatcataagtcagaccatcttaagtcaaggaccacatgtataccaagggttgagccacagggtatgtgtagatttagctttagtagaaactgcccagtaattttgatttgtagatgatctttatatattccggatccaagaactttgttggatccagtacaactcctttacctgtggtttcactttctgtggttttagttatctgtggtcaaccatagcgtgaagatattcaatggaaaattccagagataaacaattagtaagttttaaattgtacatcgttctgagtagcatgataaaatctcacaccatcccactcaggacatgaattatccctacgtccagtgtatctgtgctgtataggagtatgttacccattcgttaatcacttagtagccttcttgattatcagatgaaaaaaaaacatagattggccggtcacggtggctcacgcctgtaatcccagcactttgggagcctgaggcgggtgaatcacctgaggtcaggagcttgagaccagcctgaccaacatggtgaaaccctgtctctactaaaaaatacaaaaattatctgggcatggtggtgggcacctgtaaccctagctacttgagaggctgaggcaggagaatcacttgaacccaggagggggaggttgcagtgagccaggatcatgccattgcactccagtctgggtgacagagccagactccgtccaaaacaaaacaaaacaaaacagtatttatagggtttgtactatctgaggtttcagatatccactgggttcttggaggtatcccctgcggataaggaaggactactgtttatgtttgtaaatatcattttccactctgagggctaccttttcactgtctttttttttttttttttttaaggcggagttttgctcttgtcatccaggctggagtgtgatggtgcaatcttggctcactgcaacctccgcctcccgggttaaagcaattctcctgcctcatcctcccaagtagctgggattacaagcatgtgccaccatgcctggctaatttttgtatttttagtagagatggggtttcaccacattggccggggtggtctcgaactcctgacctcaggtgatttgcccgcctcggcctcccaaagtgctgggattacaggtatgagccacagcgcccagccaccactgcctattttttatttttaaaagtgtaaaacattgaattttatttcaacggtattgcttttaatgactgttgggtattccatttttatattagtgtgcttacctttttaaaattggtttgcaagatctgtttgtatattaagtatattgaccactgtgtggtatgtatatgttacaaatatattttcccagcatattggttctctttagattttgtttatggtgttgctgccattcagaaccttctgactgatcttttccttaatgatttatcactttaggtatcacatttgaatatcccttctgtattagtctgttctcatgctgctaataaagacatacctgaaggctgggtgtggtggctcacgcctgtaatcccagcactttgggaggccaaggcaggtggatcacgtggtcaggagtttgagaccagcctgaccaacatggtgaatccccatctctactaaaaatataaaaattagccaggtgtggtggtacatgcctgtaatcccagctactcaggaggctgaggcaggagaattgcttgaactggggaggcagaggttgcagtgagccaagattgcaccactgcactgcagcctgggtgacagagcaagactgtctcaaaaaaaaaaaaaaaaaaaagacatacccaagactgggtcatttataaagaaaaaggggtttagtgggctcacagttccacctggcttgggaggcctcccaatcatggtggaaggcaaaacaggagtgaaggcatggcttacatggcgacaggcaagaaagtgtgtgcaggggaactgccgtttgtaagatcatcagatcttgtgagacttattcactatcatgagaatagcatgggaaaaacccacccccatgattcaattacctcccaccggctccctcccacaacccatggggattatgggagctataattcaagatgagatttgggtggggacacagccaaaccatatcattccactttggtcgctcccaaatctcatgtcctcacatttcaaaaccaatcataccttcccaacagtcccccaaagtctcaactcatttcactattaactcaaaagtccacagtccaaagtctcatctgaggccgggcatggtggctcacacctgttatctcagcactttgggaggccaaggcaggcagatcagctgaggtcaggagttcaagaccagctttcccaaaataataaaaccctgtctatactaaaaatacaaaaattaggcaggcatggtggcacatgcctgtagtctcaactactcgggaggctgaggcacaagaattggttgaacctgggaagcagaggttgcagtgagccaagattgcaccactccatcccagcctgggtgacagagtgagattctgtctccaaaaaaaaaaaaaaatcaacaacaaaataaagtctcatctgagacaaggcaagtccctcccacctatgggcctgtaaaatcaaaagcaagtttagttatttcatagatacagtgggatccagggattgggtaaatacatccattctaaatggaagaaattggccaaaatgaaggggctgcaggctccgtgcaagtcctaaatccagtggggcagtcaaatcttaaagctccaaaaagatcttttactccatgtctcaaatccaggtcatgctgatgcaagaggtgggttcccatggtcttgggcagctctgcccctctggctttgcagggtacagccccactcctggctgctttcacgggctggtgtggagtatctgtggcttttccaggcacatggtgcaagctctcggtggatctaacactctgggttctggagggcgatggccctcttctcacagctccactaggggcagtgccccagtgggaactctctgtgggggctcccactccacatttcccttctgcactgtcctagcagaggttccctatgaaggcttcacccctgcagcacacctctgcctggacatccaggcatttccatacagcctctcaaatctagctggaggctcccaaacctctgttcttgacttctgttcaccagcaggcccagcaccacgtgtaagccaccaaggcttggggcttgcaccctctgaagcaatggcctgagctgtacttggccccttttagccccgactgggatgcagggcaccaagtcctgagactgcacaaaacagcaaggccatgggccctgcccatgaaaccattttttctcctagtcctttggacctgtgttgggagaggctgctgtgaaaacctctgacatgccctggagacatttttcccattgtcttggtgattaacatttggctcctcgttacttatacaaatttctgcagcaggcttgaatttttcctcagaaaatgggtttttttttctatcacattgtcaggctgcaaattttccaaacatttatgctctatttcccttttaaacataggttccaattccaaaccatatcattgtgaatacataaaactgaagtgaatgcttttaacagcactcaagtcacctcttgaatgcttttaacagcactcaagtcacctcttgaatgctttcctgctgagaaatttcttctactaggtaccctaagtcatctctctcaagttcaaagttccacagatctctagggcaggggcaaaatgctgccagtctctttgctaacacataacaaaagtgacctttaccccagttcccaaaaagttcctcatctccatgtaagaccatgtcagcctggacttcattgttcatatcactctcggcatattggtcaaagccactcaacaagtctctaggaagttccaaactttcccacatttttctgtcttcttctgagccttccaaactgttcaaacctctgcttgttacccagttccaaagtcacattttcacatctccttatagcagcaccccactttactggtaccaatttactgtattagtcttttctcatgctgctaataaagacatccctaagactgggtcatttataaagaaaaagaggtttaatggactcatagttccacatggctggggaggcctcacaatcatggtggaaggcgaaggaggagcaaagacctgtcttacatggcagcaggcaagagagagtgtgcaggggaactgccctttataaaaccatcagatctcgtgagacttattcatcatcacgagacagcatgggaaaaacctgcccccattattcaattacctcctgcctggtccctcccatgacatatgaggattatgggagctacaattcaagatgagatttgggtggggacacagccaaaccatatcaccttcctaaccagaggtcagatattatttgtatttttgttgttgtgtgtcacagctttgcggttttatttttcatgcatttaaatctttaatccacttggagtttactctgataatataagattacagcctgggaatctacattttttaccaaaatgtttatctagataagaccctggggtagggtggggctttgggggccagtttcatctagaaggcttcttggtgactatctctgtactcttccacccctgccaggcgttggagaccagggccagccctggccacaccccaggctgtgtcaccttcgtcctgaatgaccacagcatggccttcactggagatgccctgttgatccgtgggtgtgggcggacagacttccagcaaggtgaccagctcctttatccagcccaagatcttcatatagttacgtgtgtgtcaagtgttgaagtatctgttacaagaatgaatggatggacattagacttttagggggcttcagtattaaattcaaggagtttacctgctagaacagtggtccccaacctttttggcaccagggaccggtttcgtggaagacaatttttccatggaccatggcagggcatagtttcggggattcaaatgcattacatttattgtgcactttattattacattgcaatagataatgaaataattatgtaactcaccatcatgtagaatcagtgggagccctgaacttgttttcctgcaactagatggtcacatctgggagagacggaagatagtgacagatcatcaggcattagattctcataaggagaacgcaacctagatccctcgcatgtgcagttcgcaatagagtttgtgctcctatgagaatctaatgctgctgcggatctgacaggaggcagagctcaggtggtaacgggagtgatggggagtggctgtaactacagatgaagctttgctcactcacccaccgctcaccaccttctgcacagcccagttcctaacagaccacggaccggtacccagggttaaggacccccatgctagagtatgggaagagttagattcaggggcttagctgttgggggacagttagattcaggggtgtgttagttacctatttgagcccagcttgggcaacatagtgagactccctctctaagaaacaaatatagctaaaaaaaaaaaaaaaacaaagggctgggcatggtggctcacgcctataatcccagcactttgggaggccgaggcaggtggatcatgaggtcaggagttcaagaccagcctggccaagatggtgaaaccccgtctctactaaaaatacaaaaattagctggccatggtggtgggtgcctgtagtcccagctactcgggaggctgaggcagagatttacttgaacccaggaggcggaggttgcagtgagccaagattgcgccactgcactccagcctgggtgacagagtgagacttcatctcaaaaaaaaaaaaaaaaaagataaaaaaagaagttgttaaagccagcggtttaattgccagggagcaatgaatgatccatttggagtctagctgctaggggcagttagatttaggagcttccctgtagaaagcgagtatagtttcagaatctcagggttgggccatcctttgagcatgtgtgtgaatgtggggttaacactaggcctggaatttagctgtcttgtggggagaggtgaggctggatgagagggaaagacagaagccatgatgagatggccgtggaagccacatccccaggcctcttcctccctcttccctctctccttatctctgcatctcagtctctgtctttttctctccaaggctcccaatctcccatttatccattcacagtacagtcaggaagctgaaggatttaggccgaaatgcaaggtggaatagaggtttgccccctacttaggactcagagctgcttgtggggaccatggcttcacactctcctcctgggcctcatgtcctcatgtctgcagtttctttcttcttcttcttcttttttttgagacggagtctcgctctgtcgcccaggctggagtgcagtggtgcaatcttggctcactgcaagctctgcctcctgggttcacgccattctcctgcctcagcctcccgagtagctgggactacaggcgcccgccatcacgccaggctaatttttttgtatttttagtagagacagggttttaccatgttagccaggatggtctcgatctcctgactttgtgattcacccacctcggcctcccaaagtgctgggattacaggcgtgagccaccgcgcccagccttttttttttttttcttgagacagagccgcgctctatctcccaggctggagggcagtggtgtgatcttggctcactgcaacctccgcctcctgggttcaagcaattctcctgcctcagcctcccaaatagctgggattacaggcatgggtcaccatgcctggctaatttttgtatttttagtagagacagggttttgtcatgttggccaggctggtctcgaactcctgacctcaggtagtccacccacctcagcctcccaaagtgctaggattacaggcatgagccactgcacctggctttgtcttcagtttcttaccttctagtccaccttccttgttcagaacccttacttgacatcccctgggtgacagccaaggtcacaaatgacactctttggtgcttcacggtgtcattccaaccctatttacagccatgctgaatttcttgacattcctcaattctttgtatatgctgttccatctgcctagaatgcctttccctgttctctacttagacaaagggatattggcaggacacgaaggagagggtttagctatagtgattttatcctcctacccttttcttgaaggaaggggttagagtcttctgtcctgttgatccactgacctctgatctttccttccccaggctgtgccaagaccttgtaccactcggtccatgaaaagatcttcacacttccaggagactgtctgatctaccctgctcacgattaccatggtgagggcttcctggaagaggtgtggggcgtacataactttgaaagtggagtgtaaatctctgtaatccttgtagggcatgaagacgaccagtctcagaaatttctctggccaaaaaaaattaagtgtttgaggctgggcaagggggctcacacttgtaatcctagcactttgggaggccaaggcaggaggctcatttgagcccaggagtgagttcgagaccagctggagtaacatggcaaaaccctgcctctacaaaatacaagaaattagccaggcatggtggcatgctgccagctacttgggaggctgtggtagaaggattgcttgagcctgggaggttgaggctgcagtgagctatgattgtaccactatattccagcctgggtgacacagcaagcccctgtctcaaaaaaaaaaaaaaaaaaagagataaagtgcttgagcctgctgtgtgtggatgtagaaactatgtgactgccagatgcctagaattctgcagggcatgggttttcctgggccttacttgtggagcttagggaactgggggaaaactaaatttcccatagtgtccatggaggagggaaagcaattttaggaatattctgggaagagcccctgccagagaggcacccaaggcctcctggggaatgtagttctgagaggcctgaggcactagactccttgactttccttcccctcccttggcccctagggttcacagtgtccaccgtggaggaggagaggactctgaaccctcggctcaccctcagctgtgaggagtttgtcaaaatcatgggcaacctgaacttgcctaaacctcagcagataggtgagcagctggggacctggacttctgggtctgagagaggaggggctggggtcttggactcctgggtctgagagaggaggggctgggggcctggactcctgggtctgagggaggaggggctgggggcctggactcctgggtctgagggaggagaggctgggggcctggactcctgggtctaagggaggaggggctgggggactggactcctgggtctgaggcagtaggggctgggggcctggactcctggctctgagggagtaggggctgggctgggggcctgggctcctgagtctgagggaggaggggctgggggcctggggtcctgggtctgagggaggaggagctgggggcctggactcctgggtctgaaggaggaggggctgggctgggggcctgggctcctgggtctgagggaggaagaactgggggcctggactcctgggtctgagggaggaggaactgggggcctggactcctggatctgagggaggagggactggggacctgggctcctgggtctgagggaggagggactgggggaggaggagctgggggcctggactcctgggtctgagggaggagggactggggacctgggctcctgggtctgagggaggaggggctgggggcctggactcctgggtctgagggaggaggggctgggggtctgaactcctgagtctgagggaggaggggctgggggactggactcctgggtctgagggaggaggggctgggggactggactcctgggtctgaggaaggaagggctgggggactggactcctgggtctgagggaggaggggctgggggtctgggctcctgggtctgagggaagaggggctgggggtctggactcctgggtctgagggaggaggggctggggtactggactcctgggtctgagggaaggagtgggctcaggaccaaaactctagtttcctgaagaggaaaggttcctaggatttctgggtctccagtggggcctggaactctacctaggccccttagttttaaccttgatttcttcctttcagactttgctgttccagccaacatgcgctgtggggtgcagacacccactgcctgatctcacttctgtcagatgctcccatccactattaatgcactaggtgggaggagagggcggcaatgacactgcacctctcctttcccaccgcattccctggagctccctaaataaaactttttttaacgtga

SEQ ID NO: 11904 - DNA, 920 bp, Homo sapiens
attcctgaccccgcagtgggcgcgatggcggaggctgtactgagggtcgcccggcggcagctgagccagcgcggcgggtctggagcccccatcctcctgcggcagatgttcgagcctgtgagctgcaccttcacgtacctgctgggtgacagagagtcccgggaggccgttctgatcgacccagtcctggaaacagcgcctcgggatgcccagctgatcaaggagctggggctgcggctgctctatgctgtgaatacccactgccacgcggaccacattacaggctcggggctgctccgttccctcctccctggctgccagtctgtcatctcccgccttagtggggcccaggctgacttacacattgaggatggagactccatccgcttcgggcgcttcgcgttggagaccagggccagccctggccacaccccaggctgtgtcaccttcgtcctgaatgaccacagcatggccttcactggagatgccctgttgatccgtgggtgtgggcggacagacttccagcaaggctgtgccaagaccttgtaccactcggtccatgaaaagatcttcacacttccaggagactgtctgatctaccctgctcacgattaccatgggttcacagtgtccaccgtggaggaggagaggactctgaaccctcggctcaccctcagctgtgaggagtttgtcaaaatcatgggcaacctgaacttgcctaaacctcagcagatagactttgctgttccagccaacatgcgctgtggggtgcagacacccactgcctgatctcacttctgtcagatgctcccatccactattaatgcactaggtgggaggagagggcggcaatgacactgcacctctcctttcccaccgcattccctggagctccctaaataaaactttttttaacgtga

SEQ ID NO: 11905 - DNA, 20414 bp, Homo sapiens
gctcattcctgaccccgcagtgggcgcgatggcggaggctgtactgagggtcgcccggcggcagctgagccagcgcggcgggtctggagcccccatcctcctgcggcaggtgcgggtggctggacctaggaggggactgctgggcactaggcggcagcaaggacggaactccggggtctcttaatagggagagatccggggggacccacgcctgcatcttgcggaaagcggggtggaggtttagggctggactcttgggtcctttaaaggtgagtggtctgggggcctctgggcttggggccagacccctgggtcctctatgaaagaacgtgctggggaccctgattttgggatgttaggaagttggaactcttttgttctgataggggaaggtagtggggctccggactcccgactcccggggaaagagtgggctggggtttctgcttctggatcttaggaagaggatagggtcagtctggactacttggcctccagtgggtggaagtccggttctgcgccctcacctgggtcccccgttcccagatgttcgagcctgtgagctgcaccttcacgtacctgctgggtgacagagagtcccgggaggccgttctgatcgacccagtcctggaaacagcgcctcgggatgcccagctgatcaaggagctggggctgcggctgctctatgctggtcagtccggggaccaaactcatggatcccagcggggctgggctgcagcgtcagtggaatgggaagctggggcccagaactcctgagtctgagggagaaggatctgggctgggactcccaggtcctttctgtaccctccggacctgtccctcctctctctcccagtgaatacccactgccacgcggaccacattacaggctcggggctgctccgttccctcctccctggctgccagtctgtcatctcccgccttagtggggcccaggctgacttacacattgaggatggagactccatccgcttcgggcgcttcgtgagttgggtgctgggtccccaagagggtggtggcctggacttcttaaacttaagggaagaggggactgggggcctgggatcctgagtccttggggaggagggacctcaggacctgggtttctgacccctgagctcatatttctgggaggggggcaccataaacccaggtggggcactggggcaagaggctctgggcaggtggggcactggcggaactcctaagtcaacagcatttaaggagtttccttcctaaagcttaggggcagccctttggcctggcatgcatctccataaaagttgattaggggctggaattctgagggcagggctgagaaggaaagagacccagtcctgtcttgcggaaacctccgtttgaggaaggagcatctgggtgcttagaacccggagcccaggactaggaaaaggacggtgaggaccctggagtgcaacatttaaggaggcactcgctctcagggtcctgtaagtgcagggtccgcacctgtgagtgagcgcctccttaaatcttgcaccaacagcctcaccctagtcctagccctgccgttgcctcacactgggaagtctaaaggttcctgccttcctcactttatttgccacaggcaccagcgggtttccggccagaattgcaaccaggccgaaggagggagggccaggggagttgccctcagagagagggaaacagctggcagggcattcttctgatcaattgctaaagatgtataataaagtttggctgactttggggacagaatgtcaggtgacagaagacagcctccaggttagagagttttgccaaatagggacagttcatttgagtcagagtgtttagaggaaatgagggctgtgtgtgggaagagagttcagctacaatggttacagaagctttatttcaagcctttctctggaagcaggcaaaaatgcattgtacatgtatgtacattgtacataataggtgctaacaaacatgtcttgaaatgaacgaagggtttagctatggtagatttagcttcagtgttttttttttttctttctttctttctttcttttttttttttatttgagactgggtctctgtcacctaggctggagtgcagtcagccttgacctcccaggctcaggtgatcctcccaccttagcctccctggtagctgggaccacaggcatgcaccagcacgcctggctgatttgtgtatgttcttgtagagacagggttttgttatgttgcccaggctggtcttgaactactgggcacaagtgatcctcctaccttggcctcctaaagtgctaggattacagggcttctgaaagtgctgggattacaggcatgagccactgcacccacccttttttgttgttgttgtttgtttgtttgtttttgagaaaaggtcttgctctgtcacccaggctggagtgcaatggtgggatcatagcttactgcagccttgaccttctgggctcaggtgatcctcatgcctcagcctcctaagtagctgggactacaagcacctgccaccatacctggctaattttttaattttttgttgagctgtaatctcactatgttgcccaggcttaatagctttattgatataacccacataccatataatttatctatttcgagtgcacaattcaatgacttttagtatattcagagttgtacatccattactaccattaattggaaaatgtttccattactccaaaaagaccccacaccccttagccatcacccctatccttcccttttcccccctcagccttaggcaacttttttttttttttttttttaatttgagacagggtctcactttgttgcccaagctagagtgcagtggtgcgatcttggtttactgcaacctccacctcccgggttcaagtgattctcttgtttcagcctcccaaatagcagggattacaggcgtgcgccaccaagcccagcaaatttttttgttttatttatttatttatttatttgagatggagttttgctcttgttgcgcaggctggagtgcaatggcgctatctcagcttagcgcaacctcagcctcccgagtagctgggattacaggcatgcgccaccatgcctagctaattttgtatttttagtagagacggggtttctccgtattggtcaggctggtctccaactccctatctcaggtgatccgcgcgccctggcctcccaaagtgttgggattacaggcatgagccactgcgcccaggcacatttttatttatttttttgagacagtcttgctctgtcacccaggctggagtgcaatggcaagctctcagttcactgcagcctctgcctcctgagcgcaagcgattctgctgtctcagcctcccaaatagctgggattccaggcatgtgccaccatgtctggctaatttttgtatttttagtagagatagggtttcaccatgttggccaggctggtctcaaactcctgacctcaggtgatctgcacaccttgacctccccaaagtgctgggattataggcgtgagccaccatggctggcttgtctgagattttggagatgggggtccatttttctctcctttatttttccttctactttaaaaaaatgaattgttagcctgggtgtggtggctcatgcctgtaattccagtacgttgagaggctgaggtgggcggatcacttgaggtcagaagttcgagatcagcctggccaacatggtgaaaccctgtctctactaaaaatacaaaaattaagcggtatggtggtgaggcacctgtaatcccagctactcaggaggctgaggaggcaggaggagaattgcttgaatccgggaggcagaggttgcagtgagccaagatcgcaccactgcactccagcctgggtgacaaagcgagattccatctcaacaaacaaacaaacaaacaaaaccgagttgttaacattcatggaatgaaaggagtccacatattatacatgtgtatgagtacttacccagatcccgatacagaacttgcccatcaccccagaagtcttccttgcctccctttctggccaatgaccgccctcctaaggcaccattcttctgatgcatttaaccacaggccggttttgcctgttctgacattataaacaggacttatacagtgtactcttttgtgtctggccttttttccactctacatgatgttggtttatacttggagttctttccttcttattgctatagagcagcagttggccacctttttctgtgaaggaccagatagtaaatattttcagtttttacaggtagtagggtctctgtgacagctactcagctctcttattgtggcatgaaagcagccacagacactgcataaatgaataggcatggctgtgttctaataagactttatttgtggcctctacatttggattttaggtcaggctcatgcctgtaatcccagcactttgggaagctgaggtgggtagatcacctgaggtcaggagttcgagaccagcctgaccaacatggtgaaaccccatctctactaaaaatacaaaataagctgggcgtggtggggtgtgcctgtattcccagctactcaggaggctgaggcaggggaatcgcttgaacctcccccgggaggtggaggttgcagtgagcccagatggtgccattgcactccagcatgagtgacaagagcaaaactccatttcaaaaaaaataaataaataaaataaaaaataaaatttggatttcatataggtttttttttaaatttgtttgagacaggctcttgttctattgcccaagctggtatgcactggcgtgagcatagctcattgcagcctccaactcctgggctcaagtgatcctcctaccgcagcctcctgagtagctgggactatgggcatgtgccaccatgcccagctaatttttaaacaattttttgtagagactgagtcttgctgtgttgctcagattggtctcaaactccaggcctcaagcaaccctcctgcctcggcctcccaaagtgttgggattacaggtgtgagccccatctagtttttacatgttactttgatagttttcaatgtgaaaaaaagttaaaatgattcttagcttacaggccttacaaaaactgatggcaggccaaatttggtccactggccataatttttgccctacaaaatgggcaggttgtggtggctcctaggctcaagcgatcctccttgcctcagcctcccaaagtacaaagtgaattacaggcatgagccactacaccctattttccttctgattattcagtttttggctaccacgaataatgctgctatgaagattcttctgctaatatcttagggaacattgtcatgaattctaaggactggattttctgggtcactgagtcgacaaatgtttaattttcatagaaactcccagtttcttgaactggttgttcatcttacataaaagatgggacaaatttaagtggtttcattgtagaatgagttttctttctttcttttttttttttttagagacagagtctcactctgtcccccaggttggagtgcagtggcacaatcttggctcactgcaatctctgcctccctctgggagcctcagttccctgcgctaaaacacagggtttatcacagcaccttcctcttgaggctgtttcaaggattagctggctgccttcaggatctccaacccagaggttccccttctaggtgtgaagcccagagacacccttgctcatgtgcacaaaagacagcaggggtgtagggcaggggacaaagtacacagcaggggactgtttaatacatgatgacgctacaaggcagtggatcgccaaaacaggagtaattcttttttttctgagacagagcctcactctgtcacccaggctagagtgcagtggcgcagtctcggctcactgcaacctccgcctttcggtgatccttctgcctcagcctctccagtagctgggattacaggtgcgcaccaccacatctggctaaattttatgtttttattagagatggggtttcgccatactgccaggctggtcgtgagcacctggcctcaagtgatctgcgtgcctcagcctcccaaaatgcagggattacaggagtgagccaccgcacctggcccaagttttctttttttaataaactgattgagaagtgaacatcttagctgccacagggtggccgaatcagaaagttaggtttgctgttaaatatgctggcttagagaagtactgctgaaaacactgatcccccaggtcccttagaatcagagagtctgatttaattgttctgggtggacacaaggaattggcatgttttaaaagctccaccattgattcttatgtggctcaagtgtgggtttcaatacttcctccttttaacattgtgaaacgagtaatttttcttccaacattttattatgaaaaatttcaagcatagagaaaagctgaaaaaaaatttttttttttttttgagacagggtctcactttgtcatccaggctggagtgcagtggtgcaatcatagctcactgcagcctcaacctcctggctcaagcgatcctcctgcctcaggcttccaaatagctggaactacaggtgtgcaccaccactcctggctagtttttgtgttttttgtaaagacagagttttgccacattgcccaggctggcctcgacctcctgggctcaggcaatcctccctccttggcctcccaaagtgctgggattagagtgagccactgcaccaggcttaaaatttttttttacagtgtacatctctaaccatccatcacttcatctttttttcttttgagatggagtctcactctgttgcccaggctggcgtacagtggcacaatcttggtttactgcaacctctgcctcctgggttcaagcgattctcttgcctcagcctcccgagtagcagtagctggatttacaggcgagtgccaccacacccagctaattgatttttaaaagatttttagtagcgatggggtttcaccatgttggccaggctggtctcgaactcctgacctcaagtgatccacctgccttgacctcccaaagtgctaagattacaggtttgagctgctgtgtccgacctattcttttttttttttttttgggtgggggtctcgctatgttgtccaggctggtattgaaccctggctaaggtgatcctcccgcctcagcctcccaagtagctgggcctacagacgtgcaccatcatgccttgctgtaattgttctattttattattagttattattgatttattaatgtgcctaatttataaattaaactctatcataggtgcgtatgtataggaaaaagcatagtgtgtagggttctgtactatctgcggttttaggcatccactccgggtcttgaaatgtatcccaggcagataagaggtgtttactatagttttgagtaatgaagggaaagaacttgggaaccaaatggaaaagaagctgagagcttacttgccaccagggggcagtgtaggccgtgggaactccaaggccagcaagctgaatgctttacaggattccttctgggttatgtttctttgatgggggtagtttcaggtttagctgctgcaggcaacagatgaaagaaaagctctggggatgtgtcacagacatgatgcatcatggaagggaagaatgaatttgttgaaagaatttggggttaggcaggctgggctgttgcggaaatcactcgacaagtttcagggacaatgaaggctgctttaggtcaagatgttatatgttccccacccacaatttcttattttgaattttttaaaatctacattgaaataatagtacaaaatataacaatacacaagcacaggccgggcgcggtggctcacgcctgtaatcctggcactttgggaagccgaggtgtgcggatcacccgaggtcaggagtttgagatcagcctggccaacatgatgaaaccccgtccctactaaaaatacaaaaattaaccgggcatggtggcacgctcctgtaatcccagctactcaggaggctgaagcatgagaatcacttgaacacccaggaggtagaggttgcagtgagacgagatcgcaccactgcactccagcctgggccacagagcaagactgtctcaaaaaaaaaaaaaaaaaaaaaaaaaaaaaacaagcacaaatttcatcagccatcagagcaattatgtcactataggtcatgaaacttttagaaccgcgcccctctcccccaaatgtttttggggaatgcgagtgaaaatgggcaaaaagtccaaaaatcgttttgattttgcagaatgtcagggttctctaggctatactttgagacttcctcttttacaaaacctttgtcacgtctaacaaaatatgcagtaactttttttttttttttttttttttgagacaagagtctcgctctgtcgcccaggctggagtgcagtggtgcgatctcggctcactgcaagctccgcctcccgggttcatgccattctcctgcctcagcctcccgagtagctgggactacagacgcccaccaccacgcccagctaatttttttttttgtatttttagtagagacggggtttcaccatgttagccaggatggtctcgatctcctgacctcgtgatccgcccgtctcggcctcccaaagtactgggattacaggcgtgagacaccacgcccggccaatatgcagtaactttatatcattattaaatattcagctgtgttcagatgtctccaattacccgaggaataatttttacagctttttttttcttttttctttctttttttggtagagataggatctcaccatgttgcccaggctggtctcaatctcctgggctcaaatgatcttcccctctcggtgactcaaagtgctgtaattataggtgtgagccacggtgcccagcctacggctgtttttaggaaccaggatacaattgagcttagtgtttggccattatgtctatttagtctcttttgtgtgtgtgtttgtgttttctttttccttcttttctttttgttttgttttcttttttattatttatttattattttttatttatcaaaaatctttttggatctagaacagtttcatatccttttgccccaggatattgacttttttttttgagacagtctcgctctgtcacccaagctgaggatattgacttttgttttttgttttttttttttgagacggagtgttgctctgtcactcaggctggaatgcagtggcatgatctctgctcactgtaacctctgcctcccaagttcaagcaattctactgcctcagcctccccagtagctgggactataggcatgtgccaccacgcttggcatgcttggctaattttttttttttttttgaggcggagtctcactctgtcacccagggtggagtgcagtggcgtgatctcagctcactgcagcctccgcttcctgggttcaagcaattctcctgcctcagcctcccgagtagctgggattacagacatcaccaccacgcctgactaatatttgtatgttttgtggagatggggtttcaccatgttggcgaggctgatcttgaactcctgacctcaggtcatccacctgccttggcctcccaaagtgtcgcgattaggcgagccaccgtgcctggcttcggctaatttttgtatttttagtatggatggggtttcaccatgttcaccagtctggtctcaaattcctgacctcaagtaatctacctgcctcggcctcccaaagtgctgggattacaggcgtgagccaccgtgcctggccgcatttaatacatttaacctactgaacattataggttagcctactttaccttaaagtggtcagaacatttacattagcctacagttgggcaaactcatctaacacaaagccttgtattttatacaagagtgttgaatatctcatgtaatttattgaatactgaattgaaagtgaaaaacagaatggctgtatgggtgcatggaatatgatttctattgaaagtgtatcacttttggcttggtgcagtggctcatgcctgtaatcccagcacattgagaggctgagatgggaggattgcttgaggccaggagttcaagaccaggctggtcaacatagtgagagcccatctttactgaagaaaaaaaaagacaaatgaaaaaaagaaataaaatgtatcactttcacattattgtaaagtcaataaattgttagtcatcgggcacatcacacctgtaatcccaacactttgggaggctagtgtgggcagattgcttgatgccaggagttcaagaccagcctggtcaacatgatgaaacctcgtctctactaaataacagtacaaaaattagctagacacagtgatgcgtgcctgttatcccagctactcagaaggctgagacacaagaatcacttcaacccaggaggccgaggttgcagtgagccgagatcatgccactgcactccgcagcctgggcgacagagagagactctatctcaaaaaaaaaaaaaaaaaagaaaaaaagaaagaaaaaaaagccaggcatggtggctgactcacacctgtaatcccagcattttgggaggatgaggcaggcggatcatttgaggtcaggagtttgagaccagcctggccaatgtggtgaaaccccatctctactaaaaagacaaaaattagccaggtgtgatggtgagtgcctgtaatcccagctactcaggaggctgaggcaggagaatcgcttgaacccgggaggcggaggttgcagtgagccgagatcgcaccactgcactccagcctgggtgacagagtgagactctggttaaaaaaaaaaaaatcataagtcagaccatcttaagtcaaggaccacatgtataccaagggttgagccacagggtatgtgtagatttagctttagtagaaactgcccagtaattttgatttgtagatgatctttatatattccggatccaagaactttgttggatccagtacaactcctttacctgtggtttcactttctgtggttttagttatctgtggtcaaccatagcgtgaagatattcaatggaaaattccagagataaacaattagtaagttttaaattgtacatcgttctgagtagcatgataaaatctcacaccatcccactcaggacatgaattatccctacgtccagtgtatctgtgctgtataggagtatgttacccattcgttaatcacttagtagccttcttgattatcagatgaaaaaaaaacatagattggccggtcacggtggctcacgcctgtaatcccagcactttgggagcctgaggcgggtgaatcacctgaggtcaggagcttgagaccagcctgaccaacatggtgaaaccctgtctctactaaaaaatacaaaaattatctgggcatggtggtgggcacctgtaaccctagctacttgagaggctgaggcaggagaatcacttgaacccaggagggggaggttgcagtgagccaggatcatgccattgcactccagtctgggtgacagagccagactccgtccaaaacaaaacaaaacaaaacagtatttatagggtttgtactatctgaggtttcagatatccactgggttcttggaggtatcccctgcggataaggaaggactactgtttatgtttgtaaatatcattttccactctgagggctaccttttcactgtctttttttttttttttttttaaggcggagttttgctcttgtcatccaggctggagtgtgatggtgcaatcttggctcactgcaacctccgcctcccgggttaaagcaattctcctgcctcatcctcccaagtagctgggattacaagcatgtgccaccatgcctggctaatttttgtatttttagtagagatggggtttcaccacattggccggggtggtctcgaactcctgacctcaggtgatttgcccgcctcggcctcccaaagtgctgggattacaggtatgagccacagcgcccagccaccactgcctattttttatttttaaaagtgtaaaacattgaattttatttcaacggtattgcttttaatgactgttgggtattccatttttatattagtgtgcttacctttttaaaattggtttgcaagatctgtttgtatattaagtatattgaccactgtgtggtatgtatatgttacaaatatattttcccagcatattggttctctttagattttgtttatggtgttgctgccattcagaaccttctgactgatcttttccttaatgatttatcactttaggtatcacatttgaatatcccttctgtattagtctgttctcatgctgctaataaagacatacctgaaggctgggtgtggtggctcacgcctgtaatcccagcactttgggaggccaaggcaggtggatcacgtggtcaggagtttgagaccagcctgaccaacatggtgaatccccatctctactaaaaatataaaaattagccaggtgtggtggtacatgcctgtaatcccagctactcaggaggctgaggcaggagaattgcttgaactggggaggcagaggttgcagtgagccaagattgcaccactgcactgcagcctgggtgacagagcaagactgtctcaaaaaaaaaaaaaaaaaaaagacatacccaagactgggtcatttataaagaaaaaggggtttagtgggctcacagttccacctggcttgggaggcctcccaatcatggtggaaggcaaaacaggagtgaaggcatggcttacatggcgacaggcaagaaagtgtgtgcaggggaactgccgtttgtaagatcatcagatcttgtgagacttattcactatcatgagaatagcatgggaaaaacccacccccatgattcaattacctcccaccggctccctcccacaacccatggggattatgggagctataattcaagatgagatttgggtggggacacagccaaaccatatcattccactttggtcgctcccaaatctcatgtcctcacatttcaaaaccaatcataccttcccaacagtcccccaaagtctcaactcatttcactattaactcaaaagtccacagtccaaagtctcatctgaggccgggcatggtggctcacacctgttatctcagcactttgggaggccaaggcaggcagatcagctgaggtcaggagttcaagaccagctttcccaaaataataaaaccctgtctatactaaaaatacaaaaattaggcaggcatggtggcacatgcctgtagtctcaactactcgggaggctgaggcacaagaattggttgaacctgggaagcagaggttgcagtgagccaagattgcaccactccatcccagcctgggtgacagagtgagattctgtctccaaaaaaaaaaaaaaatcaacaacaaaataaagtctcatctgagacaaggcaagtccctcccacctatgggcctgtaaaatcaaaagcaagtttagttatttcatagatacagtgggatccagggattgggtaaatacatccattctaaatggaagaaattggccaaaatgaaggggctgcaggctccgtgcaagtcctaaatccagtggggcagtcaaatcttaaagctccaaaaagatcttttactccatgtctcaaatccaggtcatgctgatgcaagaggtgggttcccatggtcttgggcagctctgcccctctggctttgcagggtacagccccactcctggctgctttcacgggctggtgtggagtatctgtggcttttccaggcacatggtgcaagctctcggtggatctaacactctgggttctggagggcgatggccctcttctcacagctccactaggggcagtgccccagtgggaactctctgtgggggctcccactccacatttcccttctgcactgtcctagcagaggttccctatgaaggcttcacccctgcagcacacctctgcctggacatccaggcatttccatacagcctctcaaatctagctggaggctcccaaacctctgttcttgacttctgttcaccagcaggcccagcaccacgtgtaagccaccaaggcttggggcttgcaccctctgaagcaatggcctgagctgtacttggccccttttagccccgactgggatgcagggcaccaagtcctgagactgcacaaaacagcaaggccatgggccctgcccatgaaaccattttttctcctagtcctttggacctgtgttgggagaggctgctgtgaaaacctctgacatgccctggagacatttttcccattgtcttggtgattaacatttggctcctcgttacttatacaaatttctgcagcaggcttgaatttttcctcagaaaatgggtttttttttctatcacattgtcaggctgcaaattttccaaacatttatgctctatttcccttttaaacataggttccaattccaaaccatatcattgtgaatacataaaactgaagtgaatgcttttaacagcactcaagtcacctcttgaatgcttttaacagcactcaagtcacctcttgaatgctttcctgctgagaaatttcttctactaggtaccctaagtcatctctctcaagttcaaagttccacagatctctagggcaggggcaaaatgctgccagtctctttgctaacacataacaaaagtgacctttaccccagttcccaaaaagttcctcatctccatgtaagaccatgtcagcctggacttcattgttcatatcactctcggcatattggtcaaagccactcaacaagtctctaggaagttccaaactttcccacatttttctgtcttcttctgagccttccaaactgttcaaacctctgcttgttacccagttccaaagtcacattttcacatctccttatagcagcaccccactttactggtaccaatttactgtattagtcttttctcatgctgctaataaagacatccctaagactgggtcatttataaagaaaaagaggtttaatggactcatagttccacatggctggggaggcctcacaatcatggtggaaggcgaaggaggagcaaagacctgtcttacatggcagcaggcaagagagagtgtgcaggggaactgccctttataaaaccatcagatctcgtgagacttattcatcatcacgagacagcatgggaaaaacctgcccccattattcaattacctcctgcctggtccctcccatgacatatgaggattatgggagctacaattcaagatgagatttgggtggggacacagccaaaccatatcaccttcctaaccagaggtcagatattatttgtatttttgttgttgtgtgtcacagctttgcggttttatttttcatgcatttaaatctttaatccacttggagtttactctgataatataagattacagcctgggaatctacattttttaccaaaatgtttatctagataagaccctggggtagggtggggctttgggggccagtttcatctagaaggcttcttggtgactatctctgtactcttccacccctgccaggcgttggagaccagggccagccctggccacaccccaggctgtgtcaccttcgtcctgaatgaccacagcatggccttcactggagatgccctgttgatccgtgggtgtgggcggacagacttccagcaaggtgaccagctcctttatccagcccaagatcttcatatagttacgtgtgtgtcaagtgttgaagtatctgttacaagaatgaatggatggacattagacttttagggggcttcagtattaaattcaaggagtttacctgctagaacagtggtccccaacctttttggcaccagggaccggtttcgtggaagacaatttttccatggaccatggcagggcatagtttcggggattcaaatgcattacatttattgtgcactttattattacattgcaatagataatgaaataattatgtaactcaccatcatgtagaatcagtgggagccctgaacttgttttcctgcaactagatggtcacatctgggagagacggaagatagtgacagatcatcaggcattagattctcataaggagaacgcaacctagatccctcgcatgtgcagttcgcaatagagtttgtgctcctatgagaatctaatgctgctgcggatctgacaggaggcagagctcaggtggtaacgggagtgatggggagtggctgtaactacagatgaagctttgctcactcacccaccgctcaccaccttctgcacagcccagttcctaacagaccacggaccggtacccagggttaaggacccccatgctagagtatgggaagagttagattcaggggcttagctgttgggggacagttagattcaggggtgtgttagttacctatttgagcccagcttgggcaacatagtgagactccctctctaagaaacaaatatagctaaaaaaaaaaaaaaaacaaagggctgggcatggtggctcacgcctataatcccagcactttgggaggccgaggcaggtggatcatgaggtcaggagttcaagaccagcctggccaagatggtgaaaccccgtctctactaaaaatacaaaaattagctggccatggtggtgggtgcctgtagtcccagctactcgggaggctgaggcagagatttacttgaacccaggaggcggaggttgcagtgagccaagattgcgccactgcactccagcctgggtgacagagtgagacttcatctcaaaaaaaaaaaaaaaaaagataaaaaaagaagttgttaaagccagcggtttaattgccagggagcaatgaatgatccatttggagtctagctgctaggggcagttagatttaggagcttccctgtagaaagcgagtatagtttcagaatctcagggttgggccatcctttgagcatgtgtgtgaatgtggggttaacactaggcctggaatttagctgtcttgtggggagaggtgaggctggatgagagggaaagacagaagccatgatgagatggccgtggaagccacatccccaggcctcttcctccctcttccctctctccttatctctgcatctcagtctctgtctttttctctccaaggctcccaatctcccatttatccattcacagtacagtcaggaagctgaaggatttaggccgaaatgcaaggtggaatagaggtttgccccctacttaggactcagagctgcttgtggggaccatggcttcacactctcctcctgggcctcatgtcctcatgtctgcagtttctttcttcttcttcttcttttttttgagacggagtctcgctctgtcgcccaggctggagtgcagtggtgcaatcttggctcactgcaagctctgcctcctgggttcacgccattctcctgcctcagcctcccgagtagctgggactacaggcgcccgccatcacgccaggctaatttttttgtatttttagtagagacagggttttaccatgttagccaggatggtctcgatctcctgactttgtgattcacccacctcggcctcccaaagtgctgggattacaggcgtgagccaccgcgcccagccttttttttttttttcttgagacagagccgcgctctatctcccaggctggagggcagtggtgtgatcttggctcactgcaacctccgcctcctgggttcaagcaattctcctgcctcagcctcccaaatagctgggattacaggcatgggtcaccatgcctggctaatttttgtatttttagtagagacagggttttgtcatgttggccaggctggtctcgaactcctgacctcaggtagtccacccacctcagcctcccaaagtgctaggattacaggcatgagccactgcacctggctttgtcttcagtttcttaccttctagtccaccttccttgttcagaacccttacttgacatcccctgggtgacagccaaggtcacaaatgacactctttggtgcttcacggtgtcattccaaccctatttacagccatgctgaatttcttgacattcctcaattctttgtatatgctgttccatctgcctagaatgcctttccctgttctctacttagacaaagggatattggcaggacacgaaggagagggtttagctatagtgattttatcctcctacccttttcttgaaggaaggggttagagtcttctgtcctgttgatccactgacctctgatctttccttccccaggctgtgccaagaccttgtaccactcggtccatgaaaagatcttcacacttccaggagactgtctgatctaccctgctcacgattaccatggtgagggcttcctggaagaggtgtggggcgtacataactttgaaagtggagtgtaaatctctgtaatccttgtagggcatgaagacgaccagtctcagaaatttctctggccaaaaaaaattaagtgtttgaggctgggcaagggggctcacacttgtaatcctagcactttgggaggccaaggcaggaggctcatttgagcccaggagtgagttcgagaccagctggagtaacatggcaaaaccctgcctctacaaaatacaagaaattagccaggcatggtggcatgctgccagctacttgggaggctgtggtagaaggattgcttgagcctgggaggttgaggctgcagtgagctatgattgtaccactatattccagcctgggtgacacagcaagcccctgtctcaaaaaaaaaaaaaaaaaaagagataaagtgcttgagcctgctgtgtgtggatgtagaaactatgtgactgccagatgcctagaattctgcagggcatgggttttcctgggccttacttgtggagcttagggaactgggggaaaactaaatttcccatagtgtccatggaggagggaaagcaattttaggaatattctgggaagagcccctgccagagaggcacccaaggcctcctggggaatgtagttctgagaggcctgaggcactagactccttgactttccttcccctcccttggcccctagggttcacagtgtccaccgtggaggaggagaggactctgaaccctcggctcaccctcagctgtgaggagtttgtcaaaatcatgggcaacctgaacttgcctaaacctcagcagataggtgagcagctggggacctggacttctgggtctgagagaggaggggctggggtcttggactcctgggtctgagagaggaggggctgggggcctggactcctgggtctgagggaggaggggctgggggcctggactcctgggtctgagggaggagaggctgggggcctggactcctgggtctaagggaggaggggctgggggactggactcctgggtctgaggcagtaggggctgggggcctggactcctggctctgagggagtaggggctgggctgggggcctgggctcctgagtctgagggaggaggggctgggggcctggggtcctgggtctgagggaggaggagctgggggcctggactcctgggtctgaaggaggaggggctgggctgggggcctgggctcctgggtctgagggaggaagaactgggggcctggactcctgggtctgagggaggaggaactgggggcctggactcctggatctgagggaggagggactggggacctgggctcctgggtctgagggaggagggactgggggaggaggagctgggggcctggactcctgggtctgagggaggagggactggggacctgggctcctgggtctgagggaggaggggctgggggcctggactcctgggtctgagggaggaggggctgggggtctgaactcctgagtctgagggaggaggggctgggggactggactcctgggtctgagggaggaggggctgggggactggactcctgggtctgaggaaggaagggctgggggactggactcctgggtctgagggaggaggggctgggggtctgggctcctgggtctgagggaagaggggctgggggtctggactcctgggtctgagggaggaggggctggggtactggactcctgggtctgagggaaggagtgggctcaggaccaaaactctagtttcctgaagaggaaaggttcctaggatttctgggtctccagtggggcctggaactctacctaggccccttagttttaaccttgatttcttcctttcagactttgctgttccagccaacatgcgctgtggggtgcagacacccactgcctgatctcacttctgtcagatgctcccatccactattaatgcactaggtgggaggagagggc

SEQ ID NO: 11906 - DNA, 702 bp, Homo sapiens
gctcattcctgaccccgcagtgggcgcgatggcggaggctgtactgagggtcgcccggcggcagctgagccagcgcggcgggtctggagcccccatcctcctgcggcagatgttcgagcctgtgagctgcaccttcacgtacctgctgggtgacagagagtcccgggaggccgttctgatcgacccagtcctggaaacagcgcctcgggatgcccagctgatcaaggagctggggctgcggctgctctatgctggcgttggagaccagggccagccctggccacaccccaggctgtgtcaccttcgtcctgaatgaccacagcatggccttcactggagatgccctgttgatccgtgggtgtgggcggacagacttccagcaaggctgtgccaagaccttgtaccactcggtccatgaaaagatcttcacacttccaggagactgtctgatctaccctgctcacgattaccatgggttcacagtgtccaccgtggaggaggagaggactctgaaccctcggctcaccctcagctgtgaggagtttgtcaaaatcatgggcaacctgaacttgcctaaacctcagcagatagactttgctgttccagccaacatgcgctgtggggtgcagacacccactgcctgatctcacttctgtcagatgctcccatccactattaatgcactaggtgggaggagagggc

SEQ ID NO: 11907 - DNA, 1030 bp, Homo sapiens
cggctcctgcaggcgctcggcctccgctcattcctgaccccgcagtgggcgcgatggcggaggctgtactgagggtcgcccggcggcagctgagccagcgcggcgggtctggagcccccatcctcctgcggcaggtgcgggtggctggacctaggaggggactgctgggcactaggcggcagcaaggacggaactccggggtctcttaatagggagagatccggggggacccacgcctgcatcttgcggaaagcggggtggaggtttagggctggactcttgggtcctttaaaggtgagtggtctgggggcctctgggcttggggccagacccctgggtcctctatgaaagaacgtgctggggaccctgattttgggatgttaggaagttggaactcttttgttctgataggggaaggtagtggggctccggactcccgactcccggggaaagagtgggctggggtttctgcttctggatcttaggaagaggatagggtcagtctggactacttggcctccagtgggtggaagtccggttctgcgccctcacctgggtcccccgttcccagatgttcgagcctgtgagctgcaccttcacgtacctgctgggtgacagagagtcccgggaggccgttctgatcgacccagtcctggaaacagcgcctcgggatgcccagctgatcaaggagctggggctgcggctgctctatgctggtcagtccggggaccaaactcatggatcccagcggggctgggctgcagcgtcagtggaatgggaagctggggcccagaactcctgagtctgagggagaaggatctgggctgggactcccaggtcctttctgtaccctccggacctgtccctcctctctctcccagtgaatacccactgccacgcggaccacattacaggctcggggctgctccgttccctcctccctggctgccagtctgtcatctcccgccttagtggggcccaggctgacttacacattgaggatggagactccatccgcttcgggcgcttc

SEQ ID NO: 11908 - DNA, 593 bp, Homo sapiens
cggctcctgcaggcgctcggcctccgctcattcctgaccccgcagtgggcgcgatggcggaggctgtactgagggtcgcccggcggcagctgagccagcgcggcgggtctggagcccccatcctcctgcggcagatgttcgagcctgtgagctgcaccttcacgtacctgctgggtgacagagagtcccgggaggccgttctgatcgacccagtcctggaaacagcgcctcgggatgcccagctgatcaaggagctggggctgcggctgctctatgctggtcagtccggggaccaaactcatggatcccagcggggctgggctgcagcgtcagtggaatgggaagctggggcccagaactcctgagtctgagggagaaggatctgggctgggactcccaggtcctttctgtaccctccggacctgtccctcctctctctcccagtgaatacccactgccacgcggaccacattacaggctcggggctgctccgttccctcctccctggctgccagtctgtcatctcccgccttagtggggcccaggctgacttacacattgaggatggagactccatccgcttcgggcgcttc

SEQ ID NO: 11909 - DNA, 19586 bp, Homo sapiens
gcaggcgctcggcctccgctcattcctgaccccgcagtgggcgcgatggcggaggctgtactgagggtcgcccggcggcagctgagccagcgcggcgggtctggagcccccatcctcctgcggcaggtgcgggtggctggacctaggaggggactgctgggcactaggcggcagcaaggacggaactccggggtctcttaatagggagagatccggggggacccacgcctgcatcttgcggaaagcggggtggaggtttagggctggactcttgggtcctttaaaggtgagtggtctgggggcctctgggcttggggccagacccctgggtcctctatgaaagaacgtgctggggaccctgattttgggatgttaggaagttggaactcttttgttctgataggggaaggtagtggggctccggactcccgactcccggggaaagagtgggctggggtttctgcttctggatcttaggaagaggatagggtcagtctggactacttggcctccagtgggtggaagtccggttctgcgccctcacctgggtcccccgttcccagatgttcgagcctgtgagctgcaccttcacgtacctgctgggtgacagagagtcccgggaggccgttctgatcgacccagtcctggaaacagcgcctcgggatgcccagctgatcaaggagctggggctgcggctgctctatgctggtcagtccggggaccaaactcatggatcccagcggggctgggctgcagcgtcagtggaatgggaagctggggcccagaactcctgagtctgagggagaaggatctgggctgggactcccaggtcctttctgtaccctccggacctgtccctcctctctctcccagtgaatacccactgccacgcggaccacattacaggctcggggctgctccgttccctcctccctggctgccagtctgtcatctcccgccttagtggggcccaggctgacttacacattgaggatggagactccatccgcttcgggcgcttcgtgagttgggtgctgggtccccaagagggtggtggcctggacttcttaaacttaagggaagaggggactgggggcctgggatcctgagtccttggggaggagggacctcaggacctgggtttctgacccctgagctcatatttctgggaggggggcaccataaacccaggtggggcactggggcaagaggctctgggcaggtggggcactggcggaactcctaagtcaacagcatttaaggagtttccttcctaaagcttaggggcagccctttggcctggcatgcatctccataaaagttgattaggggctggaattctgagggcagggctgagaaggaaagagacccagtcctgtcttgcggaaacctccgtttgaggaaggagcatctgggtgcttagaacccggagcccaggactaggaaaaggacggtgaggaccctggagtgcaacatttaaggaggcactcgctctcagggtcctgtaagtgcagggtccgcacctgtgagtgagcgcctccttaaatcttgcaccaacagcctcaccctagtcctagccctgccgttgcctcacactgggaagtctaaaggttcctgccttcctcactttatttgccacaggcaccagcgggtttccggccagaattgcaaccaggccgaaggagggagggccaggggagttgccctcagagagagggaaacagctggcagggcattcttctgatcaattgctaaagatgtataataaagtttggctgactttggggacagaatgtcaggtgacagaagacagcctccaggttagagagttttgccaaatagggacagttcatttgagtcagagtgtttagaggaaatgagggctgtgtgtgggaagagagttcagctacaatggttacagaagctttatttcaagcctttctctggaagcaggcaaaaatgcattgtacatgtatgtacattgtacataataggtgctaacaaacatgtcttgaaatgaacgaagggtttagctatggtagatttagcttcagtgttttttttttttctttctttctttctttcttttttttttttatttgagactgggtctctgtcacctaggctggagtgcagtcagccttgacctcccaggctcaggtgatcctcccaccttagcctccctggtagctgggaccacaggcatgcaccagcacgcctggctgatttgtgtatgttcttgtagagacagggttttgttatgttgcccaggctggtcttgaactactgggcacaagtgatcctcctaccttggcctcctaaagtgctaggattacagggcttctgaaagtgctgggattacaggcatgagccactgcacccacccttttttgttgttgttgtttgtttgtttgtttttgagaaaaggtcttgctctgtcacccaggctggagtgcaatggtgggatcatagcttactgcagccttgaccttctgggctcaggtgatcctcatgcctcagcctcctaagtagctgggactacaagcacctgccaccatacctggctaattttttaattttttgttgagctgtaatctcactatgttgcccaggcttaatagctttattgatataacccacataccatataatttatctatttcgagtgcacaattcaatgacttttagtatattcagagttgtacatccattactaccattaattggaaaatgtttccattactccaaaaagaccccacaccccttagccatcacccctatccttcccttttcccccctcagccttaggcaacttttttttttttttttttttaatttgagacagggtctcactttgttgcccaagctagagtgcagtggtgcgatcttggtttactgcaacctccacctcccgggttcaagtgattctcttgtttcagcctcccaaatagcagggattacaggcgtgcgccaccaagcccagcaaatttttttgttttatttatttatttatttatttgagatggagttttgctcttgttgcgcaggctggagtgcaatggcgctatctcagcttagcgcaacctcagcctcccgagtagctgggattacaggcatgcgccaccatgcctagctaattttgtatttttagtagagacggggtttctccgtattggtcaggctggtctccaactccctatctcaggtgatccgcgcgccctggcctcccaaagtgttgggattacaggcatgagccactgcgcccaggcacatttttatttatttttttgagacagtcttgctctgtcacccaggctggagtgcaatggcaagctctcagttcactgcagcctctgcctcctgagcgcaagcgattctgctgtctcagcctcccaaatagctgggattccaggcatgtgccaccatgtctggctaatttttgtatttttagtagagatagggtttcaccatgttggccaggctggtctcaaactcctgacctcaggtgatctgcacaccttgacctccccaaagtgctgggattataggcgtgagccaccatggctggcttgtctgagattttggagatgggggtccatttttctctcctttatttttccttctactttaaaaaaatgaattgttagcctgggtgtggtggctcatgcctgtaattccagtacgttgagaggctgaggtgggcggatcacttgaggtcagaagttcgagatcagcctggccaacatggtgaaaccctgtctctactaaaaatacaaaaattaagcggtatggtggtgaggcacctgtaatcccagctactcaggaggctgaggaggcaggaggagaattgcttgaatccgggaggcagaggttgcagtgagccaagatcgcaccactgcactccagcctgggtgacaaagcgagattccatctcaacaaacaaacaaacaaacaaaaccgagttgttaacattcatggaatgaaaggagtccacatattatacatgtgtatgagtacttacccagatcccgatacagaacttgcccatcaccccagaagtcttccttgcctccctttctggccaatgaccgccctcctaaggcaccattcttctgatgcatttaaccacaggccggttttgcctgttctgacattataaacaggacttatacagtgtactcttttgtgtctggccttttttccactctacatgatgttggtttatacttggagttctttccttcttattgctatagagcagcagttggccacctttttctgtgaaggaccagatagtaaatattttcagtttttacaggtagtagggtctctgtgacagctactcagctctcttattgtggcatgaaagcagccacagacactgcataaatgaataggcatggctgtgttctaataagactttatttgtggcctctacatttggattttaggtcaggctcatgcctgtaatcccagcactttgggaagctgaggtgggtagatcacctgaggtcaggagttcgagaccagcctgaccaacatggtgaaaccccatctctactaaaaatacaaaataagctgggcgtggtggggtgtgcctgtattcccagctactcaggaggctgaggcaggggaatcgcttgaacctcccccgggaggtggaggttgcagtgagcccagatggtgccattgcactccagcatgagtgacaagagcaaaactccatttcaaaaaaaataaataaataaaataaaaaataaaatttggatttcatataggtttttttttaaatttgtttgagacaggctcttgttctattgcccaagctggtatgcactggcgtgagcatagctcattgcagcctccaactcctgggctcaagtgatcctcctaccgcagcctcctgagtagctgggactatgggcatgtgccaccatgcccagctaatttttaaacaattttttgtagagactgagtcttgctgtgttgctcagattggtctcaaactccaggcctcaagcaaccctcctgcctcggcctcccaaagtgttgggattacaggtgtgagccccatctagtttttacatgttactttgatagttttcaatgtgaaaaaaagttaaaatgattcttagcttacaggccttacaaaaactgatggcaggccaaatttggtccactggccataatttttgccctacaaaatgggcaggttgtggtggctcctaggctcaagcgatcctccttgcctcagcctcccaaagtacaaagtgaattacaggcatgagccactacaccctattttccttctgattattcagtttttggctaccacgaataatgctgctatgaagattcttctgctaatatcttagggaacattgtcatgaattctaaggactggattttctgggtcactgagtcgacaaatgtttaattttcatagaaactcccagtttcttgaactggttgttcatcttacataaaagatgggacaaatttaagtggtttcattgtagaatgagttttctttctttcttttttttttttttagagacagagtctcactctgtcccccaggttggagtgcagtggcacaatcttggctcactgcaatctctgcctccctctgggagcctcagttccctgcgctaaaacacagggtttatcacagcaccttcctcttgaggctgtttcaaggattagctggctgccttcaggatctccaacccagaggttccccttctaggtgtgaagcccagagacacccttgctcatgtgcacaaaagacagcaggggtgtagggcaggggacaaagtacacagcaggggactgtttaatacatgatgacgctacaaggcagtggatcgccaaaacaggagtaattcttttttttctgagacagagcctcactctgtcacccaggctagagtgcagtggcgcagtctcggctcactgcaacctccgcctttcggtgatccttctgcctcagcctctccagtagctgggattacaggtgcgcaccaccacatctggctaaattttatgtttttattagagatggggtttcgccatactgccaggctggtcgtgagcacctggcctcaagtgatctgcgtgcctcagcctcccaaaatgcagggattacaggagtgagccaccgcacctggcccaagttttctttttttaataaactgattgagaagtgaacatcttagctgccacagggtggccgaatcagaaagttaggtttgctgttaaatatgctggcttagagaagtactgctgaaaacactgatcccccaggtcccttagaatcagagagtctgatttaattgttctgggtggacacaaggaattggcatgttttaaaagctccaccattgattcttatgtggctcaagtgtgggtttcaatacttcctccttttaacattgtgaaacgagtaatttttcttccaacattttattatgaaaaatttcaagcatagagaaaagctgaaaaaaaatttttttttttttttgagacagggtctcactttgtcatccaggctggagtgcagtggtgcaatcatagctcactgcagcctcaacctcctggctcaagcgatcctcctgcctcaggcttccaaatagctggaactacaggtgtgcaccaccactcctggctagtttttgtgttttttgtaaagacagagttttgccacattgcccaggctggcctcgacctcctgggctcaggcaatcctccctccttggcctcccaaagtgctgggattagagtgagccactgcaccaggcttaaaatttttttttacagtgtacatctctaaccatccatcacttcatctttttttcttttgagatggagtctcactctgttgcccaggctggcgtacagtggcacaatcttggtttactgcaacctctgcctcctgggttcaagcgattctcttgcctcagcctcccgagtagcagtagctggatttacaggcgagtgccaccacacccagctaattgatttttaaaagatttttagtagcgatggggtttcaccatgttggccaggctggtctcgaactcctgacctcaagtgatccacctgccttgacctcccaaagtgctaagattacaggtttgagctgctgtgtccgacctattcttttttttttttttttgggtgggggtctcgctatgttgtccaggctggtattgaaccctggctaaggtgatcctcccgcctcagcctcccaagtagctgggcctacagacgtgcaccatcatgccttgctgtaattgttctattttattattagttattattgatttattaatgtgcctaatttataaattaaactctatcataggtgcgtatgtataggaaaaagcatagtgtgtagggttctgtactatctgcggttttaggcatccactccgggtcttgaaatgtatcccaggcagataagaggtgtttactatagttttgagtaatgaagggaaagaacttgggaaccaaatggaaaagaagctgagagcttacttgccaccagggggcagtgtaggccgtgggaactccaaggccagcaagctgaatgctttacaggattccttctgggttatgtttctttgatgggggtagtttcaggtttagctgctgcaggcaacagatgaaagaaaagctctggggatgtgtcacagacatgatgcatcatggaagggaagaatgaatttgttgaaagaatttggggttaggcaggctgggctgttgcggaaatcactcgacaagtttcagggacaatgaaggctgctttaggtcaagatgttatatgttccccacccacaatttcttattttgaattttttaaaatctacattgaaataatagtacaaaatataacaatacacaagcacaggccgggcgcggtggctcacgcctgtaatcctggcactttgggaagccgaggtgtgcggatcacccgaggtcaggagtttgagatcagcctggccaacatgatgaaaccccgtccctactaaaaatacaaaaattaaccgggcatggtggcacgctcctgtaatcccagctactcaggaggctgaagcatgagaatcacttgaacacccaggaggtagaggttgcagtgagacgagatcgcaccactgcactccagcctgggccacagagcaagactgtctcaaaaaaaaaaaaaaaaaaaaaaaaaaaaaacaagcacaaatttcatcagccatcagagcaattatgtcactataggtcatgaaacttttagaaccgcgcccctctcccccaaatgtttttggggaatgcgagtgaaaatgggcaaaaagtccaaaaatcgttttgattttgcagaatgtcagggttctctaggctatactttgagacttcctcttttacaaaacctttgtcacgtctaacaaaatatgcagtaactttttttttttttttttttttttgagacaagagtctcgctctgtcgcccaggctggagtgcagtggtgcgatctcggctcactgcaagctccgcctcccgggttcatgccattctcctgcctcagcctcccgagtagctgggactacagacgcccaccaccacgcccagctaatttttttttttgtatttttagtagagacggggtttcaccatgttagccaggatggtctcgatctcctgacctcgtgatccgcccgtctcggcctcccaaagtactgggattacaggcgtgagacaccacgcccggccaatatgcagtaactttatatcattattaaatattcagctgtgttcagatgtctccaattacccgaggaataatttttacagctttttttttcttttttctttctttttttggtagagataggatctcaccatgttgcccaggctggtctcaatctcctgggctcaaatgatcttcccctctcggtgactcaaagtgctgtaattataggtgtgagccacggtgcccagcctacggctgtttttaggaaccaggatacaattgagcttagtgtttggccattatgtctatttagtctcttttgtgtgtgtgtttgtgttttctttttccttcttttctttttgttttgttttcttttttattatttatttattattttttatttatcaaaaatctttttggatctagaacagtttcatatccttttgccccaggatattgacttttttttttgagacagtctcgctctgtcacccaagctgaggatattgacttttgttttttgttttttttttttgagacggagtgttgctctgtcactcaggctggaatgcagtggcatgatctctgctcactgtaacctctgcctcccaagttcaagcaattctactgcctcagcctccccagtagctgggactataggcatgtgccaccacgcttggcatgcttggctaattttttttttttttttgaggcggagtctcactctgtcacccagggtggagtgcagtggcgtgatctcagctcactgcagcctccgcttcctgggttcaagcaattctcctgcctcagcctcccgagtagctgggattacagacatcaccaccacgcctgactaatatttgtatgttttgtggagatggggtttcaccatgttggcgaggctgatcttgaactcctgacctcaggtcatccacctgccttggcctcccaaagtgtcgcgattaggcgagccaccgtgcctggcttcggctaatttttgtatttttagtatggatggggtttcaccatgttcaccagtctggtctcaaattcctgacctcaagtaatctacctgcctcggcctcccaaagtgctgggattacaggcgtgagccaccgtgcctggccgcatttaatacatttaacctactgaacattataggttagcctactttaccttaaagtggtcagaacatttacattagcctacagttgggcaaactcatctaacacaaagccttgtattttatacaagagtgttgaatatctcatgtaatttattgaatactgaattgaaagtgaaaaacagaatggctgtatgggtgcatggaatatgatttctattgaaagtgtatcacttttggcttggtgcagtggctcatgcctgtaatcccagcacattgagaggctgagatgggaggattgcttgaggccaggagttcaagaccaggctggtcaacatagtgagagcccatctttactgaagaaaaaaaaagacaaatgaaaaaaagaaataaaatgtatcactttcacattattgtaaagtcaataaattgttagtcatcgggcacatcacacctgtaatcccaacactttgggaggctagtgtgggcagattgcttgatgccaggagttcaagaccagcctggtcaacatgatgaaacctcgtctctactaaataacagtacaaaaattagctagacacagtgatgcgtgcctgttatcccagctactcagaaggctgagacacaagaatcacttcaacccaggaggccgaggttgcagtgagccgagatcatgccactgcactccgcagcctgggcgacagagagagactctatctcaaaaaaaaaaaaaaaaaagaaaaaaagaaagaaaaaaaagccaggcatggtggctgactcacacctgtaatcccagcattttgggaggatgaggcaggcggatcatttgaggtcaggagtttgagaccagcctggccaatgtggtgaaaccccatctctactaaaaagacaaaaattagccaggtgtgatggtgagtgcctgtaatcccagctactcaggaggctgaggcaggagaatcgcttgaacccgggaggcggaggttgcagtgagccgagatcgcaccactgcactccagcctgggtgacagagtgagactctggttaaaaaaaaaaaaatcataagtcagaccatcttaagtcaaggaccacatgtataccaagggttgagccacagggtatgtgtagatttagctttagtagaaactgcccagtaattttgatttgtagatgatctttatatattccggatccaagaactttgttggatccagtacaactcctttacctgtggtttcactttctgtggttttagttatctgtggtcaaccatagcgtgaagatattcaatggaaaattccagagataaacaattagtaagttttaaattgtacatcgttctgagtagcatgataaaatctcacaccatcccactcaggacatgaattatccctacgtccagtgtatctgtgctgtataggagtatgttacccattcgttaatcacttagtagccttcttgattatcagatgaaaaaaaaacatagattggccggtcacggtggctcacgcctgtaatcccagcactttgggagcctgaggcgggtgaatcacctgaggtcaggagcttgagaccagcctgaccaacatggtgaaaccctgtctctactaaaaaatacaaaaattatctgggcatggtggtgggcacctgtaaccctagctacttgagaggctgaggcaggagaatcacttgaacccaggagggggaggttgcagtgagccaggatcatgccattgcactccagtctgggtgacagagccagactccgtccaaaacaaaacaaaacaaaacagtatttatagggtttgtactatctgaggtttcagatatccactgggttcttggaggtatcccctgcggataaggaaggactactgtttatgtttgtaaatatcattttccactctgagggctaccttttcactgtctttttttttttttttttttaaggcggagttttgctcttgtcatccaggctggagtgtgatggtgcaatcttggctcactgcaacctccgcctcccgggttaaagcaattctcctgcctcatcctcccaagtagctgggattacaagcatgtgccaccatgcctggctaatttttgtatttttagtagagatggggtttcaccacattggccggggtggtctcgaactcctgacctcaggtgatttgcccgcctcggcctcccaaagtgctgggattacaggtatgagccacagcgcccagccaccactgcctattttttatttttaaaagtgtaaaacattgaattttatttcaacggtattgcttttaatgactgttgggtattccatttttatattagtgtgcttacctttttaaaattggtttgcaagatctgtttgtatattaagtatattgaccactgtgtggtatgtatatgttacaaatatattttcccagcatattggttctctttagattttgtttatggtgttgctgccattcagaaccttctgactgatcttttccttaatgatttatcactttaggtatcacatttgaatatcccttctgtattagtctgttctcatgctgctaataaagacatacctgaaggctgggtgtggtggctcacgcctgtaatcccagcactttgggaggccaaggcaggtggatcacgtggtcaggagtttgagaccagcctgaccaacatggtgaatccccatctctactaaaaatataaaaattagccaggtgtggtggtacatgcctgtaatcccagctactcaggaggctgaggcaggagaattgcttgaactggggaggcagaggttgcagtgagccaagattgcaccactgcactgcagcctgggtgacagagcaagactgtctcaaaaaaaaaaaaaaaaaaaagacatacccaagactgggtcatttataaagaaaaaggggtttagtgggctcacagttccacctggcttgggaggcctcccaatcatggtggaaggcaaaacaggagtgaaggcatggcttacatggcgacaggcaagaaagtgtgtgcaggggaactgccgtttgtaagatcatcagatcttgtgagacttattcactatcatgagaatagcatgggaaaaacccacccccatgattcaattacctcccaccggctccctcccacaacccatggggattatgggagctataattcaagatgagatttgggtggggacacagccaaaccatatcattccactttggtcgctcccaaatctcatgtcctcacatttcaaaaccaatcataccttcccaacagtcccccaaagtctcaactcatttcactattaactcaaaagtccacagtccaaagtctcatctgaggccgggcatggtggctcacacctgttatctcagcactttgggaggccaaggcaggcagatcagctgaggtcaggagttcaagaccagctttcccaaaataataaaaccctgtctatactaaaaatacaaaaattaggcaggcatggtggcacatgcctgtagtctcaactactcgggaggctgaggcacaagaattggttgaacctgggaagcagaggttgcagtgagccaagattgcaccactccatcccagcctgggtgacagagtgagattctgtctccaaaaaaaaaaaaaaatcaacaacaaaataaagtctcatctgagacaaggcaagtccctcccacctatgggcctgtaaaatcaaaagcaagtttagttatttcatagatacagtgggatccagggattgggtaaatacatccattctaaatggaagaaattggccaaaatgaaggggctgcaggctccgtgcaagtcctaaatccagtggggcagtcaaatcttaaagctccaaaaagatcttttactccatgtctcaaatccaggtcatgctgatgcaagaggtgggttcccatggtcttgggcagctctgcccctctggctttgcagggtacagccccactcctggctgctttcacgggctggtgtggagtatctgtggcttttccaggcacatggtgcaagctctcggtggatctaacactctgggttctggagggcgatggccctcttctcacagctccactaggggcagtgccccagtgggaactctctgtgggggctcccactccacatttcccttctgcactgtcctagcagaggttccctatgaaggcttcacccctgcagcacacctctgcctggacatccaggcatttccatacagcctctcaaatctagctggaggctcccaaacctctgttcttgacttctgttcaccagcaggcccagcaccacgtgtaagccaccaaggcttggggcttgcaccctctgaagcaatggcctgagctgtacttggccccttttagccccgactgggatgcagggcaccaagtcctgagactgcacaaaacagcaaggccatgggccctgcccatgaaaccattttttctcctagtcctttggacctgtgttgggagaggctgctgtgaaaacctctgacatgccctggagacatttttcccattgtcttggtgattaacatttggctcctcgttacttatacaaatttctgcagcaggcttgaatttttcctcagaaaatgggtttttttttctatcacattgtcaggctgcaaattttccaaacatttatgctctatttcccttttaaacataggttccaattccaaaccatatcattgtgaatacataaaactgaagtgaatgcttttaacagcactcaagtcacctcttgaatgcttttaacagcactcaagtcacctcttgaatgctttcctgctgagaaatttcttctactaggtaccctaagtcatctctctcaagttcaaagttccacagatctctagggcaggggcaaaatgctgccagtctctttgctaacacataacaaaagtgacctttaccccagttcccaaaaagttcctcatctccatgtaagaccatgtcagcctggacttcattgttcatatcactctcggcatattggtcaaagccactcaacaagtctctaggaagttccaaactttcccacatttttctgtcttcttctgagccttccaaactgttcaaacctctgcttgttacccagttccaaagtcacattttcacatctccttatagcagcaccccactttactggtaccaatttactgtattagtcttttctcatgctgctaataaagacatccctaagactgggtcatttataaagaaaaagaggtttaatggactcatagttccacatggctggggaggcctcacaatcatggtggaaggcgaaggaggagcaaagacctgtcttacatggcagcaggcaagagagagtgtgcaggggaactgccctttataaaaccatcagatctcgtgagacttattcatcatcacgagacagcatgggaaaaacctgcccccattattcaattacctcctgcctggtccctcccatgacatatgaggattatgggagctacaattcaagatgagatttgggtggggacacagccaaaccatatcaccttcctaaccagaggtcagatattatttgtatttttgttgttgtgtgtcacagctttgcggttttatttttcatgcatttaaatctttaatccacttggagtttactctgataatataagattacagcctgggaatctacattttttaccaaaatgtttatctagataagaccctggggtagggtggggctttgggggccagtttcatctagaaggcttcttggtgactatctctgtactcttccacccctgccaggcgttggagaccagggccagccctggccacaccccaggctgtgtcaccttcgtcctgaatgaccacagcatggccttcactggagatgccctgttgatccgtgggtgtgggcggacagacttccagcaaggtgaccagctcctttatccagcccaagatcttcatatagttacgtgtgtgtcaagtgttgaagtatctgttacaagaatgaatggatggacattagacttttagggggcttcagtattaaattcaaggagtttacctgctagaacagtggtccccaacctttttggcaccagggaccggtttcgtggaagacaatttttccatggaccatggcagggcatagtttcggggattcaaatgcattacatttattgtgcactttattattacattgcaatagataatgaaataattatgtaactcaccatcatgtagaatcagtgggagccctgaacttgttttcctgcaactagatggtcacatctgggagagacggaagatagtgacagatcatcaggcattagattctcataaggagaacgcaacctagatccctcgcatgtgcagttcgcaatagagtttgtgctcctatgagaatctaatgctgctgcggatctgacaggaggcagagctcaggtggtaacgggagtgatggggagtggctgtaactacagatgaagctttgctcactcacccaccgctcaccaccttctgcacagcccagttcctaacagaccacggaccggtacccagggttaaggacccccatgctagagtatgggaagagttagattcaggggcttagctgttgggggacagttagattcaggggtgtgttagttacctatttgagcccagcttgggcaacatagtgagactccctctctaagaaacaaatatagctaaaaaaaaaaaaaaaacaaagggctgggcatggtggctcacgcctataatcccagcactttgggaggccgaggcaggtggatcatgaggtcaggagttcaagaccagcctggccaagatggtgaaaccccgtctctactaaaaatacaaaaattagctggccatggtggtgggtgcctgtagtcccagctactcgggaggctgaggcagagatttacttgaacccaggaggcggaggttgcagtgagccaagattgcgccactgcactccagcctgggtgacagagtgagacttcatctcaaaaaaaaaaaaaaaaaagataaaaaaagaagttgttaaagccagcggtttaattgccagggagcaatgaatgatccatttggagtctagctgctaggggcagttagatttaggagcttccctgtagaaagcgagtatagtttcagaatctcagggttgggccatcctttgagcatgtgtgtgaatgtggggttaacactaggcctggaatttagctgtcttgtggggagaggtgaggctggatgagagggaaagacagaagccatgatgagatggccgtggaagccacatccccaggcctcttcctccctcttccctctctccttatctctgcatctcagtctctgtctttttctctccaaggctcccaatctcccatttatccattcacagtacagtcaggaagctgaaggatttaggccgaaatgcaaggtggaatagaggtttgccccctacttaggactcagagctgcttgtggggaccatggcttcacactctcctcctgggcctcatgtcctcatgtctgcagtttctttcttcttcttcttcttttttttgagacggagtctcgctctgtcgcccaggctggagtgcagtggtgcaatcttggctcactgcaagctctgcctcctgggttcacgccattctcctgcctcagcctcccgagtagctgggactacaggcgcccgccatcacgccaggctaatttttttgtatttttagtagagacagggttttaccatgttagccaggatggtctcgatctcctgactttgtgattcacccacctcggcctcccaaagtgctgggattacaggcgtgagccaccgcgcccagccttttttttttttttcttgagacagagccgcgctctatctcccaggctggagggcagtggtgtgatcttggctcactgcaacctccgcctcctgggttcaagcaattctcctgcctcagcctcccaaatagctgggattacaggcatgggtcaccatgcctggctaatttttgtatttttagtagagacagggttttgtcatgttggccaggctggtctcgaactcctgacctcaggtagtccacccacctcagcctcccaaagtgctaggattacaggcatgagccactgcacctggctttgtcttcagtttcttaccttctagtccaccttccttgttcagaacccttacttgacatcccctgggtgacagccaaggtcacaaatgacactctttggtgcttcacggtgtcattccaaccctatttacagccatgctgaatttcttgacattcctcaattctttgtatatgctgttccatctgcctagaatgcctttccctgttctctacttagacaaagggatattggcaggacacgaaggagagggtttagctatagtgattttatcctcctacccttttcttgaaggaaggggttagagtcttctgtcctgttgatccactgacctctgatctttccttccccaggctgtgccaagaccttgtaccactcggtccatgaaaagatcttcacacttccaggagactgtctgatctaccctgctcacgattaccatggtgagggcttcctggaagaggtgtggggcgtacataactttgaaagtggagtgtaaatctctgtaatccttgtagggcatgaagacgaccagtctcagaaatttctctggccaaaaaaaattaagtgtttgaggctgggcaagggggctcacacttgtaatcctagcactttgggaggccaaggcaggaggctcatttgagcccaggagtgagttcgagaccagctggagtaacatggcaaaaccctgcctctacaaaatacaagaaattagccaggcatggtggcatgctgccagctacttgggaggctgtggtagaaggattgcttgagcctgggaggttgaggctgcagtgagctatgattgtaccactatattccagcctgggtgacacagcaagcccctgtctcaaaaaaaaaaaaaaaaaaagagataaagtgcttgagcctgctgtgtgtggatgtagaaactatgtgactgccagatgcctagaattctgcagggcatgggttttcctgggccttacttgtggagcttagggaactgggggaaaactaaatttcccatagtgtccatggaggagggaaagcaattttaggaatattctgggaagagcccctgccagagaggcacccaaggcctcctggggaatgtagttctgagaggcctgaggcactagactccttgactttccttcccctcccttggcccctagggttcacagtgtccaccgtggaggaggagaggactctgaaccctcggctcaccctcagctgtgaggagtttgtcaaaatcatgggcaacctgaacttgcctaaacctcagcagataggtgagcagctggggacctggacttctgggtctgagagaggaggggctggggtcttggactcctgggtctgagagaggaggggctgggggcctggactcctgggtctgagggaggaggggctgggggcctggactcctgggtctgagggaggagaggctgggggcctggactcctgggtctaagggaggaggggctgggggactggactcctgggtctgaggcagtaggggctgggggcctggactcctggctctgagggagtaggggctgggctgggggcctgggctcctgagtctgagggaggagg

SEQ ID NO: 11910 - DNA, 915 bp, Homo sapiens
gcaggcgctcggcctccgctcattcctgaccccgcagtgggcgcgatggcggaggctgtactgagggtcgcccggcggcagctgagccagcgcggcgggtctggagcccccatcctcctgcggcagatgttcgagcctgtgagctgcaccttcacgtacctgctgggtgacagagagtcccgggaggccgttctgatcgacccagtcctggaaacagcgcctcgggatgcccagctgatcaaggagctggggctgcggctgctctatgctggcgttggagaccagggccagccctggccacaccccaggctgtgtcaccttcgtcctgaatgaccacagcatggccttcactggagatgccctgttgatccgtgggtgtgggcggacagacttccagcaaggctgtgccaagaccttgtaccactcggtccatgaaaagatcttcacacttccaggagactgtctgatctaccctgctcacgattaccatgggttcacagtgtccaccgtggaggaggagaggactctgaaccctcggctcaccctcagctgtgaggagtttgtcaaaatcatgggcaacctgaacttgcctaaacctcagcagataggtgagcagctggggacctggacttctgggtctgagagaggaggggctggggtcttggactcctgggtctgagagaggaggggctgggggcctggactcctgggtctgagggaggaggggctgggggcctggactcctgggtctgagggaggagaggctgggggcctggactcctgggtctaagggaggaggggctgggggactggactcctgggtctgaggcagtaggggctgggggcctggactcctggctctgagggagtaggggctgggctgggggcctgggctcctgagtctgagggaggagg

SEQ ID NO: 11911 - DNA, 19574 bp, Homo sapiens
attcctgaccccgcagtgggcgcgatggcggaggctgtactgagggtcgcccggcggcagctgagccagcgcggcgggtctggagcccccatcctcctgcggcaggtgcgggtggctggacctaggaggggactgctgggcactaggcggcagcaaggacggaactccggggtctcttaatagggagagatccggggggacccacgcctgcatcttgcggaaagcggggtggaggtttagggctggactcttgggtcctttaaaggtgagtggtctgggggcctctgggcttggggccagacccctgggtcctctatgaaagaacgtgctggggaccctgattttgggatgttaggaagttggaactcttttgttctgataggggaaggtagtggggctccggactcccgactcccggggaaagagtgggctggggtttctgcttctggatcttaggaagaggatagggtcagtctggactacttggcctccagtgggtggaagtccggttctgcgccctcacctgggtcccccgttcccagatgttcgagcctgtgagctgcaccttcacgtacctgctgggtgacagagagtcccgggaggccgttctgatcgacccagtcctggaaacagcgcctcgggatgcccagctgatcaaggagctggggctgcggctgctctatgctggtcagtccggggaccaaactcatggatcccagcggggctgggctgcagcgtcagtggaatgggaagctggggcccagaactcctgagtctgagggagaaggatctgggctgggactcccaggtcctttctgtaccctccggacctgtccctcctctctctcccagtgaatacccactgccacgcggaccacattacaggctcggggctgctccgttccctcctccctggctgccagtctgtcatctcccgccttagtggggcccaggctgacttacacattgaggatggagactccatccgcttcgggcgcttcgtgagttgggtgctgggtccccaagagggtggtggcctggacttcttaaacttaagggaagaggggactgggggcctgggatcctgagtccttggggaggagggacctcaggacctgggtttctgacccctgagctcatatttctgggaggggggcaccataaacccaggtggggcactggggcaagaggctctgggcaggtggggcactggcggaactcctaagtcaacagcatttaaggagtttccttcctaaagcttaggggcagccctttggcctggcatgcatctccataaaagttgattaggggctggaattctgagggcagggctgagaaggaaagagacccagtcctgtcttgcggaaacctccgtttgaggaaggagcatctgggtgcttagaacccggagcccaggactaggaaaaggacggtgaggaccctggagtgcaacatttaaggaggcactcgctctcagggtcctgtaagtgcagggtccgcacctgtgagtgagcgcctccttaaatcttgcaccaacagcctcaccctagtcctagccctgccgttgcctcacactgggaagtctaaaggttcctgccttcctcactttatttgccacaggcaccagcgggtttccggccagaattgcaaccaggccgaaggagggagggccaggggagttgccctcagagagagggaaacagctggcagggcattcttctgatcaattgctaaagatgtataataaagtttggctgactttggggacagaatgtcaggtgacagaagacagcctccaggttagagagttttgccaaatagggacagttcatttgagtcagagtgtttagaggaaatgagggctgtgtgtgggaagagagttcagctacaatggttacagaagctttatttcaagcctttctctggaagcaggcaaaaatgcattgtacatgtatgtacattgtacataataggtgctaacaaacatgtcttgaaatgaacgaagggtttagctatggtagatttagcttcagtgttttttttttttctttctttctttctttcttttttttttttatttgagactgggtctctgtcacctaggctggagtgcagtcagccttgacctcccaggctcaggtgatcctcccaccttagcctccctggtagctgggaccacaggcatgcaccagcacgcctggctgatttgtgtatgttcttgtagagacagggttttgttatgttgcccaggctggtcttgaactactgggcacaagtgatcctcctaccttggcctcctaaagtgctaggattacagggcttctgaaagtgctgggattacaggcatgagccactgcacccacccttttttgttgttgttgtttgtttgtttgtttttgagaaaaggtcttgctctgtcacccaggctggagtgcaatggtgggatcatagcttactgcagccttgaccttctgggctcaggtgatcctcatgcctcagcctcctaagtagctgggactacaagcacctgccaccatacctggctaattttttaattttttgttgagctgtaatctcactatgttgcccaggcttaatagctttattgatataacccacataccatataatttatctatttcgagtgcacaattcaatgacttttagtatattcagagttgtacatccattactaccattaattggaaaatgtttccattactccaaaaagaccccacaccccttagccatcacccctatccttcccttttcccccctcagccttaggcaacttttttttttttttttttttaatttgagacagggtctcactttgttgcccaagctagagtgcagtggtgcgatcttggtttactgcaacctccacctcccgggttcaagtgattctcttgtttcagcctcccaaatagcagggattacaggcgtgcgccaccaagcccagcaaatttttttgttttatttatttatttatttatttgagatggagttttgctcttgttgcgcaggctggagtgcaatggcgctatctcagcttagcgcaacctcagcctcccgagtagctgggattacaggcatgcgccaccatgcctagctaattttgtatttttagtagagacggggtttctccgtattggtcaggctggtctccaactccctatctcaggtgatccgcgcgccctggcctcccaaagtgttgggattacaggcatgagccactgcgcccaggcacatttttatttatttttttgagacagtcttgctctgtcacccaggctggagtgcaatggcaagctctcagttcactgcagcctctgcctcctgagcgcaagcgattctgctgtctcagcctcccaaatagctgggattccaggcatgtgccaccatgtctggctaatttttgtatttttagtagagatagggtttcaccatgttggccaggctggtctcaaactcctgacctcaggtgatctgcacaccttgacctccccaaagtgctgggattataggcgtgagccaccatggctggcttgtctgagattttggagatgggggtccatttttctctcctttatttttccttctactttaaaaaaatgaattgttagcctgggtgtggtggctcatgcctgtaattccagtacgttgagaggctgaggtgggcggatcacttgaggtcagaagttcgagatcagcctggccaacatggtgaaaccctgtctctactaaaaatacaaaaattaagcggtatggtggtgaggcacctgtaatcccagctactcaggaggctgaggaggcaggaggagaattgcttgaatccgggaggcagaggttgcagtgagccaagatcgcaccactgcactccagcctgggtgacaaagcgagattccatctcaacaaacaaacaaacaaacaaaaccgagttgttaacattcatggaatgaaaggagtccacatattatacatgtgtatgagtacttacccagatcccgatacagaacttgcccatcaccccagaagtcttccttgcctccctttctggccaatgaccgccctcctaaggcaccattcttctgatgcatttaaccacaggccggttttgcctgttctgacattataaacaggacttatacagtgtactcttttgtgtctggccttttttccactctacatgatgttggtttatacttggagttctttccttcttattgctatagagcagcagttggccacctttttctgtgaaggaccagatagtaaatattttcagtttttacaggtagtagggtctctgtgacagctactcagctctcttattgtggcatgaaagcagccacagacactgcataaatgaataggcatggctgtgttctaataagactttatttgtggcctctacatttggattttaggtcaggctcatgcctgtaatcccagcactttgggaagctgaggtgggtagatcacctgaggtcaggagttcgagaccagcctgaccaacatggtgaaaccccatctctactaaaaatacaaaataagctgggcgtggtggggtgtgcctgtattcccagctactcaggaggctgaggcaggggaatcgcttgaacctcccccgggaggtggaggttgcagtgagcccagatggtgccattgcactccagcatgagtgacaagagcaaaactccatttcaaaaaaaataaataaataaaataaaaaataaaatttggatttcatataggtttttttttaaatttgtttgagacaggctcttgttctattgcccaagctggtatgcactggcgtgagcatagctcattgcagcctccaactcctgggctcaagtgatcctcctaccgcagcctcctgagtagctgggactatgggcatgtgccaccatgcccagctaatttttaaacaattttttgtagagactgagtcttgctgtgttgctcagattggtctcaaactccaggcctcaagcaaccctcctgcctcggcctcccaaagtgttgggattacaggtgtgagccccatctagtttttacatgttactttgatagttttcaatgtgaaaaaaagttaaaatgattcttagcttacaggccttacaaaaactgatggcaggccaaatttggtccactggccataatttttgccctacaaaatgggcaggttgtggtggctcctaggctcaagcgatcctccttgcctcagcctcccaaagtacaaagtgaattacaggcatgagccactacaccctattttccttctgattattcagtttttggctaccacgaataatgctgctatgaagattcttctgctaatatcttagggaacattgtcatgaattctaaggactggattttctgggtcactgagtcgacaaatgtttaattttcatagaaactcccagtttcttgaactggttgttcatcttacataaaagatgggacaaatttaagtggtttcattgtagaatgagttttctttctttcttttttttttttttagagacagagtctcactctgtcccccaggttggagtgcagtggcacaatcttggctcactgcaatctctgcctccctctgggagcctcagttccctgcgctaaaacacagggtttatcacagcaccttcctcttgaggctgtttcaaggattagctggctgccttcaggatctccaacccagaggttccccttctaggtgtgaagcccagagacacccttgctcatgtgcacaaaagacagcaggggtgtagggcaggggacaaagtacacagcaggggactgtttaatacatgatgacgctacaaggcagtggatcgccaaaacaggagtaattcttttttttctgagacagagcctcactctgtcacccaggctagagtgcagtggcgcagtctcggctcactgcaacctccgcctttcggtgatccttctgcctcagcctctccagtagctgggattacaggtgcgcaccaccacatctggctaaattttatgtttttattagagatggggtttcgccatactgccaggctggtcgtgagcacctggcctcaagtgatctgcgtgcctcagcctcccaaaatgcagggattacaggagtgagccaccgcacctggcccaagttttctttttttaataaactgattgagaagtgaacatcttagctgccacagggtggccgaatcagaaagttaggtttgctgttaaatatgctggcttagagaagtactgctgaaaacactgatcccccaggtcccttagaatcagagagtctgatttaattgttctgggtggacacaaggaattggcatgttttaaaagctccaccattgattcttatgtggctcaagtgtgggtttcaatacttcctccttttaacattgtgaaacgagtaatttttcttccaacattttattatgaaaaatttcaagcatagagaaaagctgaaaaaaaatttttttttttttttgagacagggtctcactttgtcatccaggctggagtgcagtggtgcaatcatagctcactgcagcctcaacctcctggctcaagcgatcctcctgcctcaggcttccaaatagctggaactacaggtgtgcaccaccactcctggctagtttttgtgttttttgtaaagacagagttttgccacattgcccaggctggcctcgacctcctgggctcaggcaatcctccctccttggcctcccaaagtgctgggattagagtgagccactgcaccaggcttaaaatttttttttacagtgtacatctctaaccatccatcacttcatctttttttcttttgagatggagtctcactctgttgcccaggctggcgtacagtggcacaatcttggtttactgcaacctctgcctcctgggttcaagcgattctcttgcctcagcctcccgagtagcagtagctggatttacaggcgagtgccaccacacccagctaattgatttttaaaagatttttagtagcgatggggtttcaccatgttggccaggctggtctcgaactcctgacctcaagtgatccacctgccttgacctcccaaagtgctaagattacaggtttgagctgctgtgtccgacctattcttttttttttttttttgggtgggggtctcgctatgttgtccaggctggtattgaaccctggctaaggtgatcctcccgcctcagcctcccaagtagctgggcctacagacgtgcaccatcatgccttgctgtaattgttctattttattattagttattattgatttattaatgtgcctaatttataaattaaactctatcataggtgcgtatgtataggaaaaagcatagtgtgtagggttctgtactatctgcggttttaggcatccactccgggtcttgaaatgtatcccaggcagataagaggtgtttactatagttttgagtaatgaagggaaagaacttgggaaccaaatggaaaagaagctgagagcttacttgccaccagggggcagtgtaggccgtgggaactccaaggccagcaagctgaatgctttacaggattccttctgggttatgtttctttgatgggggtagtttcaggtttagctgctgcaggcaacagatgaaagaaaagctctggggatgtgtcacagacatgatgcatcatggaagggaagaatgaatttgttgaaagaatttggggttaggcaggctgggctgttgcggaaatcactcgacaagtttcagggacaatgaaggctgctttaggtcaagatgttatatgttccccacccacaatttcttattttgaattttttaaaatctacattgaaataatagtacaaaatataacaatacacaagcacaggccgggcgcggtggctcacgcctgtaatcctggcactttgggaagccgaggtgtgcggatcacccgaggtcaggagtttgagatcagcctggccaacatgatgaaaccccgtccctactaaaaatacaaaaattaaccgggcatggtggcacgctcctgtaatcccagctactcaggaggctgaagcatgagaatcacttgaacacccaggaggtagaggttgcagtgagacgagatcgcaccactgcactccagcctgggccacagagcaagactgtctcaaaaaaaaaaaaaaaaaaaaaaaaaaaaaacaagcacaaatttcatcagccatcagagcaattatgtcactataggtcatgaaacttttagaaccgcgcccctctcccccaaatgtttttggggaatgcgagtgaaaatgggcaaaaagtccaaaaatcgttttgattttgcagaatgtcagggttctctaggctatactttgagacttcctcttttacaaaacctttgtcacgtctaacaaaatatgcagtaactttttttttttttttttttttttgagacaagagtctcgctctgtcgcccaggctggagtgcagtggtgcgatctcggctcactgcaagctccgcctcccgggttcatgccattctcctgcctcagcctcccgagtagctgggactacagacgcccaccaccacgcccagctaatttttttttttgtatttttagtagagacggggtttcaccatgttagccaggatggtctcgatctcctgacctcgtgatccgcccgtctcggcctcccaaagtactgggattacaggcgtgagacaccacgcccggccaatatgcagtaactttatatcattattaaatattcagctgtgttcagatgtctccaattacccgaggaataatttttacagctttttttttcttttttctttctttttttggtagagataggatctcaccatgttgcccaggctggtctcaatctcctgggctcaaatgatcttcccctctcggtgactcaaagtgctgtaattataggtgtgagccacggtgcccagcctacggctgtttttaggaaccaggatacaattgagcttagtgtttggccattatgtctatttagtctcttttgtgtgtgtgtttgtgttttctttttccttcttttctttttgttttgttttcttttttattatttatttattattttttatttatcaaaaatctttttggatctagaacagtttcatatccttttgccccaggatattgacttttttttttgagacagtctcgctctgtcacccaagctgaggatattgacttttgttttttgttttttttttttgagacggagtgttgctctgtcactcaggctggaatgcagtggcatgatctctgctcactgtaacctctgcctcccaagttcaagcaattctactgcctcagcctccccagtagctgggactataggcatgtgccaccacgcttggcatgcttggctaattttttttttttttttgaggcggagtctcactctgtcacccagggtggagtgcagtggcgtgatctcagctcactgcagcctccgcttcctgggttcaagcaattctcctgcctcagcctcccgagtagctgggattacagacatcaccaccacgcctgactaatatttgtatgttttgtggagatggggtttcaccatgttggcgaggctgatcttgaactcctgacctcaggtcatccacctgccttggcctcccaaagtgtcgcgattaggcgagccaccgtgcctggcttcggctaatttttgtatttttagtatggatggggtttcaccatgttcaccagtctggtctcaaattcctgacctcaagtaatctacctgcctcggcctcccaaagtgctgggattacaggcgtgagccaccgtgcctggccgcatttaatacatttaacctactgaacattataggttagcctactttaccttaaagtggtcagaacatttacattagcctacagttgggcaaactcatctaacacaaagccttgtattttatacaagagtgttgaatatctcatgtaatttattgaatactgaattgaaagtgaaaaacagaatggctgtatgggtgcatggaatatgatttctattgaaagtgtatcacttttggcttggtgcagtggctcatgcctgtaatcccagcacattgagaggctgagatgggaggattgcttgaggccaggagttcaagaccaggctggtcaacatagtgagagcccatctttactgaagaaaaaaaaagacaaatgaaaaaaagaaataaaatgtatcactttcacattattgtaaagtcaataaattgttagtcatcgggcacatcacacctgtaatcccaacactttgggaggctagtgtgggcagattgcttgatgccaggagttcaagaccagcctggtcaacatgatgaaacctcgtctctactaaataacagtacaaaaattagctagacacagtgatgcgtgcctgttatcccagctactcagaaggctgagacacaagaatcacttcaacccaggaggccgaggttgcagtgagccgagatcatgccactgcactccgcagcctgggcgacagagagagactctatctcaaaaaaaaaaaaaaaaaagaaaaaaagaaagaaaaaaaagccaggcatggtggctgactcacacctgtaatcccagcattttgggaggatgaggcaggcggatcatttgaggtcaggagtttgagaccagcctggccaatgtggtgaaaccccatctctactaaaaagacaaaaattagccaggtgtgatggtgagtgcctgtaatcccagctactcaggaggctgaggcaggagaatcgcttgaacccgggaggcggaggttgcagtgagccgagatcgcaccactgcactccagcctgggtgacagagtgagactctggttaaaaaaaaaaaaatcataagtcagaccatcttaagtcaaggaccacatgtataccaagggttgagccacagggtatgtgtagatttagctttagtagaaactgcccagtaattttgatttgtagatgatctttatatattccggatccaagaactttgttggatccagtacaactcctttacctgtggtttcactttctgtggttttagttatctgtggtcaaccatagcgtgaagatattcaatggaaaattccagagataaacaattagtaagttttaaattgtacatcgttctgagtagcatgataaaatctcacaccatcccactcaggacatgaattatccctacgtccagtgtatctgtgctgtataggagtatgttacccattcgttaatcacttagtagccttcttgattatcagatgaaaaaaaaacatagattggccggtcacggtggctcacgcctgtaatcccagcactttgggagcctgaggcgggtgaatcacctgaggtcaggagcttgagaccagcctgaccaacatggtgaaaccctgtctctactaaaaaatacaaaaattatctgggcatggtggtgggcacctgtaaccctagctacttgagaggctgaggcaggagaatcacttgaacccaggagggggaggttgcagtgagccaggatcatgccattgcactccagtctgggtgacagagccagactccgtccaaaacaaaacaaaacaaaacagtatttatagggtttgtactatctgaggtttcagatatccactgggttcttggaggtatcccctgcggataaggaaggactactgtttatgtttgtaaatatcattttccactctgagggctaccttttcactgtctttttttttttttttttttaaggcggagttttgctcttgtcatccaggctggagtgtgatggtgcaatcttggctcactgcaacctccgcctcccgggttaaagcaattctcctgcctcatcctcccaagtagctgggattacaagcatgtgccaccatgcctggctaatttttgtatttttagtagagatggggtttcaccacattggccggggtggtctcgaactcctgacctcaggtgatttgcccgcctcggcctcccaaagtgctgggattacaggtatgagccacagcgcccagccaccactgcctattttttatttttaaaagtgtaaaacattgaattttatttcaacggtattgcttttaatgactgttgggtattccatttttatattagtgtgcttacctttttaaaattggtttgcaagatctgtttgtatattaagtatattgaccactgtgtggtatgtatatgttacaaatatattttcccagcatattggttctctttagattttgtttatggtgttgctgccattcagaaccttctgactgatcttttccttaatgatttatcactttaggtatcacatttgaatatcccttctgtattagtctgttctcatgctgctaataaagacatacctgaaggctgggtgtggtggctcacgcctgtaatcccagcactttgggaggccaaggcaggtggatcacgtggtcaggagtttgagaccagcctgaccaacatggtgaatccccatctctactaaaaatataaaaattagccaggtgtggtggtacatgcctgtaatcccagctactcaggaggctgaggcaggagaattgcttgaactggggaggcagaggttgcagtgagccaagattgcaccactgcactgcagcctgggtgacagagcaagactgtctcaaaaaaaaaaaaaaaaaaaagacatacccaagactgggtcatttataaagaaaaaggggtttagtgggctcacagttccacctggcttgggaggcctcccaatcatggtggaaggcaaaacaggagtgaaggcatggcttacatggcgacaggcaagaaagtgtgtgcaggggaactgccgtttgtaagatcatcagatcttgtgagacttattcactatcatgagaatagcatgggaaaaacccacccccatgattcaattacctcccaccggctccctcccacaacccatggggattatgggagctataattcaagatgagatttgggtggggacacagccaaaccatatcattccactttggtcgctcccaaatctcatgtcctcacatttcaaaaccaatcataccttcccaacagtcccccaaagtctcaactcatttcactattaactcaaaagtccacagtccaaagtctcatctgaggccgggcatggtggctcacacctgttatctcagcactttgggaggccaaggcaggcagatcagctgaggtcaggagttcaagaccagctttcccaaaataataaaaccctgtctatactaaaaatacaaaaattaggcaggcatggtggcacatgcctgtagtctcaactactcgggaggctgaggcacaagaattggttgaacctgggaagcagaggttgcagtgagccaagattgcaccactccatcccagcctgggtgacagagtgagattctgtctccaaaaaaaaaaaaaaatcaacaacaaaataaagtctcatctgagacaaggcaagtccctcccacctatgggcctgtaaaatcaaaagcaagtttagttatttcatagatacagtgggatccagggattgggtaaatacatccattctaaatggaagaaattggccaaaatgaaggggctgcaggctccgtgcaagtcctaaatccagtggggcagtcaaatcttaaagctccaaaaagatcttttactccatgtctcaaatccaggtcatgctgatgcaagaggtgggttcccatggtcttgggcagctctgcccctctggctttgcagggtacagccccactcctggctgctttcacgggctggtgtggagtatctgtggcttttccaggcacatggtgcaagctctcggtggatctaacactctgggttctggagggcgatggccctcttctcacagctccactaggggcagtgccccagtgggaactctctgtgggggctcccactccacatttcccttctgcactgtcctagcagaggttccctatgaaggcttcacccctgcagcacacctctgcctggacatccaggcatttccatacagcctctcaaatctagctggaggctcccaaacctctgttcttgacttctgttcaccagcaggcccagcaccacgtgtaagccaccaaggcttggggcttgcaccctctgaagcaatggcctgagctgtacttggccccttttagccccgactgggatgcagggcaccaagtcctgagactgcacaaaacagcaaggccatgggccctgcccatgaaaccattttttctcctagtcctttggacctgtgttgggagaggctgctgtgaaaacctctgacatgccctggagacatttttcccattgtcttggtgattaacatttggctcctcgttacttatacaaatttctgcagcaggcttgaatttttcctcagaaaatgggtttttttttctatcacattgtcaggctgcaaattttccaaacatttatgctctatttcccttttaaacataggttccaattccaaaccatatcattgtgaatacataaaactgaagtgaatgcttttaacagcactcaagtcacctcttgaatgcttttaacagcactcaagtcacctcttgaatgctttcctgctgagaaatttcttctactaggtaccctaagtcatctctctcaagttcaaagttccacagatctctagggcaggggcaaaatgctgccagtctctttgctaacacataacaaaagtgacctttaccccagttcccaaaaagttcctcatctccatgtaagaccatgtcagcctggacttcattgttcatatcactctcggcatattggtcaaagccactcaacaagtctctaggaagttccaaactttcccacatttttctgtcttcttctgagccttccaaactgttcaaacctctgcttgttacccagttccaaagtcacattttcacatctccttatagcagcaccccactttactggtaccaatttactgtattagtcttttctcatgctgctaataaagacatccctaagactgggtcatttataaagaaaaagaggtttaatggactcatagttccacatggctggggaggcctcacaatcatggtggaaggcgaaggaggagcaaagacctgtcttacatggcagcaggcaagagagagtgtgcaggggaactgccctttataaaaccatcagatctcgtgagacttattcatcatcacgagacagcatgggaaaaacctgcccccattattcaattacctcctgcctggtccctcccatgacatatgaggattatgggagctacaattcaagatgagatttgggtggggacacagccaaaccatatcaccttcctaaccagaggtcagatattatttgtatttttgttgttgtgtgtcacagctttgcggttttatttttcatgcatttaaatctttaatccacttggagtttactctgataatataagattacagcctgggaatctacattttttaccaaaatgtttatctagataagaccctggggtagggtggggctttgggggccagtttcatctagaaggcttcttggtgactatctctgtactcttccacccctgccaggcgttggagaccagggccagccctggccacaccccaggctgtgtcaccttcgtcctgaatgaccacagcatggccttcactggagatgccctgttgatccgtgggtgtgggcggacagacttccagcaaggtgaccagctcctttatccagcccaagatcttcatatagttacgtgtgtgtcaagtgttgaagtatctgttacaagaatgaatggatggacattagacttttagggggcttcagtattaaattcaaggagtttacctgctagaacagtggtccccaacctttttggcaccagggaccggtttcgtggaagacaatttttccatggaccatggcagggcatagtttcggggattcaaatgcattacatttattgtgcactttattattacattgcaatagataatgaaataattatgtaactcaccatcatgtagaatcagtgggagccctgaacttgttttcctgcaactagatggtcacatctgggagagacggaagatagtgacagatcatcaggcattagattctcataaggagaacgcaacctagatccctcgcatgtgcagttcgcaatagagtttgtgctcctatgagaatctaatgctgctgcggatctgacaggaggcagagctcaggtggtaacgggagtgatggggagtggctgtaactacagatgaagctttgctcactcacccaccgctcaccaccttctgcacagcccagttcctaacagaccacggaccggtacccagggttaaggacccccatgctagagtatgggaagagttagattcaggggcttagctgttgggggacagttagattcaggggtgtgttagttacctatttgagcccagcttgggcaacatagtgagactccctctctaagaaacaaatatagctaaaaaaaaaaaaaaaacaaagggctgggcatggtggctcacgcctataatcccagcactttgggaggccgaggcaggtggatcatgaggtcaggagttcaagaccagcctggccaagatggtgaaaccccgtctctactaaaaatacaaaaattagctggccatggtggtgggtgcctgtagtcccagctactcgggaggctgaggcagagatttacttgaacccaggaggcggaggttgcagtgagccaagattgcgccactgcactccagcctgggtgacagagtgagacttcatctcaaaaaaaaaaaaaaaaaagataaaaaaagaagttgttaaagccagcggtttaattgccagggagcaatgaatgatccatttggagtctagctgctaggggcagttagatttaggagcttccctgtagaaagcgagtatagtttcagaatctcagggttgggccatcctttgagcatgtgtgtgaatgtggggttaacactaggcctggaatttagctgtcttgtggggagaggtgaggctggatgagagggaaagacagaagccatgatgagatggccgtggaagccacatccccaggcctcttcctccctcttccctctctccttatctctgcatctcagtctctgtctttttctctccaaggctcccaatctcccatttatccattcacagtacagtcaggaagctgaaggatttaggccgaaatgcaaggtggaatagaggtttgccccctacttaggactcagagctgcttgtggggaccatggcttcacactctcctcctgggcctcatgtcctcatgtctgcagtttctttcttcttcttcttcttttttttgagacggagtctcgctctgtcgcccaggctggagtgcagtggtgcaatcttggctcactgcaagctctgcctcctgggttcacgccattctcctgcctcagcctcccgagtagctgggactacaggcgcccgccatcacgccaggctaatttttttgtatttttagtagagacagggttttaccatgttagccaggatggtctcgatctcctgactttgtgattcacccacctcggcctcccaaagtgctgggattacaggcgtgagccaccgcgcccagccttttttttttttttcttgagacagagccgcgctctatctcccaggctggagggcagtggtgtgatcttggctcactgcaacctccgcctcctgggttcaagcaattctcctgcctcagcctcccaaatagctgggattacaggcatgggtcaccatgcctggctaatttttgtatttttagtagagacagggttttgtcatgttggccaggctggtctcgaactcctgacctcaggtagtccacccacctcagcctcccaaagtgctaggattacaggcatgagccactgcacctggctttgtcttcagtttcttaccttctagtccaccttccttgttcagaacccttacttgacatcccctgggtgacagccaaggtcacaaatgacactctttggtgcttcacggtgtcattccaaccctatttacagccatgctgaatttcttgacattcctcaattctttgtatatgctgttccatctgcctagaatgcctttccctgttctctacttagacaaagggatattggcaggacacgaaggagagggtttagctatagtgattttatcctcctacccttttcttgaaggaaggggttagagtcttctgtcctgttgatccactgacctctgatctttccttccccaggctgtgccaagaccttgtaccactcggtccatgaaaagatcttcacacttccaggagactgtctgatctaccctgctcacgattaccatggtgagggcttcctggaagaggtgtggggcgtacataactttgaaagtggagtgtaaatctctgtaatccttgtagggcatgaagacgaccagtctcagaaatttctctggccaaaaaaaattaagtgtttgaggctgggcaagggggctcacacttgtaatcctagcactttgggaggccaaggcaggaggctcatttgagcccaggagtgagttcgagaccagctggagtaacatggcaaaaccctgcctctacaaaatacaagaaattagccaggcatggtggcatgctgccagctacttgggaggctgtggtagaaggattgcttgagcctgggaggttgaggctgcagtgagctatgattgtaccactatattccagcctgggtgacacagcaagcccctgtctcaaaaaaaaaaaaaaaaaaagagataaagtgcttgagcctgctgtgtgtggatgtagaaactatgtgactgccagatgcctagaattctgcagggcatgggttttcctgggccttacttgtggagcttagggaactgggggaaaactaaatttcccatagtgtccatggaggagggaaagcaattttaggaatattctgggaagagcccctgccagagaggcacccaaggcctcctggggaatgtagttctgagaggcctgaggcactagactccttgactttccttcccctcccttggcccctagggttcacagtgtccaccgtggaggaggagaggactctgaaccctcggctcaccctcagctgtgaggagtttgtcaaaatcatgggcaacctgaacttgcctaaacctcagcagataggtgagcagctggggacctggacttctgggtctgagagaggaggggctggggtcttggactcctgggtctgagagaggaggggctgggggcctggactcctgggtctgagggaggaggggctgggggcctggactcctgggtctgagggaggagaggctgggggcctggactcctgggtctaagggaggaggggctgggggactggactcctgggtctgaggcagtaggggctgggggcctggactcctggctctgagggagtaggggctgggctgggggcctgggctcctgagtctgagggaggaggggctggggg

SEQ ID NO: 11912 - DNA, 1052 bp, Homo sapiens
attcctgaccccgcagtgggcgcgatggcggaggctgtactgagggtcgcccggcggcagctgagccagcgcggcgggtctggagcccccatcctcctgcggcagatgttcgagcctgtgagctgcaccttcacgtacctgctgggtgacagagagtcccgggaggccgttctgatcgacccagtcctggaaacagcgcctcgggatgcccagctgatcaaggagctggggctgcggctgctctatgctgtgaatacccactgccacgcggaccacattacaggctcggggctgctccgttccctcctccctggctgccagtctgtcatctcccgccttagtggggcccaggctgacttacacattgaggatggagactccatccgcttcgggcgcttcgcgttggagaccagggccagccctggccacaccccaggctgtgtcaccttcgtcctgaatgaccacagcatggccttcactggagatgccctgttgatccgtgggtgtgggcggacagacttccagcaaggctgtgccaagaccttgtaccactcggtccatgaaaagatcttcacacttccaggagactgtctgatctaccctgctcacgattaccatgggttcacagtgtccaccgtggaggaggagaggactctgaaccctcggctcaccctcagctgtgaggagtttgtcaaaatcatgggcaacctgaacttgcctaaacctcagcagataggtgagcagctggggacctggacttctgggtctgagagaggaggggctggggtcttggactcctgggtctgagagaggaggggctgggggcctggactcctgggtctgagggaggaggggctgggggcctggactcctgggtctgagggaggagaggctgggggcctggactcctgggtctaagggaggaggggctgggggactggactcctgggtctgaggcagtaggggctgggggcctggactcctggctctgagggagtaggggctgggctgggggcctgggctcctgagtctgagggaggaggggctggggg

SEQ ID NO: 11913 - DNA, 15724 bp, Homo sapiens
cccgcagtgggcgcgatggcggaggctgtactgagggtcgcccggcggcagctgagccagcgcggcgggtctggagcccccatcctcctgcggcaggtgcgggtggctggacctaggaggggactgctgggcactaggcggcagcaaggacggaactccggggtctcttaatagggagagatccggggggacccacgcctgcatcttgcggaaagcggggtggaggtttagggctggactcttgggtcctttaaaggtgagtggtctgggggcctctgggcttggggccagacccctgggtcctctatgaaagaacgtgctggggaccctgattttgggatgttaggaagttggaactcttttgttctgataggggaaggtagtggggctccggactcccgactcccggggaaagagtgggctggggtttctgcttctggatcttaggaagaggatagggtcagtctggactacttggcctccagtgggtggaagtccggttctgcgccctcacctgggtcccccgttcccagatgttcgagcctgtgagctgcaccttcacgtacctgctgggtgacagagagtcccgggaggccgttctgatcgacccagtcctggaaacagcgcctcgggatgcccagctgatcaaggagctggggctgcggctgctctatgctggtcagtccggggaccaaactcatggatcccagcggggctgggctgcagcgtcagtggaatgggaagctggggcccagaactcctgagtctgagggagaaggatctgggctgggactcccaggtcctttctgtaccctccggacctgtccctcctctctctcccagtgaatacccactgccacgcggaccacattacaggctcggggctgctccgttccctcctccctggctgccagtctgtcatctcccgccttagtggggcccaggctgacttacacattgaggatggagactccatccgcttcgggcgcttcgtgagttgggtgctgggtccccaagagggtggtggcctggacttcttaaacttaagggaagaggggactgggggcctgggatcctgagtccttggggaggagggacctcaggacctgggtttctgacccctgagctcatatttctgggaggggggcaccataaacccaggtggggcactggggcaagaggctctgggcaggtggggcactggcggaactcctaagtcaacagcatttaaggagtttccttcctaaagcttaggggcagccctttggcctggcatgcatctccataaaagttgattaggggctggaattctgagggcagggctgagaaggaaagagacccagtcctgtcttgcggaaacctccgtttgaggaaggagcatctgggtgcttagaacccggagcccaggactaggaaaaggacggtgaggaccctggagtgcaacatttaaggaggcactcgctctcagggtcctgtaagtgcagggtccgcacctgtgagtgagcgcctccttaaatcttgcaccaacagcctcaccctagtcctagccctgccgttgcctcacactgggaagtctaaaggttcctgccttcctcactttatttgccacaggcaccagcgggtttccggccagaattgcaaccaggccgaaggagggagggccaggggagttgccctcagagagagggaaacagctggcagggcattcttctgatcaattgctaaagatgtataataaagtttggctgactttggggacagaatgtcaggtgacagaagacagcctccaggttagagagttttgccaaatagggacagttcatttgagtcagagtgtttagaggaaatgagggctgtgtgtgggaagagagttcagctacaatggttacagaagctttatttcaagcctttctctggaagcaggcaaaaatgcattgtacatgtatgtacattgtacataataggtgctaacaaacatgtcttgaaatgaacgaagggtttagctatggtagatttagcttcagtgttttttttttttctttctttctttctttcttttttttttttatttgagactgggtctctgtcacctaggctggagtgcagtcagccttgacctcccaggctcaggtgatcctcccaccttagcctccctggtagctgggaccacaggcatgcaccagcacgcctggctgatttgtgtatgttcttgtagagacagggttttgttatgttgcccaggctggtcttgaactactgggcacaagtgatcctcctaccttggcctcctaaagtgctaggattacagggcttctgaaagtgctgggattacaggcatgagccactgcacccacccttttttgttgttgttgtttgtttgtttgtttttgagaaaaggtcttgctctgtcacccaggctggagtgcaatggtgggatcatagcttactgcagccttgaccttctgggctcaggtgatcctcatgcctcagcctcctaagtagctgggactacaagcacctgccaccatacctggctaattttttaattttttgttgagctgtaatctcactatgttgcccaggcttaatagctttattgatataacccacataccatataatttatctatttcgagtgcacaattcaatgacttttagtatattcagagttgtacatccattactaccattaattggaaaatgtttccattactccaaaaagaccccacaccccttagccatcacccctatccttcccttttcccccctcagccttaggcaacttttttttttttttttttttaatttgagacagggtctcactttgttgcccaagctagagtgcagtggtgcgatcttggtttactgcaacctccacctcccgggttcaagtgattctcttgtttcagcctcccaaatagcagggattacaggcgtgcgccaccaagcccagcaaatttttttgttttatttatttatttatttatttgagatggagttttgctcttgttgcgcaggctggagtgcaatggcgctatctcagcttagcgcaacctcagcctcccgagtagctgggattacaggcatgcgccaccatgcctagctaattttgtatttttagtagagacggggtttctccgtattggtcaggctggtctccaactccctatctcaggtgatccgcgcgccctggcctcccaaagtgttgggattacaggcatgagccactgcgcccaggcacatttttatttatttttttgagacagtcttgctctgtcacccaggctggagtgcaatggcaagctctcagttcactgcagcctctgcctcctgagcgcaagcgattctgctgtctcagcctcccaaatagctgggattccaggcatgtgccaccatgtctggctaatttttgtatttttagtagagatagggtttcaccatgttggccaggctggtctcaaactcctgacctcaggtgatctgcacaccttgacctccccaaagtgctgggattataggcgtgagccaccatggctggcttgtctgagattttggagatgggggtccatttttctctcctttatttttccttctactttaaaaaaatgaattgttagcctgggtgtggtggctcatgcctgtaattccagtacgttgagaggctgaggtgggcggatcacttgaggtcagaagttcgagatcagcctggccaacatggtgaaaccctgtctctactaaaaatacaaaaattaagcggtatggtggtgaggcacctgtaatcccagctactcaggaggctgaggaggcaggaggagaattgcttgaatccgggaggcagaggttgcagtgagccaagatcgcaccactgcactccagcctgggtgacaaagcgagattccatctcaacaaacaaacaaacaaacaaaaccgagttgttaacattcatggaatgaaaggagtccacatattatacatgtgtatgagtacttacccagatcccgatacagaacttgcccatcaccccagaagtcttccttgcctccctttctggccaatgaccgccctcctaaggcaccattcttctgatgcatttaaccacaggccggttttgcctgttctgacattataaacaggacttatacagtgtactcttttgtgtctggccttttttccactctacatgatgttggtttatacttggagttctttccttcttattgctatagagcagcagttggccacctttttctgtgaaggaccagatagtaaatattttcagtttttacaggtagtagggtctctgtgacagctactcagctctcttattgtggcatgaaagcagccacagacactgcataaatgaataggcatggctgtgttctaataagactttatttgtggcctctacatttggattttaggtcaggctcatgcctgtaatcccagcactttgggaagctgaggtgggtagatcacctgaggtcaggagttcgagaccagcctgaccaacatggtgaaaccccatctctactaaaaatacaaaataagctgggcgtggtggggtgtgcctgtattcccagctactcaggaggctgaggcaggggaatcgcttgaacctcccccgggaggtggaggttgcagtgagcccagatggtgccattgcactccagcatgagtgacaagagcaaaactccatttcaaaaaaaataaataaataaaataaaaaataaaatttggatttcatataggtttttttttaaatttgtttgagacaggctcttgttctattgcccaagctggtatgcactggcgtgagcatagctcattgcagcctccaactcctgggctcaagtgatcctcctaccgcagcctcctgagtagctgggactatgggcatgtgccaccatgcccagctaatttttaaacaattttttgtagagactgagtcttgctgtgttgctcagattggtctcaaactccaggcctcaagcaaccctcctgcctcggcctcccaaagtgttgggattacaggtgtgagccccatctagtttttacatgttactttgatagttttcaatgtgaaaaaaagttaaaatgattcttagcttacaggccttacaaaaactgatggcaggccaaatttggtccactggccataatttttgccctacaaaatgggcaggttgtggtggctcctaggctcaagcgatcctccttgcctcagcctcccaaagtacaaagtgaattacaggcatgagccactacaccctattttccttctgattattcagtttttggctaccacgaataatgctgctatgaagattcttctgctaatatcttagggaacattgtcatgaattctaaggactggattttctgggtcactgagtcgacaaatgtttaattttcatagaaactcccagtttcttgaactggttgttcatcttacataaaagatgggacaaatttaagtggtttcattgtagaatgagttttctttctttcttttttttttttttagagacagagtctcactctgtcccccaggttggagtgcagtggcacaatcttggctcactgcaatctctgcctccctctgggagcctcagttccctgcgctaaaacacagggtttatcacagcaccttcctcttgaggctgtttcaaggattagctggctgccttcaggatctccaacccagaggttccccttctaggtgtgaagcccagagacacccttgctcatgtgcacaaaagacagcaggggtgtagggcaggggacaaagtacacagcaggggactgtttaatacatgatgacgctacaaggcagtggatcgccaaaacaggagtaattcttttttttctgagacagagcctcactctgtcacccaggctagagtgcagtggcgcagtctcggctcactgcaacctccgcctttcggtgatccttctgcctcagcctctccagtagctgggattacaggtgcgcaccaccacatctggctaaattttatgtttttattagagatggggtttcgccatactgccaggctggtcgtgagcacctggcctcaagtgatctgcgtgcctcagcctcccaaaatgcagggattacaggagtgagccaccgcacctggcccaagttttctttttttaataaactgattgagaagtgaacatcttagctgccacagggtggccgaatcagaaagttaggtttgctgttaaatatgctggcttagagaagtactgctgaaaacactgatcccccaggtcccttagaatcagagagtctgatttaattgttctgggtggacacaaggaattggcatgttttaaaagctccaccattgattcttatgtggctcaagtgtgggtttcaatacttcctccttttaacattgtgaaacgagtaatttttcttccaacattttattatgaaaaatttcaagcatagagaaaagctgaaaaaaaatttttttttttttttgagacagggtctcactttgtcatccaggctggagtgcagtggtgcaatcatagctcactgcagcctcaacctcctggctcaagcgatcctcctgcctcaggcttccaaatagctggaactacaggtgtgcaccaccactcctggctagtttttgtgttttttgtaaagacagagttttgccacattgcccaggctggcctcgacctcctgggctcaggcaatcctccctccttggcctcccaaagtgctgggattagagtgagccactgcaccaggcttaaaatttttttttacagtgtacatctctaaccatccatcacttcatctttttttcttttgagatggagtctcactctgttgcccaggctggcgtacagtggcacaatcttggtttactgcaacctctgcctcctgggttcaagcgattctcttgcctcagcctcccgagtagcagtagctggatttacaggcgagtgccaccacacccagctaattgatttttaaaagatttttagtagcgatggggtttcaccatgttggccaggctggtctcgaactcctgacctcaagtgatccacctgccttgacctcccaaagtgctaagattacaggtttgagctgctgtgtccgacctattcttttttttttttttttgggtgggggtctcgctatgttgtccaggctggtattgaaccctggctaaggtgatcctcccgcctcagcctcccaagtagctgggcctacagacgtgcaccatcatgccttgctgtaattgttctattttattattagttattattgatttattaatgtgcctaatttataaattaaactctatcataggtgcgtatgtataggaaaaagcatagtgtgtagggttctgtactatctgcggttttaggcatccactccgggtcttgaaatgtatcccaggcagataagaggtgtttactatagttttgagtaatgaagggaaagaacttgggaaccaaatggaaaagaagctgagagcttacttgccaccagggggcagtgtaggccgtgggaactccaaggccagcaagctgaatgctttacaggattccttctgggttatgtttctttgatgggggtagtttcaggtttagctgctgcaggcaacagatgaaagaaaagctctggggatgtgtcacagacatgatgcatcatggaagggaagaatgaatttgttgaaagaatttggggttaggcaggctgggctgttgcggaaatcactcgacaagtttcagggacaatgaaggctgctttaggtcaagatgttatatgttccccacccacaatttcttattttgaattttttaaaatctacattgaaataatagtacaaaatataacaatacacaagcacaggccgggcgcggtggctcacgcctgtaatcctggcactttgggaagccgaggtgtgcggatcacccgaggtcaggagtttgagatcagcctggccaacatgatgaaaccccgtccctactaaaaatacaaaaattaaccgggcatggtggcacgctcctgtaatcccagctactcaggaggctgaagcatgagaatcacttgaacacccaggaggtagaggttgcagtgagacgagatcgcaccactgcactccagcctgggccacagagcaagactgtctcaaaaaaaaaaaaaaaaaaaaaaaaaaaaaacaagcacaaatttcatcagccatcagagcaattatgtcactataggtcatgaaacttttagaaccgcgcccctctcccccaaatgtttttggggaatgcgagtgaaaatgggcaaaaagtccaaaaatcgttttgattttgcagaatgtcagggttctctaggctatactttgagacttcctcttttacaaaacctttgtcacgtctaacaaaatatgcagtaactttttttttttttttttttttttgagacaagagtctcgctctgtcgcccaggctggagtgcagtggtgcgatctcggctcactgcaagctccgcctcccgggttcatgccattctcctgcctcagcctcccgagtagctgggactacagacgcccaccaccacgcccagctaatttttttttttgtatttttagtagagacggggtttcaccatgttagccaggatggtctcgatctcctgacctcgtgatccgcccgtctcggcctcccaaagtactgggattacaggcgtgagacaccacgcccggccaatatgcagtaactttatatcattattaaatattcagctgtgttcagatgtctccaattacccgaggaataatttttacagctttttttttcttttttctttctttttttggtagagataggatctcaccatgttgcccaggctggtctcaatctcctgggctcaaatgatcttcccctctcggtgactcaaagtgctgtaattataggtgtgagccacggtgcccagcctacggctgtttttaggaaccaggatacaattgagcttagtgtttggccattatgtctatttagtctcttttgtgtgtgtgtttgtgttttctttttccttcttttctttttgttttgttttcttttttattatttatttattattttttatttatcaaaaatctttttggatctagaacagtttcatatccttttgccccaggatattgacttttttttttgagacagtctcgctctgtcacccaagctgaggatattgacttttgttttttgttttttttttttgagacggagtgttgctctgtcactcaggctggaatgcagtggcatgatctctgctcactgtaacctctgcctcccaagttcaagcaattctactgcctcagcctccccagtagctgggactataggcatgtgccaccacgcttggcatgcttggctaattttttttttttttttgaggcggagtctcactctgtcacccagggtggagtgcagtggcgtgatctcagctcactgcagcctccgcttcctgggttcaagcaattctcctgcctcagcctcccgagtagctgggattacagacatcaccaccacgcctgactaatatttgtatgttttgtggagatggggtttcaccatgttggcgaggctgatcttgaactcctgacctcaggtcatccacctgccttggcctcccaaagtgtcgcgattaggcgagccaccgtgcctggcttcggctaatttttgtatttttagtatggatggggtttcaccatgttcaccagtctggtctcaaattcctgacctcaagtaatctacctgcctcggcctcccaaagtgctgggattacaggcgtgagccaccgtgcctggccgcatttaatacatttaacctactgaacattataggttagcctactttaccttaaagtggtcagaacatttacattagcctacagttgggcaaactcatctaacacaaagccttgtattttatacaagagtgttgaatatctcatgtaatttattgaatactgaattgaaagtgaaaaacagaatggctgtatgggtgcatggaatatgatttctattgaaagtgtatcacttttggcttggtgcagtggctcatgcctgtaatcccagcacattgagaggctgagatgggaggattgcttgaggccaggagttcaagaccaggctggtcaacatagtgagagcccatctttactgaagaaaaaaaaagacaaatgaaaaaaagaaataaaatgtatcactttcacattattgtaaagtcaataaattgttagtcatcgggcacatcacacctgtaatcccaacactttgggaggctagtgtgggcagattgcttgatgccaggagttcaagaccagcctggtcaacatgatgaaacctcgtctctactaaataacagtacaaaaattagctagacacagtgatgcgtgcctgttatcccagctactcagaaggctgagacacaagaatcacttcaacccaggaggccgaggttgcagtgagccgagatcatgccactgcactccgcagcctgggcgacagagagagactctatctcaaaaaaaaaaaaaaaaaagaaaaaaagaaagaaaaaaaagccaggcatggtggctgactcacacctgtaatcccagcattttgggaggatgaggcaggcggatcatttgaggtcaggagtttgagaccagcctggccaatgtggtgaaaccccatctctactaaaaagacaaaaattagccaggtgtgatggtgagtgcctgtaatcccagctactcaggaggctgaggcaggagaatcgcttgaacccgggaggcggaggttgcagtgagccgagatcgcaccactgcactccagcctgggtgacagagtgagactctggttaaaaaaaaaaaaatcataagtcagaccatcttaagtcaaggaccacatgtataccaagggttgagccacagggtatgtgtagatttagctttagtagaaactgcccagtaattttgatttgtagatgatctttatatattccggatccaagaactttgttggatccagtacaactcctttacctgtggtttcactttctgtggttttagttatctgtggtcaaccatagcgtgaagatattcaatggaaaattccagagataaacaattagtaagttttaaattgtacatcgttctgagtagcatgataaaatctcacaccatcccactcaggacatgaattatccctacgtccagtgtatctgtgctgtataggagtatgttacccattcgttaatcacttagtagccttcttgattatcagatgaaaaaaaaacatagattggccggtcacggtggctcacgcctgtaatcccagcactttgggagcctgaggcgggtgaatcacctgaggtcaggagcttgagaccagcctgaccaacatggtgaaaccctgtctctactaaaaaatacaaaaattatctgggcatggtggtgggcacctgtaaccctagctacttgagaggctgaggcaggagaatcacttgaacccaggagggggaggttgcagtgagccaggatcatgccattgcactccagtctgggtgacagagccagactccgtccaaaacaaaacaaaacaaaacagtatttatagggtttgtactatctgaggtttcagatatccactgggttcttggaggtatcccctgcggataaggaaggactactgtttatgtttgtaaatatcattttccactctgagggctaccttttcactgtctttttttttttttttttttaaggcggagttttgctcttgtcatccaggctggagtgtgatggtgcaatcttggctcactgcaacctccgcctcccgggttaaagcaattctcctgcctcatcctcccaagtagctgggattacaagcatgtgccaccatgcctggctaatttttgtatttttagtagagatggggtttcaccacattggccggggtggtctcgaactcctgacctcaggtgatttgcccgcctcggcctcccaaagtgctgggattacaggtatgagccacagcgcccagccaccactgcctattttttatttttaaaagtgtaaaacattgaattttatttcaacggtattgcttttaatgactgttgggtattccatttttatattagtgtgcttacctttttaaaattggtttgcaagatctgtttgtatattaagtatattgaccactgtgtggtatgtatatgttacaaatatattttcccagcatattggttctctttagattttgtttatggtgttgctgccattcagaaccttctgactgatcttttccttaatgatttatcactttaggtatcacatttgaatatcccttctgtattagtctgttctcatgctgctaataaagacatacctgaaggctgggtgtggtggctcacgcctgtaatcccagcactttgggaggccaaggcaggtggatcacgtggtcaggagtttgagaccagcctgaccaacatggtgaatccccatctctactaaaaatataaaaattagccaggtgtggtggtacatgcctgtaatcccagctactcaggaggctgaggcaggagaattgcttgaactggggaggcagaggttgcagtgagccaagattgcaccactgcactgcagcctgggtgacagagcaagactgtctcaaaaaaaaaaaaaaaaaaaagacatacccaagactgggtcatttataaagaaaaaggggtttagtgggctcacagttccacctggcttgggaggcctcccaatcatggtggaaggcaaaacaggagtgaaggcatggcttacatggcgacaggcaagaaagtgtgtgcaggggaactgccgtttgtaagatcatcagatcttgtgagacttattcactatcatgagaatagcatgggaaaaacccacccccatgattcaattacctcccaccggctccctcccacaacccatggggattatgggagctataattcaagatgagatttgggtggggacacagccaaaccatatcattccactttggtcgctcccaaatctcatgtcctcacatttcaaaaccaatcataccttcccaacagtcccccaaagtctcaactcatttcactattaactcaaaagtccacagtccaaagtctcatctgaggccgggcatggtggctcacacctgttatctcagcactttgggaggccaaggcaggcagatcagctgaggtcaggagttcaagaccagctttcccaaaataataaaaccctgtctatactaaaaatacaaaaattaggcaggcatggtggcacatgcctgtagtctcaactactcgggaggctgaggcacaagaattggttgaacctgggaagcagaggttgcagtgagccaagattgcaccactccatcccagcctgggtgacagagtgagattctgtctccaaaaaaaaaaaaaaatcaacaacaaaataaagtctcatctgagacaaggcaagtccctcccacctatgggcctgtaaaatcaaaagcaagtttagttatttcatagatacagtgggatccagggattgggtaaatacatccattctaaatggaagaaattggccaaaatgaaggggctgcaggctccgtgcaagtcctaaatccagtggggcagtcaaatcttaaagctccaaaaagatcttttactccatgtctcaaatccaggtcatgctgatgcaagaggtgggttcccatggtcttgggcagctctgcccctctggctttgcagggtacagccccactcctggctgctttcacgggctggtgtggagtatctgtggcttttccaggcacatggtgcaagctctcggtggatctaacactctgggttctggagggcgatggccctcttctcacagctccactaggggcagtgccccagtgggaactctctgtgggggctcccactccacatttcccttctgcactgtcctagcagaggttccctatgaaggcttcacccctgcagcacacctctgcctggacatccaggcatttccatacagcctctcaaatctagctggaggctcccaaacctctgttcttgacttctgttcaccagcaggcccagcaccacgtgtaagccaccaaggcttggggcttgcaccctctgaagcaatggcctgagctgtacttggccccttttagccccgactgggatgcagggcaccaagtcctgagactgcacaaaacagcaaggccatgggccctgcccatgaaaccattttttctcctagtcctttggacctgtgttgggagaggctgctgtgaaaacctctgacatgccctggagacatttttcccattgtcttggtgattaacatttggctcctcgttacttatacaaatttctgcagcaggcttgaatttttcctcagaaaatgggtttttttttctatcacattgtcaggctgcaaattttccaaacatttatgctctatttcccttttaaacataggttccaattccaaaccatatcattgtgaatacataaaactgaagtgaatgcttttaacagcactcaagtcacctcttgaatgcttttaacagcactcaagtcacctcttgaatgctttcctgctgagaaatttcttctactaggtaccctaagtcatctctctcaagttcaaagttccacagatctctagggcaggggcaaaatgctgccagtctctttgctaacacataacaaaagtgacctttaccccagttcccaaaaagttcctcatctccatgtaagaccatgtcagcctggacttcattgttcatatcactctcggcatattggtcaaagccactcaacaagtctctaggaagttccaaactttcccacatttttctgtcttcttctgagccttccaaactgttcaaacctctgcttgttacccagttccaaagtcacattttcacatctccttatagcagcaccccactttactggtaccaatttactgtattagtcttttctcatgctgctaataaagacatccctaagactgggtcatttataaagaaaaagaggtttaatggactcatagttccacatggctggggaggcctcacaatcatggtggaaggcgaaggaggagcaaagacctgtcttacatggcagcaggcaagagagagtgtgcaggggaactgccctttataaaaccatcagatctcgtgagacttattcatcatcacgagacagcatgggaaaaacctgcccccattattcaattacctcctgcctggtccctcccatgacatatgaggattatgggagctacaattcaagatgagatttgggtggggacacagccaaaccatatcaccttcctaaccagaggtcagatattatttgtatttttgttgttgtgtgtcacagctttgcggttttatttttcatgcatttaaatctttaatccacttggagtttactctgataatataagattacagcctgggaatctacattttttaccaaaatgtttatctagataagaccctggggtagggtggggctttgggggccagtttcatctagaaggcttcttggtgactatctctgtactcttccacccctgccaggcgttggagaccagggccagccctggccacaccccaggctgtgtcaccttcgtcctgaatgaccacagcatggccttcactggagatgccctgttgat

SEQ ID NO: 11914 - DNA, 648 bp, Homo sapiens
cccgcagtgggcgcgatggcggaggctgtactgagggtcgcccggcggcagctgagccagcgcggcgggtctggagcccccatcctcctgcggcaggtgcgggtggctggacctaggaggggactgctgggcactaggcggcagcaaggacggaactccggggtctcttaatagggagagatccggggggacccacgcctgcatcttgcggaaagcggggtggaggtttagggctggactcttgggtcctttaaagatgttcgagcctgtgagctgcaccttcacgtacctgctgggtgacagagagtcccgggaggccgttctgatcgacccagtcctggaaacagcgcctcgggatgcccagctgatcaaggagctggggctgcggctgctctatgctgtgaatacccactgccacgcggaccacattacaggctcggggctgctccgttccctcctccctggctgccagtctgtcatctcccgccttagtggggcccaggctgacttacacattgaggatggagactccatccgcttcgggcgcttcgcgttggagaccagggccagccctggccacaccccaggctgtgtcaccttcgtcctgaatgaccacagcatggccttcactggagatgccctgttgat

SEQ ID NO: 11915 - DNA, 25299 bp, Homo sapiens
tcagaggcccgacagcctctttctgaggaggacgtagccagcctttcctggagacccttgcaccttccttctgcagactggcagagagctgccctctctctctggacacacagaaccttccgagaggtgttgaaagaggaagatgttcacgtaggtgaccgttccttctcctgcatcatgccacgtcctgagtctagggtttgtgtgtgctcctcgggcaagaacagcagcacgtaggtgaccgttccttcccctgcatcatgccacgtcccgagtctagggtgtgtgtgtgccgactgtctcctcgtctcgagtctagggtgcgtgtgccgactgtctcctcagaggcaagaacagcagcacttagatggtttgattggaatcttgactaaaatcgttgtggcctcatgtgcagctcttaagaaattatacagatactgggcacggtgctcacacctgtgatcccagcactgtgggaggccaaggcgggttgatcacctgaactcaggagttcaagaccagcccgggcaacatagtgaaaccccatctctacaaagaatgcaaaaattagctgggcacagttgtgtgcacctttggttccagctacttgggaggctgaggcaagagaaatcacttgagcccaggaggtggaggttgcagtgagccaagatcacgccactctattccagccaggatgacacagcaagaccctgtctcaaaaaaatatattaataaatacagagaaaccctgctatactttctcagtttctcccaacacgaacttctttttttatttttactgatatattttttgagacaacgtctcgctgtgctcagtggtgcagtcttggctcactgcagcctctgcctcctgggttcaagcaattctcatgcctcagcctctccagtagctgggactacaggcgcctgccaccacgcccgactaattttggtatctttagtacagacggggtttcaccatgttgtccaggctggtcttaaactcctggcctcaaattacccacacgccttggcctcccaaaatgctggaattacaggcgtgagccattgcgcccgagaacttgttttttgttgttgttgttgttttgttttttttttctggtggagtcttactctggggcacagtggcgcaatcttggctcactgcagcctctgcctctctggttcaagtgattctcctgcctcagcctcccaagtagctgggactacaggcgcgcaccaccacgcctggctaagttttgtatttttagtagagatggggtttcaccatgttaggctggtctcgacctcctgacctcgtgatctgcccgccttggcctcccaaagtgctgggattacaggtgtgagccactgcgctcggcccctgggaacttgttttaaacatgtctgccaggctgtgtggtggtcactcagggtctctgggctcacccatgtgtgcctggttactggagctggcattgctctcaccagtgtgccttggtactgatttatttctgaggatgtttgcctggttgttttggtctttagaaaagaatttcaaggtggctgggcacagtggctcatgcctataatcccagcactttgggaggctgagatgtcaggagattgagaccatcctgggtaacacgatgaagccccatctctactaaaaataggaaaaagtgatccttctgctttggcctgccaatatgttgagattgcaagtgtgagccactgtgccaagccttttgtgaaattattttattatttttaaattattatttttttttttggagatggaatcttcctctgttgcccaggctggagtgcagtggcacaatcttgggtcactgcaacctcagccttctgggttcaagggattctcctgactcggcctcccaagtagctgggaccacaggtgcacgccaccgcgcccagctaactttttgtatttttagtagagatggggtttcactgtgttagccaggatggtctcaatctcctgacctcatcatcctcccgcctcggcctcccaaagtgctgggattacaggtgtgagccaccacgcccaaccctttttttttttttttttcgtatttttagtagaaacagggtttcaccgtgttagctaggatggtctcaatctgctgacctcgtgatctgcctgcctcggcctcccaaagtgctgggattacaggcatgagccaccgtgctcggcctcctaaaaatgtttttaaaaaacttagctggtcatggtgatgtgcacctgcagtcccagccatctgagaggctgagggggagaattctggagttcaggaggcagagtctgcagcgagctacgattgcaccactgcacacactccagcctgggcaacagaacctgtttccaaaaataaatgaaggtatgctactgtgaatagctgtagaatgttgttgttttgttagtttcttttttcttttttttttttttcctttttatagatagttctcactctgttactcactgcagccttgacctcctgggctcaagagatcctcctgcctcagcctcccaagaggctgggaccacacacatgtgccaccacacctggctgatttttaaatcttttgtagagacggggtgtcaccatgttgcctaggctggtgtcaaactcctaggctcaagcaatctgctggcctcagcctcccaaagtgctgggattacaggcatgagccaccgtgcccaggtaatttttaaatgagatgaggtcttactatgttgcccagactaaaatagccgttttatacttagaaagaaggattacagtactaacatctttgtgctagggaaatcctgtaagaaatcattcttgataaaactaaggtttctttcctgtggaactctcagctgcaatttcattataacacagggacatggaggactgcgtatgagatgaaatgacaaactggtttataaacctgtcggtggattgtgtgttctgtcctcattgtattgaattgcttgctctctttctcagttaacttaccaagactggttacacctggagctggaaattcaacctgaagctgatgctctttcagatactgaacggtaagtgttgaaaagagctaccctggccaggcatgatggctcacacctataatcccagcactttgggaggctgaggcaggagatctcttgaatccaggagtttgaggtcagcctgggcaacatggggaaactccatttctacaaaaaatagaaaagaaattagccggacatgcggcacgttccagtcatcacagccacttgggaagctgagcaggagcattgcttgagcctgggaggtagaggctgcagcgagctgagatcacaccactgcactttagcctgtgcaacggagtgagaccctatctcaaaagaaaaaggagcttccctttaaaatgttacacggttttccacattgccttaaagcctatgtttcgtcattttatcctcaatttaatgtttggtttacctgttaatctttgagcacaatttcaattttttttttttcggtggcaagatttattaaagcaaaagcgaaagtaaagcttccacgcggtggcaatttctgtttttctttttttttttttttttctgagacagagtcttgctctgtcacccaggctggaatgcagtggcgcgatctcggctcactgcaacctccacctcccgggttcacgccattctcctggctcagcctcccgagtagctgggactacaggcgcccgccaccatacccagctaattttttgtatttttggtagagacggggtttcaccgtgttaaccagggtggtctcaatctcctgacctcgtgatccacttgccttggcctcccaaagtgctggcattacaggcgtgagccaccgcgcctggccaggttgcccaatttcggttgttattcctttatttaagaaacatttactgagctcctaccatgtggcagacaattctagagtgttctagaagcagggagtatagaggggaataaacaagcctgcccatatggcacctttgtatcaatgagggcagatgtggcacgtataaggcacccacttagacttcaccctaccctggctgggctatggctgctgtccgggagctgtacacctgtgtccaggccctggcaacacacaggtagatacagaagtggattaaaggtaggaatgagccctggagataacagacagggccgtgtgagaggaaatgaccaggcaggagcagaggctggtgtggagcaggtggtgcagactttgaggagtgatgccagccttgacttgggggcaccaagaagtgggtaaatgaagcagtgaacccccatgagtcccagggctgatgactgagaccatttgagactatttgagaggccagatgtgctgttctgggcataggagtagggagcccagaggaccgttgggtttaagggtgtggagtttagggtggaggtcagggagaggggaatgtggtcactgcagatatggagtatcctggtgggtatatgggcctcagggtgcctgccacacctagactcaggagagggttggcaacagccaccctgtgctcctcgtccttccggccatcaggggccttccaggcacatgcagcactgtcgcctgcacctggatcctggtatcagattctggatgaaaccaatggaagtaataggaaaaggaaaacataggggccacaaaaagaaaactcgctgctgcctgcggcaaaacacgtgctgatggttcaggtcgtgccaagcccgctctgcaggcgcttccttcactcacccccgtttctcctcccggctgctctctggggtggagtctaaggaggaggtcagagggaggggcttgtctgctgcatgaggtcatgctgcatcaggtcaccgctgcgtggaagttgtgttgagatgtgttgcgggattttctttcttttctgaattacttaagtgatacttagatacattctgtgccagttccagacagtgtgggtggagcaccccagttccggacagcgtgggtggagcaccccggtcccggacagcgtgggtggagcaccccggtcccgcacagcgtgggtggagcacccaggtcccgcacagcgtgggtggagcaccccagtcccggacagtgtgaggagagcacacactccctagcactcacatttgcagggtcgtgtggagcgttttcctggttgtggctctttctgcataaatggattgcggtattgatggttctgtgcactgcggatttgtttgtttgtttgagacagggtctcactctgttggccaggatggagtacagtgatgcactcacggctcacggcagcttccctctccagagctcgagtgatcctcctgcctcagcctcctgagtagctgggaccacaggtgggcactactatgcccagctaatttttttattttttgtaggaatggggtctccctttgttgctcaggctgatgtcagactcctgggctcaagtgatcctcccaccttggcctcccacagtgctgggattacaggtgtagccactgcagttttgagtcagtgtctccttgagccccttcccatccgtatccacagagtccacagtctggatgcaggttgcttcaccatccccttctggtgggcctgtgagtagctcaggtgccctcaggtgactttccaggctactttttttttttttttttttttttttttttttagacggagtctcgctctgttgcccaagcaggagtgcagtggcatgatctcagctcactgcaagctccacctcccaggttcataccattctcctgcctcagcctcctgagtagctgggactacaggcgcccaccaccacgcccggctaattttttgtattttgagtagagacgaggtttcaccgtgttacccaggatggtctcgatctcctaacctcgtgatccgcccgcctgagcctcccaaagtgctgggattacaggcatgagccactgcacctgccccagcctacatttttgtgcttgcctattctgttcaccaagctcatgtgctgtgtggccagcagttaccccgtgggatgtcatcctgagtggcctttgatccgtggaaggtggggtcacaaaggtcactcctgagaccaggcctttcccacatccccaggcatcccaccctgcagacagtgaggtctcatccctactccaaggtcccgagccgccagtctcaacccagctctcactagtgctgtgtgtcccttactatgggcctattccctggttatggggaaccgctggccacgaagcatttctcagaattgatagcagtgtttgctgttctaggcaggacttccaccagtgggcgatccatgagcactttctccctgagtcctcggcttcagggggctgtgacggagacctgcaggctgcgtgtaccattcttgtcaacgcactgatggatttccaccaaaggttagcagcacacactgtattagggttctctggagggacaggactaataggatatatataaaggggagtttctggccatgctggtgcccatctaattagcttagggtgggtctgcctttcccagcctatacccaaatgtcagtctcctttggcaacaccctcacagacacactcaggatcaatgctttgcatccttcagtccagtcacgttgacactcagtattaaccatcacacaccgatgaggccttacttttaatcatggtagttctaagaatgcatttttctctcagtccaattttggtatgcaaagtacacttgagcctatcacatagcaaatctatgtcaatacaaaataaagccaagcttcctgcatcggttgtttctttatgtgtatagacttgtcagaagcgacaacttcgggctgggcgtggtggctcacacctgtaatcccagcacttcgggaggctgaggtgggtggattacctcaggtcaggagttagagaccagcctggcctacatggtgaaacctccctctctactaaaaatacaaaaattagctgagtgtggtggcgggtgcctgtaatcccagctacttgggaggctgaggcaggaggattgcttgaacctgggaggcagaggttgcagtgagccgactgggcgacagagcaagactctgtctcaaaaaaaagataaaaatagcaacaacgttgtttttctgttctgtcacctggtattcaaggtgagcatgtgtgaagcacggcacaaatggcctagtagatcctgggcatcacagcctctctccatctgagagggattctcaggacagagcagttcctgaggtgttgcatgtgggccagaaggatggacggagtgtacctggggctgtccaggctttgtccccaggggctcttgtttgcagcttcacactgttgtgttacagctgcagcattcagtacagatggcaagtgtgtatgcagcttccccccatgtctcctgcctgcggcaaccacgaatccattttatgttcatggatttgcctgtttgggatgtttaatatcaacagaatcatgtagtatgtggccctttgtgtctggcttctttggctgagcagaatgtttctgaggctcatctgtgttgtagcacatatcagcatacccttccttcttatggctgactgatgctcacagaaggtatggaggctgacgcacctccatcgtgggtgacttcttgttaaccctactccaagaatgcctcctgagatttcccatttatctgctgttaccttaaatcccactcttaggtcaaaacaaccttgaggctgggcgcagtggctcatgcctggaatctcagcactgggaggccaaggcaggcggatcatctgagctcaggagctcgagaccagcctggtgaaaccgtctagacaaaaaaaaaaattagccaggcatggtagtgtgtgcctatggtcccagctactcgtgaggctgaggtgggattgcatgagccggggaggcagaggttgcaatgagctgtgaaaacaccactacattccagcctgtgtgacagagtgagactccatctcaaaacaaaaaagcaaatcttccaccataaatccagcggttagattcacagagcattcttgcctttccctgaggggttgacttcaatagtccttccctgtggtatagaagccctgcctgggggtaacagtgcagggatgcatcgtctctctaggctgcctgagacatggtttctgtctgtaagtccttaaacgtttctgtctgagaaactggattattcagcctctcttcagccttccagcttccccagcctttatgggtaggtttgcacagagctgctcactgcggaacagaaagatcagccatattttgtttatccattcactttgtttgtttgttttttgagatagtcttactttgtcttatttatatttattttgaaactgggtctttctttgtcacccaggctggggtacagtgactgcagcccactgcagcctcgacctcctgggctcaagtgatcctcctgcttcagcccctcaagtagctgggaccacaggcaccaccatacctggcaaatttttgtagttgtagtagagatggggtttcaccatgttggccagactggtcttgaacttctgacctcaggtgatctgcccgcctcggcctcccaaagtgctgggattacaggcgtgaacctctgccaggcctgacttgatggtagccatcctagtgggtattaagtgctatttgatagtggtttcgatttgcacttccctaatgggtagtgattttgaacatctttccattttcttattggccattttagattttttttggagaaatctgttcacatccttagcccatttgaaaactgggtcacattcatgtactgcataagaatgttctggttaacaacgagccacatatatgacagtaatcccacatagccataattttttgtaccttttttttaaactgtgtttttaccgtaccttttctatgtttagatacacaaatactgttgtgttacagttgcggcatgcaatacagttacatgctatgccggtttatagcctgggagcggtgggccgtgccatgtggcctaggtgtgcgggggctctggtctgtttctgcgcggtgggccgtgccgtgtggcctaggtgtgcgggcggctccggtctgtgtctgtgcggtgggccgtgccgtgtggcctaggtgtgcggggggctctggtctgtgtctgtgctcttggatgttcacgtgatgaaaccacctaaagatgtgtttctcagaatggatccttgtcattgagcagttcatgactgtatttgtcttactgagttgtatgagttctttatatattttagataaagttcttatcaaatatatgatttgtaaatattttttcccattctgttaattcttttttcactctcttgatagtatcgtttaatgcacaaaggttttaaatttttataaagtccagatcatttatttttagtttagctctttaggattttgattcattttgatggatcagaaaacattttgggccagccacggtggctcacgcctgtaatcccagcactttgggaggctgaggcgggcagatcacttgatgtcaggagttcgagaccagcctggccaacatggcgaaactaaaaaaatacaaaaactagccaggcatggtggcaggcgcctgtaatcccagctactcgggaggctgaggcggcaggagacttgcttgaacctgggaggcggaggttgcaatgagcccagattgtgccactgcactccagcctgggcgacagagtgagagactgtctcaaaaaaaaaaaaaaaattgttgtgtgaggtcatccagctttattctgttgcttgtggccatgcagttgtcccagcaccatttgttgaaaacacttctttccccactgaatggtcttggcacccttgtcaaaagttagatggctgctcgtgtgagggtttgtttctggctctcattgtgttcccttggtctgtatgtccatatgcactgcgtcattgggatgaagctttgtagtaggttttaaaattgggaagtgtgaggcctccaacttggttcttctttttcaggatggtttggcttttctaggtgctttgtagttgtgtcttaattttgggatgagcttgtcagtttcgacaaaagtagctgggaccctgatacggactgcatgtggggcagtattgccatctcagtgatagcgagtcttctttccttttgaatcatttgttgctaacgtatagaaacaccagtgattcttgtatattcattggctctagtcatttattagttctaagagtgtttttgtatcgattccttagggctttgtatatataagatcgtgtctggccaggcatggtggctcatgcctgtaatcccagcactttgggagggtgaagtgggcggatcatgaggtcaggagttggagaccagcctggccaacatggtgaaaccccatctctactaaaaatacaaaaattagccgggcatcgtggtgggctcctgtaatccgttacttgggaggctgaggcagaagaatcacttgaactcaggaggcagaggttgcagtgagttgagatcatgccactgcaactccagcctgggcgacaagagtgaaactcagtctcaaaacaaaaaaacaaaagaaagatcatataatatgtgaagagagatagtttcactttttcctttcctatctggatgctttttctttttcttgttgaattgccccggcttgaactccccgggcagtgttgttttttttgttgttgttttgttttgtttttttttttctgagacggagtctcgctctgtcacccaggctggagtgcagtggtgcaatctcggcttaccgaaaccttcgcctctcaggttcaagcgattctcctgcctcagcctcccgagtagctgggattacaggcacccgccaccatgcccagctaatttttgtttgtttgtttttgagacagagtgtcgctgtgtgtcccaggctggagtacagtggcactatctcagctgtctgcaacctccgccttccaggttcaggcaattctgctgcctcagcctcccaataggtgggattactggcgtccgctaacacgcccgtctaatttttgtatttttagtagagatagggtttcgccacattggccaggatggtctcgatctcctgacctcagatgatctgcctgcctcggcctcccaaagtgctgggattacaggcgtgagccaccgtgtctgtccccagtgcagtgttgagtagaggcagcgacactgttctgagtgtagagaggacatccttgttgcccctgatcttaggagaacagctttcagtctttcctcattaaatctgacgtttgctgtgggttttcatccatgccaggcactagattgagaagatttcctttgttcctggttgattgagtgtttttatcacaaaaggatgtcacatttcgtcaagtgctttttctacatctattgagataatcttacggtttttgctttttattttattgataactgcgttatattggtttggggatcttaagctatccttgtgtagggaccagccccggagggtcggtgggtctctccctgtgtgcggcgatgagagagtgtagaaataaagacacaagacagagataagagaaaaggcagctgggcccgggggaccactaccaccaatgcgcggagaccggtagtggccccgagtgtcgggctgcgctgttacttattggatacaaggcagaaggggcagggtaaacaatgtgagtcacctccaatgataggtaaggtcacgtgggtcacatgtccactggacagggggcccgtccctgcctggcagctgaggcagagagggagaggagacagagagaaagacagcttacgccattatttctgcatatcagggactattagtattttcactaatttgctactgctatctggaaggcagagccaggtgtacaggatggaacatgaaggtggactaggagcatgaccactgaagcacagcatcacagggagacggtgaggcctccggataactgcgggcgagtctgactgatgtcaggccctccacaagaggtggaggagcagagtcttctctaaactccccgggggaaagggagactccctttcccggtctgctaagtagtgggtgttgttccttgacaccttttgctaccgctggaccacgatccgcttggtgacgggcgtcttcccagacgctggcatcaccgctagaccaaggagccctctggtggccctgtccgggcacaacagaaggctcgcactcttgtcttctggtcacacctcagtatatcccctcagctcctatctctgtatggcctggtttttcctaggctatgattattgagtgaggattatcataatattggaataaaaagtaattgctaccaactaatgattaatgatattcatatgtaatcatatctaagatctatatctggtataactattcttgttttatattttattatactggaacagctcgtgtcctctgtctcttgccttggtgcctgggtggcttgccacccacatccttgcattcttgggataagcctccttggtcatggtacataatttttgtatttcctaggttggggttggtagtattttgtggcagtttttgttgtttattgttgactaatgtgagggtcacactgtcagagaagcacagccatcactcagctccggaggcaggaggagaactgggaacttcagcactattaggcgatactgaggaggattttattgtattttcatttcagctcaaggagttatgaccactcagaaaattctgatttggtctttggtggccgcacaggaaatgaggatattatttccagattgcaggtgagtttgagggtgccacaactcagtgcattcacttcatttaagccgcgtgctattaagatatttattgccaggcgcggtggctcacgcctgtaatcccagaactttgggaggccgaggcaggcggatcacacagtcaggagatcgagaccatgctggctaacacgatgagaccccgtctctactaaaaatacaaaaatttagccgggcgtggtggcgggcacctgtagccccacctactcgggaggctgaggcaggagaatggcatgaacccaggaggcggagcttgcagtgagccgagattgtgccactgcactccagcctgggcgggcgacagagtgagactccgtctcaaaaaaaaaaaaaagatatttattgttggctcaggcttgtaatcccagtactttgggagtccgaggctggtggatcacctgaagtctatacaggtaggcagcatgtacctgtgtgggttcactgtcagtcaacaggcatttactggtgctggccacccgtgcgtcttctgtgccaggcccctgtctctccctccgccagctctggggcctcccaactccttagccagatgctttccctagacccacctggctccttctcagtgagaccatctgctttttcctcttaattgtaatcataattattattattattgggacagggtcttgctctgtcacccaggctagagtacagtggtgcgatcatatctctctgcagccttgacttcctgggctcaagcaatcctgacagcgtgcacctgtgtgcgccaccacacccagctgattttttgtagagacggagttttgccatgttgcccaggcttgtctcgaactcctgggcccaagtgaaccacccatctcggtctccaaaattgttggattacaggcgtgagccactgcacctgatctttattcttctttaaaaaatacagccggccaggcacggtggcttatgcctgtaatcccagcactttgggaggctgaggtggctagatcacttgaggtcaggggctcaagaccagtttggccaacatggtgaaaccccatctctactaaaaatacaaaacactagtcaagcatggtggtgtgtacctatagtcccagctactcaggaagctgacttaggagaatcagctgagctcgagagtcaaggctgccataagccaagactgcactgccgcactccagcctgggcaaccggactgagactgtcctaacaacaacaacaacaacaaaagacttgtgaggcaaaaatgatgtgtggggtaaaatgttagccagaggttaatctgggtgaagggcacatgagtgtcctcctgctgtttttttttgttgttgttttgttttgttttgtctgtttgtttttgagacagagtcttgctctggagtgcagtggcgggatcttggctcactgcagcctctacctcccgggttcaaactattctcctgcctctgcctcctgattagctgggattacaggcgcctgccaccacacccagctaatttttgtatggctaattttgttggccaggctggtcttggactcctgacctcaggtaatccatctgtcttggcctcccaaagttctgggattacaggcgtgagccaccatacctggctgtttttttttgtttgtttttttttgagacggagtctcactctgttgcccagtctgaagtgcagtggtgcgatctgggctcactgcaagctccacctcccgggttcacgccattctcctgcctcagccgcctgagtcgctgggactacaggcacccgccaccatgcccagctaatttttttgtattttttagtagcgacagggtttcaccatgttagccaggatggtctccatctcctgacctcgtgatcctcctgccttggcctcccaaagtgctgggattacaggcatgagccaccacgcccagctgttttttcttaattgataagtagttgataagtagtactgtaactcctgggctcaaggaatctgcctgcctcggcctcccaaagtgctggcattacagacgtgagccacagcacccggcctgcactgttctatatttgcaatttcaaagtgatttccaattgaaatagcttgccccacttgttccttcttgccctgtccactgtggagacctctccctgacccctgacgtctgggtccccgactggctgggcagtgagccccgaggccttcctgtgccagcatactgctctttttcaggagatggtagctgacctggagctgcagcaagacctcatagtgcctctcggccacaccccttcccaggagcacttcctctttgagattttccgcagacggctccaggctctgacaagcgggtggagcgtggctgccagccttcagagacagagggagctgctaatgtacaaacggtaacacctactaccacctgggcagggcagcaccacctgggcagggcagcatctcatgacggtcctagaggttctttgtagtgagtttgtttcccgttacttacttgtctgtgtgtccccaccccaagcctgtccatttctgtggcacatgccacggagaagaggatctggagggttgaaagtacttttgattaaaaccttccagccaagcgaggtggttcatgcctgtaatcctagcattttgggaggctgaggtgagtggatcacctgaggtcaggagtttgagaccagcctgaccaacatggcgaaacgccatgtctactaaaaatacaaaaaaaatacaaaaaaatttagctaggtgtggtggcgggcacctgtaatcccagctactcgggagactgaggcaggagagtggtgtgaacctgggaggcagaggtttcagtgagccgagatcacgccattgcacaccagcctgggcaacagagcgagactctgtctcaacaacaacaacaaaaccttcctgctcagacgtggagggacgtcgcagaaggagctcttgtgaaagtagggaaaagtgttcagaaatgcccacggcggctgcatttataagaagcagcgtggagtcatttaattttacagtcatagggaattgcttcactagacagactggtgcgtcatccacttggttatcgtgtaactgtcagaagttgttggttattatgtaactgttaaaagttgtttgtttggtaacacattttgaatgcagtgggccaaacacagtataggggaggtgggctcagagtgcaggctttggatgggacagagggacacaggccaaggctctggttccaacagtggccctgggtttcagggtggtggttgctgctctgagagtctgagcccttgggaaggagcagagtgtacgctgtgctgtcgccaccaatacagccccttctttccaggatcctcctccgcctgccttcgtctgtcctctgcggcagcagcttccaggcagaacagcccatcactgccagatgcgagcagttcttccacttggtcaactctgagatggtaggtgccccgtgtgcacgtgtccgtccgatctgtcagtgcctgtggcgctaacagcagctcttgcagcctccatgcgtgtactgaccgtgtgaattactgaggaaagggttcaaagtcaaatagggaacagtgtctggaatgccatgtgagggaggaccccacccacagccaggacggcgaccagcacatcaccaaaccagctgtaggttgccttctcccaagtttgagttcctttagtttccctcaagttttaatgattttgacacatggaatcgtacagaccattttgtgtgccacgcacctcggttcatttatttctaatctcaacatgcttcatgtgtaaaaaaagccttgtggtgatctgactaccgctgttgcctgccaggcagcccagttatcttccattttagacactgcccagcgtgagttgcagggtgatcttaaccagcaggctgggtgcggtggctcacgcccgtaatcccagcactctggaaaggtgggggatcacttgagcccaggagttcgagaccagcctgggcaacatgacaaaaccctgtttctacaaaaaatagaaaaattagctgggtatggtggtgcacgcctgtactcccacctacttgagaggctgggtcaggaggagtaattgagcccaggaggcagagttgcactgagccaagatcccaccactacactccagcctgggtgacagagcgaaactcttgtctcaaataaaaagaagtgacactcgctgtggggacgggcagcgtagggacccagttggtcagagctggggagacggataccagcccctcccactctacagagagcagcttctgctcccgaaggcctttttcttgtttttgaagatgcacaaatgtgagagatggaattcaggttccatgccagctgtgcagcattttatatttttatttatttatttatttatttattttttgagacagagtcttgctctgtcgcccaggctggagtgcagcagtgaaatcttggctcaccctgcaacctccgcctcccaggttcaagcgattctcctgcctcagcctcctgagtagctgggactacaggtgcctgccgccatgaccggctaagttttgtatttttagtagagatgacgttttaccatgttggtcagtctggtcttgaactcctgacctcgtgatccacccgccttggcctcccaaagtgctgggattacaggtgtgagcccggccttgtgcagcacttcaaaatgtgacaaggaaagcagaggacgtgagactagcaaaagctttcagaaaatcactatggtctcctttgaattcttatgaatggctgtttttcagaaagctctcagttggcacgtgacagccgacagacaggaaaacaccatagacagcacttggttagtgaagggaccagaggatggttggcccttggtattagtgtcgtcctcaccacagttctacgctccgggtgcgtccccttccctgcggctgcttgtgcctccctggcttcttcctggagcctacaagactgtttgggccagagctggtgggctgcaggatctggccgcccagggaagccgttaagtttcaggacagcacagccagggcgccaggcccggtcagcccaggagcaccatccatggtggccacgccaagccttagcgagtgtttttctcaaaactgaatccacagcagccactctgcatgttggtctcgcctctcttcctgtgggcttttcttacctgccttgaactcttttgcagagaaacttctgctcccacggaggtgccctgacacaggacatcactgcccacttcttcagggtgagatgctccctcagcccctctcgtggccttctcagaacgccgtgggtggatcctcctgtcagcttcctgtgagttccttcactctactagttgtgggtcctcacaaaccgctgacctcctgctgcgttctctcctgcagggcctcctgaacgcctgtctgcggagcagagacccctccctgatggtcgacttcatactggccaagtgccagacgaaatgccccttaattttgacctctgctctggtgggtcagctgtcttgtttggtgttttgttttggggatgagtgggagactccacagctgcctctggcatctctgcagcacgtctccatcacgggtgttaccatctcagggaaaatgcatcaggagacatggaagccacagttaaagatgccagctcatagcagatgagggccgcacatcctgagttcccagaaccgtccctgcccccaccgccgtcaccatggcacccgcaggacttctcccctgtggaccccactcagaccccacgggcaccttcatgtccacaggggtgcagggcttgtttgttcacggtcttgggttgtgcactggctggaggctgtacggtggctgcctgtgccccgtcacgagagcatgactgtggcccacttgcgcctgactatgctttcttgggacttcggagcagagacttcacctcagctcccgccagagctcagcaggctcccctagcagcccagggtcccgagagtgggaggagggcagcatttccctcacttccctggcggctcacttagtcctgaagaccacagctgtcgcccttccttctcggtcatcagggacaggagggcctttttctccgcagcacggcatgttccccagggagctccccaagcaggctgcatttgcaccgagttgtagctcagttggtggaattcgtgagaaatgaactcttcggtgtttagaacgccacctctcagctgagggcatccaaggaccaggcattcccagctcagggcagtgtggtctcttcactgtttcgttcccagctcagaggagtgtggtcccttcactgtttcgttcccagctcagggcagtgtggtcccttcactgttttgttcccagctcagaggagtgtggtcccttcactgttttgttcccagctcagggcagtgtggtcccttcactgttttgttcccagctcagaggagtgtggtcccttcactgtttcgttcccagctcagggcagtgtggtcccttcactgttttgttcccagctcagaggagtgtggtcccttcactgtttcgttcccagctcagggcagtgtggtcccttcactgtttcgttcccagctcagaggagtgtggtcccttcactgttttgttcccagctcagaggagtgtggtcccttcactgttttgttcccagctcagaggagtgtggtcccttcactgtttcattcccagctcaggggactgtggtcccttcactgtttcgttcccagctcaggggagtgtggtcccttcactgttgcgttaggccaggctcttccttctccaaattccacgtcttccatgagtgtgggtaataaatgcctcatggaactgctttgagccttaattgacgtaaaaaatactggctttggagttccagagcgcagggcgagtgtgggcctgtagtggcctgtaggagcactgggggcttgtcatggctggggcagcggaggtgtgtccatctcagccaccctcatctgtgtgctggtgctctctccataggtgtggtggccgagcctggagcctgtgctgctctgccggtggaggagacactgccagagcccgctgccccgggaactgcagaagctacaagaaggccggcagtttgccagcgagtacgtgtgggtggtgagatggggtgtgcccgcccagatgcacttcgggacctgctcaaggtcatctcctaaacaccctggcttgcttgagagaagcggtgtgggcagcctctcgtgtgagcagggagaaaagaaccgagttctcgtggtggtgggcgcctgtaatcccaactactggggaggccgaggcaggagaatcagttgaacccaggaggtggagtttccagtgagccgagatcactccaacggccaatagagcaagactctgtccagaaaaaaaacaaaaaaaaaaacagcctctgccagtgtctcgtctgagtgaggaacggcctctcccaggctcccgtctgagtgaggagctcgagtgattcctttgcacctgctccccttcctcttaaatctaatgtgggctcctagagtgcaccgcgtgctggtagggtcagtgtcatggggacctcagggatgcagattctcagcctaccctgacctgtcgaccccagtcagatattcacgggtccttgcaaaccatcaagctcctggcgcaatccaggctcacacacccttctgaggaccacagagctgacagccactccacctgctgaatgtgggtgccgtgttcttaaggggtcgtcagagggcactgctagtacccatcctgcctccttggagaacaccttactttgtgactagttttgaatcactgatgccacaccgggtcccctcagggtttggctgctcgccgtctgctgaaagaagagaagagggccccggcgcggtggcgcacacctgtaatcccagcactttgggaggccaaggcaggtggatcacctgaggtcaggagtttgagaccagcctggccaacatgtgaaacaatctctactgaaaatacagaaatgagctgggtgtgatagtgtgcgcctgtagtcccagctactcaggaggctgaggcaggagaattgcttgaacccaggaggtggaggttgcagtgagccgagatcatgccattgtagtccagcatgggcaatgagagagaaactccatctcaaaaaaggagaaagcaggtcacacctccagttctaattctacaaacacagatcagattgtctgaagttttgttttttgttttgttttgtttgagacagagtttcactcttgtcacccaccctagagtgagatggcacgatctcggctcaccatgacctccgcctcccaggttcaagcgatcctcctgcctcagtctcctgagtagctgggattacaggcgtgagccaccatgcctggctaattttgtatttttagtagagacagggtttctccacgttggtcaggctggtctcgaactcccgacctcaggtgatctgcctgcctcagcctcccaaagtgctgggattacaggcgtgaaccaccacgccctgcctcgtttttgtttatttgagattgagtctcactgtgttgcccaggcagatctcaaactgctgggcttaagcgatcctcctgaagtgctatgattgcagatgtgaaccgtcatgcccagcttatttaaagtctcttaaaccacagcattgtttcattaatttcctaccaattttttaaccagccagaaaactcagacaccacactggggccagagccaggcagtcctttgttctctgttgtaggagggaatgcctgatccacagggccaggcatgggcaactgaggaaaatgaggcctcttcttccaaaatgtaggcagctggggcccaagagcacagggcaaggtagacaggaccaggccagctgcctgctcagtcagcagctctcagaacgccaggatgctgtgggggcagcaccagcacctgcccacactctcacgtggacctgggggatgcagacctagtttctgatggtcctgaaacccttctctgtcctctgatggaaaggcaggccccaaaggtgacaggtgggaataaggacttggtttctatggcgtggttgtatggttgtaaggccctgcaatgaccccgttctctctgtcccagtttcctctcccctgaggctgcctccccagcacccaacccggactggctctcagctgctgcactgcactttgcgattcaacaagtcagggaagaaaacatcaggaagcagctaaagaagctggactgcgagagagaggaggcaagataggaaattcttttactgatttattttctcgcaagcttggtttcaatcagtgctatttctctgggcttgtctgatgaactgtttttctaaagacaaatatgtggcttggagcaagactttttttttttttttttttttttgtatttttagtagagacggggtttcactgtgttagccaggatggtctcgatctcctgaccccgtgatcctcccgccttggcctcccaaagtgctgggattacaggcgtgagccaccacgcccagctggcttggagtaagactttgactatcaagtttactagtaaaaataataatttcagttttttaaatggttgtatgtagttgagacagggtctcactgtcgcccaggctggagtgcagtggtgcagtcagctcactgcagcctcttctgggctcaagccatcctcttacctcagcctctggagtagctcagactacaggtgtgtgccaccatgcccggctaattttgtaattttttctgagatgggggtctgtagtccaggcatggtggctcatgcctgtaatcccaacacttagggaggccgaggcaggcggatcacttggtgtcaggagtttgagaccagcttgggcaacatggtgaaaccctgtctctactaaaaacacaaaaattagtcgggtgtggtggtgcgcacctacaatcccatagcctgtaaagctactcaggaggctgaggcaggaggatcacttgaacccagggggcagaggctgcagtgagccaagatcacgccactgccctgcagtctgggtgacagagcgagacttgtctcaaaaaaaaaaaatttgtttaaagtaaaaattaaaagagatgggggtctcactgtgttgcccaggcttgaagtgcgtttcttcagcttatttttatcctcatcacagcccagcgtaaatgctgtcagccttcaagtggtgccttctgtgttcatgctgcagtagccttgattcatgtgctgagggacagccccagataagcttgcagtgagacagctcagacctggggtgctggggacaagaggcagcaaggatgggaccgtctgcagccataggcatagggaaaggagtgggagaggctgctcttgaattccaggccagggaccatgttcgactcagacccactgcccacctggttgctgcaccctggaaagcctgactgcccccacaagaccagtgacacccacacagctctctgtgcagggagccaagggtggtgtgtgcagaacaggaacagaaacaagcatcccacaagagagctggaggcagcagccctctgtgcccagcccgagatccgcaacgcataggtgccatgtcagcacacaacttacaccagctcaaagctggatcgacagcagcgcccagggttttggtgattataaccaccctgcaggggttcttctgagtacgtcttcaggtttcttgtgtagttttgttagaagggattttagtggctccagggccttaggaccctagtgtgcagcgaggagtgtccacagagaccctgcccagtcaggccctactttaggctggagcctgtgggcttatcttcaaggattttacaaacacttctgacaggaggccttgcagggagatgatgctgagttgggactgcgcacagccaaggagaccgcagcagtcttctctttctggctcttgtcactttttcaaactgtttctagctttgtttaaaggcaagtgtgaaatgacccagccagtagtaattaattctcaattaagctgtctctctagaagtgattggaaagttttctaagatccacttaaaggatttatggcctagatgtaaaaaatttcaattaaagaggaatgtgtcagccttatttagaatgacagcacaggtaattttaatgtaataataagtgcacgtttttatttacagctattggttttccttttcttcttctccttgatgggcctgctgtcgtcacatctgacctcaaatgtaagtcagaccttaccagccaaggtgtcctctcccactgtgggccaggcaggggcaccaggcagccagcttccaagtcagggtttccagactagctcaggagctccttgtgtttgcggaagtgtgagtgagaactcccaggccgtgggttttttttttttttttttgagatgggggtctcactctgtcacccaggctggagtgcagtggtgtgatctcagctcactgcaacctcagcctcctgggttcaagcaattctcctgcatcagcctcccgagtagctgggattacaggcgtgagtctgtcacacccggctaatttttgtatttttagtagagacggggtttcaccatattgccaggctggtcttgaactggcctcagtgatccgccgacctcggcctcccaaagtgttgggattacaggcatgagccactgcatccggcctgtgggcctttcttttaatgtcttatttgaggacgtggtgcagcagccttggtgtgggtgctcgaagtccctggcctcctacctgagcctcttctgtccagaggcccagtattaccttctataggtaaaactgtcaccagttttaagacttacaataagcaaagaggaaatgccctcttctgtgctgagggctgtaccctcctacccatgggagcaccaggtcggccattctcagggttggtctcctgcggtttacagagcaccacagacctgccaaaggctttccacgtttgtgcagcaatcctcgagtgtttagagaagaggaagatatcctggctggcactctttcagttgacagagagtggtaagaaacacgctgctgaggcacaaatgcggagggccgctcttttcagaggcatcttgcaaatggttaagaacgagccctccttgaggttccttgctaagtaagtttataagctccattttagttgggacagattaagcacaaacttgtttaaagcaataagataatttactggctcactggtcaaccccaggaccaatgggcctatcatggggactgcctctctctgcaccacacccaccctcctgcaaga

SEQ ID NO: 11916 - DNA, 1430 bp, Homo sapiens
tcagaggcccgacagcctctttctgaggaggacgtagccagcctttcctggagacccttgcaccttccttctgcagactggcagagagctgccctctctctctggacacacagaaccttccgagaggtgttgaaagaggaagatgttcacttaacttaccaagactggttacacctggagctggaaattcaacctgaagctgatgctctttcagatactgaacgctcaaggagttatgaccactcagaaaattctgatttggtctttggtggccgcacaggaaatgaggatattatttccagattgcaggagatggtagctgacctggagctgcagcaagacctcatagtgcctctcggccacaccccttcccaggagcacttcctctttgagattttccgcagacggctccaggctctgacaagcgggtggagcgtggctgccagccttcagagacagagggagctgctaatgtacaaacggatcctcctccgcctgccttcgtctgtcctctgcggcagcagcttccaggcagaacagcccatcactgccagatgcgagcagttcttccacttggtcaactctgagatgagaaacttctgctcccacggaggtgccctgacacaggacatcactgcccacttcttcaggggcctcctgaacgcctgtctgcggagcagagacccctccctgatggtcgacttcatactggccaagtgccagacgaaatgccccttaattttgacctctgctctggtgtggtggccgagcctggagcctgtgctgctctgccggtggaggagacactgccagagcccgctgccccgggaactgcagaagctacaagaaggccggcagtttgccagcgatttcctctcccctgaggctgcctccccagcacccaacccggactggctctcagctgctgcactgcactttgcgattcaacaagtcagggaagaaaacatcaggaagcagctaaagaagctggactgcgagagagaggagctattggttttccttttcttcttctccttgatgggcctgctgtcgtcacatctgacctcaaatagcaccacagacctgccaaaggctttccacgtttgtgcagcaatcctcgagtgtttagagaagaggaagatatcctggctggcactctttcagttgacagagagtggtaagaaacacgctgctgaggcacaaatgcggagggccgctcttttcagaggcatcttgcaaatggttaagaacgagccctccttgaggttccttgctaagtaagtttataagctccattttagttgggacagattaagcacaaacttgtttaaagcaataagataatttactggctcactggtcaaccccaggaccaatgggcctatcatggggactgcctctctctgcaccacacccaccctcctgcaaga

SEQ ID NO: 11917 - DNA, 5452 bp, Homo sapiens
gagccgccgccggggctgtaggcgccaaggccatgtccgactcgtgggtcccgaactccgcctcgggccaggacccagggggccgccggagggcctgggccgagctgctggcgggaagggtcaagagggaaaaatataatcctgaaagggcacagaaattaaaggaatcagctgtgcgcctcctgcgaagccatcaggacctgaatgcccttttgcttgaggtagaaggtccactgtgtaaaaaattgtctctcagcaaagtgattgactgtgacagttctgaggcctatgctaatcattctagttcatttataggctctgctttgcaggatcaagcctcaaggctgggggttcccgtgggtattctctcagccgggatggttgcctctagcgtgggacagatctgcacggctccagcggagaccagtcaccctgtgctgctgactgtggagcagagaaagaagctgtcttccctgttagagtttgctcagtatttattggcacacagtatgttctcccgtctttccttctgtcaagaattatggaaaatacagagttctttgttgcttgaagcggtgtggcatcttcacgtacaaggcattgtgagcctgcaagagctgctggaaagccatcccgacatgcatgctgtgggatcgtggctcttcaggaatctgtgctgcctttgtgaacagatggaagcatcctgccagcatgctgacgtcgccagggccatgctttctgattttgttcaaatgtttgttttgaggggatttcagaaaaactcagatctgagaagaactgtggagcctgaaaaaatgccgcaggtcacggttgatgtactgcagagaatgctgatttttgcacttgacgctttggctgctggagtacaggaggagtcctccactcacaagatcgtgaggtgctggttcggagtgttcagtggacacacgcttggcagtgtaatttccacagatcctctgaagaggttcttcagtcataccctgactcagatactcactcacagccctgtgctgaaagcatctgatgctgttcagatgcagagagagtggagctttgcgcggacacaccctctgctcacctcactgtaccgcaggctctttgtgatgctgagtgcagaggagttggttggccatttgcaagaagttctggaaacgcaggaggttcactggcagagagtgctctcctttgtgtctgccctggttgtctgctttccagaagcgcagcagctgcttgaagactgggtggcgcgtttgatggcccaggcattcgagagctgccagctggacagcatggtcactgcgttcctggttgtgcgccaggcagcactggagggcccctctgcgttcctgtcatatgcagactggttcaaggcctcctttgggagcacacgaggctaccatggctgcagcaagaaggccctggtcttcctgtttacgttcttgtcagaactcgtgccttttgagtctccccggtacctgcaggtgcacattctccacccacccctggttcccggcaagtaccgctccctcctcacagactacatctcattggccaagacacggctggccgacctcaaggtttctatagaaaacatgggactctacgaggatttgtcatcagctggggacattactgagccccacagccaagctcttcaggatgttgaaaaggccatcatggtgtttgagcatacggggaacatcccagtcaccgtcatggaggccagcatattcaggaggccttactacgtgtcccacttcctccccgccctgctcacacctcgagtgctccccaaagtccctgactcccgtgtggcgtttatagagtctctgaagagagcagataaaatccccccatctctgtactccacctactgccaggcctgctctgctgctgaagagaagccagaagatgcagccctgggagtgagggcagaacccaactctgctgaggagcccctgggacagctcacagctgcactgggagagctgagagcctccatgacagaccccagccagcgtgatgttatatcggcacaggtggcagtgatttctgaaagactgagggctgtcctgggccacaatgaggatgacagcagcgttgagatatcaaagattcagctcagcatcaacacgccgagactggagccacgggaacacatggctgtggacctcctgctgacgtctttctgtcagaacctgatggctgcctccagtgtcgctcccccggagaggcagggtccctgggctgccctcttcgtgaggaccatgtgtggacgtgtgctccctgcagtgctcacccggctctgccagctgctccgtcaccagggcccgagcctgagtgccccacatgtgctggggttggctgccctggccgtgcacctgggtgagtccaggtctgcgctcccagaggtggatgtgggtcctcctgcacctggtgctggccttcctgtccctgcgctctttgacagcctcctgacctgtaggacgagggattccttgttcttctgcctgaaattttgtacagcagcaatttcttactctctctgcaagttttcttcccagtcacgagatactttgtgcagctgcttatctccaggccttattaaaaagtttcagttcctcatgttcagattgttctcagaggcccgacagcctctttctgaggaggacgtagccagcctttcctggagacccttgcaccttccttctgcagactggcagagagctgccctctctctctggacacacagaaccttccgagaggtgttgaaagaggaagatgttcacttaacttaccaagactggttacacctggagctggaaattcaacctgaagctgatgctctttcagatactgaacggcaggacttccaccagtgggcgatccatgagcactttctccctgagtcctcggcttcagggggctgtgacggagacctgcaggctgcgtgtaccattcttgtcaacgcactgatggatttccaccaaagctcaaggagttatgaccactcagaaaattctgatttggtctttggtggccgcacaggaaatgaggatattatttccagattgcaggagatggtagctgacctggagctgcagcaagacctcatagtgcctctcggccacaccccttcccaggagcacttcctctttgagattttccgcagacggctccaggctctgacaagcgggtggagcgtggctgccagccttcagagacagagggagctgctaatgtacaaacggatcctcctccgcctgccttcgtctgtcctctgcggcagcagcttccaggcagaacagcccatcactgccagatgcgagcagttcttccacttggtcaactctgagatgagaaacttctgctcccacggaggtgccctgacacaggacatcactgcccacttcttcaggggcctcctgaacgcctgtctgcggagcagagacccctccctgatggtcgacttcatactggccaagtgccagacgaaatgccccttaattttgacctctgctctggtgtggtggccgagcctggagcctgtgctgctctgccggtggaggagacactgccagagcccgctgccccgggaactgcagaagctacaagaaggccggcagtttgccagcgatttcctctcccctgaggctgcctccccagcacccaacccggactggctctcagctgctgcactgcactttgcgattcaacaagtcagggaagaaaacatcaggaagcagctaaagaagctggactgcgagagagaggagctattggttttccttttcttcttctccttgatgggcctgctgtcgtcacatctgacctcaaatagcaccacagacctgccaaaggctttccacgtttgtgcagcaatcctcgagtgtttagagaagaggaagatatcctggctggcactctttcagttgacagagagtgacctcaggctggggcggctcctcctccgtgtggccccggatcagcacaccaggctgctgcctttcgctttttacagtcttctctcctacttccatgaagacgcggccatcagggaagaggccttcctgcatgttgctgtggacatgtacttgaagctggtccagctcttcgtggctggggatacaagcacagtttcacctccagctggcaggagcctggagctcaagggtcagggcaaccccgtggaactgataacaaaagctcgtctttttctgctgcagttaatacctcggtgcccgaaaaagagcttctcacacgtggcagagctgctggctgatcgtggggactgcgacccagaggtgagcgccgccctccagagcagacagcaggctgcccctgacgctgacctgtcccaggagcctcatctcttctgacgggacctgccactgcacaccagcccagctcccgtgtaaataatttattacaagcataacatggagctcttgttgcactaaaaagtggattacaaatctcctcgactgctttagtggggaaaggaatcaattatttatgaactgtccggccccgagtcactcagcgtttgcgggaaaataaaccactggtcccagagcagaggaaggctacttgagccggacaccaagcccgcctccagcaccaagggcgggcagcaccctccgaccctcccatgcgggtgcacacgaagggtgaggctgacacagccactgcggagtccaggctgctagaggtgctcatcctcactgccgtcctcaggtgggttcgggcttcaccgcctggccctctgtggtcacagaggggctcggtggcccaggtggtggttccgcctccaggggcagggccttgtcctgggtctgtgtcagcgggtgcaccatggacatgtgtacattgaggttgtgggccttctcaaaccgccggccacactggtcacaggcaaagtccagctcagtctcagccttgtgtttggtcatgtggtacttgagggatgcccgctgcctgcactggaacccacagacctcacacctgggggacagaggcagataagaaggtgcgagggccacagccctgggagggggtcctgactcacacttactgcaaaggcttggctcccgaatgtcgcatttggtggacgagaaggtgcttccgctgcttgaaggtttgtccacattcgtcacagatatagttccgcacctctgagaggggagagtccagtgagtccaggcccctgatgctccaacctcccggggggacgacgatgacaatgtgaaaccatcacagctgggaagacatttctgcacatggttcaccatgcagtgggcccaagcaaggggcctatgagggcctcgtttattaagatctttaaactgctttatacactgtcacgtggcttcatcagctgtgtgcatttcaggatggtttttaaagaaacctcagaaagctatttccttaa

SEQ ID NO: 11918 - DNA, 18284 bp, Homo sapiens
cgggcgcagggagccgccgccggggctgtaggcgccaaggccatgtccgactcgtgggtcccgaactccgcctcgggccaggacccagggggccgccggagggcctgggccgagctgctgggtaggtgggcgcggcaggccgcgggagtgggcggcgtccggcccgggacggtttcgccggttccccgatcccttcccgccagagcctccgccggtcggatccccggacgccgcgcccggggggctgtgcggggtgggcgcccggctggggcggcgcggctgcctcggacccggcccctcctgcgcctgggcggacgcccccagccgccgcccgcggggcgctcccttctttcccgaacgccgcccccgccggccgccctgtcaggcgggcctggggtgcgcggcctggggctcccctcagcgcagaggccgcccctcgccagccgtccccgggctcccctgcctcgggccctcctgggccgtcttccccggcgtccgcggtggggccgtctccgttagtttcccgagacctgcgccctggggaggagccccggcccctcttcgggagggtgtcgctggtgggtttctccgcggcgtccacctgcgcgtcgggccggggaccccgtgtgtgaattgtgctgtgatggtttcgaaccgacttctctccgtagcgggaagggtcaagagggaaaaatataatcctgaaagggcacagaaattaaaggaatcagctgtgcgcctcctgcgaagccatcaggacctgaatgcccttttgcttgaggtaagaggaagctggtgtccgtctgcgggcagatttaggttcggggtttttgagtccagccaccgcacagctttcctaagaaaacacccgaggcggcgggcgcggtggcctggcccgcagaggggagggtcgcctgagcccgggagttctggaccaacctgggcaacggggtgagaccccgcctcttttattaaaaacaaaacaacaacaacaaaaaaacaggccgggcgccgtggctcagggctgtaatcccagcttttggggaggccaaggcgggtggatcactcagggtcaggagttcgagaccagcctggccaacatagtgaaacccggtctctactgaaaatacaaaaattagctgggtgtggtggcgcacgcctttaatcccagctactcgggagcctgaggcaggagaattgcttgaacctggacccgggaggcagaaattgcagtgagccgagatcacgccccttgcaatccagtctggattacagagtgagactgtctcacaaaaaaaaaaaaaaaaaaaaaaaaaaaaaaagccgggcgtggtggctcacgcctgtaatcctagccctttgggaggccgaagtgggtagatcacttgaggttaggagttcgagaccagcctgaccaacatggtgaaaccccgtcactacttaaaatacaaaaattagccgggtatggtagcaggtgtctgtaatcccagctgctcaggaggctgaggcaggagaatcgcttgaacctgggaggtggaggtcgccgtgagtgagatcccgccattgcactccagcctggacgacagtgagactccctctcaaaaaagaaaaaaaggaaaatagcccagtagggaagcattacttacacacaggttgtgtttatgcacagatcttgaattttttttatttttattttttattttcatttattttttttgagacaaagtctcacactgtagcctgggctggtatgcagtggggtgatctcggctcactgcagcctccacctcccgggtttaagtgattctcccgtctcagcctcccgagtggctgggactacaggcacgcgccaccatgccctcctaatttttgtatttttagtagagacagggtttcactatgttggccaggctggtctcgaactcttgacctcgtgatctgcccatctcggcctcccaaagtactgggattacaggcgtgagccactacgcctggcctggagcttgaattttttaaatggagtttgttgtgttttggattctaggtagaaggtccactgtgtaaaaaattgtctctcagcaaagtgattgactgtgacagttctgaggcctatgctaatcattctagttcatttataggtaagttatagcttcattttctctattttgaattgcagaagggtttttatatagtaaccatagtttgctaaattaagtagaaatgtaaattttctcaggcgatgggtttccactggtgtgtgtagtcgcaaattctatgggatgtttgtgtgacttgctcttgggcttcttacgatgctgtgtttaaaaacagcgtctgattcaacctgcgactcagaagcagtaggacccagagtgtcccttggaaaaacatgggacatagcaacagcagggatgtgccccttgctcatggaagtagtgagacaggctgtggtgtgcccaggagagcagacgggagaacaattttctaggtacctccttctccccccagtttgagagtgggagatagggtaagttctgggtcaacaacagtaagttattttctgatccttcacgtccttatgtgatgacttgtttctgttaaaataaccttcagtaatagcgctcccttgacaactggtcactgaatgtcattggcaaatgatacagattttcactgccatgattgtatttgaatttcacaaattgcatattatcattccaaggaaccaagctcagccacacagataaacctttaattcattaatttttgagtttgtttttttctgctaaagatatagttagtacatgcacgcacgtgcacacggacacacacacacacacacacacacacagtaaaagacttgtagataaaaaaactttcctatggagacacattggaaacaaatgactagaaattggcattgttggcctggcacagtggctcacgcctataatcgcagcactttgggaggctgaggtgtgcggatcacctgaggtcaggattcgagacgagcctggccaacatggtgaaaccctgtctctactaaaaaacacaaaaattagccgggtgtggtggtgggtgcctgtagtcccagctattcaggaggctgaggcaggagaattgcttgaacgtgggaggcagaggttgcattgagccgagacccctccattgcactccagcctgggcaataagagcaaaactctgtctcagaacagaaaatggcattgtctacttttttttttttttttaacagacagggtctcactctgttgcctggactggagagccgtggtgcaatcacggctcactgcagtcttgacctcctggcctcaagtgatcctcccaccccagcatcttgagtagctgggactacaggtgtgcgccaccatgcctggctaattttttcatagagacagggttttgccatattgcccaggctggtctcaaactcctgagctcaagcaatcagtttacctcagccacccaaggtgttgggattgcaggcatgagccactgtgccccatctgtctacttttctaccgagaatttcaccagcagctgatgatttctcgtactataattttaagcttctagaactattgtaaaattttttttttttttttttgagacgaagtgttgctctgtcgcccaggctggagtgcaatggcgccatctcggctcactacaaactctgcctcctgggttcaagcaattctcctgcctcagcctcccgaatagctgggattataggtgcccgccgccgcacccagctaatttttgtatttttagtagaggcggggtttcaccatcttggccaggctggtctcaaactcctgacctcgtgatcgacccgcctcggcctcctgcagtgttgggattacaggcatgagccaccgcaaccagcctgtaaatgtttttacttatgtattgataatgtgtttttagagccagtacattacaataacaggttcgtactgcagttaacagttttttttttttttttttttttttgagacggagtattgctcttgttacccaggctggagtgcaatggtgtgatctcgactcaccgcaacctctgcctccctagttaaagtgattctcctgcctcagcctcctgagtagctggtattacaggcatgcaccaccacgcctggctaattttgtatttttagtagagatagggtttcaccatgttggtcaggctggtctcaaactcccgacctcaggtgatccacccgcctcggcctcccaaagtgctgggattacaggagggacccactgagcctggcctccagtttttttttgttttgtttttttgagatgaagtctggctctgtcgcccagactgcagtgtagtggcgtgatctcggctcactgcaaactccgcctcctgggttcacgccattcttcgcctcagcctcctgagtagctgggactacaggctcccgtcaccaaacctggctaattttgtttttgtgtctttagtagagacagggtttcaccgtgttagccaggatggtctcgatctcctgaccttgtaatccgcccgcctcggcctcccaaagtgctgggattacaggcgtgagccaccgtgcccggcccggtttctttaaacaattaattttggctcacgtggtggctcacacctgtaatcccagcagtatgggaggccgaggcgggcggattaatgaggttgggaattggagacgagcctagccaacatagtgaaaccccatctctactaaaaatacaaaaaattaactgggcgtagtgacgcgtgcctgtaatcccagctacttgggaggctgaggcaggagaatcgcttgaacctgagaggcggaggttgcagtgagctgagatggcgccgttgcacttcagtccaggcggcagtgtaagacaccattgcaaaaaaataaaacaaaaaaaaattaattttggaagacaaataaattagaaaatgatttcttggcattgcctgcttccaggttgcccaccgtttctcactttattgaatgcagaccagtggctggttgctcaggagaatggtggctgcctgcaggctgttagtgaggttccacttggtggcctgcggactgagcacagctgtgactgcacctgcccaccaggtgcatggcagaatgttgggaaatccctgcctaattttatcacaaccatcaatgtgagtcaacaggggcaggcttatctctgaagtaattagaaaaacaatgtaattgaaagagcctgctgcagttctcaatttattgtgctcctttgtaaaaagatgataaagttcttggtcagaatatatttctttatcttgctccttttgtgtcatgggaaacgtaacaaataccaatgtataactctgggttcaggtgttgccaccagttttattgtgagctgcttggatcatcaaattctcatttttatctcatgtttttccctttgcatctattctccccgtttaaaaggcaattttttttgtgctgcatcttaaaataaggcattttaaacagcaagtctttggttttagattttgtctcatgtgttaagagaaagctatggttttgttttgtgtttaaggctctgctttgcaggatcaagcctcaaggctgggggttcccgtgggtattctctcagccgggatggttgcctctagcgtgggacagatctgcacggctccagcggagaccagtcaccctgtgctgctgactgtggagcagagagtaagacaccagcaaagatgaggaaacctgcccgttgttacttttaagctggttgggaaaataggacatagctttagtattgtttcaggtaatttgttttttaaaaaatgtaatctctcttttcagaagaagctgtcttccctgttagagtttgctcagtatttattggcacacagtatgttctcccgtctttccttctgtcaagaattatggaaaatacaggtaaatttgagattgcaaatctgactctccagtgttccaggcaatgttctgttgatctggatggaggcaacagagtacctgggttttcttgggaattctccaagcttctcattaattacagagagtggatgaaaaagggtttagaaatcatctgtggattggaaagaagtaccttcaattgccattttttgtccctattcacctatcattagtaatatttattagactagaatatattgaaaaacacgtttagccttgggtatattagtatggagaattttccagggtagtatagtaaactattaaaaaaaaatgtatgtaatttttttttccagagacagggtctcgccttgttgcccaggctggtcttttttttttttttttgagacgaagtctcgctctgtcgcacaggctggagtgcagtggcgtgatcttggctcactgcaagccccacctcccaggttcacgccattctcctgcctcagcctcccgagtagctgggactacaggtgactgccaccacgcccagctaattttttgtattttttagcagagacggggtttcaccgtgttagccaggatggtctcgatctcctgacctcgtgatctgcccacctcggcctcccaaagtgctgggattacaagtgtgagccaccgcgcctggcatttatttttatttttgagacagaatattgctctgccgcccaggctggagtgcagtggcgcaatcttggctcactgcaacgtctgcctcccaggttcaagcgattgtcctgcctcagccaccttagtagctgggattacaggcgcgtgccaccatgcccagttaatttttgtatctttttttttttttgagatggagttttgctcttgttgcccaggctggagtgcaatggtgctatcttggcttatcgcaacgtccgcctcccgggttcacgccattctcccgcctcagcctcccgagtagctgggattacaggcatgcgccaccatgcctggctaattttttttgtatttttagtagagacggggtttctccatgttggtcaggctggtctcaaactcctgacctcagatgatctgcccacctcggcctcccaaagtgccgggattacaggtgtgagtcaccgcgccctgcccaatttttgtatctttagtagagatgaggtttcaccatgttggccaggctggtcttcaattcctgacctcaggtgatctgcccatcttggcctcccaagtgctgggattacaggtgtgagccactgcgtccggcctttcccattcttttatccagcatacattatagaattcattagatttttcagttattgctttggtccctgccctcattatcacgtagcttgggaaacaagccactaaatccacaagaagtgcgatgattcatgtgctcacagatttgcgaagaagatgttggacatgcatatcagattggagagttaggaaagccttcctgcacggactgtgaagagtgcgagttaggggccgggcccagtggctcacacctgtaatcccagcactttgggaggccgaggcaggtggatcatgaggtcaggagatcgagcccatcctggctaacacggtgaaaccccgtctctactaaaaaatagaaaaaattagccgggtgtggtggcaggcacctgtagtcccagctactcaggaggctgaggcaggagaatggcgtgaacccgggaggcagagcttacagtgacccgagatggcgccactgcactccagcctgggtgacagagcgcgactctgtctcaaaaaaaaaaaaatagagtgtgagttagggggatgagaaggggaggctgcagggagatcagggcagtgtgacaggcacagtgttcacagtgagtggctaaagcagatcctgttttatcaaatgggagagggttgagtgagaaagacaagggacatgcacagggcacactgaagcctgacctttgtcctggcagcttcgaggagccagtgaaggcttctgaaggagagactgtcatgtcagtgtgtgtaatactgtgttggctgtagtgtggagaaagggttagaagtaggctacagtgcgtaggaagagagaaggaagagaagcaagtgttgggcaacggtgtgtgggtgcccaaaggccagggagtttgaaaaccagtacagctttgtaaaaaaagatgtgtttcaggctctaagtttttgcttgaggttaattttcaatacggcatggttaagaacctaagttgaacattttgtaggaaaatgcattcataaaggactcagaatgctgggggtttttttgtttttgtttttgtttgttttgttttgtttttcagagttctttgttgcttgaagcggtgtggcatcttcacgtacaaggcattgtgagcctgcaagagctgctggaaaggtagcgtgctaatgatgattcagtgttactgtttttgcagtctagtctagtataaattatatttcaaagcccagaatcagacgggtttgatttctggctttgacatataatttgtactagactagattgcattgcatatttatactagactagacctggaggaactattgctttattatttcaagagaacgtttatggtgttttggttttgtttgctttttgtctgttttttttttgagacggagtctcgctctgtggcccaggtgggagtgcagtggcacgatttcagctcactacaacctccacctccagggttcaagcaattctcctgcctcagcctcccaagtcgctgggattacaggcgcccgccaccacacgcagctaatttttgttatgtatttattttttttagggacagagtctcgttctgtcacccaggctggagtgcagtgacgtgatgtcggctcactgcaggctccacctcccgggttcacgccattctcctgcctcagcttcccgagtagctgggactacaggcgtccgccaccacgcctggctaatttttgtatttttagtagagactgggtttcaccatgttagccaggatgggctccatctcctgacttcaggatctgcccgcctctgcctcccaaagcgctgggattacaggcatgaaccactgtgcctggcaatttttgttatttttagtagagatgtggtttcgccatgttagccaggctggtgtcaaactcctaacctcaggtgattcccctgcctcggcctcccaaagtgctgggattacaggcatgagccacctcgcgcggcctttttttttctttttgagacagagacctgctatgtcgccaggctggagtgcagtggtgagatctgggctcgctgcaacctccgcttcccggattcaagcaattctgcccctgcctcctcagtagctgggactacaggcgcgtgccaccacacccggctaatttttgtatgtttagtagagatggggtttcaccatgttggctaggctggtctcgaactcctgatcttgtgatcctcccgcctcggcctagagcagaatttcatctcaaaaaaaaaaaaaaaaagaaaaacctgcttcctaggatatacacatcttatctcagcaccaaaatctatgaagcaaaaatggccagaattaaagggagaagtagacatttcagcaataatcattagaggtttcaatactcccctttcagtaatgggtagaacaagttagattaagaatgatatagaacagccgccccgtccgggagggaggtgggggagtcagccccccgcccggccagccgccctgtccaggaggtgaggggcgcctctgcccggccgcccatactgggaagtgaggagcccctctacccggccaccaccccgtctgggaggtgtacccaacagctcattgagaacgggccatgatgacaatggcggttttatggaatacaaaggggggaagggtggggaaaagattgcgaaatcagatggttgctgtgtctgtgtagaaagaagtagacacgggagacttttcattttgttctgtactaagagaaattcttctgccttgggatcctgttgatctgtgaccttgcccccaaccctgtgctctctgaaacatgtgctgtgtccactcagggttaaatggattaagggcggtgcaagatatgctttgttaaacagatgcttgaaggcagcatgctcgttaagagtcatcaccactccctaatctcaagtacccagggacacaaacactgcagaaggcctcagggtcctctgcctaggaaaaccagagacctttgttcacttgtttatctgctgaccttccctccaccattgtcctatgaccctgccaaatccccctctgcgagaaacacccaagaatgatcaattaaaaaaaaaaaaaaaaaaaagaatgatatagaagttgaatgctgcaaaccagctgacctgactgactgtggagcactctacccagtagtagcagagtgtgtattcgtaagtccaaatggaacagtccccaggatacagcataaggttcaggccaaggccaggtgcggtggctcacacctgtaatcccagcactttgggaggctgaggcgggcagatcacctgaggtcaggagttcaagaccagcctgtccaacgtggtgaaaccctgtctctactaaaattacaaaaattagctgggcaaggtggcaggtgcctgtaatcccagccgttgtggaggctgaggcaggagaatcgcttgaacttgggaggcggaggttgtagtgagctgagattgtgccattgcactccagcctggatgacaagagcaaaactgtttcaagagaaaaaaaaaaggttcaggccataaaacaaagaggaataaatttagaagggctgaaatcattcaaaatatgttctctaaccacaaatgaatttaattagaataaacaacagaagggaattgggaaaatccacaatatttgaaagttaacataatgagtcaaagaagtcacaagggaaattagaaaataacttgagactgggcacagtgccacaccagtcatcccagcactttgggagggcaaggtgggagattgttttgagcccgggagtttgagtccagcctgggcaaagtagtaagacctccagctgggcgtggtggtatgcgcctgttgtcccaactactcaggaggctgaggtggaaggattgcttgagcctgggaggtcgagggtgcagtgactgattgcgccactgcactccagcctcagtgacagcaaaaaactgtctcaaaaaaaaaattgggacatatggctcaactcaatcccctgatgatgggatttagttgagccttacgtctgcctctgtgtgtgtctccagccatcccgacatgcatgctgtgggatcgtggctcttcaggaatctgtgctgcctttgtgaacagatggaagcatcctgccagcatgctgacgtcgccagggccatgctttctggtgcgttcatgacaagatgcgggttcttgggtaaaactcattttgatctgtgataatgccttctgctctcaagagctctgcgaggcagaacagcctgtctctccgtggccgtgggaacctggcatgacagactcccagtctcagcctgttgtggggttgcattttacttgactgatgtggaaatactagtaagtcggccttgacatgagtttaagtgtttccattcacctttcccatagagtgaccgcagctgcttccttctgtcgcccaggctggagtacagtggcgcgatctcagctcactgcaacctccgcctcctgggttcaagtgattctctgcctcaacctccttagtagctgggactgcaggcacgtggcaccatgcccggctaattttttttttgtatttttagtagagacggggtttcattaggttggccaggctgctcttgaactcctgacctcgtgatgcacccccctcggcctcccaaagtgctgggattataggcgtgagccactatgcctggccttcctgaggaatgatattatgagaaaaacttgggactgtaatgtccccccacaaactaagaaggtgctgagagaccagaggatggctcagactagggaccaacccagtttgaggagtagttgggtttgtcagaagatggcttggaccagagtccagcttgaggagtagttgggcttgtcagaggatggctcggaccagagtccagcttgaggagtagttgggcttgtcagagaatggcttggaccaatccagcttgaggagtagttgggtttgtcaggacttatattcagcgcactcctggacggcggcaggacagctctagagaaccgccccaccacctgtctctaaggtgcattgaagctcgttttctggctctttgcctgctgtgtttgagtgatgagactcttttccttggtgagttctcagatcctctctgggatatttgggttctgaggaacacctgctgggagacccatcccactacaagtgacacctacaaataaaaattagatgagaaactgatctgtacagtagcttgtgggttttttcctttttcctaaagctttttggtggcatgagcgacttagcattcctgagctactataacctggtaccagataggttaaatttaaatcaaagttagaaaatcttgtggatttcagtcctcttggtcttattttttaaaaagctaagaatgcctttcctcccccatcacattcctcagaataggatgcttctgggtccctctagaccctctggtattggagattggcaggcaagacaatccataagacctcccttggaaaccacttttatttaagagaaaaaaattgggctgggtggggtgactcatgccagtaatcccagcactttgggaggccaaggcaggtggatcatgaggtcaggagttcaagaccaacctggccaagatggtgaaaccccatctctactaaaaatacaaaaattagctgggtgtggtggcggcgcctatattcccagctactggtgaggctgaggcagagaattgcttgaacctgggaggcggaggttgcagtgagcgagatcataccattgcactcaagcccaggcgacagagcaagcctccgtctcacaaaaaaaaaaaaaaagaaaaaaatctgactataaacttgttccctttcaaatagaagtgcaagaggaaaaaatctggttcatctaagggtcctgattgggtttggtgaacgctagtgtagctgtggtcaggtgagcagtaacttctgcagcgttcctcaggttaggagcagctcacaggggtcctggtgggcccaagccatatgctcacccgcccctctgaagtggatggtctgtgccattcacagttgcttggagaccatgatgtccataaataactttggttttatggtttttcagattttgttcaaatgtttgttttgaggggatttcagaaaaactcagatctgagaagaactgtggagcctgaaaaaatgccgcaggtaggaggaaaagtcaagtgaagagtttagcggaaggagccgtccttattccaagtgttgaaatgtatttacgtgtctctctattgaaacgtgctgtttgtacctatttacggggtacatgtgatacttgttttgtgcatagagtgtaatgatcaagtcagggtgtttagagtctccgtcacctccagtatgtatcatttctgtgtgttggcaacatttcacatgttgcagttactttgaaatatacaatctgttgttaactatagccgcctcactctgctgtggaacattagaacttacttcttctgtctagctgtatgtttgtacccattaaccaactctcttcgttcccccactgcatatacccttctcatctctggtatctctcgttctactctctacctccacaagagccactttttagctcccacatatttgtgataacatgcaatatttgtccttctgtgcctggcttatttcacttaacataatggccttcagttgcattcctgttgctgtgaatgacaggatttcactttaaaaaaaaagaatagctggccgggcatggtggctcatgcctgtaatcccagcactttgggaggacgaggcgggcggatcacaaggtcaggagatcgagaccatcctggctaacatggtaaaatcccgtctctactaaaaaaatagaaaaaattagccgggcctggtggcaggcacctgtggacccagccactcaggaggctgaggcaggagaatggcgtgaaacctggaggcggagcttgcagtgagcccagatcgtgtcactgtattccagcctaggcgacagagactccatctcagaaaaagaaaaaaatagctgaggttgggctcaatggctcatgcctataatccagcactttgggaggctgagactggtggatcccctgaggtcaggagttcaagaccagcctgaccaacatggtgaaaccctgtctctagtaaaaaaaaaaaaaaaatagccgggcgtggtggcacatgcctgtagtcccagctacaggcgtggaggcaggagaattgcttgaacccaggaggcggaggttgcagtgagccaagattgcgccttgcactctagcctgggtgacagagcgagactccgttaaagctgaccagtattccgttgtgtgtatataccacgttttctgtatccggtcatctcttgttgggcacacaggttgatttcatatcttggctattgttaatagtgccacaataaatgtaggagtacagatgtctcttcagctggctgatttcctttcctttggctgtaagcccagtaatgggattgctggatcatatggcagttctggttttttttttgtttttttgtgtttttttgagacggtgtctctctctgttgctcaggctagagtgcagtggcgcgatttcggctcactgcaacctctgcctcccaggttcaaccgattctcctgcctcagcctcccgaatagctgggattacaggcatgcaccaccatgcccagctaatttttgtatttttagtagaggtgaggtttcactctgttggctaggatggtctcgatctcttgacctcatgatctgcctgccttggcctcctgaagtgctgggattacagatgtgatccaccatgcctggtgaaagtgagaccctctgggctggtagttctgtttttagaactacccaactatttagaaatctccatactattttccataatggctgtattaatttacattctcactgatagcatataagagttctgtttgcattctcaccagcatttgttattttttgttttcttgataatgataattctaactggagtgaaataatagctcattgtggctttgacttgtatttccctgatgattagtgacattggcttttttttttttttttttgagacagagtcttgctctgtcgcccgggctggagtgcagtggcgcgatctcggctcactgcaagctccgcctccggggttcacgccattctcctgcctcagcctcctgaatagctgggactacaggcgcccaccaccactcccggctagtttttctatttttagtagagatgggctttcacagtgttggtcaggctggtctcgaacttctgatctcatgacccgcccaccttggcctctcaaagtgttgggattataggcgtgggctaccgtgcctggcctttttttttcttttttcttttttttttttttgagatggagtcttgctctgtctcccaggctggagtgcagtggtgccatcttggttcactgcaagctccgcctaccgggttcaagctattctcctgcctcagtctcccgagtagctgggactatagacacccgccaccgcacctagctaatttttttgtatttttagtagagacagggtttcaccttgttggtcaggctggtctagaactcctgacctcaggtgatccacccacctcgacttccgaaagtgctgggattacaggcgtgggccacagttcccggcctgtttctgggttctctatcctgttccgttggtctgtgtgtatgtttatatcaacctcatgctgttttcatttctgtagcctcgtagtatattttgacctcaggcagtgtgatttctatattctatagctttgttctttttcctcaggattgctttgcttatctgtgttctattttggttccatgtgaattttagaatctttttttctatttctgggaagaacgttattggtattttgatagggattgcattgaatctgtagatagttttggatacgtcccaaatttttattcccttttggaggttcctgagccagtggctcccattttgcctacactgcagtctgtgggctttgtttgaggaagtctgttttattgttaccatgagttgctctctgagtagtggtatgctttaagcccaggagatgtgaagaagggaaatggacaatggtaccttctcaccgtcttctggctccagaggcatcaagggtgaaagtccttagttccacagcccagattcaaggcctgagctttcctctcttcactgaagtacttcagcaaaactctgcgtgcaaaagtgtcctgcccagccctaggctcatggcctcaggccatgctgagagcagtcttagggtaattccagaaagttcagccttttcactctgtctaggtcccttcggtactggagtaatttctaggtctatgagggtttttaaagttgatctctttgtaaagtccatttctttttcttttttccgagacggagtctggctctttcgcccgggccggactgcagtggcactatctcagctcactggaagctctgcctcccgggttcacgccattctcctgcctcagcctcccgagtagctgagactacagggcgtccgccactgcgcccggctaattttttgtatttttagtagagacggggtttcaccatgttagccaggatggtctcgatctcctgacctcgtgatccgcccgcctcggcctcctgaagtgccgtttctttactttagagtaacaagtaataattctcttgtgtgatgcaggtatcacacaaattacagaagattaccaagatggtaactcacattctattttgacaggtcacggttgatgtactgcagagaatgctgatttgtaagttaattgcactgcagcccagactgtaaatgacttagtttgcttattagcaattgtatcagttttctgcctttccatttgaggtatttctcctctgtatgtttcactgtgcagagtcctggtactggaatgcccttgttttggcattttcagagctgtgaagggatacctcatgaatctgtgggtcacagggaagcattttcttgtctgtgtgttttgattaaggcctacagattgtagaagtcttgatggatgtgggccctctggggggttgaagtggatctgttgtctgaaagcgcctggggattgtttctggtgggctgccgccgtgtgctgacatctgttttctgttcctggctctgtcttcagttgcacttgacgctttggctgctggagtacaggaggagtcctccactcacaagatcgtgaggtgctggtatgttcctgagggtggcctgcctgagtgtgcagcagggaggtgtctgccaaattaaagagccaagatattttaaacacttccagagcttcagcagcccgctcctgagcacacttcctctgccagttacgataacgtgcgtgaggaggaggcgaccatgggaaagcccggggaacgctctggtcagccttttcctgtgaggatgaggtcggaaggtgcgcccactgcagtatcctgttccgcctctggaagtcctgcaccaatgtttgtcccactcactgtgacctcctcctgtgtggagtctccccttgctcctccttccctgggtgtgattcaggctctagagctggccctgcctctcagccccccacatttctagaacacactgtagctgtgcctctacagactcccgctgcctggcctccacagatcctgctcagattcaccagtaggcaaagcttggccctattagctttttctctccatggctctgtggagatgtgcggagacccttacaggtcgggaggcggaagctgaggagtgggggctgggtggaaggtggacatcggggtttggtggaaatggggctctggggtttgcttccctctagtgtgggcaggggaccttgaagtgaagtcttgagaaaccagtagaatttgccactgtttccaggccttgtcaaccttttcattctttattttgctcctcatttcccatccctcacagtaactgtttaactgctcaattaaatgtgttgtaccgttcggtacttttactgaaacagtgaataaa

SEQ ID NO: 11919 - DNA, 1641 bp, Homo sapiens
cgggcgcagggagccgccgccggggctgtaggcgccaaggccatgtccgactcgtgggtcccgaactccgcctcgggccaggacccagggggccgccggagggcctgggccgagctgctggcgggaagggtcaagagggaaaaatataatcctgaaagggcacagaaattaaaggaatcagctgtgcgcctcctgcgaagccatcaggacctgaatgcccttttgcttgaggtagaaggtccactgtgtaaaaaattgtctctcagcaaagtgattgactgtgacagttctgaggcctatgctaatcattctagttcatttataggctctgctttgcaggatcaagcctcaaggctgggggttcccgtgggtattctctcagccgggatggttgcctctagcgtgggacagatctgcacggctccagcggagaccagtcaccctgtgctgctgactgtggagcagagaaagaagctgtcttccctgttagagtttgctcagtatttattggcacacagtatgttctcccgtctttccttctgtcaagaattatggaaaatacagagttctttgttgcttgaagcggtgtggcatcttcacgtacaaggcattgtgagcctgcaagagctgctggaaagccatcccgacatgcatgctgtgggatcgtggctcttcaggaatctgtgctgcctttgtgaacagatggaagcatcctgccagcatgctgacgtcgccagggccatgctttctgattttgttcaaatgtttgttttgaggggatttcagaaaaactcagatctgagaagaactgtggagcctgaaaaaatgccgcaggtcacggttgatgtactgcagagaatgctgatttttgcacttgacgctttggctgctggagtacaggaggagtcctccactcacaagatcgtgaggtgctgagcttcagcagcccgctcctgagcacacttcctctgccagttacgataacgtgcgtgaggaggaggcgaccatgggaaagcccggggaacgctctggtcagccttttcctgtgaggatgaggtcggaaggtgcgcccactgcagtatcctgttccgcctctggaagtcctgcaccaatgtttgtcccactcactgtgacctcctcctgtgtggagtctccccttgctcctccttccctgggtgtgattcaggctctagagctggccctgcctctcagccccccacatttctagaacacactgtagctgtgcctctacagactcccgctgcctggcctccacagatcctgctcagattcaccagtaggcaaagcttggccctattagctttttctctccatggctctgtggagatgtgcggagacccttacaggtcgggaggcggaagctgaggagtgggggctgggtggaaggtggacatcggggtttggtggaaatggggctctggggtttgcttccctctagtgtgggcaggggaccttgaagtgaagtcttgagaaaccagtagaatttgccactgtttccaggccttgtcaaccttttcattctttattttgctcctcatttcccatccctcacagtaactgtttaactgctcaattaaatgtgttgtaccgttcggtacttttactgaaacagtgaataaa

SEQ ID NO: 11920 - DNA, 17737 bp, Homo sapiens
ggcgcagggagccgccgccggggctgtaggcgccaaggccatgtccgactcgtgggtcccgaactccgcctcgggccaggacccagggggccgccggagggcctgggccgagctgctgggtaggtgggcgcggcaggccgcgggagtgggcggcgtccggcccgggacggtttcgccggttccccgatcccttcccgccagagcctccgccggtcggatccccggacgccgcgcccggggggctgtgcggggtgggcgcccggctggggcggcgcggctgcctcggacccggcccctcctgcgcctgggcggacgcccccagccgccgcccgcggggcgctcccttctttcccgaacgccgcccccgccggccgccctgtcaggcgggcctggggtgcgcggcctggggctcccctcagcgcagaggccgcccctcgccagccgtccccgggctcccctgcctcgggccctcctgggccgtcttccccggcgtccgcggtggggccgtctccgttagtttcccgagacctgcgccctggggaggagccccggcccctcttcgggagggtgtcgctggtgggtttctccgcggcgtccacctgcgcgtcgggccggggaccccgtgtgtgaattgtgctgtgatggtttcgaaccgacttctctccgtagcgggaagggtcaagagggaaaaatataatcctgaaagggcacagaaattaaaggaatcagctgtgcgcctcctgcgaagccatcaggacctgaatgcccttttgcttgaggtaagaggaagctggtgtccgtctgcgggcagatttaggttcggggtttttgagtccagccaccgcacagctttcctaagaaaacacccgaggcggcgggcgcggtggcctggcccgcagaggggagggtcgcctgagcccgggagttctggaccaacctgggcaacggggtgagaccccgcctcttttattaaaaacaaaacaacaacaacaaaaaaacaggccgggcgccgtggctcagggctgtaatcccagcttttggggaggccaaggcgggtggatcactcagggtcaggagttcgagaccagcctggccaacatagtgaaacccggtctctactgaaaatacaaaaattagctgggtgtggtggcgcacgcctttaatcccagctactcgggagcctgaggcaggagaattgcttgaacctggacccgggaggcagaaattgcagtgagccgagatcacgccccttgcaatccagtctggattacagagtgagactgtctcacaaaaaaaaaaaaaaaaaaaaaaaaaaaaaaagccgggcgtggtggctcacgcctgtaatcctagccctttgggaggccgaagtgggtagatcacttgaggttaggagttcgagaccagcctgaccaacatggtgaaaccccgtcactacttaaaatacaaaaattagccgggtatggtagcaggtgtctgtaatcccagctgctcaggaggctgaggcaggagaatcgcttgaacctgggaggtggaggtcgccgtgagtgagatcccgccattgcactccagcctggacgacagtgagactccctctcaaaaaagaaaaaaaggaaaatagcccagtagggaagcattacttacacacaggttgtgtttatgcacagatcttgaattttttttatttttattttttattttcatttattttttttgagacaaagtctcacactgtagcctgggctggtatgcagtggggtgatctcggctcactgcagcctccacctcccgggtttaagtgattctcccgtctcagcctcccgagtggctgggactacaggcacgcgccaccatgccctcctaatttttgtatttttagtagagacagggtttcactatgttggccaggctggtctcgaactcttgacctcgtgatctgcccatctcggcctcccaaagtactgggattacaggcgtgagccactacgcctggcctggagcttgaattttttaaatggagtttgttgtgttttggattctaggtagaaggtccactgtgtaaaaaattgtctctcagcaaagtgattgactgtgacagttctgaggcctatgctaatcattctagttcatttataggtaagttatagcttcattttctctattttgaattgcagaagggtttttatatagtaaccatagtttgctaaattaagtagaaatgtaaattttctcaggcgatgggtttccactggtgtgtgtagtcgcaaattctatgggatgtttgtgtgacttgctcttgggcttcttacgatgctgtgtttaaaaacagcgtctgattcaacctgcgactcagaagcagtaggacccagagtgtcccttggaaaaacatgggacatagcaacagcagggatgtgccccttgctcatggaagtagtgagacaggctgtggtgtgcccaggagagcagacgggagaacaattttctaggtacctccttctccccccagtttgagagtgggagatagggtaagttctgggtcaacaacagtaagttattttctgatccttcacgtccttatgtgatgacttgtttctgttaaaataaccttcagtaatagcgctcccttgacaactggtcactgaatgtcattggcaaatgatacagattttcactgccatgattgtatttgaatttcacaaattgcatattatcattccaaggaaccaagctcagccacacagataaacctttaattcattaatttttgagtttgtttttttctgctaaagatatagttagtacatgcacgcacgtgcacacggacacacacacacacacacacacacacagtaaaagacttgtagataaaaaaactttcctatggagacacattggaaacaaatgactagaaattggcattgttggcctggcacagtggctcacgcctataatcgcagcactttgggaggctgaggtgtgcggatcacctgaggtcaggattcgagacgagcctggccaacatggtgaaaccctgtctctactaaaaaacacaaaaattagccgggtgtggtggtgggtgcctgtagtcccagctattcaggaggctgaggcaggagaattgcttgaacgtgggaggcagaggttgcattgagccgagacccctccattgcactccagcctgggcaataagagcaaaactctgtctcagaacagaaaatggcattgtctacttttttttttttttttaacagacagggtctcactctgttgcctggactggagagccgtggtgcaatcacggctcactgcagtcttgacctcctggcctcaagtgatcctcccaccccagcatcttgagtagctgggactacaggtgtgcgccaccatgcctggctaattttttcatagagacagggttttgccatattgcccaggctggtctcaaactcctgagctcaagcaatcagtttacctcagccacccaaggtgttgggattgcaggcatgagccactgtgccccatctgtctacttttctaccgagaatttcaccagcagctgatgatttctcgtactataattttaagcttctagaactattgtaaaattttttttttttttttttgagacgaagtgttgctctgtcgcccaggctggagtgcaatggcgccatctcggctcactacaaactctgcctcctgggttcaagcaattctcctgcctcagcctcccgaatagctgggattataggtgcccgccgccgcacccagctaatttttgtatttttagtagaggcggggtttcaccatcttggccaggctggtctcaaactcctgacctcgtgatcgacccgcctcggcctcctgcagtgttgggattacaggcatgagccaccgcaaccagcctgtaaatgtttttacttatgtattgataatgtgtttttagagccagtacattacaataacaggttcgtactgcagttaacagttttttttttttttttttttttttgagacggagtattgctcttgttacccaggctggagtgcaatggtgtgatctcgactcaccgcaacctctgcctccctagttaaagtgattctcctgcctcagcctcctgagtagctggtattacaggcatgcaccaccacgcctggctaattttgtatttttagtagagatagggtttcaccatgttggtcaggctggtctcaaactcccgacctcaggtgatccacccgcctcggcctcccaaagtgctgggattacaggagggacccactgagcctggcctccagtttttttttgttttgtttttttgagatgaagtctggctctgtcgcccagactgcagtgtagtggcgtgatctcggctcactgcaaactccgcctcctgggttcacgccattcttcgcctcagcctcctgagtagctgggactacaggctcccgtcaccaaacctggctaattttgtttttgtgtctttagtagagacagggtttcaccgtgttagccaggatggtctcgatctcctgaccttgtaatccgcccgcctcggcctcccaaagtgctgggattacaggcgtgagccaccgtgcccggcccggtttctttaaacaattaattttggctcacgtggtggctcacacctgtaatcccagcagtatgggaggccgaggcgggcggattaatgaggttgggaattggagacgagcctagccaacatagtgaaaccccatctctactaaaaatacaaaaaattaactgggcgtagtgacgcgtgcctgtaatcccagctacttgggaggctgaggcaggagaatcgcttgaacctgagaggcggaggttgcagtgagctgagatggcgccgttgcacttcagtccaggcggcagtgtaagacaccattgcaaaaaaataaaacaaaaaaaaattaattttggaagacaaataaattagaaaatgatttcttggcattgcctgcttccaggttgcccaccgtttctcactttattgaatgcagaccagtggctggttgctcaggagaatggtggctgcctgcaggctgttagtgaggttccacttggtggcctgcggactgagcacagctgtgactgcacctgcccaccaggtgcatggcagaatgttgggaaatccctgcctaattttatcacaaccatcaatgtgagtcaacaggggcaggcttatctctgaagtaattagaaaaacaatgtaattgaaagagcctgctgcagttctcaatttattgtgctcctttgtaaaaagatgataaagttcttggtcagaatatatttctttatcttgctccttttgtgtcatgggaaacgtaacaaataccaatgtataactctgggttcaggtgttgccaccagttttattgtgagctgcttggatcatcaaattctcatttttatctcatgtttttccctttgcatctattctccccgtttaaaaggcaattttttttgtgctgcatcttaaaataaggcattttaaacagcaagtctttggttttagattttgtctcatgtgttaagagaaagctatggttttgttttgtgtttaaggctctgctttgcaggatcaagcctcaaggctgggggttcccgtgggtattctctcagccgggatggttgcctctagcgtgggacagatctgcacggctccagcggagaccagtcaccctgtgctgctgactgtggagcagagagtaagacaccagcaaagatgaggaaacctgcccgttgttacttttaagctggttgggaaaataggacatagctttagtattgtttcaggtaatttgttttttaaaaaatgtaatctctcttttcagaagaagctgtcttccctgttagagtttgctcagtatttattggcacacagtatgttctcccgtctttccttctgtcaagaattatggaaaatacaggtaaatttgagattgcaaatctgactctccagtgttccaggcaatgttctgttgatctggatggaggcaacagagtacctgggttttcttgggaattctccaagcttctcattaattacagagagtggatgaaaaagggtttagaaatcatctgtggattggaaagaagtaccttcaattgccattttttgtccctattcacctatcattagtaatatttattagactagaatatattgaaaaacacgtttagccttgggtatattagtatggagaattttccagggtagtatagtaaactattaaaaaaaaatgtatgtaatttttttttccagagacagggtctcgccttgttgcccaggctggtcttttttttttttttttgagacgaagtctcgctctgtcgcacaggctggagtgcagtggcgtgatcttggctcactgcaagccccacctcccaggttcacgccattctcctgcctcagcctcccgagtagctgggactacaggtgactgccaccacgcccagctaattttttgtattttttagcagagacggggtttcaccgtgttagccaggatggtctcgatctcctgacctcgtgatctgcccacctcggcctcccaaagtgctgggattacaagtgtgagccaccgcgcctggcatttatttttatttttgagacagaatattgctctgccgcccaggctggagtgcagtggcgcaatcttggctcactgcaacgtctgcctcccaggttcaagcgattgtcctgcctcagccaccttagtagctgggattacaggcgcgtgccaccatgcccagttaatttttgtatctttttttttttttgagatggagttttgctcttgttgcccaggctggagtgcaatggtgctatcttggcttatcgcaacgtccgcctcccgggttcacgccattctcccgcctcagcctcccgagtagctgggattacaggcatgcgccaccatgcctggctaattttttttgtatttttagtagagacggggtttctccatgttggtcaggctggtctcaaactcctgacctcagatgatctgcccacctcggcctcccaaagtgccgggattacaggtgtgagtcaccgcgccctgcccaatttttgtatctttagtagagatgaggtttcaccatgttggccaggctggtcttcaattcctgacctcaggtgatctgcccatcttggcctcccaagtgctgggattacaggtgtgagccactgcgtccggcctttcccattcttttatccagcatacattatagaattcattagatttttcagttattgctttggtccctgccctcattatcacgtagcttgggaaacaagccactaaatccacaagaagtgcgatgattcatgtgctcacagatttgcgaagaagatgttggacatgcatatcagattggagagttaggaaagccttcctgcacggactgtgaagagtgcgagttaggggccgggcccagtggctcacacctgtaatcccagcactttgggaggccgaggcaggtggatcatgaggtcaggagatcgagcccatcctggctaacacggtgaaaccccgtctctactaaaaaatagaaaaaattagccgggtgtggtggcaggcacctgtagtcccagctactcaggaggctgaggcaggagaatggcgtgaacccgggaggcagagcttacagtgacccgagatggcgccactgcactccagcctgggtgacagagcgcgactctgtctcaaaaaaaaaaaaatagagtgtgagttagggggatgagaaggggaggctgcagggagatcagggcagtgtgacaggcacagtgttcacagtgagtggctaaagcagatcctgttttatcaaatgggagagggttgagtgagaaagacaagggacatgcacagggcacactgaagcctgacctttgtcctggcagcttcgaggagccagtgaaggcttctgaaggagagactgtcatgtcagtgtgtgtaatactgtgttggctgtagtgtggagaaagggttagaagtaggctacagtgcgtaggaagagagaaggaagagaagcaagtgttgggcaacggtgtgtgggtgcccaaaggccagggagtttgaaaaccagtacagctttgtaaaaaaagatgtgtttcaggctctaagtttttgcttgaggttaattttcaatacggcatggttaagaacctaagttgaacattttgtaggaaaatgcattcataaaggactcagaatgctgggggtttttttgtttttgtttttgtttgttttgttttgtttttcagagttctttgttgcttgaagcggtgtggcatcttcacgtacaaggcattgtgagcctgcaagagctgctggaaaggtagcgtgctaatgatgattcagtgttactgtttttgcagtctagtctagtataaattatatttcaaagcccagaatcagacgggtttgatttctggctttgacatataatttgtactagactagattgcattgcatatttatactagactagacctggaggaactattgctttattatttcaagagaacgtttatggtgttttggttttgtttgctttttgtctgttttttttttgagacggagtctcgctctgtggcccaggtgggagtgcagtggcacgatttcagctcactacaacctccacctccagggttcaagcaattctcctgcctcagcctcccaagtcgctgggattacaggcgcccgccaccacacgcagctaatttttgttatgtatttattttttttagggacagagtctcgttctgtcacccaggctggagtgcagtgacgtgatgtcggctcactgcaggctccacctcccgggttcacgccattctcctgcctcagcttcccgagtagctgggactacaggcgtccgccaccacgcctggctaatttttgtatttttagtagagactgggtttcaccatgttagccaggatgggctccatctcctgacttcaggatctgcccgcctctgcctcccaaagcgctgggattacaggcatgaaccactgtgcctggcaatttttgttatttttagtagagatgtggtttcgccatgttagccaggctggtgtcaaactcctaacctcaggtgattcccctgcctcggcctcccaaagtgctgggattacaggcatgagccacctcgcgcggcctttttttttctttttgagacagagacctgctatgtcgccaggctggagtgcagtggtgagatctgggctcgctgcaacctccgcttcccggattcaagcaattctgcccctgcctcctcagtagctgggactacaggcgcgtgccaccacacccggctaatttttgtatgtttagtagagatggggtttcaccatgttggctaggctggtctcgaactcctgatcttgtgatcctcccgcctcggcctagagcagaatttcatctcaaaaaaaaaaaaaaaaagaaaaacctgcttcctaggatatacacatcttatctcagcaccaaaatctatgaagcaaaaatggccagaattaaagggagaagtagacatttcagcaataatcattagaggtttcaatactcccctttcagtaatgggtagaacaagttagattaagaatgatatagaacagccgccccgtccgggagggaggtgggggagtcagccccccgcccggccagccgccctgtccaggaggtgaggggcgcctctgcccggccgcccatactgggaagtgaggagcccctctacccggccaccaccccgtctgggaggtgtacccaacagctcattgagaacgggccatgatgacaatggcggttttatggaatacaaaggggggaagggtggggaaaagattgcgaaatcagatggttgctgtgtctgtgtagaaagaagtagacacgggagacttttcattttgttctgtactaagagaaattcttctgccttgggatcctgttgatctgtgaccttgcccccaaccctgtgctctctgaaacatgtgctgtgtccactcagggttaaatggattaagggcggtgcaagatatgctttgttaaacagatgcttgaaggcagcatgctcgttaagagtcatcaccactccctaatctcaagtacccagggacacaaacactgcagaaggcctcagggtcctctgcctaggaaaaccagagacctttgttcacttgtttatctgctgaccttccctccaccattgtcctatgaccctgccaaatccccctctgcgagaaacacccaagaatgatcaattaaaaaaaaaaaaaaaaaaaagaatgatatagaagttgaatgctgcaaaccagctgacctgactgactgtggagcactctacccagtagtagcagagtgtgtattcgtaagtccaaatggaacagtccccaggatacagcataaggttcaggccaaggccaggtgcggtggctcacacctgtaatcccagcactttgggaggctgaggcgggcagatcacctgaggtcaggagttcaagaccagcctgtccaacgtggtgaaaccctgtctctactaaaattacaaaaattagctgggcaaggtggcaggtgcctgtaatcccagccgttgtggaggctgaggcaggagaatcgcttgaacttgggaggcggaggttgtagtgagctgagattgtgccattgcactccagcctggatgacaagagcaaaactgtttcaagagaaaaaaaaaaggttcaggccataaaacaaagaggaataaatttagaagggctgaaatcattcaaaatatgttctctaaccacaaatgaatttaattagaataaacaacagaagggaattgggaaaatccacaatatttgaaagttaacataatgagtcaaagaagtcacaagggaaattagaaaataacttgagactgggcacagtgccacaccagtcatcccagcactttgggagggcaaggtgggagattgttttgagcccgggagtttgagtccagcctgggcaaagtagtaagacctccagctgggcgtggtggtatgcgcctgttgtcccaactactcaggaggctgaggtggaaggattgcttgagcctgggaggtcgagggtgcagtgactgattgcgccactgcactccagcctcagtgacagcaaaaaactgtctcaaaaaaaaaattgggacatatggctcaactcaatcccctgatgatgggatttagttgagccttacgtctgcctctgtgtgtgtctccagccatcccgacatgcatgctgtgggatcgtggctcttcaggaatctgtgctgcctttgtgaacagatggaagcatcctgccagcatgctgacgtcgccagggccatgctttctggtgcgttcatgacaagatgcgggttcttgggtaaaactcattttgatctgtgataatgccttctgctctcaagagctctgcgaggcagaacagcctgtctctccgtggccgtgggaacctggcatgacagactcccagtctcagcctgttgtggggttgcattttacttgactgatgtggaaatactagtaagtcggccttgacatgagtttaagtgtttccattcacctttcccatagagtgaccgcagctgcttccttctgtcgcccaggctggagtacagtggcgcgatctcagctcactgcaacctccgcctcctgggttcaagtgattctctgcctcaacctccttagtagctgggactgcaggcacgtggcaccatgcccggctaattttttttttgtatttttagtagagacggggtttcattaggttggccaggctgctcttgaactcctgacctcgtgatgcacccccctcggcctcccaaagtgctgggattataggcgtgagccactatgcctggccttcctgaggaatgatattatgagaaaaacttgggactgtaatgtccccccacaaactaagaaggtgctgagagaccagaggatggctcagactagggaccaacccagtttgaggagtagttgggtttgtcagaagatggcttggaccagagtccagcttgaggagtagttgggcttgtcagaggatggctcggaccagagtccagcttgaggagtagttgggcttgtcagagaatggcttggaccaatccagcttgaggagtagttgggtttgtcaggacttatattcagcgcactcctggacggcggcaggacagctctagagaaccgccccaccacctgtctctaaggtgcattgaagctcgttttctggctctttgcctgctgtgtttgagtgatgagactcttttccttggtgagttctcagatcctctctgggatatttgggttctgaggaacacctgctgggagacccatcccactacaagtgacacctacaaataaaaattagatgagaaactgatctgtacagtagcttgtgggttttttcctttttcctaaagctttttggtggcatgagcgacttagcattcctgagctactataacctggtaccagataggttaaatttaaatcaaagttagaaaatcttgtggatttcagtcctcttggtcttattttttaaaaagctaagaatgcctttcctcccccatcacattcctcagaataggatgcttctgggtccctctagaccctctggtattggagattggcaggcaagacaatccataagacctcccttggaaaccacttttatttaagagaaaaaaattgggctgggtggggtgactcatgccagtaatcccagcactttgggaggccaaggcaggtggatcatgaggtcaggagttcaagaccaacctggccaagatggtgaaaccccatctctactaaaaatacaaaaattagctgggtgtggtggcggcgcctatattcccagctactggtgaggctgaggcagagaattgcttgaacctgggaggcggaggttgcagtgagcgagatcataccattgcactcaagcccaggcgacagagcaagcctccgtctcacaaaaaaaaaaaaaaagaaaaaaatctgactataaacttgttccctttcaaatagaagtgcaagaggaaaaaatctggttcatctaagggtcctgattgggtttggtgaacgctagtgtagctgtggtcaggtgagcagtaacttctgcagcgttcctcaggttaggagcagctcacaggggtcctggtgggcccaagccatatgctcacccgcccctctgaagtggatggtctgtgccattcacagttgcttggagaccatgatgtccataaataactttggttttatggtttttcagattttgttcaaatgtttgttttgaggggatttcagaaaaactcagatctgagaagaactgtggagcctgaaaaaatgccgcaggtaggaggaaaagtcaagtgaagagtttagcggaaggagccgtccttattccaagtgttgaaatgtatttacgtgtctctctattgaaacgtgctgtttgtacctatttacggggtacatgtgatacttgttttgtgcatagagtgtaatgatcaagtcagggtgtttagagtctccgtcacctccagtatgtatcatttctgtgtgttggcaacatttcacatgttgcagttactttgaaatatacaatctgttgttaactatagccgcctcactctgctgtggaacattagaacttacttcttctgtctagctgtatgtttgtacccattaaccaactctcttcgttcccccactgcatatacccttctcatctctggtatctctcgttctactctctacctccacaagagccactttttagctcccacatatttgtgataacatgcaatatttgtccttctgtgcctggcttatttcacttaacataatggccttcagttgcattcctgttgctgtgaatgacaggatttcactttaaaaaaaaagaatagctggccgggcatggtggctcatgcctgtaatcccagcactttgggaggacgaggcgggcggatcacaaggtcaggagatcgagaccatcctggctaacatggtaaaatcccgtctctactaaaaaaatagaaaaaattagccgggcctggtggcaggcacctgtggacccagccactcaggaggctgaggcaggagaatggcgtgaaacctggaggcggagcttgcagtgagcccagatcgtgtcactgtattccagcctaggcgacagagactccatctcagaaaaagaaaaaaatagctgaggttgggctcaatggctcatgcctataatccagcactttgggaggctgagactggtggatcccctgaggtcaggagttcaagaccagcctgaccaacatggtgaaaccctgtctctagtaaaaaaaaaaaaaaaatagccgggcgtggtggcacatgcctgtagtcccagctacaggcgtggaggcaggagaattgcttgaacccaggaggcggaggttgcagtgagccaagattgcgccttgcactctagcctgggtgacagagcgagactccgttaaagctgaccagtattccgttgtgtgtatataccacgttttctgtatccggtcatctcttgttgggcacacaggttgatttcatatcttggctattgttaatagtgccacaataaatgtaggagtacagatgtctcttcagctggctgatttcctttcctttggctgtaagcccagtaatgggattgctggatcatatggcagttctggttttttttttgtttttttgtgtttttttgagacggtgtctctctctgttgctcaggctagagtgcagtggcgcgatttcggctcactgcaacctctgcctcccaggttcaaccgattctcctgcctcagcctcccgaatagctgggattacaggcatgcaccaccatgcccagctaatttttgtatttttagtagaggtgaggtttcactctgttggctaggatggtctcgatctcttgacctcatgatctgcctgccttggcctcctgaagtgctgggattacagatgtgatccaccatgcctggtgaaagtgagaccctctgggctggtagttctgtttttagaactacccaactatttagaaatctccatactattttccataatggctgtattaatttacattctcactgatagcatataagagttctgtttgcattctcaccagcatttgttattttttgttttcttgataatgataattctaactggagtgaaataatagctcattgtggctttgacttgtatttccctgatgattagtgacattggcttttttttttttttttttgagacagagtcttgctctgtcgcccgggctggagtgcagtggcgcgatctcggctcactgcaagctccgcctccggggttcacgccattctcctgcctcagcctcctgaatagctgggactacaggcgcccaccaccactcccggctagtttttctatttttagtagagatgggctttcacagtgttggtcaggctggtctcgaacttctgatctcatgacccgcccaccttggcctctcaaagtgttgggattataggcgtgggctaccgtgcctggcctttttttttcttttttcttttttttttttttgagatggagtcttgctctgtctcccaggctggagtgcagtggtgccatcttggttcactgcaagctccgcctaccgggttcaagctattctcctgcctcagtctcccgagtagctgggactatagacacccgccaccgcacctagctaatttttttgtatttttagtagagacagggtttcaccttgttggtcaggctggtctagaactcctgacctcaggtgatccacccacctcgacttccgaaagtgctgggattacaggcgtgggccacagttcccggcctgtttctgggttctctatcctgttccgttggtctgtgtgtatgtttatatcaacctcatgctgttttcatttctgtagcctcgtagtatattttgacctcaggcagtgtgatttctatattctatagctttgttctttttcctcaggattgctttgcttatctgtgttctattttggttccatgtgaattttagaatctttttttctatttctgggaagaacgttattggtattttgatagggattgcattgaatctgtagatagttttggatacgtcccaaatttttattcccttttggaggttcctgagccagtggctcccattttgcctacactgcagtctgtgggctttgtttgaggaagtctgttttattgttaccatgagttgctctctgagtagtggtatgctttaagcccaggagatgtgaagaagggaaatggacaatggtaccttctcaccgtcttctggctccagaggcatcaagggtgaaagtccttagttccacagcccagattcaaggcctgagctttcctctcttcactgaagtacttcagcaaaactctgcgtgcaaaagtgtcctgcccagccctaggctcatggcctcaggccatgctgagagcagtcttagggtaattccagaaagttcagccttttcactctgtctaggtcccttcggtactggagtaatttctaggtctatgagggtttttaaagttgatctctttgtaaagtccatttctttttcttttttccgagacggagtctggctctttcgcccgggccggactgcagtggcactatctcagctcactggaagctctgcctcccgggttcacgccattctcctgcctcagcctcccgagtagctgagactacagggcgtccgccactgcgcccggctaattttttgtatttttagtagagacggggtttcaccatgttagccaggatggtctcgatctcctgacctcgtgatccgcccgcctcggcctcctgaagtgccgtttctttactttagagtaacaagtaataattctcttgtgtgatgcaggtatcacacaaattacagaagattaccaagatggtaactcacattctattttgacaggtcacggttgatgtactgcagagaatgctgatttgtaagttaattgcactgcagcccagactgtaaatgacttagtttgcttattagcaattgtatcagttttctgcctttccatttgaggtatttctcctctgtatgtttcactgtgcagagtcctggtactggaatgcccttgttttggcattttcagagctgtgaagggatacctcatgaatctgtgggtcacagggaagcattttcttgtctgtgtgttttgattaaggcctacagattgtagaagtcttgatggatgtgggccctctggggggttgaagtggatctgttgtctgaaagcgcctggggattgtttctggtgggctgccgccgtgtgctgacatctgttttctgttcctggctctgtcttcagttgcacttgacgctttggctgctggagtacaggaggagtcctccactcacaagatcgtgaggtgctggtatgttcctgagggtggcctgcctgagtgtgcagcagggaggtgtctgccaaattaaagagccaagatattttaaacacttccagagcttcagcagcccgctcctgagcacacttcctctgccagttacgataacgtgcgtgaggaggaggcgaccatgggaaagcccggggaacgctctggtcagccttttcctgtgaggatgaggtcggaaggtgcgcccactgcagtatcctgttccgcctct

SEQ ID NO: 11921 - DNA, 1088 bp, Homo sapiens
ggcgcagggagccgccgccggggctgtaggcgccaaggccatgtccgactcgtgggtcccgaactccgcctcgggccaggacccagggggccgccggagggcctgggccgagctgctggcgggaagggtcaagagggaaaaatataatcctgaaagggcacagaaattaaaggaatcagctgtgcgcctcctgcgaagccatcaggacctgaatgcccttttgcttgaggtagaaggtccactgtgtaaaaaattgtctctcagcaaagtgattgactgtgacagttctgaggcctatgctaatcattctagttcatttataggctctgctttgcaggatcaagcctcaaggctgggggttcccgtgggtattctctcagccgggatggttgcctctagcgtgggacagatctgcacggctccagcggagaccagtcaccctgtgctgctgactgtggagcagagaaagaagctgtcttccctgttagagtttgctcagtatttattggcacacagtatgttctcccgtctttccttctgtcaagaattatggaaaatacagagttctttgttgcttgaagcggtgtggcatcttcacgtacaaggcattgtgagcctgcaagagctgctggaaagccatcccgacatgcatgctgtgggatcgtggctcttcaggaatctgtgctgcctttgtgaacagatggaagcatcctgccagcatgctgacgtcgccagggccatgctttctgattttgttcaaatgtttgttttgaggggatttcagaaaaactcagatctgagaagaactgtggagcctgaaaaaatgccgcaggtcacggttgatgtactgcagagaatgctgatttttgcacttgacgctttggctgctggagtacaggaggagtcctccactcacaagatcgtgagagcttcagcagcccgctcctgagcacacttcctctgccagttacgataacgtgcgtgaggaggaggcgaccatgggaaagcccggggaacgctctggtcagccttttcctgtgaggatgaggtcggaaggtgcgcccactgcagtatcctgttccgcctct

SEQ ID NO: 11922 - DNA, 17739 bp, Homo sapiens
cgggcgcagggagccgccgccggggctgtaggcgccaaggccatgtccgactcgtgggtcccgaactccgcctcgggccaggacccagggggccgccggagggcctgggccgagctgctgggtaggtgggcgcggcaggccgcgggagtgggcggcgtccggcccgggacggtttcgccggttccccgatcccttcccgccagagcctccgccggtcggatccccggacgccgcgcccggggggctgtgcggggtgggcgcccggctggggcggcgcggctgcctcggacccggcccctcctgcgcctgggcggacgcccccagccgccgcccgcggggcgctcccttctttcccgaacgccgcccccgccggccgccctgtcaggcgggcctggggtgcgcggcctggggctcccctcagcgcagaggccgcccctcgccagccgtccccgggctcccctgcctcgggccctcctgggccgtcttccccggcgtccgcggtggggccgtctccgttagtttcccgagacctgcgccctggggaggagccccggcccctcttcgggagggtgtcgctggtgggtttctccgcggcgtccacctgcgcgtcgggccggggaccccgtgtgtgaattgtgctgtgatggtttcgaaccgacttctctccgtagcgggaagggtcaagagggaaaaatataatcctgaaagggcacagaaattaaaggaatcagctgtgcgcctcctgcgaagccatcaggacctgaatgcccttttgcttgaggtaagaggaagctggtgtccgtctgcgggcagatttaggttcggggtttttgagtccagccaccgcacagctttcctaagaaaacacccgaggcggcgggcgcggtggcctggcccgcagaggggagggtcgcctgagcccgggagttctggaccaacctgggcaacggggtgagaccccgcctcttttattaaaaacaaaacaacaacaacaaaaaaacaggccgggcgccgtggctcagggctgtaatcccagcttttggggaggccaaggcgggtggatcactcagggtcaggagttcgagaccagcctggccaacatagtgaaacccggtctctactgaaaatacaaaaattagctgggtgtggtggcgcacgcctttaatcccagctactcgggagcctgaggcaggagaattgcttgaacctggacccgggaggcagaaattgcagtgagccgagatcacgccccttgcaatccagtctggattacagagtgagactgtctcacaaaaaaaaaaaaaaaaaaaaaaaaaaaaaaagccgggcgtggtggctcacgcctgtaatcctagccctttgggaggccgaagtgggtagatcacttgaggttaggagttcgagaccagcctgaccaacatggtgaaaccccgtcactacttaaaatacaaaaattagccgggtatggtagcaggtgtctgtaatcccagctgctcaggaggctgaggcaggagaatcgcttgaacctgggaggtggaggtcgccgtgagtgagatcccgccattgcactccagcctggacgacagtgagactccctctcaaaaaagaaaaaaaggaaaatagcccagtagggaagcattacttacacacaggttgtgtttatgcacagatcttgaattttttttatttttattttttattttcatttattttttttgagacaaagtctcacactgtagcctgggctggtatgcagtggggtgatctcggctcactgcagcctccacctcccgggtttaagtgattctcccgtctcagcctcccgagtggctgggactacaggcacgcgccaccatgccctcctaatttttgtatttttagtagagacagggtttcactatgttggccaggctggtctcgaactcttgacctcgtgatctgcccatctcggcctcccaaagtactgggattacaggcgtgagccactacgcctggcctggagcttgaattttttaaatggagtttgttgtgttttggattctaggtagaaggtccactgtgtaaaaaattgtctctcagcaaagtgattgactgtgacagttctgaggcctatgctaatcattctagttcatttataggtaagttatagcttcattttctctattttgaattgcagaagggtttttatatagtaaccatagtttgctaaattaagtagaaatgtaaattttctcaggcgatgggtttccactggtgtgtgtagtcgcaaattctatgggatgtttgtgtgacttgctcttgggcttcttacgatgctgtgtttaaaaacagcgtctgattcaacctgcgactcagaagcagtaggacccagagtgtcccttggaaaaacatgggacatagcaacagcagggatgtgccccttgctcatggaagtagtgagacaggctgtggtgtgcccaggagagcagacgggagaacaattttctaggtacctccttctccccccagtttgagagtgggagatagggtaagttctgggtcaacaacagtaagttattttctgatccttcacgtccttatgtgatgacttgtttctgttaaaataaccttcagtaatagcgctcccttgacaactggtcactgaatgtcattggcaaatgatacagattttcactgccatgattgtatttgaatttcacaaattgcatattatcattccaaggaaccaagctcagccacacagataaacctttaattcattaatttttgagtttgtttttttctgctaaagatatagttagtacatgcacgcacgtgcacacggacacacacacacacacacacacacacagtaaaagacttgtagataaaaaaactttcctatggagacacattggaaacaaatgactagaaattggcattgttggcctggcacagtggctcacgcctataatcgcagcactttgggaggctgaggtgtgcggatcacctgaggtcaggattcgagacgagcctggccaacatggtgaaaccctgtctctactaaaaaacacaaaaattagccgggtgtggtggtgggtgcctgtagtcccagctattcaggaggctgaggcaggagaattgcttgaacgtgggaggcagaggttgcattgagccgagacccctccattgcactccagcctgggcaataagagcaaaactctgtctcagaacagaaaatggcattgtctacttttttttttttttttaacagacagggtctcactctgttgcctggactggagagccgtggtgcaatcacggctcactgcagtcttgacctcctggcctcaagtgatcctcccaccccagcatcttgagtagctgggactacaggtgtgcgccaccatgcctggctaattttttcatagagacagggttttgccatattgcccaggctggtctcaaactcctgagctcaagcaatcagtttacctcagccacccaaggtgttgggattgcaggcatgagccactgtgccccatctgtctacttttctaccgagaatttcaccagcagctgatgatttctcgtactataattttaagcttctagaactattgtaaaattttttttttttttttttgagacgaagtgttgctctgtcgcccaggctggagtgcaatggcgccatctcggctcactacaaactctgcctcctgggttcaagcaattctcctgcctcagcctcccgaatagctgggattataggtgcccgccgccgcacccagctaatttttgtatttttagtagaggcggggtttcaccatcttggccaggctggtctcaaactcctgacctcgtgatcgacccgcctcggcctcctgcagtgttgggattacaggcatgagccaccgcaaccagcctgtaaatgtttttacttatgtattgataatgtgtttttagagccagtacattacaataacaggttcgtactgcagttaacagttttttttttttttttttttttttgagacggagtattgctcttgttacccaggctggagtgcaatggtgtgatctcgactcaccgcaacctctgcctccctagttaaagtgattctcctgcctcagcctcctgagtagctggtattacaggcatgcaccaccacgcctggctaattttgtatttttagtagagatagggtttcaccatgttggtcaggctggtctcaaactcccgacctcaggtgatccacccgcctcggcctcccaaagtgctgggattacaggagggacccactgagcctggcctccagtttttttttgttttgtttttttgagatgaagtctggctctgtcgcccagactgcagtgtagtggcgtgatctcggctcactgcaaactccgcctcctgggttcacgccattcttcgcctcagcctcctgagtagctgggactacaggctcccgtcaccaaacctggctaattttgtttttgtgtctttagtagagacagggtttcaccgtgttagccaggatggtctcgatctcctgaccttgtaatccgcccgcctcggcctcccaaagtgctgggattacaggcgtgagccaccgtgcccggcccggtttctttaaacaattaattttggctcacgtggtggctcacacctgtaatcccagcagtatgggaggccgaggcgggcggattaatgaggttgggaattggagacgagcctagccaacatagtgaaaccccatctctactaaaaatacaaaaaattaactgggcgtagtgacgcgtgcctgtaatcccagctacttgggaggctgaggcaggagaatcgcttgaacctgagaggcggaggttgcagtgagctgagatggcgccgttgcacttcagtccaggcggcagtgtaagacaccattgcaaaaaaataaaacaaaaaaaaattaattttggaagacaaataaattagaaaatgatttcttggcattgcctgcttccaggttgcccaccgtttctcactttattgaatgcagaccagtggctggttgctcaggagaatggtggctgcctgcaggctgttagtgaggttccacttggtggcctgcggactgagcacagctgtgactgcacctgcccaccaggtgcatggcagaatgttgggaaatccctgcctaattttatcacaaccatcaatgtgagtcaacaggggcaggcttatctctgaagtaattagaaaaacaatgtaattgaaagagcctgctgcagttctcaatttattgtgctcctttgtaaaaagatgataaagttcttggtcagaatatatttctttatcttgctccttttgtgtcatgggaaacgtaacaaataccaatgtataactctgggttcaggtgttgccaccagttttattgtgagctgcttggatcatcaaattctcatttttatctcatgtttttccctttgcatctattctccccgtttaaaaggcaattttttttgtgctgcatcttaaaataaggcattttaaacagcaagtctttggttttagattttgtctcatgtgttaagagaaagctatggttttgttttgtgtttaaggctctgctttgcaggatcaagcctcaaggctgggggttcccgtgggtattctctcagccgggatggttgcctctagcgtgggacagatctgcacggctccagcggagaccagtcaccctgtgctgctgactgtggagcagagagtaagacaccagcaaagatgaggaaacctgcccgttgttacttttaagctggttgggaaaataggacatagctttagtattgtttcaggtaatttgttttttaaaaaatgtaatctctcttttcagaagaagctgtcttccctgttagagtttgctcagtatttattggcacacagtatgttctcccgtctttccttctgtcaagaattatggaaaatacaggtaaatttgagattgcaaatctgactctccagtgttccaggcaatgttctgttgatctggatggaggcaacagagtacctgggttttcttgggaattctccaagcttctcattaattacagagagtggatgaaaaagggtttagaaatcatctgtggattggaaagaagtaccttcaattgccattttttgtccctattcacctatcattagtaatatttattagactagaatatattgaaaaacacgtttagccttgggtatattagtatggagaattttccagggtagtatagtaaactattaaaaaaaaatgtatgtaatttttttttccagagacagggtctcgccttgttgcccaggctggtcttttttttttttttttgagacgaagtctcgctctgtcgcacaggctggagtgcagtggcgtgatcttggctcactgcaagccccacctcccaggttcacgccattctcctgcctcagcctcccgagtagctgggactacaggtgactgccaccacgcccagctaattttttgtattttttagcagagacggggtttcaccgtgttagccaggatggtctcgatctcctgacctcgtgatctgcccacctcggcctcccaaagtgctgggattacaagtgtgagccaccgcgcctggcatttatttttatttttgagacagaatattgctctgccgcccaggctggagtgcagtggcgcaatcttggctcactgcaacgtctgcctcccaggttcaagcgattgtcctgcctcagccaccttagtagctgggattacaggcgcgtgccaccatgcccagttaatttttgtatctttttttttttttgagatggagttttgctcttgttgcccaggctggagtgcaatggtgctatcttggcttatcgcaacgtccgcctcccgggttcacgccattctcccgcctcagcctcccgagtagctgggattacaggcatgcgccaccatgcctggctaattttttttgtatttttagtagagacggggtttctccatgttggtcaggctggtctcaaactcctgacctcagatgatctgcccacctcggcctcccaaagtgccgggattacaggtgtgagtcaccgcgccctgcccaatttttgtatctttagtagagatgaggtttcaccatgttggccaggctggtcttcaattcctgacctcaggtgatctgcccatcttggcctcccaagtgctgggattacaggtgtgagccactgcgtccggcctttcccattcttttatccagcatacattatagaattcattagatttttcagttattgctttggtccctgccctcattatcacgtagcttgggaaacaagccactaaatccacaagaagtgcgatgattcatgtgctcacagatttgcgaagaagatgttggacatgcatatcagattggagagttaggaaagccttcctgcacggactgtgaagagtgcgagttaggggccgggcccagtggctcacacctgtaatcccagcactttgggaggccgaggcaggtggatcatgaggtcaggagatcgagcccatcctggctaacacggtgaaaccccgtctctactaaaaaatagaaaaaattagccgggtgtggtggcaggcacctgtagtcccagctactcaggaggctgaggcaggagaatggcgtgaacccgggaggcagagcttacagtgacccgagatggcgccactgcactccagcctgggtgacagagcgcgactctgtctcaaaaaaaaaaaaatagagtgtgagttagggggatgagaaggggaggctgcagggagatcagggcagtgtgacaggcacagtgttcacagtgagtggctaaagcagatcctgttttatcaaatgggagagggttgagtgagaaagacaagggacatgcacagggcacactgaagcctgacctttgtcctggcagcttcgaggagccagtgaaggcttctgaaggagagactgtcatgtcagtgtgtgtaatactgtgttggctgtagtgtggagaaagggttagaagtaggctacagtgcgtaggaagagagaaggaagagaagcaagtgttgggcaacggtgtgtgggtgcccaaaggccagggagtttgaaaaccagtacagctttgtaaaaaaagatgtgtttcaggctctaagtttttgcttgaggttaattttcaatacggcatggttaagaacctaagttgaacattttgtaggaaaatgcattcataaaggactcagaatgctgggggtttttttgtttttgtttttgtttgttttgttttgtttttcagagttctttgttgcttgaagcggtgtggcatcttcacgtacaaggcattgtgagcctgcaagagctgctggaaaggtagcgtgctaatgatgattcagtgttactgtttttgcagtctagtctagtataaattatatttcaaagcccagaatcagacgggtttgatttctggctttgacatataatttgtactagactagattgcattgcatatttatactagactagacctggaggaactattgctttattatttcaagagaacgtttatggtgttttggttttgtttgctttttgtctgttttttttttgagacggagtctcgctctgtggcccaggtgggagtgcagtggcacgatttcagctcactacaacctccacctccagggttcaagcaattctcctgcctcagcctcccaagtcgctgggattacaggcgcccgccaccacacgcagctaatttttgttatgtatttattttttttagggacagagtctcgttctgtcacccaggctggagtgcagtgacgtgatgtcggctcactgcaggctccacctcccgggttcacgccattctcctgcctcagcttcccgagtagctgggactacaggcgtccgccaccacgcctggctaatttttgtatttttagtagagactgggtttcaccatgttagccaggatgggctccatctcctgacttcaggatctgcccgcctctgcctcccaaagcgctgggattacaggcatgaaccactgtgcctggcaatttttgttatttttagtagagatgtggtttcgccatgttagccaggctggtgtcaaactcctaacctcaggtgattcccctgcctcggcctcccaaagtgctgggattacaggcatgagccacctcgcgcggcctttttttttctttttgagacagagacctgctatgtcgccaggctggagtgcagtggtgagatctgggctcgctgcaacctccgcttcccggattcaagcaattctgcccctgcctcctcagtagctgggactacaggcgcgtgccaccacacccggctaatttttgtatgtttagtagagatggggtttcaccatgttggctaggctggtctcgaactcctgatcttgtgatcctcccgcctcggcctagagcagaatttcatctcaaaaaaaaaaaaaaaaagaaaaacctgcttcctaggatatacacatcttatctcagcaccaaaatctatgaagcaaaaatggccagaattaaagggagaagtagacatttcagcaataatcattagaggtttcaatactcccctttcagtaatgggtagaacaagttagattaagaatgatatagaacagccgccccgtccgggagggaggtgggggagtcagccccccgcccggccagccgccctgtccaggaggtgaggggcgcctctgcccggccgcccatactgggaagtgaggagcccctctacccggccaccaccccgtctgggaggtgtacccaacagctcattgagaacgggccatgatgacaatggcggttttatggaatacaaaggggggaagggtggggaaaagattgcgaaatcagatggttgctgtgtctgtgtagaaagaagtagacacgggagacttttcattttgttctgtactaagagaaattcttctgccttgggatcctgttgatctgtgaccttgcccccaaccctgtgctctctgaaacatgtgctgtgtccactcagggttaaatggattaagggcggtgcaagatatgctttgttaaacagatgcttgaaggcagcatgctcgttaagagtcatcaccactccctaatctcaagtacccagggacacaaacactgcagaaggcctcagggtcctctgcctaggaaaaccagagacctttgttcacttgtttatctgctgaccttccctccaccattgtcctatgaccctgccaaatccccctctgcgagaaacacccaagaatgatcaattaaaaaaaaaaaaaaaaaaaagaatgatatagaagttgaatgctgcaaaccagctgacctgactgactgtggagcactctacccagtagtagcagagtgtgtattcgtaagtccaaatggaacagtccccaggatacagcataaggttcaggccaaggccaggtgcggtggctcacacctgtaatcccagcactttgggaggctgaggcgggcagatcacctgaggtcaggagttcaagaccagcctgtccaacgtggtgaaaccctgtctctactaaaattacaaaaattagctgggcaaggtggcaggtgcctgtaatcccagccgttgtggaggctgaggcaggagaatcgcttgaacttgggaggcggaggttgtagtgagctgagattgtgccattgcactccagcctggatgacaagagcaaaactgtttcaagagaaaaaaaaaaggttcaggccataaaacaaagaggaataaatttagaagggctgaaatcattcaaaatatgttctctaaccacaaatgaatttaattagaataaacaacagaagggaattgggaaaatccacaatatttgaaagttaacataatgagtcaaagaagtcacaagggaaattagaaaataacttgagactgggcacagtgccacaccagtcatcccagcactttgggagggcaaggtgggagattgttttgagcccgggagtttgagtccagcctgggcaaagtagtaagacctccagctgggcgtggtggtatgcgcctgttgtcccaactactcaggaggctgaggtggaaggattgcttgagcctgggaggtcgagggtgcagtgactgattgcgccactgcactccagcctcagtgacagcaaaaaactgtctcaaaaaaaaaattgggacatatggctcaactcaatcccctgatgatgggatttagttgagccttacgtctgcctctgtgtgtgtctccagccatcccgacatgcatgctgtgggatcgtggctcttcaggaatctgtgctgcctttgtgaacagatggaagcatcctgccagcatgctgacgtcgccagggccatgctttctggtgcgttcatgacaagatgcgggttcttgggtaaaactcattttgatctgtgataatgccttctgctctcaagagctctgcgaggcagaacagcctgtctctccgtggccgtgggaacctggcatgacagactcccagtctcagcctgttgtggggttgcattttacttgactgatgtggaaatactagtaagtcggccttgacatgagtttaagtgtttccattcacctttcccatagagtgaccgcagctgcttccttctgtcgcccaggctggagtacagtggcgcgatctcagctcactgcaacctccgcctcctgggttcaagtgattctctgcctcaacctccttagtagctgggactgcaggcacgtggcaccatgcccggctaattttttttttgtatttttagtagagacggggtttcattaggttggccaggctgctcttgaactcctgacctcgtgatgcacccccctcggcctcccaaagtgctgggattataggcgtgagccactatgcctggccttcctgaggaatgatattatgagaaaaacttgggactgtaatgtccccccacaaactaagaaggtgctgagagaccagaggatggctcagactagggaccaacccagtttgaggagtagttgggtttgtcagaagatggcttggaccagagtccagcttgaggagtagttgggcttgtcagaggatggctcggaccagagtccagcttgaggagtagttgggcttgtcagagaatggcttggaccaatccagcttgaggagtagttgggtttgtcaggacttatattcagcgcactcctggacggcggcaggacagctctagagaaccgccccaccacctgtctctaaggtgcattgaagctcgttttctggctctttgcctgctgtgtttgagtgatgagactcttttccttggtgagttctcagatcctctctgggatatttgggttctgaggaacacctgctgggagacccatcccactacaagtgacacctacaaataaaaattagatgagaaactgatctgtacagtagcttgtgggttttttcctttttcctaaagctttttggtggcatgagcgacttagcattcctgagctactataacctggtaccagataggttaaatttaaatcaaagttagaaaatcttgtggatttcagtcctcttggtcttattttttaaaaagctaagaatgcctttcctcccccatcacattcctcagaataggatgcttctgggtccctctagaccctctggtattggagattggcaggcaagacaatccataagacctcccttggaaaccacttttatttaagagaaaaaaattgggctgggtggggtgactcatgccagtaatcccagcactttgggaggccaaggcaggtggatcatgaggtcaggagttcaagaccaacctggccaagatggtgaaaccccatctctactaaaaatacaaaaattagctgggtgtggtggcggcgcctatattcccagctactggtgaggctgaggcagagaattgcttgaacctgggaggcggaggttgcagtgagcgagatcataccattgcactcaagcccaggcgacagagcaagcctccgtctcacaaaaaaaaaaaaaaagaaaaaaatctgactataaacttgttccctttcaaatagaagtgcaagaggaaaaaatctggttcatctaagggtcctgattgggtttggtgaacgctagtgtagctgtggtcaggtgagcagtaacttctgcagcgttcctcaggttaggagcagctcacaggggtcctggtgggcccaagccatatgctcacccgcccctctgaagtggatggtctgtgccattcacagttgcttggagaccatgatgtccataaataactttggttttatggtttttcagattttgttcaaatgtttgttttgaggggatttcagaaaaactcagatctgagaagaactgtggagcctgaaaaaatgccgcaggtaggaggaaaagtcaagtgaagagtttagcggaaggagccgtccttattccaagtgttgaaatgtatttacgtgtctctctattgaaacgtgctgtttgtacctatttacggggtacatgtgatacttgttttgtgcatagagtgtaatgatcaagtcagggtgtttagagtctccgtcacctccagtatgtatcatttctgtgtgttggcaacatttcacatgttgcagttactttgaaatatacaatctgttgttaactatagccgcctcactctgctgtggaacattagaacttacttcttctgtctagctgtatgtttgtacccattaaccaactctcttcgttcccccactgcatatacccttctcatctctggtatctctcgttctactctctacctccacaagagccactttttagctcccacatatttgtgataacatgcaatatttgtccttctgtgcctggcttatttcacttaacataatggccttcagttgcattcctgttgctgtgaatgacaggatttcactttaaaaaaaaagaatagctggccgggcatggtggctcatgcctgtaatcccagcactttgggaggacgaggcgggcggatcacaaggtcaggagatcgagaccatcctggctaacatggtaaaatcccgtctctactaaaaaaatagaaaaaattagccgggcctggtggcaggcacctgtggacccagccactcaggaggctgaggcaggagaatggcgtgaaacctggaggcggagcttgcagtgagcccagatcgtgtcactgtattccagcctaggcgacagagactccatctcagaaaaagaaaaaaatagctgaggttgggctcaatggctcatgcctataatccagcactttgggaggctgagactggtggatcccctgaggtcaggagttcaagaccagcctgaccaacatggtgaaaccctgtctctagtaaaaaaaaaaaaaaaatagccgggcgtggtggcacatgcctgtagtcccagctacaggcgtggaggcaggagaattgcttgaacccaggaggcggaggttgcagtgagccaagattgcgccttgcactctagcctgggtgacagagcgagactccgttaaagctgaccagtattccgttgtgtgtatataccacgttttctgtatccggtcatctcttgttgggcacacaggttgatttcatatcttggctattgttaatagtgccacaataaatgtaggagtacagatgtctcttcagctggctgatttcctttcctttggctgtaagcccagtaatgggattgctggatcatatggcagttctggttttttttttgtttttttgtgtttttttgagacggtgtctctctctgttgctcaggctagagtgcagtggcgcgatttcggctcactgcaacctctgcctcccaggttcaaccgattctcctgcctcagcctcccgaatagctgggattacaggcatgcaccaccatgcccagctaatttttgtatttttagtagaggtgaggtttcactctgttggctaggatggtctcgatctcttgacctcatgatctgcctgccttggcctcctgaagtgctgggattacagatgtgatccaccatgcctggtgaaagtgagaccctctgggctggtagttctgtttttagaactacccaactatttagaaatctccatactattttccataatggctgtattaatttacattctcactgatagcatataagagttctgtttgcattctcaccagcatttgttattttttgttttcttgataatgataattctaactggagtgaaataatagctcattgtggctttgacttgtatttccctgatgattagtgacattggcttttttttttttttttttgagacagagtcttgctctgtcgcccgggctggagtgcagtggcgcgatctcggctcactgcaagctccgcctccggggttcacgccattctcctgcctcagcctcctgaatagctgggactacaggcgcccaccaccactcccggctagtttttctatttttagtagagatgggctttcacagtgttggtcaggctggtctcgaacttctgatctcatgacccgcccaccttggcctctcaaagtgttgggattataggcgtgggctaccgtgcctggcctttttttttcttttttcttttttttttttttgagatggagtcttgctctgtctcccaggctggagtgcagtggtgccatcttggttcactgcaagctccgcctaccgggttcaagctattctcctgcctcagtctcccgagtagctgggactatagacacccgccaccgcacctagctaatttttttgtatttttagtagagacagggtttcaccttgttggtcaggctggtctagaactcctgacctcaggtgatccacccacctcgacttccgaaagtgctgggattacaggcgtgggccacagttcccggcctgtttctgggttctctatcctgttccgttggtctgtgtgtatgtttatatcaacctcatgctgttttcatttctgtagcctcgtagtatattttgacctcaggcagtgtgatttctatattctatagctttgttctttttcctcaggattgctttgcttatctgtgttctattttggttccatgtgaattttagaatctttttttctatttctgggaagaacgttattggtattttgatagggattgcattgaatctgtagatagttttggatacgtcccaaatttttattcccttttggaggttcctgagccagtggctcccattttgcctacactgcagtctgtgggctttgtttgaggaagtctgttttattgttaccatgagttgctctctgagtagtggtatgctttaagcccaggagatgtgaagaagggaaatggacaatggtaccttctcaccgtcttctggctccagaggcatcaagggtgaaagtccttagttccacagcccagattcaaggcctgagctttcctctcttcactgaagtacttcagcaaaactctgcgtgcaaaagtgtcctgcccagccctaggctcatggcctcaggccatgctgagagcagtcttagggtaattccagaaagttcagccttttcactctgtctaggtcccttcggtactggagtaatttctaggtctatgagggtttttaaagttgatctctttgtaaagtccatttctttttcttttttccgagacggagtctggctctttcgcccgggccggactgcagtggcactatctcagctcactggaagctctgcctcccgggttcacgccattctcctgcctcagcctcccgagtagctgagactacagggcgtccgccactgcgcccggctaattttttgtatttttagtagagacggggtttcaccatgttagccaggatggtctcgatctcctgacctcgtgatccgcccgcctcggcctcctgaagtgccgtttctttactttagagtaacaagtaataattctcttgtgtgatgcaggtatcacacaaattacagaagattaccaagatggtaactcacattctattttgacaggtcacggttgatgtactgcagagaatgctgatttgtaagttaattgcactgcagcccagactgtaaatgacttagtttgcttattagcaattgtatcagttttctgcctttccatttgaggtatttctcctctgtatgtttcactgtgcagagtcctggtactggaatgcccttgttttggcattttcagagctgtgaagggatacctcatgaatctgtgggtcacagggaagcattttcttgtctgtgtgttttgattaaggcctacagattgtagaagtcttgatggatgtgggccctctggggggttgaagtggatctgttgtctgaaagcgcctggggattgtttctggtgggctgccgccgtgtgctgacatctgttttctgttcctggctctgtcttcagttgcacttgacgctttggctgctggagtacaggaggagtcctccactcacaagatcgtgaggtgctggtatgttcctgagggtggcctgcctgagtgtgcagcagggaggtgtctgccaaattaaagagccaagatattttaaacacttccagagcttcagcagcccgctcctgagcacacttcctctgccagttacgataacgtgcgtgaggaggaggcgaccatgggaaagcccggggaacgctctggtcagccttttcctgtgaggatgaggtcggaaggtgcgcccactgcagtatcctgttccgcctct

SEQ ID NO: 11923 - DNA, 1000 bp, Homo sapiens
cgggcgcagggagccgccgccggggctgtaggcgccaaggccatgtccgactcgtgggtcccgaactccgcctcgggccaggacccagggggccgccggagggcctgggccgagctgctggcgggaagggtcaagagggaaaaatataatcctgaaagggcacagaaattaaaggaatcagctgtgcgcctcctgcgaagccatcaggacctgaatgcccttttgcttgaggtagaaggtccactgtgtaaaaaattgtctctcagcaaagtgattgactgtgacagttctgaggcctatgctaatcattctagttcatttataggctctgctttgcaggatcaagcctcaaggctgggggttcccgtgggtattctctcagccgggatggttgcctctagcgtgggacagatctgcacggctccagcggagaccagtcaccctgtgctgctgactgtggagcagagaagttctttgttgcttgaagcggtgtggcatcttcacgtacaaggcattgtgagcctgcaagagctgctggaaagccatcccgacatgcatgctgtgggatcgtggctcttcaggaatctgtgctgcctttgtgaacagatggaagcatcctgccagcatgctgacgtcgccagggccatgctttctgattttgttcaaatgtttgttttgaggggatttcagaaaaactcagatctgagaagaactgtggagcctgaaaaaatgccgcaggtcacggttgatgtactgcagagaatgctgatttttgcacttgacgctttggctgctggagtacaggaggagtcctccactcacaagatcgtgaggtgctgagcttcagcagcccgctcctgagcacacttcctctgccagttacgataacgtgcgtgaggaggaggcgaccatgggaaagcccggggaacgctctggtcagccttttcctgtgaggatgaggtcggaaggtgcgcccactgcagtatcctgttccgcctct

SEQ ID NO: 11924 - DNA, 20018 bp, Homo sapiens
tgttctcagaggcccgacagcctctttctgaggaggacgtagccagcctttcctggagacccttgcaccttccttctgcagactggcagagagctgccctctctctctggacacacagaaccttccgagaggtgttgaaagaggaagatgttcacgtaggtgaccgttccttctcctgcatcatgccacgtcctgagtctagggtttgtgtgtgctcctcgggcaagaacagcagcacgtaggtgaccgttccttcccctgcatcatgccacgtcccgagtctagggtgtgtgtgtgccgactgtctcctcgtctcgagtctagggtgcgtgtgccgactgtctcctcagaggcaagaacagcagcacttagatggtttgattggaatcttgactaaaatcgttgtggcctcatgtgcagctcttaagaaattatacagatactgggcacggtgctcacacctgtgatcccagcactgtgggaggccaaggcgggttgatcacctgaactcaggagttcaagaccagcccgggcaacatagtgaaaccccatctctacaaagaatgcaaaaattagctgggcacagttgtgtgcacctttggttccagctacttgggaggctgaggcaagagaaatcacttgagcccaggaggtggaggttgcagtgagccaagatcacgccactctattccagccaggatgacacagcaagaccctgtctcaaaaaaatatattaataaatacagagaaaccctgctatactttctcagtttctcccaacacgaacttctttttttatttttactgatatattttttgagacaacgtctcgctgtgctcagtggtgcagtcttggctcactgcagcctctgcctcctgggttcaagcaattctcatgcctcagcctctccagtagctgggactacaggcgcctgccaccacgcccgactaattttggtatctttagtacagacggggtttcaccatgttgtccaggctggtcttaaactcctggcctcaaattacccacacgccttggcctcccaaaatgctggaattacaggcgtgagccattgcgcccgagaacttgttttttgttgttgttgttgttttgttttttttttctggtggagtcttactctggggcacagtggcgcaatcttggctcactgcagcctctgcctctctggttcaagtgattctcctgcctcagcctcccaagtagctgggactacaggcgcgcaccaccacgcctggctaagttttgtatttttagtagagatggggtttcaccatgttaggctggtctcgacctcctgacctcgtgatctgcccgccttggcctcccaaagtgctgggattacaggtgtgagccactgcgctcggcccctgggaacttgttttaaacatgtctgccaggctgtgtggtggtcactcagggtctctgggctcacccatgtgtgcctggttactggagctggcattgctctcaccagtgtgccttggtactgatttatttctgaggatgtttgcctggttgttttggtctttagaaaagaatttcaaggtggctgggcacagtggctcatgcctataatcccagcactttgggaggctgagatgtcaggagattgagaccatcctgggtaacacgatgaagccccatctctactaaaaataggaaaaagtgatccttctgctttggcctgccaatatgttgagattgcaagtgtgagccactgtgccaagccttttgtgaaattattttattatttttaaattattatttttttttttggagatggaatcttcctctgttgcccaggctggagtgcagtggcacaatcttgggtcactgcaacctcagccttctgggttcaagggattctcctgactcggcctcccaagtagctgggaccacaggtgcacgccaccgcgcccagctaactttttgtatttttagtagagatggggtttcactgtgttagccaggatggtctcaatctcctgacctcatcatcctcccgcctcggcctcccaaagtgctgggattacaggtgtgagccaccacgcccaaccctttttttttttttttttcgtatttttagtagaaacagggtttcaccgtgttagctaggatggtctcaatctgctgacctcgtgatctgcctgcctcggcctcccaaagtgctgggattacaggcatgagccaccgtgctcggcctcctaaaaatgtttttaaaaaacttagctggtcatggtgatgtgcacctgcagtcccagccatctgagaggctgagggggagaattctggagttcaggaggcagagtctgcagcgagctacgattgcaccactgcacacactccagcctgggcaacagaacctgtttccaaaaataaatgaaggtatgctactgtgaatagctgtagaatgttgttgttttgttagtttcttttttcttttttttttttttcctttttatagatagttctcactctgttactcactgcagccttgacctcctgggctcaagagatcctcctgcctcagcctcccaagaggctgggaccacacacatgtgccaccacacctggctgatttttaaatcttttgtagagacggggtgtcaccatgttgcctaggctggtgtcaaactcctaggctcaagcaatctgctggcctcagcctcccaaagtgctgggattacaggcatgagccaccgtgcccaggtaatttttaaatgagatgaggtcttactatgttgcccagactaaaatagccgttttatacttagaaagaaggattacagtactaacatctttgtgctagggaaatcctgtaagaaatcattcttgataaaactaaggtttctttcctgtggaactctcagctgcaatttcattataacacagggacatggaggactgcgtatgagatgaaatgacaaactggtttataaacctgtcggtggattgtgtgttctgtcctcattgtattgaattgcttgctctctttctcagttaacttaccaagactggttacacctggagctggaaattcaacctgaagctgatgctctttcagatactgaacggtaagtgttgaaaagagctaccctggccaggcatgatggctcacacctataatcccagcactttgggaggctgaggcaggagatctcttgaatccaggagtttgaggtcagcctgggcaacatggggaaactccatttctacaaaaaatagaaaagaaattagccggacatgcggcacgttccagtcatcacagccacttgggaagctgagcaggagcattgcttgagcctgggaggtagaggctgcagcgagctgagatcacaccactgcactttagcctgtgcaacggagtgagaccctatctcaaaagaaaaaggagcttccctttaaaatgttacacggttttccacattgccttaaagcctatgtttcgtcattttatcctcaatttaatgtttggtttacctgttaatctttgagcacaatttcaattttttttttttcggtggcaagatttattaaagcaaaagcgaaagtaaagcttccacgcggtggcaatttctgtttttctttttttttttttttttctgagacagagtcttgctctgtcacccaggctggaatgcagtggcgcgatctcggctcactgcaacctccacctcccgggttcacgccattctcctggctcagcctcccgagtagctgggactacaggcgcccgccaccatacccagctaattttttgtatttttggtagagacggggtttcaccgtgttaaccagggtggtctcaatctcctgacctcgtgatccacttgccttggcctcccaaagtgctggcattacaggcgtgagccaccgcgcctggccaggttgcccaatttcggttgttattcctttatttaagaaacatttactgagctcctaccatgtggcagacaattctagagtgttctagaagcagggagtatagaggggaataaacaagcctgcccatatggcacctttgtatcaatgagggcagatgtggcacgtataaggcacccacttagacttcaccctaccctggctgggctatggctgctgtccgggagctgtacacctgtgtccaggccctggcaacacacaggtagatacagaagtggattaaaggtaggaatgagccctggagataacagacagggccgtgtgagaggaaatgaccaggcaggagcagaggctggtgtggagcaggtggtgcagactttgaggagtgatgccagccttgacttgggggcaccaagaagtgggtaaatgaagcagtgaacccccatgagtcccagggctgatgactgagaccatttgagactatttgagaggccagatgtgctgttctgggcataggagtagggagcccagaggaccgttgggtttaagggtgtggagtttagggtggaggtcagggagaggggaatgtggtcactgcagatatggagtatcctggtgggtatatgggcctcagggtgcctgccacacctagactcaggagagggttggcaacagccaccctgtgctcctcgtccttccggccatcaggggccttccaggcacatgcagcactgtcgcctgcacctggatcctggtatcagattctggatgaaaccaatggaagtaataggaaaaggaaaacataggggccacaaaaagaaaactcgctgctgcctgcggcaaaacacgtgctgatggttcaggtcgtgccaagcccgctctgcaggcgcttccttcactcacccccgtttctcctcccggctgctctctggggtggagtctaaggaggaggtcagagggaggggcttgtctgctgcatgaggtcatgctgcatcaggtcaccgctgcgtggaagttgtgttgagatgtgttgcgggattttctttcttttctgaattacttaagtgatacttagatacattctgtgccagttccagacagtgtgggtggagcaccccagttccggacagcgtgggtggagcaccccggtcccggacagcgtgggtggagcaccccggtcccgcacagcgtgggtggagcacccaggtcccgcacagcgtgggtggagcaccccagtcccggacagtgtgaggagagcacacactccctagcactcacatttgcagggtcgtgtggagcgttttcctggttgtggctctttctgcataaatggattgcggtattgatggttctgtgcactgcggatttgtttgtttgtttgagacagggtctcactctgttggccaggatggagtacagtgatgcactcacggctcacggcagcttccctctccagagctcgagtgatcctcctgcctcagcctcctgagtagctgggaccacaggtgggcactactatgcccagctaatttttttattttttgtaggaatggggtctccctttgttgctcaggctgatgtcagactcctgggctcaagtgatcctcccaccttggcctcccacagtgctgggattacaggtgtagccactgcagttttgagtcagtgtctccttgagccccttcccatccgtatccacagagtccacagtctggatgcaggttgcttcaccatccccttctggtgggcctgtgagtagctcaggtgccctcaggtgactttccaggctactttttttttttttttttttttttttttttttagacggagtctcgctctgttgcccaagcaggagtgcagtggcatgatctcagctcactgcaagctccacctcccaggttcataccattctcctgcctcagcctcctgagtagctgggactacaggcgcccaccaccacgcccggctaattttttgtattttgagtagagacgaggtttcaccgtgttacccaggatggtctcgatctcctaacctcgtgatccgcccgcctgagcctcccaaagtgctgggattacaggcatgagccactgcacctgccccagcctacatttttgtgcttgcctattctgttcaccaagctcatgtgctgtgtggccagcagttaccccgtgggatgtcatcctgagtggcctttgatccgtggaaggtggggtcacaaaggtcactcctgagaccaggcctttcccacatccccaggcatcccaccctgcagacagtgaggtctcatccctactccaaggtcccgagccgccagtctcaacccagctctcactagtgctgtgtgtcccttactatgggcctattccctggttatggggaaccgctggccacgaagcatttctcagaattgatagcagtgtttgctgttctaggcaggacttccaccagtgggcgatccatgagcactttctccctgagtcctcggcttcagggggctgtgacggagacctgcaggctgcgtgtaccattcttgtcaacgcactgatggatttccaccaaaggttagcagcacacactgtattagggttctctggagggacaggactaataggatatatataaaggggagtttctggccatgctggtgcccatctaattagcttagggtgggtctgcctttcccagcctatacccaaatgtcagtctcctttggcaacaccctcacagacacactcaggatcaatgctttgcatccttcagtccagtcacgttgacactcagtattaaccatcacacaccgatgaggccttacttttaatcatggtagttctaagaatgcatttttctctcagtccaattttggtatgcaaagtacacttgagcctatcacatagcaaatctatgtcaatacaaaataaagccaagcttcctgcatcggttgtttctttatgtgtatagacttgtcagaagcgacaacttcgggctgggcgtggtggctcacacctgtaatcccagcacttcgggaggctgaggtgggtggattacctcaggtcaggagttagagaccagcctggcctacatggtgaaacctccctctctactaaaaatacaaaaattagctgagtgtggtggcgggtgcctgtaatcccagctacttgggaggctgaggcaggaggattgcttgaacctgggaggcagaggttgcagtgagccgactgggcgacagagcaagactctgtctcaaaaaaaagataaaaatagcaacaacgttgtttttctgttctgtcacctggtattcaaggtgagcatgtgtgaagcacggcacaaatggcctagtagatcctgggcatcacagcctctctccatctgagagggattctcaggacagagcagttcctgaggtgttgcatgtgggccagaaggatggacggagtgtacctggggctgtccaggctttgtccccaggggctcttgtttgcagcttcacactgttgtgttacagctgcagcattcagtacagatggcaagtgtgtatgcagcttccccccatgtctcctgcctgcggcaaccacgaatccattttatgttcatggatttgcctgtttgggatgtttaatatcaacagaatcatgtagtatgtggccctttgtgtctggcttctttggctgagcagaatgtttctgaggctcatctgtgttgtagcacatatcagcatacccttccttcttatggctgactgatgctcacagaaggtatggaggctgacgcacctccatcgtgggtgacttcttgttaaccctactccaagaatgcctcctgagatttcccatttatctgctgttaccttaaatcccactcttaggtcaaaacaaccttgaggctgggcgcagtggctcatgcctggaatctcagcactgggaggccaaggcaggcggatcatctgagctcaggagctcgagaccagcctggtgaaaccgtctagacaaaaaaaaaaattagccaggcatggtagtgtgtgcctatggtcccagctactcgtgaggctgaggtgggattgcatgagccggggaggcagaggttgcaatgagctgtgaaaacaccactacattccagcctgtgtgacagagtgagactccatctcaaaacaaaaaagcaaatcttccaccataaatccagcggttagattcacagagcattcttgcctttccctgaggggttgacttcaatagtccttccctgtggtatagaagccctgcctgggggtaacagtgcagggatgcatcgtctctctaggctgcctgagacatggtttctgtctgtaagtccttaaacgtttctgtctgagaaactggattattcagcctctcttcagccttccagcttccccagcctttatgggtaggtttgcacagagctgctcactgcggaacagaaagatcagccatattttgtttatccattcactttgtttgtttgttttttgagatagtcttactttgtcttatttatatttattttgaaactgggtctttctttgtcacccaggctggggtacagtgactgcagcccactgcagcctcgacctcctgggctcaagtgatcctcctgcttcagcccctcaagtagctgggaccacaggcaccaccatacctggcaaatttttgtagttgtagtagagatggggtttcaccatgttggccagactggtcttgaacttctgacctcaggtgatctgcccgcctcggcctcccaaagtgctgggattacaggcgtgaacctctgccaggcctgacttgatggtagccatcctagtgggtattaagtgctatttgatagtggtttcgatttgcacttccctaatgggtagtgattttgaacatctttccattttcttattggccattttagattttttttggagaaatctgttcacatccttagcccatttgaaaactgggtcacattcatgtactgcataagaatgttctggttaacaacgagccacatatatgacagtaatcccacatagccataattttttgtaccttttttttaaactgtgtttttaccgtaccttttctatgtttagatacacaaatactgttgtgttacagttgcggcatgcaatacagttacatgctatgccggtttatagcctgggagcggtgggccgtgccatgtggcctaggtgtgcgggggctctggtctgtttctgcgcggtgggccgtgccgtgtggcctaggtgtgcgggcggctccggtctgtgtctgtgcggtgggccgtgccgtgtggcctaggtgtgcggggggctctggtctgtgtctgtgctcttggatgttcacgtgatgaaaccacctaaagatgtgtttctcagaatggatccttgtcattgagcagttcatgactgtatttgtcttactgagttgtatgagttctttatatattttagataaagttcttatcaaatatatgatttgtaaatattttttcccattctgttaattcttttttcactctcttgatagtatcgtttaatgcacaaaggttttaaatttttataaagtccagatcatttatttttagtttagctctttaggattttgattcattttgatggatcagaaaacattttgggccagccacggtggctcacgcctgtaatcccagcactttgggaggctgaggcgggcagatcacttgatgtcaggagttcgagaccagcctggccaacatggcgaaactaaaaaaatacaaaaactagccaggcatggtggcaggcgcctgtaatcccagctactcgggaggctgaggcggcaggagacttgcttgaacctgggaggcggaggttgcaatgagcccagattgtgccactgcactccagcctgggcgacagagtgagagactgtctcaaaaaaaaaaaaaaaattgttgtgtgaggtcatccagctttattctgttgcttgtggccatgcagttgtcccagcaccatttgttgaaaacacttctttccccactgaatggtcttggcacccttgtcaaaagttagatggctgctcgtgtgagggtttgtttctggctctcattgtgttcccttggtctgtatgtccatatgcactgcgtcattgggatgaagctttgtagtaggttttaaaattgggaagtgtgaggcctccaacttggttcttctttttcaggatggtttggcttttctaggtgctttgtagttgtgtcttaattttgggatgagcttgtcagtttcgacaaaagtagctgggaccctgatacggactgcatgtggggcagtattgccatctcagtgatagcgagtcttctttccttttgaatcatttgttgctaacgtatagaaacaccagtgattcttgtatattcattggctctagtcatttattagttctaagagtgtttttgtatcgattccttagggctttgtatatataagatcgtgtctggccaggcatggtggctcatgcctgtaatcccagcactttgggagggtgaagtgggcggatcatgaggtcaggagttggagaccagcctggccaacatggtgaaaccccatctctactaaaaatacaaaaattagccgggcatcgtggtgggctcctgtaatccgttacttgggaggctgaggcagaagaatcacttgaactcaggaggcagaggttgcagtgagttgagatcatgccactgcaactccagcctgggcgacaagagtgaaactcagtctcaaaacaaaaaaacaaaagaaagatcatataatatgtgaagagagatagtttcactttttcctttcctatctggatgctttttctttttcttgttgaattgccccggcttgaactccccgggcagtgttgttttttttgttgttgttttgttttgtttttttttttctgagacggagtctcgctctgtcacccaggctggagtgcagtggtgcaatctcggcttaccgaaaccttcgcctctcaggttcaagcgattctcctgcctcagcctcccgagtagctgggattacaggcacccgccaccatgcccagctaatttttgtttgtttgtttttgagacagagtgtcgctgtgtgtcccaggctggagtacagtggcactatctcagctgtctgcaacctccgccttccaggttcaggcaattctgctgcctcagcctcccaataggtgggattactggcgtccgctaacacgcccgtctaatttttgtatttttagtagagatagggtttcgccacattggccaggatggtctcgatctcctgacctcagatgatctgcctgcctcggcctcccaaagtgctgggattacaggcgtgagccaccgtgtctgtccccagtgcagtgttgagtagaggcagcgacactgttctgagtgtagagaggacatccttgttgcccctgatcttaggagaacagctttcagtctttcctcattaaatctgacgtttgctgtgggttttcatccatgccaggcactagattgagaagatttcctttgttcctggttgattgagtgtttttatcacaaaaggatgtcacatttcgtcaagtgctttttctacatctattgagataatcttacggtttttgctttttattttattgataactgcgttatattggtttggggatcttaagctatccttgtgtagggaccagccccggagggtcggtgggtctctccctgtgtgcggcgatgagagagtgtagaaataaagacacaagacagagataagagaaaaggcagctgggcccgggggaccactaccaccaatgcgcggagaccggtagtggccccgagtgtcgggctgcgctgttacttattggatacaaggcagaaggggcagggtaaacaatgtgagtcacctccaatgataggtaaggtcacgtgggtcacatgtccactggacagggggcccgtccctgcctggcagctgaggcagagagggagaggagacagagagaaagacagcttacgccattatttctgcatatcagggactattagtattttcactaatttgctactgctatctggaaggcagagccaggtgtacaggatggaacatgaaggtggactaggagcatgaccactgaagcacagcatcacagggagacggtgaggcctccggataactgcgggcgagtctgactgatgtcaggccctccacaagaggtggaggagcagagtcttctctaaactccccgggggaaagggagactccctttcccggtctgctaagtagtgggtgttgttccttgacaccttttgctaccgctggaccacgatccgcttggtgacgggcgtcttcccagacgctggcatcaccgctagaccaaggagccctctggtggccctgtccgggcacaacagaaggctcgcactcttgtcttctggtcacacctcagtatatcccctcagctcctatctctgtatggcctggtttttcctaggctatgattattgagtgaggattatcataatattggaataaaaagtaattgctaccaactaatgattaatgatattcatatgtaatcatatctaagatctatatctggtataactattcttgttttatattttattatactggaacagctcgtgtcctctgtctcttgccttggtgcctgggtggcttgccacccacatccttgcattcttgggataagcctccttggtcatggtacataatttttgtatttcctaggttggggttggtagtattttgtggcagtttttgttgtttattgttgactaatgtgagggtcacactgtcagagaagcacagccatcactcagctccggaggcaggaggagaactgggaacttcagcactattaggcgatactgaggaggattttattgtattttcatttcagctcaaggagttatgaccactcagaaaattctgatttggtctttggtggccgcacaggaaatgaggatattatttccagattgcaggtgagtttgagggtgccacaactcagtgcattcacttcatttaagccgcgtgctattaagatatttattgccaggcgcggtggctcacgcctgtaatcccagaactttgggaggccgaggcaggcggatcacacagtcaggagatcgagaccatgctggctaacacgatgagaccccgtctctactaaaaatacaaaaatttagccgggcgtggtggcgggcacctgtagccccacctactcgggaggctgaggcaggagaatggcatgaacccaggaggcggagcttgcagtgagccgagattgtgccactgcactccagcctgggcgggcgacagagtgagactccgtctcaaaaaaaaaaaaaagatatttattgttggctcaggcttgtaatcccagtactttgggagtccgaggctggtggatcacctgaagtctatacaggtaggcagcatgtacctgtgtgggttcactgtcagtcaacaggcatttactggtgctggccacccgtgcgtcttctgtgccaggcccctgtctctccctccgccagctctggggcctcccaactccttagccagatgctttccctagacccacctggctccttctcagtgagaccatctgctttttcctcttaattgtaatcataattattattattattgggacagggtcttgctctgtcacccaggctagagtacagtggtgcgatcatatctctctgcagccttgacttcctgggctcaagcaatcctgacagcgtgcacctgtgtgcgccaccacacccagctgattttttgtagagacggagttttgccatgttgcccaggcttgtctcgaactcctgggcccaagtgaaccacccatctcggtctccaaaattgttggattacaggcgtgagccactgcacctgatctttattcttctttaaaaaatacagccggccaggcacggtggcttatgcctgtaatcccagcactttgggaggctgaggtggctagatcacttgaggtcaggggctcaagaccagtttggccaacatggtgaaaccccatctctactaaaaatacaaaacactagtcaagcatggtggtgtgtacctatagtcccagctactcaggaagctgacttaggagaatcagctgagctcgagagtcaaggctgccataagccaagactgcactgccgcactccagcctgggcaaccggactgagactgtcctaacaacaacaacaacaacaaaagacttgtgaggcaaaaatgatgtgtggggtaaaatgttagccagaggttaatctgggtgaagggcacatgagtgtcctcctgctgtttttttttgttgttgttttgttttgttttgtctgtttgtttttgagacagagtcttgctctggagtgcagtggcgggatcttggctcactgcagcctctacctcccgggttcaaactattctcctgcctctgcctcctgattagctgggattacaggcgcctgccaccacacccagctaatttttgtatggctaattttgttggccaggctggtcttggactcctgacctcaggtaatccatctgtcttggcctcccaaagttctgggattacaggcgtgagccaccatacctggctgtttttttttgtttgtttttttttgagacggagtctcactctgttgcccagtctgaagtgcagtggtgcgatctgggctcactgcaagctccacctcccgggttcacgccattctcctgcctcagccgcctgagtcgctgggactacaggcacccgccaccatgcccagctaatttttttgtattttttagtagcgacagggtttcaccatgttagccaggatggtctccatctcctgacctcgtgatcctcctgccttggcctcccaaagtgctgggattacaggcatgagccaccacgcccagctgttttttcttaattgataagtagttgataagtagtactgtaactcctgggctcaaggaatctgcctgcctcggcctcccaaagtgctggcattacagacgtgagccacagcacccggcctgcactgttctatatttgcaatttcaaagtgatttccaattgaaatagcttgccccacttgttccttcttgccctgtccactgtggagacctctccctgacccctgacgtctgggtccccgactggctgggcagtgagccccgaggccttcctgtgccagcatactgctctttttcaggagatggtagctgacctggagctgcagcaagacctcatagtgcctctcggccacaccccttcccaggagcacttcctctttgagattttccgcagacggctccaggctctgacaagcgggtggagcgtggctgccagccttcagagacagagggagctgctaatgtacaaacggtaacacctactaccacctgggcagggcagcaccacctgggcagggcagcatctcatgacggtcctagaggttctttgtagtgagtttgtttcccgttacttacttgtctgtgtgtccccaccccaagcctgtccatttctgtggcacatgccacggagaagaggatctggagggttgaaagtacttttgattaaaaccttccagccaagcgaggtggttcatgcctgtaatcctagcattttgggaggctgaggtgagtggatcacctgaggtcaggagtttgagaccagcctgaccaacatggcgaaacgccatgtctactaaaaatacaaaaaaaatacaaaaaaatttagctaggtgtggtggcgggcacctgtaatcccagctactcgggagactgaggcaggagagtggtgtgaacctgggaggcagaggtttcagtgagccgagatcacgccattgcacaccagcctgggcaacagagcgagactctgtctcaacaacaacaacaaaaccttcctgctcagacgtggagggacgtcgcagaaggagctcttgtgaaagtagggaaaagtgttcagaaatgcccacggcggctgcatttataagaagcagcgtggagtcatttaattttacagtcatagggaattgcttcactagacagactggtgcgtcatccacttggttatcgtgtaactgtcagaagttgttggttattatgtaactgttaaaagttgtttgtttggtaacacattttgaatgcagtgggccaaacacagtataggggaggtgggctcagagtgcaggctttggatgggacagagggacacaggccaaggctctggttccaacagtggccctgggtttcagggtggtggttgctgctctgagagtctgagcccttgggaaggagcagagtgtacgctgtgctgtcgccaccaatacagccccttctttccaggatcctcctccgcctgccttcgtctgtcctctgcggcagcagcttccaggcagaacagcccatcactgccagatgcgagcagttcttccacttggtcaactctgagatggtaggtgccccgtgtgcacgtgtccgtccgatctgtcagtgcctgtggcgctaacagcagctcttgcagcctccatgcgtgtactgaccgtgtgaattactgaggaaagggttcaaagtcaaatagggaacagtgtctggaatgccatgtgagggaggaccccacccacagccaggacggcgaccagcacatcaccaaaccagctgtaggttgccttctcccaagtttgagttcctttagtttccctcaagttttaatgattttgacacatggaatcgtacagaccattttgtgtgccacgcacctcggttcatttatttctaatctcaacatgcttcatgtgtaaaaaaagccttgtggtgatctgactaccgctgttgcctgccaggcagcccagttatcttccattttagacactgcccagcgtgagttgcagggtgatcttaaccagcaggctgggtgcggtggctcacgcccgtaatcccagcactctggaaaggtgggggatcacttgagcccaggagttcgagaccagcctgggcaacatgacaaaaccctgtttctacaaaaaatagaaaaattagctgggtatggtggtgcacgcctgtactcccacctacttgagaggctgggtcaggaggagtaattgagcccaggaggcagagttgcactgagccaagatcccaccactacactccagcctgggtgacagagcgaaactcttgtctcaaataaaaagaagtgacactcgctgtggggacgggcagcgtagggacccagttggtcagagctggggagacggataccagcccctcccactctacagagagcagcttctgctcccgaaggcctttttcttgtttttgaagatgcacaaatgtgagagatggaattcaggttccatgccagctgtgcagcattttatatttttatttatttatttatttatttattttttgagacagagtcttgctctgtcgcccaggctggagtgcagcagtgaaatcttggctcaccctgcaacctccgcctcccaggttcaagcgattctcctgcctcagcctcctgagtagctgggactacaggtgcctgccgccatgaccggctaagttttgtatttttagtagagatgacgttttaccatgttggtcagtctggtcttgaactcctgacctcgtgatccacccgccttggcctcccaaagtgctgggattacaggtgtgagcccggccttgtgcagcacttcaaaatgtgacaaggaaagcagaggacgtgagactagcaaaagctttcagaaaatcactatggtctcctttgaattcttatgaatggctgtttttcagaaagctctcagttggcacgtgacagccgacagacaggaaaacaccatagacagcacttggttagtgaagggaccagaggatggttggcccttggtattagtgtcgtcctcaccacagttctacgctccgggtgcgtccccttccctgcggctgcttgtgcctccctggcttcttcctggagcctacaagactgtttgggccagagctggtgggctgcaggatctggccgcccagggaagccgttaagtttcaggacagcacagccagggcgccaggcccggtcagcccaggagcaccatccatggtggccacgccaagccttagcgagtgtttttctcaaaactgaatccacagcagccactctgcatgttggtctcgcctctcttcctgtgggcttttcttacctgccttgaactcttttgcagagaaacttctgctcccacggaggtgccctgacacaggacatcactgcccacttcttcagggtgagatgctccctcagcccctctcgtggccttctcagaacgccgtgggtggatcctcctgtcagcttcctgtgagttccttcactctactagttgtgggtcctcacaaaccgctgacctcctgctgcgttctctcctgcagggcctcctgaacgcctgtctgcggagcagagacccctccctgatggtcgacttcatactggccaagtgccagacgaaatgccccttaattttgacctctgctctggtgggtcagctgtcttgtttggtgttttgttttggggatgagtgggagactccacagctgcctctggcatctctgcagcacgtctccatcacgggtgttaccatctcagggaaaatgcatcaggagacatggaagccacagttaaagatgccagctcatagcagatgagggccgcacatcctgagttcccagaaccgtccctgcccccaccgccgtcaccatggcacccgcaggacttctcccctgtggaccccactcagaccccacgggcaccttcatgtccacaggggtgcagggcttgtttgttcacggtcttgggttgtgcactggctggaggctgtacggtggctgcctgtgccccgtcacgagagcatgactgtggcccacttgcgcctgactatgctttcttgggacttcggagcagagacttcacctcagctcccgccagagctcagcaggctcccctagcagcccagggtcccgagagtgggaggagggcagcatttccctcacttccctggcggctcacttagtcctgaagaccacagctgtcgcccttccttctcggtcatcagggacaggagggcctttttctccgcagcacggcatgttccccagggagctccccaagcaggctgcatttgcaccgagttgtagctcagttggtggaattcgtgagaaatgaactcttcggtgtttagaacgccacctctcagctgagggcatccaaggaccaggcattcccagctcagggcagtgtggtctcttcactgtttcgttcccagctcagaggagtgtggtcccttcactgtttcgttcccagctcagggcagtgtggtcccttcactgttttgttcccagctcagaggagtgtggtcccttcactgttttgttcccagctcagggcagtgtggtcccttcactgttttgttcccagctcagaggagtgtggtcccttcactgtttcgttcccagctcagggcagtgtggtcccttcactgttttgttcccagctcagaggagtgtggtcccttcactgtttcgttcccagctcagggcagtgtggtcccttcactgtttcgttcccagctcagaggagtgtggtcccttcactgttttgttcccagctcagaggagtgtggtcccttcactgttttgttcccagctcagaggagtgtggtcccttcactgtttcattcccagctcaggggactgtggtcccttcactgtttcgttcccagctcaggggagtgtggtcccttcactgttgcgttaggccaggctcttccttctccaaattccacgtcttccatgagtgtgggtaataaatgcctcatggaactgctttgagccttaattgacgtaaaaaatactggctttggagttccagagcgcagggcgagtgtgggcctgtagtggcctgtaggagcactgggggcttgtcatggctggggcagcggaggtgtgtccatctcagccaccctcatctgtgtgctggtgctctctccataggtgtggtggccgagcctggagcctgtgctgctctgccggtggagg

SEQ ID NO: 11925 - DNA, 762 bp, Homo sapiens
tgttctcagaggcccgacagcctctttctgaggaggacgtagccagcctttcctggagacccttgcaccttccttctgcagactggcagagagctgccctctctctctggacacacagaaccttccgagaggtgttgaaagaggaagatgttcacttaacttaccaagactggttacacctggagctggaaattcaacctgaagctgatgctctttcagatactgaacggcaggacttccaccagtgggcgatccatgagcactttctccctgagtcctcggcttcagggggctgtgacggagacctgcaggctgcgtgtaccattcttgtcaacgcactgatggatttccaccaaagctcaaggagttatgaccactcagaaaattctgatttggtctttggtggccgcacaggaaatgaggatattatttccagattgcaggatcctcctccgcctgccttcgtctgtcctctgcggcagcagcttccaggcagaacagcccatcactgccagatgcgagcagttcttccacttggtcaactctgagatgagaaacttctgctcccacggaggtgccctgacacaggacatcactgcccacttcttcaggggcctcctgaacgcctgtctgcggagcagagacccctccctgatggtcgacttcatactggccaagtgccagacgaaatgccccttaattttgacctctgctctggtgtggtggccgagcctggagcctgtgctgctctgccggtggagg

SEQ ID NO: 11926 - DNA, 669 bp, Homo sapiens
agtgtcgctcccccggagaggtgaaggcgcgggcagctccctgagtggtggggctcctctgggtgccacctcttgctgggccaagtctgcagaccagggactcatgagctcgtctccgcaggagcatgcggcgatgctgagtttcatcaaataggacgcagcagaagttgggaagcactgcagaagatgggttgtcttccagaaagaccactgttttggggaacagcttggctctttcttcggccgctggtggttggattagctgttggagggatgtgcaggactgaatggctagtactgatggtttcacggctgtctctgcaggcagggtccctgggctgccctcttcgtgaggaccatgtgtggacgtgtgctccctgcagtgctcacccggctctgccagctgctccgtcaccaggtgaggctctccttcatgggggccacccttgggggcccactctgagggccaggctgctacttctcaattcgtcttcagtgccctggaaaattccagcttggaagagggcagtctgctctgccaccctcattctcgttgcagggcccgagcctgagtgccccacatgtgctggggttggctgccctggccgtgcacctgggtgagtccaggtctgcgctcccagaggtggatgtgggtcctcctgcacctgg

SEQ ID NO: 11927 - DNA, 528 bp, Homo sapiens
agtgtcgctcccccggagaggtgaaggcgcgggcagctccctgagtggtggggctcctctgggtgccacctcttgctgggccaagtctgcagaccagggactcatgagctcgtctccgcaggagcatgcggcgatgctgagtttcatcaaataggacgcagcagaagttgggaagcactgcagaagatgggttgtcttccagaaagaccactgttttggggaacagcttggctctttcttcggccgctggtggttggattagctgttggagggatgtgcaggactgaatggctagtactgatggtttcacggctgtctctgcaggcagggtccctgggctgccctcttcgtgaggaccatgtgtggacgtgtgctccctgcagtgctcacccggctctgccagctgctccgtcaccagggcccgagcctgagtgccccacatgtgctggggttggctgccctggccgtgcacctgggtgagtccaggtctgcgctcccagaggtggatgtgggtcctcctgcacctgg

SEQ ID NO: 11928 - DNA, 1586 bp, Homo sapiens
gctttccacgtttgtgcagcaatcctcgagtgtttagagaagaggaagatatcctggctggcactctttcagttgacagagagtggtaagaaacacgctgctgaggcacaaatgcggagggccgctcttttcagaggcatcttgcaaatggttaagaacgagccctccttgaggttccttgctaagtaagtttataagctccattttagttgggacagattaagcacaaacttgtttaaagcaataagataatttactggctcactggtcaaccccaggaccaatgggcctatcatggggactgcctctctctgcaccacacccaccctcctgcaagaggtcgacccccccatcctctcccagctgctgacaggtacctgggtatcctcagctcaggctgttcgccccacactatccccacagccaggcctcccagggtacacgtcccgacccccaggggtgtccccagcactgataataggcagagatgtccagagttgcctgagccacttcttggtgttgcagacctcaggctggggcggctcctcctccgtgtggccccggatcagcacaccaggctgctgcctttcgctttttacaggtacctccacccacagggctggtcagggctgggcagtgtttcccagacccccatctcagcacctctgggtcccgccagatgggaagggttgtctgtgcctctgctccacagatgagcagtatcccttggcatcacctgctacctttccagcagtctgtagccatttgtcactatgtctttacctctagtcttctctcctacttccatgaagacgcggccatcagggaagaggccttcctgcatgttgctgtggacatgtacttgaagctggtccagctcttcgtggctggggatacaagcacagtttcacctccagctggcaggagcctggagctcaagggtcaggcaggtgcaagggccagtcccacctccaggggagctccccccagccggaggctccttctgccaaagaatgttccggcacagcatgcagactatgggggacacaccagccctgtttctgtatgtcttctaacctgtgagtttgcctgttttctctctagggcaaccccgtggaactgataacaaaagctcgtctttttctgctgcagttaatacctcggtgcccgaaaaagagcttctcacacgtggcagaggtaacgtcaagatgcccaccttgggccatgtgggggacatgagaattgacagctgcctgggccatgtgcctgcctggctggcaatacaactcgactatttctgccagagcccctcccctgtggtctgaggcctagtgggcggcatgggctgaggacctgctcctctctcacagctgctggctgatcgtggggactgcgacccagaggtgagcgccgccctccagagcagacagcaggctgcccctgacgctgacctgtcccaggagcctcatctcttctgacgggacctgccactgcacaccagcccagctcccgtgtaaataatttattacaagcataacatggagctcttgttgcactaaaaagtggattacaaatctcctcgactg

SEQ ID NO: 11929 - DNA, 696 bp, Homo sapiens
gctttccacgtttgtgcagcaatcctcgagtgtttagagaagaggaagatatcctggctggcactctttcagttgacagagagtgacctcaggctggggcggctcctcctccgtgtggccccggatcagcacaccaggctgctgcctttcgctttttacagtcttctctcctacttccatgaagacgcggccatcagggaagaggccttcctgcatgttgctgtggacatgtacttgaagctggtccagctcttcgtggctggggatacaagcacagtttcacctccagctggcaggagcctggagctcaagggtcaggcaggtgcaagggccagtcccacctccaggggagctccccccagccggaggctccttctgccaaagaatgttccggcacagcatgcagactatgggggacacaccagccctgtttctttaatacctcggtgcccgaaaaagagcttctcacacgtggcagagctgctggctgatcgtggggactgcgacccagaggtgagcgccgccctccagagcagacagcaggctgcccctgacgctgacctgtcccaggagcctcatctcttctgacgggacctgccactgcacaccagcccagctcccgtgtaaataatttattacaagcataacatggagctcttgttgcactaaaaagtggattacaaatctcctcgactg

SEQ ID NO: 11930 - DNA, 1264 bp, Homo sapiens
acccaccctcctgcaagaggtcgacccccccatcctctcccagctgctgacaggtacctgggtatcctcagctcaggctgttcgccccacactatccccacagccaggcctcccagggtacacgtcccgacccccaggggtgtccccagcactgataataggcagagatgtccagagttgcctgagccacttcttggtgttgcagacctcaggctggggcggctcctcctccgtgtggccccggatcagcacaccaggctgctgcctttcgctttttacaggtacctccacccacagggctggtcagggctgggcagtgtttcccagacccccatctcagcacctctgggtcccgccagatgggaagggttgtctgtgcctctgctccacagatgagcagtatcccttggcatcacctgctacctttccagcagtctgtagccatttgtcactatgtctttacctctagtcttctctcctacttccatgaagacgcggccatcagggaagaggccttcctgcatgttgctgtggacatgtacttgaagctggtccagctcttcgtggctggggatacaagcacagtttcacctccagctggcaggagcctggagctcaagggtcaggcaggtgcaagggccagtcccacctccaggggagctccccccagccggaggctccttctgccaaagaatgttccggcacagcatgcagactatgggggacacaccagccctgtttctgtatgtcttctaacctgtgagtttgcctgttttctctctagggcaaccccgtggaactgataacaaaagctcgtctttttctgctgcagttaatacctcggtgcccgaaaaagagcttctcacacgtggcagaggtaacgtcaagatgcccaccttgggccatgtgggggacatgagaattgacagctgcctgggccatgtgcctgcctggctggcaatacaactcgactatttctgccagagcccctcccctgtggtctgaggcctagtgggcggcatgggctgaggacctgctcctctctcacagctgctggctgatcgtggggactgcgacccagaggtgagcgccgccctccagagcagacagcaggctgcccctgacgctgacctgtcccaggagcctcatctcttctgacgggacctgccactgcacaccagcccagctcccgtgtaaataatttattacaagcataacatggagctcttgttgcactaaaaagtggattacaaatctcctcgac

SEQ ID NO: 11931 - DNA, 745 bp, Homo sapiens
acccaccctcctgcaagaggtcgacccccccatcctctcccagctgctgacaggtacctgggtatcctcagctcaggctgttcgccccacactatccccacagccaggcctcccagggtacacgtcccgacccccaggggtgtccccagcactgataataggcagagatgtccagagttgcctgagccacttcttggtgttgcagacctcaggctggggcggctcctcctccgtgtggccccggatcagcacaccaggctgctgcctttcgctttttacagtcttctctcctacttccatgaagacgcggccatcagggaagaggccttcctgcatgttgctgtggacatgtacttgaagctggtccagctcttcgtggctggggatacaagcacagtttcacctccagctggcaggagcctggagctcaagggtcagggcaaccccgtggaactgataacaaaagctcgtctttttctgctgcagttaatacctcggtgcccgaaaaagagcttctcacacgtggcagagctgctggctgatcgtggggactgcgacccagaggtgagcgccgccctccagagcagacagcaggctgcccctgacgctgacctgtcccaggagcctcatctcttctgacgggacctgccactgcacaccagcccagctcccgtgtaaataatttattacaagcataacatggagctcttgttgcactaaaaagtggattacaaatctcctcgac

SEQ ID NO: 11932 - DNA, 14987 bp, Homo sapiens
taaaaaggtaggttcactcttttcctatttttccattctgccatacgtttcaggtttacgcagctttcggaccggaaggccgaggtctgctgccgctttgtgcccatctcaggggcagctcctgggtcaggctggctgtcatggggcagctcctgagtcaggctggctgtcatggccacctctgctgtctgcttaggcagcctgactgctgagtgctgcctttccttgtgttctctgagtgtaaagtgaagttgtatgaagacaactacaagtctgtaattgtaatgaaatagatgttggcatttataggatagatgaattaaaagatcagtattcataataagtatctttccctggaaagaagaattcttattcctctcatctagtaaatgttccttacattgttcagacaaaggaatttttttttttttttgagatggagtcttgctctgtcgcccaggctggagtgcagtggtgcgatctcggcccactgcaacctccacctcccgggttcaggcagttctcctgccttagcttcccaagttgctgggattacaggcacgtgccaccatacccggctaattgttttgtatgttttttagtagagatagggtttcaccatgttggccaggctgttttcgaactcctgacctcaagtgatccacccgccttggcctcccaaagtgctgggattacaggcgtgagccgctggtgcccggcccagacaaaggaatttaaagatgagcattggaaaccctgaatgtcaaaagtaaaggtgaaatggcactgcaaaccagtgttgtccttttataggattttaatgaacgtctcgtgtataaaatagtggttttcaggctgggcgtggtggctcatgcctgtaatcccaacactttgggaggccgaggcgggcagatcatgaggtcaagagatcgagaccagcctggccaacatggtgaaacctggtctctactaaaaatacaaaaattagccaggcgtggtggcgcacgcctgtaatcccagctacttgggaggctgaggcaggagaatcgcttgaaccagggaggcaaaggttgcagtgagccgagactgcaccactgcactccagcctgggcaacagagcgagactccacctcaaaaaaaaaaaaaaataaataaataatggttttcaacttcaggcttcacattagaatcaactgagaagcttttgaaactatagattcctggcccctttccagataaattaagtcagaatctgggagcagcccctgaggatccagggtgcacgtatttccagttatttcctctgaggaactttgtccctggtgccaagtttttaaagaaaacatggagtttgagcttaggagagggcagcgtggttcccacccagcatgctgagcagggacgacagtccttggagcaggctggttataaacatgggaggctctcatctcctcgggggcagagatggacacggtcacgcagcaccaatagtgtgtctggcttgtccagttggtgtgcatttttggtgggaacgccattcctggcagaggcctagagatgggctgtttcactgcccgggaccaaaccagccctacccctgggaggcagttttgttcctgcaattctgcttccagacatttagctcaaggaagcagtcagatggcaggaaggtctgcacataggctcttccctggagcactgtgcacagccatgatcgctgaggggctctgcacccttccaggggctggactgaggtcccctgaacgtggggttgtgtgttgtgccctcccaggggctggactgaggtcccctgaacgtggggttgtgtgttgtgccctcccaagggctggactgaggtcccctaaacgtggggttgtgtgttgtgccctcccaggggctggactgaggtcccctgaacgtggggtcgtgtattgcgccctcccaggggctggactgaggtcctctgaatgtggggttgtgtgtgtgggctgttgatggtctgtttccacctgagcatttgctcagccactcacagtgaaacttgcgcaatgaagaaacggccgggtcactctctgtttcagtttcagttcctcatgttcagattgttctcagaggcccgacagcctctttctgaggaggacgtagccagcctttcctggagacccttgcaccttccttctgcagactggcagagagctgccctctctctctggacacacagaaccttccgagaggtgttgaaagaggaagatgttcacgtaggtgaccgttccttctcctgcatcatgccacgtcctgagtctagggtttgtgtgtgctcctcgggcaagaacagcagcacgtaggtgaccgttccttcccctgcatcatgccacgtcccgagtctagggtgtgtgtgtgccgactgtctcctcgtctcgagtctagggtgcgtgtgccgactgtctcctcagaggcaagaacagcagcacttagatggtttgattggaatcttgactaaaatcgttgtggcctcatgtgcagctcttaagaaattatacagatactgggcacggtgctcacacctgtgatcccagcactgtgggaggccaaggcgggttgatcacctgaactcaggagttcaagaccagcccgggcaacatagtgaaaccccatctctacaaagaatgcaaaaattagctgggcacagttgtgtgcacctttggttccagctacttgggaggctgaggcaagagaaatcacttgagcccaggaggtggaggttgcagtgagccaagatcacgccactctattccagccaggatgacacagcaagaccctgtctcaaaaaaatatattaataaatacagagaaaccctgctatactttctcagtttctcccaacacgaacttctttttttatttttactgatatattttttgagacaacgtctcgctgtgctcagtggtgcagtcttggctcactgcagcctctgcctcctgggttcaagcaattctcatgcctcagcctctccagtagctgggactacaggcgcctgccaccacgcccgactaattttggtatctttagtacagacggggtttcaccatgttgtccaggctggtcttaaactcctggcctcaaattacccacacgccttggcctcccaaaatgctggaattacaggcgtgagccattgcgcccgagaacttgttttttgttgttgttgttgttttgttttttttttctggtggagtcttactctggggcacagtggcgcaatcttggctcactgcagcctctgcctctctggttcaagtgattctcctgcctcagcctcccaagtagctgggactacaggcgcgcaccaccacgcctggctaagttttgtatttttagtagagatggggtttcaccatgttaggctggtctcgacctcctgacctcgtgatctgcccgccttggcctcccaaagtgctgggattacaggtgtgagccactgcgctcggcccctgggaacttgttttaaacatgtctgccaggctgtgtggtggtcactcagggtctctgggctcacccatgtgtgcctggttactggagctggcattgctctcaccagtgtgccttggtactgatttatttctgaggatgtttgcctggttgttttggtctttagaaaagaatttcaaggtggctgggcacagtggctcatgcctataatcccagcactttgggaggctgagatgtcaggagattgagaccatcctgggtaacacgatgaagccccatctctactaaaaataggaaaaagtgatccttctgctttggcctgccaatatgttgagattgcaagtgtgagccactgtgccaagccttttgtgaaattattttattatttttaaattattatttttttttttggagatggaatcttcctctgttgcccaggctggagtgcagtggcacaatcttgggtcactgcaacctcagccttctgggttcaagggattctcctgactcggcctcccaagtagctgggaccacaggtgcacgccaccgcgcccagctaactttttgtatttttagtagagatggggtttcactgtgttagccaggatggtctcaatctcctgacctcatcatcctcccgcctcggcctcccaaagtgctgggattacaggtgtgagccaccacgcccaaccctttttttttttttttttcgtatttttagtagaaacagggtttcaccgtgttagctaggatggtctcaatctgctgacctcgtgatctgcctgcctcggcctcccaaagtgctgggattacaggcatgagccaccgtgctcggcctcctaaaaatgtttttaaaaaacttagctggtcatggtgatgtgcacctgcagtcccagccatctgagaggctgagggggagaattctggagttcaggaggcagagtctgcagcgagctacgattgcaccactgcacacactccagcctgggcaacagaacctgtttccaaaaataaatgaaggtatgctactgtgaatagctgtagaatgttgttgttttgttagtttcttttttcttttttttttttttcctttttatagatagttctcactctgttactcactgcagccttgacctcctgggctcaagagatcctcctgcctcagcctcccaagaggctgggaccacacacatgtgccaccacacctggctgatttttaaatcttttgtagagacggggtgtcaccatgttgcctaggctggtgtcaaactcctaggctcaagcaatctgctggcctcagcctcccaaagtgctgggattacaggcatgagccaccgtgcccaggtaatttttaaatgagatgaggtcttactatgttgcccagactaaaatagccgttttatacttagaaagaaggattacagtactaacatctttgtgctagggaaatcctgtaagaaatcattcttgataaaactaaggtttctttcctgtggaactctcagctgcaatttcattataacacagggacatggaggactgcgtatgagatgaaatgacaaactggtttataaacctgtcggtggattgtgtgttctgtcctcattgtattgaattgcttgctctctttctcagttaacttaccaagactggttacacctggagctggaaattcaacctgaagctgatgctctttcagatactgaacggtaagtgttgaaaagagctaccctggccaggcatgatggctcacacctataatcccagcactttgggaggctgaggcaggagatctcttgaatccaggagtttgaggtcagcctgggcaacatggggaaactccatttctacaaaaaatagaaaagaaattagccggacatgcggcacgttccagtcatcacagccacttgggaagctgagcaggagcattgcttgagcctgggaggtagaggctgcagcgagctgagatcacaccactgcactttagcctgtgcaacggagtgagaccctatctcaaaagaaaaaggagcttccctttaaaatgttacacggttttccacattgccttaaagcctatgtttcgtcattttatcctcaatttaatgtttggtttacctgttaatctttgagcacaatttcaattttttttttttcggtggcaagatttattaaagcaaaagcgaaagtaaagcttccacgcggtggcaatttctgtttttctttttttttttttttttctgagacagagtcttgctctgtcacccaggctggaatgcagtggcgcgatctcggctcactgcaacctccacctcccgggttcacgccattctcctggctcagcctcccgagtagctgggactacaggcgcccgccaccatacccagctaattttttgtatttttggtagagacggggtttcaccgtgttaaccagggtggtctcaatctcctgacctcgtgatccacttgccttggcctcccaaagtgctggcattacaggcgtgagccaccgcgcctggccaggttgcccaatttcggttgttattcctttatttaagaaacatttactgagctcctaccatgtggcagacaattctagagtgttctagaagcagggagtatagaggggaataaacaagcctgcccatatggcacctttgtatcaatgagggcagatgtggcacgtataaggcacccacttagacttcaccctaccctggctgggctatggctgctgtccgggagctgtacacctgtgtccaggccctggcaacacacaggtagatacagaagtggattaaaggtaggaatgagccctggagataacagacagggccgtgtgagaggaaatgaccaggcaggagcagaggctggtgtggagcaggtggtgcagactttgaggagtgatgccagccttgacttgggggcaccaagaagtgggtaaatgaagcagtgaacccccatgagtcccagggctgatgactgagaccatttgagactatttgagaggccagatgtgctgttctgggcataggagtagggagcccagaggaccgttgggtttaagggtgtggagtttagggtggaggtcagggagaggggaatgtggtcactgcagatatggagtatcctggtgggtatatgggcctcagggtgcctgccacacctagactcaggagagggttggcaacagccaccctgtgctcctcgtccttccggccatcaggggccttccaggcacatgcagcactgtcgcctgcacctggatcctggtatcagattctggatgaaaccaatggaagtaataggaaaaggaaaacataggggccacaaaaagaaaactcgctgctgcctgcggcaaaacacgtgctgatggttcaggtcgtgccaagcccgctctgcaggcgcttccttcactcacccccgtttctcctcccggctgctctctggggtggagtctaaggaggaggtcagagggaggggcttgtctgctgcatgaggtcatgctgcatcaggtcaccgctgcgtggaagttgtgttgagatgtgttgcgggattttctttcttttctgaattacttaagtgatacttagatacattctgtgccagttccagacagtgtgggtggagcaccccagttccggacagcgtgggtggagcaccccggtcccggacagcgtgggtggagcaccccggtcccgcacagcgtgggtggagcacccaggtcccgcacagcgtgggtggagcaccccagtcccggacagtgtgaggagagcacacactccctagcactcacatttgcagggtcgtgtggagcgttttcctggttgtggctctttctgcataaatggattgcggtattgatggttctgtgcactgcggatttgtttgtttgtttgagacagggtctcactctgttggccaggatggagtacagtgatgcactcacggctcacggcagcttccctctccagagctcgagtgatcctcctgcctcagcctcctgagtagctgggaccacaggtgggcactactatgcccagctaatttttttattttttgtaggaatggggtctccctttgttgctcaggctgatgtcagactcctgggctcaagtgatcctcccaccttggcctcccacagtgctgggattacaggtgtagccactgcagttttgagtcagtgtctccttgagccccttcccatccgtatccacagagtccacagtctggatgcaggttgcttcaccatccccttctggtgggcctgtgagtagctcaggtgccctcaggtgactttccaggctactttttttttttttttttttttttttttttttagacggagtctcgctctgttgcccaagcaggagtgcagtggcatgatctcagctcactgcaagctccacctcccaggttcataccattctcctgcctcagcctcctgagtagctgggactacaggcgcccaccaccacgcccggctaattttttgtattttgagtagagacgaggtttcaccgtgttacccaggatggtctcgatctcctaacctcgtgatccgcccgcctgagcctcccaaagtgctgggattacaggcatgagccactgcacctgccccagcctacatttttgtgcttgcctattctgttcaccaagctcatgtgctgtgtggccagcagttaccccgtgggatgtcatcctgagtggcctttgatccgtggaaggtggggtcacaaaggtcactcctgagaccaggcctttcccacatccccaggcatcccaccctgcagacagtgaggtctcatccctactccaaggtcccgagccgccagtctcaacccagctctcactagtgctgtgtgtcccttactatgggcctattccctggttatggggaaccgctggccacgaagcatttctcagaattgatagcagtgtttgctgttctaggcaggacttccaccagtgggcgatccatgagcactttctccctgagtcctcggcttcagggggctgtgacggagacctgcaggctgcgtgtaccattcttgtcaacgcactgatggatttccaccaaaggttagcagcacacactgtattagggttctctggagggacaggactaataggatatatataaaggggagtttctggccatgctggtgcccatctaattagcttagggtgggtctgcctttcccagcctatacccaaatgtcagtctcctttggcaacaccctcacagacacactcaggatcaatgctttgcatccttcagtccagtcacgttgacactcagtattaaccatcacacaccgatgaggccttacttttaatcatggtagttctaagaatgcatttttctctcagtccaattttggtatgcaaagtacacttgagcctatcacatagcaaatctatgtcaatacaaaataaagccaagcttcctgcatcggttgtttctttatgtgtatagacttgtcagaagcgacaacttcgggctgggcgtggtggctcacacctgtaatcccagcacttcgggaggctgaggtgggtggattacctcaggtcaggagttagagaccagcctggcctacatggtgaaacctccctctctactaaaaatacaaaaattagctgagtgtggtggcgggtgcctgtaatcccagctacttgggaggctgaggcaggaggattgcttgaacctgggaggcagaggttgcagtgagccgactgggcgacagagcaagactctgtctcaaaaaaaagataaaaatagcaacaacgttgtttttctgttctgtcacctggtattcaaggtgagcatgtgtgaagcacggcacaaatggcctagtagatcctgggcatcacagcctctctccatctgagagggattctcaggacagagcagttcctgaggtgttgcatgtgggccagaaggatggacggagtgtacctggggctgtccaggctttgtccccaggggctcttgtttgcagcttcacactgttgtgttacagctgcagcattcagtacagatggcaagtgtgtatgcagcttccccccatgtctcctgcctgcggcaaccacgaatccattttatgttcatggatttgcctgtttgggatgtttaatatcaacagaatcatgtagtatgtggccctttgtgtctggcttctttggctgagcagaatgtttctgaggctcatctgtgttgtagcacatatcagcatacccttccttcttatggctgactgatgctcacagaaggtatggaggctgacgcacctccatcgtgggtgacttcttgttaaccctactccaagaatgcctcctgagatttcccatttatctgctgttaccttaaatcccactcttaggtcaaaacaaccttgaggctgggcgcagtggctcatgcctggaatctcagcactgggaggccaaggcaggcggatcatctgagctcaggagctcgagaccagcctggtgaaaccgtctagacaaaaaaaaaaattagccaggcatggtagtgtgtgcctatggtcccagctactcgtgaggctgaggtgggattgcatgagccggggaggcagaggttgcaatgagctgtgaaaacaccactacattccagcctgtgtgacagagtgagactccatctcaaaacaaaaaagcaaatcttccaccataaatccagcggttagattcacagagcattcttgcctttccctgaggggttgacttcaatagtccttccctgtggtatagaagccctgcctgggggtaacagtgcagggatgcatcgtctctctaggctgcctgagacatggtttctgtctgtaagtccttaaacgtttctgtctgagaaactggattattcagcctctcttcagccttccagcttccccagcctttatgggtaggtttgcacagagctgctcactgcggaacagaaagatcagccatattttgtttatccattcactttgtttgtttgttttttgagatagtcttactttgtcttatttatatttattttgaaactgggtctttctttgtcacccaggctggggtacagtgactgcagcccactgcagcctcgacctcctgggctcaagtgatcctcctgcttcagcccctcaagtagctgggaccacaggcaccaccatacctggcaaatttttgtagttgtagtagagatggggtttcaccatgttggccagactggtcttgaacttctgacctcaggtgatctgcccgcctcggcctcccaaagtgctgggattacaggcgtgaacctctgccaggcctgacttgatggtagccatcctagtgggtattaagtgctatttgatagtggtttcgatttgcacttccctaatgggtagtgattttgaacatctttccattttcttattggccattttagattttttttggagaaatctgttcacatccttagcccatttgaaaactgggtcacattcatgtactgcataagaatgttctggttaacaacgagccacatatatgacagtaatcccacatagccataattttttgtaccttttttttaaactgtgtttttaccgtaccttttctatgtttagatacacaaatactgttgtgttacagttgcggcatgcaatacagttacatgctatgccggtttatagcctgggagcggtgggccgtgccatgtggcctaggtgtgcgggggctctggtctgtttctgcgcggtgggccgtgccgtgtggcctaggtgtgcgggcggctccggtctgtgtctgtgcggtgggccgtgccgtgtggcctaggtgtgcggggggctctggtctgtgtctgtgctcttggatgttcacgtgatgaaaccacctaaagatgtgtttctcagaatggatccttgtcattgagcagttcatgactgtatttgtcttactgagttgtatgagttctttatatattttagataaagttcttatcaaatatatgatttgtaaatattttttcccattctgttaattcttttttcactctcttgatagtatcgtttaatgcacaaaggttttaaatttttataaagtccagatcatttatttttagtttagctctttaggattttgattcattttgatggatcagaaaacattttgggccagccacggtggctcacgcctgtaatcccagcactttgggaggctgaggcgggcagatcacttgatgtcaggagttcgagaccagcctggccaacatggcgaaactaaaaaaatacaaaaactagccaggcatggtggcaggcgcctgtaatcccagctactcgggaggctgaggcggcaggagacttgcttgaacctgggaggcggaggttgcaatgagcccagattgtgccactgcactccagcctgggcgacagagtgagagactgtctcaaaaaaaaaaaaaaaattgttgtgtgaggtcatccagctttattctgttgcttgtggccatgcagttgtcccagcaccatttgttgaaaacacttctttccccactgaatggtcttggcacccttgtcaaaagttagatggctgctcgtgtgagggtttgtttctggctctcattgtgttcccttggtctgtatgtccatatgcactgcgtcattgggatgaagctttgtagtaggttttaaaattgggaagtgtgaggcctccaacttggttcttctttttcaggatggtttggcttttctaggtgctttgtagttgtgtcttaattttgggatgagcttgtcagtttcgacaaaagtagctgggaccctgatacggactgcatgtggggcagtattgccatctcagtgatagcgagtcttctttccttttgaatcatttgttgctaacgtatagaaacaccagtgattcttgtatattcattggctctagtcatttattagttctaagagtgtttttgtatcgattccttagggctttgtatatataagatcgtgtctggccaggcatggtggctcatgcctgtaatcccagcactttgggagggtgaagtgggcggatcatgaggtcaggagttggagaccagcctggccaacatggtgaaaccccatctctactaaaaatacaaaaattagccgggcatcgtggtgggctcctgtaatccgttacttgggaggctgaggcagaagaatcacttgaactcaggaggcagaggttgcagtgagttgagatcatgccactgcaactccagcctgggcgacaagagtgaaactcagtctcaaaacaaaaaaacaaaagaaagatcatataatatgtgaagagagatagtttcactttttcctttcctatctggatgctttttctttttcttgttgaattgccccggcttgaactccccgggcagtgttgttttttttgttgttgttttgttttgtttttttttttctgagacggagtctcgctctgtcacccaggctggagtgcagtggtgcaatctcggcttaccgaaaccttcgcctctcaggttcaagcgattctcctgcctcagcctcccgagtagctgggattacaggcacccgccaccatgcccagctaatttttgtttgtttgtttttgagacagagtgtcgctgtgtgtcccaggctggagtacagtggcactatctcagctgtctgcaacctccgccttccaggttcaggcaattctgctgcctcagcctcccaataggtgggattactggcgtccgctaacacgcccgtctaatttttgtatttttagtagagatagggtttcgccacattggccaggatggtctcgatctcctgacctcagatgatctgcctgcctcggcctcccaaagtgctgggattacaggcgtgagccaccgtgtctgtccccagtgcagtgttgagtagaggcagcgacactgttctgagtgtagagaggacatccttgttgcccctgatcttaggagaacagctttcagtctttcctcattaaatctgacgtttgctgtgggttttcatccatgccaggcactagattgagaagatttcctttgttcctggttgattgagtgtttttatcacaaaaggatgtcacatttcgtcaagtgctttttctacatctattgagataatcttacggtttttgctttttattttattgataactgcgttatattggtttggggatcttaagctatccttgtgtagggaccagccccggagggtcggtgggtctctccctgtgtgcggcgatgagagagtgtagaaataaagacacaagacagagataagagaaaaggcagctgggcccgggggaccactaccaccaatgcgcggagaccggtagtggccccgagtgtcgggctgcgctgttacttattggatacaaggcagaaggggcagggtaaacaatgtgagtcacctccaatgataggtaaggtcacgtgggtcacatgtccactggacagggggcccgtccctgcctggcagctgaggcagagagggagaggagacagagagaaagacagcttacgccattatttctgcatatcagggactattagtattttcactaatttgctactgctatctggaaggcagagccaggtgtacaggatggaacatgaaggtggactaggagcatgaccactgaagcacagcatcacagggagacggtgaggcctccggataactgcgggcgagtctgactgatgtcaggccctccacaagaggtggaggagcagagtcttctctaaactccccgggggaaagggagactccctttcccggtctgctaagtagtgggtgttgttccttgacaccttttgctaccgctggaccacgatccgcttggtgacgggcgtcttcccagacgctggcatcaccgctagaccaaggagccctctggtggccctgtccgggcacaacagaaggctcgcactcttgtcttctggtcacacctcagtatatcccctcagctcctatctctgtatggcctggtttttcctaggctatgattattgagtgaggattatcataatattggaataaaaagtaattgctaccaactaatgattaatgatattcatatgtaatcatatctaagatctatatctggtataactattcttgttttatattttattatactggaacagctcgtgtcctctgtctcttgccttggtgcctgggtggcttgccacccacatccttgcattcttgggataagcctccttggtcatggtacataatttttgtatttcctaggttggggttggtagtattttgtggcagtttttgttgtttattgttgactaatgtgagggtcacactgtcagagaagcacagccatcactcagctccggaggcaggaggagaactgggaacttcagcactattaggcgatactgaggaggattttattgtattttcatttcagctcaaggagttatgaccactcagaaaattctgatttggtctttggtggccgcacaggaaatg

SEQ ID NO: 11933 - DNA, 605 bp, Homo sapiens
taaaaagtttcagttcctcatgttcagattgttctcagaggcccgacagcctctttctgaggaggacgtagccagcctttcctggagacccttgcaccttccttctgcagactggcagagagctgccctctctctctggacacacagaaccttccgagaggtgttgaaagaggaagatgttcacctggtcatggtgatgtgcacctgcagtcccagccatctgagaggctgagggggagaattctggagttcaggaggcagagtctgcagcgagctacgattgcaccactgcacacactccagcctgggcaacagaacctgtttccaaaaataaatgaagttaacttaccaagactggttacacctggagctggaaattcaacctgaagctgatgctctttcagatactgaacggcaggacttccaccagtgggcgatccatgagcactttctccctgagtcctcggcttcagggggctgtgacggagacctgcaggctgcgtgtaccattcttgtcaacgcactgatggatttccaccaaagctcaaggagttatgaccactcagaaaattctgatttggtctttggtggccgcacaggaaatg

SEQ ID NO: 11934 - DNA, 16184 bp, Homo sapiens
cctctctctctggacacacagaaccttccgagaggtgttgaaagaggaagatgttcacgtaggtgaccgttccttctcctgcatcatgccacgtcctgagtctagggtttgtgtgtgctcctcgggcaagaacagcagcacgtaggtgaccgttccttcccctgcatcatgccacgtcccgagtctagggtgtgtgtgtgccgactgtctcctcgtctcgagtctagggtgcgtgtgccgactgtctcctcagaggcaagaacagcagcacttagatggtttgattggaatcttgactaaaatcgttgtggcctcatgtgcagctcttaagaaattatacagatactgggcacggtgctcacacctgtgatcccagcactgtgggaggccaaggcgggttgatcacctgaactcaggagttcaagaccagcccgggcaacatagtgaaaccccatctctacaaagaatgcaaaaattagctgggcacagttgtgtgcacctttggttccagctacttgggaggctgaggcaagagaaatcacttgagcccaggaggtggaggttgcagtgagccaagatcacgccactctattccagccaggatgacacagcaagaccctgtctcaaaaaaatatattaataaatacagagaaaccctgctatactttctcagtttctcccaacacgaacttctttttttatttttactgatatattttttgagacaacgtctcgctgtgctcagtggtgcagtcttggctcactgcagcctctgcctcctgggttcaagcaattctcatgcctcagcctctccagtagctgggactacaggcgcctgccaccacgcccgactaattttggtatctttagtacagacggggtttcaccatgttgtccaggctggtcttaaactcctggcctcaaattacccacacgccttggcctcccaaaatgctggaattacaggcgtgagccattgcgcccgagaacttgttttttgttgttgttgttgttttgttttttttttctggtggagtcttactctggggcacagtggcgcaatcttggctcactgcagcctctgcctctctggttcaagtgattctcctgcctcagcctcccaagtagctgggactacaggcgcgcaccaccacgcctggctaagttttgtatttttagtagagatggggtttcaccatgttaggctggtctcgacctcctgacctcgtgatctgcccgccttggcctcccaaagtgctgggattacaggtgtgagccactgcgctcggcccctgggaacttgttttaaacatgtctgccaggctgtgtggtggtcactcagggtctctgggctcacccatgtgtgcctggttactggagctggcattgctctcaccagtgtgccttggtactgatttatttctgaggatgtttgcctggttgttttggtctttagaaaagaatttcaaggtggctgggcacagtggctcatgcctataatcccagcactttgggaggctgagatgtcaggagattgagaccatcctgggtaacacgatgaagccccatctctactaaaaataggaaaaagtgatccttctgctttggcctgccaatatgttgagattgcaagtgtgagccactgtgccaagccttttgtgaaattattttattatttttaaattattatttttttttttggagatggaatcttcctctgttgcccaggctggagtgcagtggcacaatcttgggtcactgcaacctcagccttctgggttcaagggattctcctgactcggcctcccaagtagctgggaccacaggtgcacgccaccgcgcccagctaactttttgtatttttagtagagatggggtttcactgtgttagccaggatggtctcaatctcctgacctcatcatcctcccgcctcggcctcccaaagtgctgggattacaggtgtgagccaccacgcccaaccctttttttttttttttttcgtatttttagtagaaacagggtttcaccgtgttagctaggatggtctcaatctgctgacctcgtgatctgcctgcctcggcctcccaaagtgctgggattacaggcatgagccaccgtgctcggcctcctaaaaatgtttttaaaaaacttagctggtcatggtgatgtgcacctgcagtcccagccatctgagaggctgagggggagaattctggagttcaggaggcagagtctgcagcgagctacgattgcaccactgcacacactccagcctgggcaacagaacctgtttccaaaaataaatgaaggtatgctactgtgaatagctgtagaatgttgttgttttgttagtttcttttttcttttttttttttttcctttttatagatagttctcactctgttactcactgcagccttgacctcctgggctcaagagatcctcctgcctcagcctcccaagaggctgggaccacacacatgtgccaccacacctggctgatttttaaatcttttgtagagacggggtgtcaccatgttgcctaggctggtgtcaaactcctaggctcaagcaatctgctggcctcagcctcccaaagtgctgggattacaggcatgagccaccgtgcccaggtaatttttaaatgagatgaggtcttactatgttgcccagactaaaatagccgttttatacttagaaagaaggattacagtactaacatctttgtgctagggaaatcctgtaagaaatcattcttgataaaactaaggtttctttcctgtggaactctcagctgcaatttcattataacacagggacatggaggactgcgtatgagatgaaatgacaaactggtttataaacctgtcggtggattgtgtgttctgtcctcattgtattgaattgcttgctctctttctcagttaacttaccaagactggttacacctggagctggaaattcaacctgaagctgatgctctttcagatactgaacggtaagtgttgaaaagagctaccctggccaggcatgatggctcacacctataatcccagcactttgggaggctgaggcaggagatctcttgaatccaggagtttgaggtcagcctgggcaacatggggaaactccatttctacaaaaaatagaaaagaaattagccggacatgcggcacgttccagtcatcacagccacttgggaagctgagcaggagcattgcttgagcctgggaggtagaggctgcagcgagctgagatcacaccactgcactttagcctgtgcaacggagtgagaccctatctcaaaagaaaaaggagcttccctttaaaatgttacacggttttccacattgccttaaagcctatgtttcgtcattttatcctcaatttaatgtttggtttacctgttaatctttgagcacaatttcaattttttttttttcggtggcaagatttattaaagcaaaagcgaaagtaaagcttccacgcggtggcaatttctgtttttctttttttttttttttttctgagacagagtcttgctctgtcacccaggctggaatgcagtggcgcgatctcggctcactgcaacctccacctcccgggttcacgccattctcctggctcagcctcccgagtagctgggactacaggcgcccgccaccatacccagctaattttttgtatttttggtagagacggggtttcaccgtgttaaccagggtggtctcaatctcctgacctcgtgatccacttgccttggcctcccaaagtgctggcattacaggcgtgagccaccgcgcctggccaggttgcccaatttcggttgttattcctttatttaagaaacatttactgagctcctaccatgtggcagacaattctagagtgttctagaagcagggagtatagaggggaataaacaagcctgcccatatggcacctttgtatcaatgagggcagatgtggcacgtataaggcacccacttagacttcaccctaccctggctgggctatggctgctgtccgggagctgtacacctgtgtccaggccctggcaacacacaggtagatacagaagtggattaaaggtaggaatgagccctggagataacagacagggccgtgtgagaggaaatgaccaggcaggagcagaggctggtgtggagcaggtggtgcagactttgaggagtgatgccagccttgacttgggggcaccaagaagtgggtaaatgaagcagtgaacccccatgagtcccagggctgatgactgagaccatttgagactatttgagaggccagatgtgctgttctgggcataggagtagggagcccagaggaccgttgggtttaagggtgtggagtttagggtggaggtcagggagaggggaatgtggtcactgcagatatggagtatcctggtgggtatatgggcctcagggtgcctgccacacctagactcaggagagggttggcaacagccaccctgtgctcctcgtccttccggccatcaggggccttccaggcacatgcagcactgtcgcctgcacctggatcctggtatcagattctggatgaaaccaatggaagtaataggaaaaggaaaacataggggccacaaaaagaaaactcgctgctgcctgcggcaaaacacgtgctgatggttcaggtcgtgccaagcccgctctgcaggcgcttccttcactcacccccgtttctcctcccggctgctctctggggtggagtctaaggaggaggtcagagggaggggcttgtctgctgcatgaggtcatgctgcatcaggtcaccgctgcgtggaagttgtgttgagatgtgttgcgggattttctttcttttctgaattacttaagtgatacttagatacattctgtgccagttccagacagtgtgggtggagcaccccagttccggacagcgtgggtggagcaccccggtcccggacagcgtgggtggagcaccccggtcccgcacagcgtgggtggagcacccaggtcccgcacagcgtgggtggagcaccccagtcccggacagtgtgaggagagcacacactccctagcactcacatttgcagggtcgtgtggagcgttttcctggttgtggctctttctgcataaatggattgcggtattgatggttctgtgcactgcggatttgtttgtttgtttgagacagggtctcactctgttggccaggatggagtacagtgatgcactcacggctcacggcagcttccctctccagagctcgagtgatcctcctgcctcagcctcctgagtagctgggaccacaggtgggcactactatgcccagctaatttttttattttttgtaggaatggggtctccctttgttgctcaggctgatgtcagactcctgggctcaagtgatcctcccaccttggcctcccacagtgctgggattacaggtgtagccactgcagttttgagtcagtgtctccttgagccccttcccatccgtatccacagagtccacagtctggatgcaggttgcttcaccatccccttctggtgggcctgtgagtagctcaggtgccctcaggtgactttccaggctactttttttttttttttttttttttttttttttagacggagtctcgctctgttgcccaagcaggagtgcagtggcatgatctcagctcactgcaagctccacctcccaggttcataccattctcctgcctcagcctcctgagtagctgggactacaggcgcccaccaccacgcccggctaattttttgtattttgagtagagacgaggtttcaccgtgttacccaggatggtctcgatctcctaacctcgtgatccgcccgcctgagcctcccaaagtgctgggattacaggcatgagccactgcacctgccccagcctacatttttgtgcttgcctattctgttcaccaagctcatgtgctgtgtggccagcagttaccccgtgggatgtcatcctgagtggcctttgatccgtggaaggtggggtcacaaaggtcactcctgagaccaggcctttcccacatccccaggcatcccaccctgcagacagtgaggtctcatccctactccaaggtcccgagccgccagtctcaacccagctctcactagtgctgtgtgtcccttactatgggcctattccctggttatggggaaccgctggccacgaagcatttctcagaattgatagcagtgtttgctgttctaggcaggacttccaccagtgggcgatccatgagcactttctccctgagtcctcggcttcagggggctgtgacggagacctgcaggctgcgtgtaccattcttgtcaacgcactgatggatttccaccaaaggttagcagcacacactgtattagggttctctggagggacaggactaataggatatatataaaggggagtttctggccatgctggtgcccatctaattagcttagggtgggtctgcctttcccagcctatacccaaatgtcagtctcctttggcaacaccctcacagacacactcaggatcaatgctttgcatccttcagtccagtcacgttgacactcagtattaaccatcacacaccgatgaggccttacttttaatcatggtagttctaagaatgcatttttctctcagtccaattttggtatgcaaagtacacttgagcctatcacatagcaaatctatgtcaatacaaaataaagccaagcttcctgcatcggttgtttctttatgtgtatagacttgtcagaagcgacaacttcgggctgggcgtggtggctcacacctgtaatcccagcacttcgggaggctgaggtgggtggattacctcaggtcaggagttagagaccagcctggcctacatggtgaaacctccctctctactaaaaatacaaaaattagctgagtgtggtggcgggtgcctgtaatcccagctacttgggaggctgaggcaggaggattgcttgaacctgggaggcagaggttgcagtgagccgactgggcgacagagcaagactctgtctcaaaaaaaagataaaaatagcaacaacgttgtttttctgttctgtcacctggtattcaaggtgagcatgtgtgaagcacggcacaaatggcctagtagatcctgggcatcacagcctctctccatctgagagggattctcaggacagagcagttcctgaggtgttgcatgtgggccagaaggatggacggagtgtacctggggctgtccaggctttgtccccaggggctcttgtttgcagcttcacactgttgtgttacagctgcagcattcagtacagatggcaagtgtgtatgcagcttccccccatgtctcctgcctgcggcaaccacgaatccattttatgttcatggatttgcctgtttgggatgtttaatatcaacagaatcatgtagtatgtggccctttgtgtctggcttctttggctgagcagaatgtttctgaggctcatctgtgttgtagcacatatcagcatacccttccttcttatggctgactgatgctcacagaaggtatggaggctgacgcacctccatcgtgggtgacttcttgttaaccctactccaagaatgcctcctgagatttcccatttatctgctgttaccttaaatcccactcttaggtcaaaacaaccttgaggctgggcgcagtggctcatgcctggaatctcagcactgggaggccaaggcaggcggatcatctgagctcaggagctcgagaccagcctggtgaaaccgtctagacaaaaaaaaaaattagccaggcatggtagtgtgtgcctatggtcccagctactcgtgaggctgaggtgggattgcatgagccggggaggcagaggttgcaatgagctgtgaaaacaccactacattccagcctgtgtgacagagtgagactccatctcaaaacaaaaaagcaaatcttccaccataaatccagcggttagattcacagagcattcttgcctttccctgaggggttgacttcaatagtccttccctgtggtatagaagccctgcctgggggtaacagtgcagggatgcatcgtctctctaggctgcctgagacatggtttctgtctgtaagtccttaaacgtttctgtctgagaaactggattattcagcctctcttcagccttccagcttccccagcctttatgggtaggtttgcacagagctgctcactgcggaacagaaagatcagccatattttgtttatccattcactttgtttgtttgttttttgagatagtcttactttgtcttatttatatttattttgaaactgggtctttctttgtcacccaggctggggtacagtgactgcagcccactgcagcctcgacctcctgggctcaagtgatcctcctgcttcagcccctcaagtagctgggaccacaggcaccaccatacctggcaaatttttgtagttgtagtagagatggggtttcaccatgttggccagactggtcttgaacttctgacctcaggtgatctgcccgcctcggcctcccaaagtgctgggattacaggcgtgaacctctgccaggcctgacttgatggtagccatcctagtgggtattaagtgctatttgatagtggtttcgatttgcacttccctaatgggtagtgattttgaacatctttccattttcttattggccattttagattttttttggagaaatctgttcacatccttagcccatttgaaaactgggtcacattcatgtactgcataagaatgttctggttaacaacgagccacatatatgacagtaatcccacatagccataattttttgtaccttttttttaaactgtgtttttaccgtaccttttctatgtttagatacacaaatactgttgtgttacagttgcggcatgcaatacagttacatgctatgccggtttatagcctgggagcggtgggccgtgccatgtggcctaggtgtgcgggggctctggtctgtttctgcgcggtgggccgtgccgtgtggcctaggtgtgcgggcggctccggtctgtgtctgtgcggtgggccgtgccgtgtggcctaggtgtgcggggggctctggtctgtgtctgtgctcttggatgttcacgtgatgaaaccacctaaagatgtgtttctcagaatggatccttgtcattgagcagttcatgactgtatttgtcttactgagttgtatgagttctttatatattttagataaagttcttatcaaatatatgatttgtaaatattttttcccattctgttaattcttttttcactctcttgatagtatcgtttaatgcacaaaggttttaaatttttataaagtccagatcatttatttttagtttagctctttaggattttgattcattttgatggatcagaaaacattttgggccagccacggtggctcacgcctgtaatcccagcactttgggaggctgaggcgggcagatcacttgatgtcaggagttcgagaccagcctggccaacatggcgaaactaaaaaaatacaaaaactagccaggcatggtggcaggcgcctgtaatcccagctactcgggaggctgaggcggcaggagacttgcttgaacctgggaggcggaggttgcaatgagcccagattgtgccactgcactccagcctgggcgacagagtgagagactgtctcaaaaaaaaaaaaaaaattgttgtgtgaggtcatccagctttattctgttgcttgtggccatgcagttgtcccagcaccatttgttgaaaacacttctttccccactgaatggtcttggcacccttgtcaaaagttagatggctgctcgtgtgagggtttgtttctggctctcattgtgttcccttggtctgtatgtccatatgcactgcgtcattgggatgaagctttgtagtaggttttaaaattgggaagtgtgaggcctccaacttggttcttctttttcaggatggtttggcttttctaggtgctttgtagttgtgtcttaattttgggatgagcttgtcagtttcgacaaaagtagctgggaccctgatacggactgcatgtggggcagtattgccatctcagtgatagcgagtcttctttccttttgaatcatttgttgctaacgtatagaaacaccagtgattcttgtatattcattggctctagtcatttattagttctaagagtgtttttgtatcgattccttagggctttgtatatataagatcgtgtctggccaggcatggtggctcatgcctgtaatcccagcactttgggagggtgaagtgggcggatcatgaggtcaggagttggagaccagcctggccaacatggtgaaaccccatctctactaaaaatacaaaaattagccgggcatcgtggtgggctcctgtaatccgttacttgggaggctgaggcagaagaatcacttgaactcaggaggcagaggttgcagtgagttgagatcatgccactgcaactccagcctgggcgacaagagtgaaactcagtctcaaaacaaaaaaacaaaagaaagatcatataatatgtgaagagagatagtttcactttttcctttcctatctggatgctttttctttttcttgttgaattgccccggcttgaactccccgggcagtgttgttttttttgttgttgttttgttttgtttttttttttctgagacggagtctcgctctgtcacccaggctggagtgcagtggtgcaatctcggcttaccgaaaccttcgcctctcaggttcaagcgattctcctgcctcagcctcccgagtagctgggattacaggcacccgccaccatgcccagctaatttttgtttgtttgtttttgagacagagtgtcgctgtgtgtcccaggctggagtacagtggcactatctcagctgtctgcaacctccgccttccaggttcaggcaattctgctgcctcagcctcccaataggtgggattactggcgtccgctaacacgcccgtctaatttttgtatttttagtagagatagggtttcgccacattggccaggatggtctcgatctcctgacctcagatgatctgcctgcctcggcctcccaaagtgctgggattacaggcgtgagccaccgtgtctgtccccagtgcagtgttgagtagaggcagcgacactgttctgagtgtagagaggacatccttgttgcccctgatcttaggagaacagctttcagtctttcctcattaaatctgacgtttgctgtgggttttcatccatgccaggcactagattgagaagatttcctttgttcctggttgattgagtgtttttatcacaaaaggatgtcacatttcgtcaagtgctttttctacatctattgagataatcttacggtttttgctttttattttattgataactgcgttatattggtttggggatcttaagctatccttgtgtagggaccagccccggagggtcggtgggtctctccctgtgtgcggcgatgagagagtgtagaaataaagacacaagacagagataagagaaaaggcagctgggcccgggggaccactaccaccaatgcgcggagaccggtagtggccccgagtgtcgggctgcgctgttacttattggatacaaggcagaaggggcagggtaaacaatgtgagtcacctccaatgataggtaaggtcacgtgggtcacatgtccactggacagggggcccgtccctgcctggcagctgaggcagagagggagaggagacagagagaaagacagcttacgccattatttctgcatatcagggactattagtattttcactaatttgctactgctatctggaaggcagagccaggtgtacaggatggaacatgaaggtggactaggagcatgaccactgaagcacagcatcacagggagacggtgaggcctccggataactgcgggcgagtctgactgatgtcaggccctccacaagaggtggaggagcagagtcttctctaaactccccgggggaaagggagactccctttcccggtctgctaagtagtgggtgttgttccttgacaccttttgctaccgctggaccacgatccgcttggtgacgggcgtcttcccagacgctggcatcaccgctagaccaaggagccctctggtggccctgtccgggcacaacagaaggctcgcactcttgtcttctggtcacacctcagtatatcccctcagctcctatctctgtatggcctggtttttcctaggctatgattattgagtgaggattatcataatattggaataaaaagtaattgctaccaactaatgattaatgatattcatatgtaatcatatctaagatctatatctggtataactattcttgttttatattttattatactggaacagctcgtgtcctctgtctcttgccttggtgcctgggtggcttgccacccacatccttgcattcttgggataagcctccttggtcatggtacataatttttgtatttcctaggttggggttggtagtattttgtggcagtttttgttgtttattgttgactaatgtgagggtcacactgtcagagaagcacagccatcactcagctccggaggcaggaggagaactgggaacttcagcactattaggcgatactgaggaggattttattgtattttcatttcagctcaaggagttatgaccactcagaaaattctgatttggtctttggtggccgcacaggaaatgaggatattatttccagattgcaggtgagtttgagggtgccacaactcagtgcattcacttcatttaagccgcgtgctattaagatatttattgccaggcgcggtggctcacgcctgtaatcccagaactttgggaggccgaggcaggcggatcacacagtcaggagatcgagaccatgctggctaacacgatgagaccccgtctctactaaaaatacaaaaatttagccgggcgtggtggcgggcacctgtagccccacctactcgggaggctgaggcaggagaatggcatgaacccaggaggcggagcttgcagtgagccgagattgtgccactgcactccagcctgggcgggcgacagagtgagactccgtctcaaaaaaaaaaaaaagatatttattgttggctcaggcttgtaatcccagtactttgggagtccgaggctggtggatcacctgaagtctatacaggtaggcagcatgtacctgtgtgggttcactgtcagtcaacaggcatttactggtgctggccacccgtgcgtcttctgtgccaggcccctgtctctccctccgccagctctggggcctcccaactccttagccagatgctttccctagacccacctggctccttctcagtgagaccatctgctttttcctcttaattgtaatcataattattattattattgggacagggtcttgctctgtcacccaggctagagtacagtggtgcgatcatatctctctgcagccttgacttcctgggctcaagcaatcctgacagcgtgcacctgtgtgcgccaccacacccagctgattttttgtagagacggagttttgccatgttgcccaggcttgtctcgaactcctgggcccaagtgaaccacccatctcggtctccaaaattgttggattacaggcgtgagccactgcacctgatctttattcttctttaaaaaatacagccggccaggcacggtggcttatgcctgtaatcccagcactttgggaggctgaggtggctagatcacttgaggtcaggggctcaagaccagtttggccaacatggtgaaaccccatctctactaaaaatacaaaacactagtcaagcatggtggtgtgtacctatagtcccagctactcaggaagctgacttaggagaatcagctgagctcgagagtcaaggctgccataagccaagactgcactgccgcactccagcctgggcaaccggactgagactgtcctaacaacaacaacaacaacaaaagacttgtgaggcaaaaatgatgtgtggggtaaaatgttagccagaggttaatctgggtgaagggcacatgagtgtcctcctgctgtttttttttgttgttgttttgttttgttttgtctgtttgtttttgagacagagtcttgctctggagtgcagtggcgggatcttggctcactgcagcctctacctcccgggttcaaactattctcctgcctctgcctcctgattagctgggattacaggcgcctgccaccacacccagctaatttttgtatggctaattttgttggccaggctggtcttggactcctgacctcaggtaatccatctgtcttggcctcccaaagttctgggattacaggcgtgagccaccatacctggctgtttttttttgtttgtttttttttgagacggagtctcactctgttgcccagtctgaagtgcagtggtgcgatctgggctcactgcaagctccacctcccgggttcacgccattctcctgcctcagccgcctgagtcgctgggactacaggcacccgccaccatgcccagctaatttttttgtattttttagtagcgacagggtttcaccatgttagccaggatggtctccatctcctgacctcgtgatcctcctgccttggcctcccaaagtgctgggattacaggcatgagccaccacgcccagctgttttttcttaattgataagtagttgataagtagtactgtaactcctgggctcaaggaatctgcctgcctcggcctcccaaagtgctggcattacagacgtgagccacagcacccggcctgcactgttctatatttgcaatttcaaagtgatttccaattgaaatagcttgccccacttgttccttcttgccctgtccactgtggagacctctccctgacccctgacgtctgggtccccgactggctgggcagtgagccccgaggccttcctgtgccagcatactgctctttttcaggagatggtagctgacctggagctgcagcaagacctcatagtgcctctcggccacaccccttcccaggagcacttcctctttgagattttccgcagacggctccaggctctgacaagcgggtggagcgtggctgccagccttcagagacagagggagctgctaatgtacaaacggtaacacctactaccacctgggcagggcagcaccacctgggcagggcagcatctcatgacggtcctagaggttctttgtagtgagtttgtttcccgttacttacttgtctgtgtgtccccaccccaagcctgtccatttctgtggcacatgccacggagaagaggatctggagggttgaaagtacttttgattaaaaccttccagccaagcgaggtggttcatgcctgtaatcctagcattttgggaggctgaggtgagtggatcacctgaggtcaggagtttgagaccagcctgaccaacatggcgaaacgccatgtctactaaaaatacaaaaaaaatacaaaaaaatttagctaggtgtggtggcgggcacctgtaatcccagctactcgggagactgaggcaggagagtggtgtgaacctgggaggcagaggtttcagtgagccgagatcacgccattgcacaccagcctgggcaacagagcgagactctgtctcaacaacaacaacaaaaccttcctgctcagacgtggagggacgtcgcagaaggagctcttgtgaaagtagggaaaagtgttcagaaatgcccacggcggctgcatttataagaagcagcgtggagtcatttaattttacagtcatagggaattgcttcactagacagactggtgcgtcatccacttggttatcgtgtaactgtcagaagttgttggttattatgtaactgttaaaagttgtttgtttggtaacacattttgaatgcagtgggccaaacacagtataggggaggtgggctcagagtgcaggctttggatgggacagagggacacaggccaaggctctggttccaacagtggccctgggtttcagggtggtggttgctgctctgagagtctgagcccttgggaaggagcagagtgtacgctgtgctgtcgccaccaatacagccccttctttccaggatc

SEQ ID NO: 11935 - DNA, 633 bp, Homo sapiens
cctctctctctggacacacagaaccttccgagaggtgttgaaagaggaagatgttcacgtaggtgaccgttccttctcctgcatcatgccacgtcctgagtctagggtttgtgtgtgctcctcgggcaagaacagcagcacctggtcatggtgatgtgcacctgcagtcccagccatctgagaggctgagggggagaattctggagttcaggaggcagagtctgcagcgagctacgattgcaccactgcacacactccagcctgggcaacagaacctgtttccaaaaataaatgaagttaacttaccaagactggttacacctggagctggaaattcaacctgaagctgatgctctttcagatactgaacgctcaaggagttatgaccactcagaaaattctgatttggtctttggtggccgcacaggaaatgaggatattatttccagattgcaggagatggtagctgacctggagctgcagcaagacctcatagtgcctctcggccacaccccttcccaggagcacttcctctttgagattttccgcagacggctccaggctctgacaagcgggtggagcgtggctgccagccttcagagacagagggagctgctaatgtacaaacggatc

SEQ ID NO: 11936 - DNA, 8311 bp, Homo sapiens
aaggccatgtccgactcgtgggtcccgaactccgcctcgggccaggacccagggggccgccggagggcctgggccgagctgctgggtaggtgggcgcggcaggccgcgggagtgggcggcgtccggcccgggacggtttcgccggttccccgatcccttcccgccagagcctccgccggtcggatccccggacgccgcgcccggggggctgtgcggggtgggcgcccggctggggcggcgcggctgcctcggacccggcccctcctgcgcctgggcggacgcccccagccgccgcccgcggggcgctcccttctttcccgaacgccgcccccgccggccgccctgtcaggcgggcctggggtgcgcggcctggggctcccctcagcgcagaggccgcccctcgccagccgtccccgggctcccctgcctcgggccctcctgggccgtcttccccggcgtccgcggtggggccgtctccgttagtttcccgagacctgcgccctggggaggagccccggcccctcttcgggagggtgtcgctggtgggtttctccgcggcgtccacctgcgcgtcgggccggggaccccgtgtgtgaattgtgctgtgatggtttcgaaccgacttctctccgtagcgggaagggtcaagagggaaaaatataatcctgaaagggcacagaaattaaaggaatcagctgtgcgcctcctgcgaagccatcaggacctgaatgcccttttgcttgaggtaagaggaagctggtgtccgtctgcgggcagatttaggttcggggtttttgagtccagccaccgcacagctttcctaagaaaacacccgaggcggcgggcgcggtggcctggcccgcagaggggagggtcgcctgagcccgggagttctggaccaacctgggcaacggggtgagaccccgcctcttttattaaaaacaaaacaacaacaacaaaaaaacaggccgggcgccgtggctcagggctgtaatcccagcttttggggaggccaaggcgggtggatcactcagggtcaggagttcgagaccagcctggccaacatagtgaaacccggtctctactgaaaatacaaaaattagctgggtgtggtggcgcacgcctttaatcccagctactcgggagcctgaggcaggagaattgcttgaacctggacccgggaggcagaaattgcagtgagccgagatcacgccccttgcaatccagtctggattacagagtgagactgtctcacaaaaaaaaaaaaaaaaaaaaaaaaaaaaaaagccgggcgtggtggctcacgcctgtaatcctagccctttgggaggccgaagtgggtagatcacttgaggttaggagttcgagaccagcctgaccaacatggtgaaaccccgtcactacttaaaatacaaaaattagccgggtatggtagcaggtgtctgtaatcccagctgctcaggaggctgaggcaggagaatcgcttgaacctgggaggtggaggtcgccgtgagtgagatcccgccattgcactccagcctggacgacagtgagactccctctcaaaaaagaaaaaaaggaaaatagcccagtagggaagcattacttacacacaggttgtgtttatgcacagatcttgaattttttttatttttattttttattttcatttattttttttgagacaaagtctcacactgtagcctgggctggtatgcagtggggtgatctcggctcactgcagcctccacctcccgggtttaagtgattctcccgtctcagcctcccgagtggctgggactacaggcacgcgccaccatgccctcctaatttttgtatttttagtagagacagggtttcactatgttggccaggctggtctcgaactcttgacctcgtgatctgcccatctcggcctcccaaagtactgggattacaggcgtgagccactacgcctggcctggagcttgaattttttaaatggagtttgttgtgttttggattctaggtagaaggtccactgtgtaaaaaattgtctctcagcaaagtgattgactgtgacagttctgaggcctatgctaatcattctagttcatttataggtaagttatagcttcattttctctattttgaattgcagaagggtttttatatagtaaccatagtttgctaaattaagtagaaatgtaaattttctcaggcgatgggtttccactggtgtgtgtagtcgcaaattctatgggatgtttgtgtgacttgctcttgggcttcttacgatgctgtgtttaaaaacagcgtctgattcaacctgcgactcagaagcagtaggacccagagtgtcccttggaaaaacatgggacatagcaacagcagggatgtgccccttgctcatggaagtagtgagacaggctgtggtgtgcccaggagagcagacgggagaacaattttctaggtacctccttctccccccagtttgagagtgggagatagggtaagttctgggtcaacaacagtaagttattttctgatccttcacgtccttatgtgatgacttgtttctgttaaaataaccttcagtaatagcgctcccttgacaactggtcactgaatgtcattggcaaatgatacagattttcactgccatgattgtatttgaatttcacaaattgcatattatcattccaaggaaccaagctcagccacacagataaacctttaattcattaatttttgagtttgtttttttctgctaaagatatagttagtacatgcacgcacgtgcacacggacacacacacacacacacacacacacagtaaaagacttgtagataaaaaaactttcctatggagacacattggaaacaaatgactagaaattggcattgttggcctggcacagtggctcacgcctataatcgcagcactttgggaggctgaggtgtgcggatcacctgaggtcaggattcgagacgagcctggccaacatggtgaaaccctgtctctactaaaaaacacaaaaattagccgggtgtggtggtgggtgcctgtagtcccagctattcaggaggctgaggcaggagaattgcttgaacgtgggaggcagaggttgcattgagccgagacccctccattgcactccagcctgggcaataagagcaaaactctgtctcagaacagaaaatggcattgtctacttttttttttttttttaacagacagggtctcactctgttgcctggactggagagccgtggtgcaatcacggctcactgcagtcttgacctcctggcctcaagtgatcctcccaccccagcatcttgagtagctgggactacaggtgtgcgccaccatgcctggctaattttttcatagagacagggttttgccatattgcccaggctggtctcaaactcctgagctcaagcaatcagtttacctcagccacccaaggtgttgggattgcaggcatgagccactgtgccccatctgtctacttttctaccgagaatttcaccagcagctgatgatttctcgtactataattttaagcttctagaactattgtaaaattttttttttttttttttgagacgaagtgttgctctgtcgcccaggctggagtgcaatggcgccatctcggctcactacaaactctgcctcctgggttcaagcaattctcctgcctcagcctcccgaatagctgggattataggtgcccgccgccgcacccagctaatttttgtatttttagtagaggcggggtttcaccatcttggccaggctggtctcaaactcctgacctcgtgatcgacccgcctcggcctcctgcagtgttgggattacaggcatgagccaccgcaaccagcctgtaaatgtttttacttatgtattgataatgtgtttttagagccagtacattacaataacaggttcgtactgcagttaacagttttttttttttttttttttttttgagacggagtattgctcttgttacccaggctggagtgcaatggtgtgatctcgactcaccgcaacctctgcctccctagttaaagtgattctcctgcctcagcctcctgagtagctggtattacaggcatgcaccaccacgcctggctaattttgtatttttagtagagatagggtttcaccatgttggtcaggctggtctcaaactcccgacctcaggtgatccacccgcctcggcctcccaaagtgctgggattacaggagggacccactgagcctggcctccagtttttttttgttttgtttttttgagatgaagtctggctctgtcgcccagactgcagtgtagtggcgtgatctcggctcactgcaaactccgcctcctgggttcacgccattcttcgcctcagcctcctgagtagctgggactacaggctcccgtcaccaaacctggctaattttgtttttgtgtctttagtagagacagggtttcaccgtgttagccaggatggtctcgatctcctgaccttgtaatccgcccgcctcggcctcccaaagtgctgggattacaggcgtgagccaccgtgcccggcccggtttctttaaacaattaattttggctcacgtggtggctcacacctgtaatcccagcagtatgggaggccgaggcgggcggattaatgaggttgggaattggagacgagcctagccaacatagtgaaaccccatctctactaaaaatacaaaaaattaactgggcgtagtgacgcgtgcctgtaatcccagctacttgggaggctgaggcaggagaatcgcttgaacctgagaggcggaggttgcagtgagctgagatggcgccgttgcacttcagtccaggcggcagtgtaagacaccattgcaaaaaaataaaacaaaaaaaaattaattttggaagacaaataaattagaaaatgatttcttggcattgcctgcttccaggttgcccaccgtttctcactttattgaatgcagaccagtggctggttgctcaggagaatggtggctgcctgcaggctgttagtgaggttccacttggtggcctgcggactgagcacagctgtgactgcacctgcccaccaggtgcatggcagaatgttgggaaatccctgcctaattttatcacaaccatcaatgtgagtcaacaggggcaggcttatctctgaagtaattagaaaaacaatgtaattgaaagagcctgctgcagttctcaatttattgtgctcctttgtaaaaagatgataaagttcttggtcagaatatatttctttatcttgctccttttgtgtcatgggaaacgtaacaaataccaatgtataactctgggttcaggtgttgccaccagttttattgtgagctgcttggatcatcaaattctcatttttatctcatgtttttccctttgcatctattctccccgtttaaaaggcaattttttttgtgctgcatcttaaaataaggcattttaaacagcaagtctttggttttagattttgtctcatgtgttaagagaaagctatggttttgttttgtgtttaaggctctgctttgcaggatcaagcctcaaggctgggggttcccgtgggtattctctcagccgggatggttgcctctagcgtgggacagatctgcacggctccagcggagaccagtcaccctgtgctgctgactgtggagcagagagtaagacaccagcaaagatgaggaaacctgcccgttgttacttttaagctggttgggaaaataggacatagctttagtattgtttcaggtaatttgttttttaaaaaatgtaatctctcttttcagaagaagctgtcttccctgttagagtttgctcagtatttattggcacacagtatgttctcccgtctttccttctgtcaagaattatggaaaatacaggtaaatttgagattgcaaatctgactctccagtgttccaggcaatgttctgttgatctggatggaggcaacagagtacctgggttttcttgggaattctccaagcttctcattaattacagagagtggatgaaaaagggtttagaaatcatctgtggattggaaagaagtaccttcaattgccattttttgtccctattcacctatcattagtaatatttattagactagaatatattgaaaaacacgtttagccttgggtatattagtatggagaattttccagggtagtatagtaaactattaaaaaaaaatgtatgtaatttttttttccagagacagggtctcgccttgttgcccaggctggtcttttttttttttttttgagacgaagtctcgctctgtcgcacaggctggagtgcagtggcgtgatcttggctcactgcaagccccacctcccaggttcacgccattctcctgcctcagcctcccgagtagctgggactacaggtgactgccaccacgcccagctaattttttgtattttttagcagagacggggtttcaccgtgttagccaggatggtctcgatctcctgacctcgtgatctgcccacctcggcctcccaaagtgctgggattacaagtgtgagccaccgcgcctggcatttatttttatttttgagacagaatattgctctgccgcccaggctggagtgcagtggcgcaatcttggctcactgcaacgtctgcctcccaggttcaagcgattgtcctgcctcagccaccttagtagctgggattacaggcgcgtgccaccatgcccagttaatttttgtatctttttttttttttgagatggagttttgctcttgttgcccaggctggagtgcaatggtgctatcttggcttatcgcaacgtccgcctcccgggttcacgccattctcccgcctcagcctcccgagtagctgggattacaggcatgcgccaccatgcctggctaattttttttgtatttttagtagagacggggtttctccatgttggtcaggctggtctcaaactcctgacctcagatgatctgcccacctcggcctcccaaagtgccgggattacaggtgtgagtcaccgcgccctgcccaatttttgtatctttagtagagatgaggtttcaccatgttggccaggctggtcttcaattcctgacctcaggtgatctgcccatcttggcctcccaagtgctgggattacaggtgtgagccactgcgtccggcctttcccattcttttatccagcatacattatagaattcattagatttttcagttattgctttggtccctgccctcattatcacgtagcttgggaaacaagccactaaatccacaagaagtgcgatgattcatgtgctcacagatttgcgaagaagatgttggacatgcatatcagattggagagttaggaaagccttcctgcacggactgtgaagagtgcgagttaggggccgggcccagtggctcacacctgtaatcccagcactttgggaggccgaggcaggtggatcatgaggtcaggagatcgagcccatcctggctaacacggtgaaaccccgtctctactaaaaaatagaaaaaattagccgggtgtggtggcaggcacctgtagtcccagctactcaggaggctgaggcaggagaatggcgtgaacccgggaggcagagcttacagtgacccgagatggcgccactgcactccagcctgggtgacagagcgcgactctgtctcaaaaaaaaaaaaatagagtgtgagttagggggatgagaaggggaggctgcagggagatcagggcagtgtgacaggcacagtgttcacagtgagtggctaaagcagatcctgttttatcaaatgggagagggttgagtgagaaagacaagggacatgcacagggcacactgaagcctgacctttgtcctggcagcttcgaggagccagtgaaggcttctgaaggagagactgtcatgtcagtgtgtgtaatactgtgttggctgtagtgtggagaaagggttagaagtaggctacagtgcgtaggaagagagaaggaagagaagcaagtgttgggcaacggtgtgtgggtgcccaaaggccagggagtttgaaaaccagtacagctttgtaaaaaaagatgtgtttcaggctctaagtttttgcttgaggttaattttcaatacggcatggttaagaacctaagttgaacattttgtaggaaaatgcattcataaaggactcagaatgctgggggtttttttgtttttgtttttgtttgttttgttttgtttttcagagttctttgttgcttgaagcggtgtggcatcttcacgtacaaggcattgtgagcctg

SEQ ID NO: 11937 - DNA, 571 bp, Homo sapiens
aaggccatgtccgactcgtgggtcccgaactccgcctcgggccaggacccagggggccgccggagggcctgggccgagctgctggcgggaagggtcaagagggaaaaatataatcctgaaagggcacagaaattaaaggaatcagctgtgcgcctcctgcgaagccatcaggacctgaatgcccttttgcttgaggtagaaggtccactgtgtaaaaaattgtctctcagcaaagtgattgactgtgacagttctgaggcctatgctaatcattctagttcatttataggatcaagcctcaaggctgggggttcccgtgggtattctctcagccgggatggttgcctctagcgtgggacagatctgcacggctccagcggagaccagtcaccctgtgctgctgactgtggagcagagaaagaagctgtcttccctgttagagtttgctcagtatttattggcacacagtatgttctcccgtctttccttctgtcaagaattatggaaaatacagagttctttgttgcttgaagcggtgtggcatcttcacgtacaaggcattgtgagcctg

SEQ ID NO: 11938 - DNA, 18251 bp, Homo sapiens
gggctgtaggcgccaaggccatgtccgactcgtgggtcccgaactccgcctcgggccaggacccagggggccgccggagggcctgggccgagctgctgggtaggtgggcgcggcaggccgcgggagtgggcggcgtccggcccgggacggtttcgccggttccccgatcccttcccgccagagcctccgccggtcggatccccggacgccgcgcccggggggctgtgcggggtgggcgcccggctggggcggcgcggctgcctcggacccggcccctcctgcgcctgggcggacgcccccagccgccgcccgcggggcgctcccttctttcccgaacgccgcccccgccggccgccctgtcaggcgggcctggggtgcgcggcctggggctcccctcagcgcagaggccgcccctcgccagccgtccccgggctcccctgcctcgggccctcctgggccgtcttccccggcgtccgcggtggggccgtctccgttagtttcccgagacctgcgccctggggaggagccccggcccctcttcgggagggtgtcgctggtgggtttctccgcggcgtccacctgcgcgtcgggccggggaccccgtgtgtgaattgtgctgtgatggtttcgaaccgacttctctccgtagcgggaagggtcaagagggaaaaatataatcctgaaagggcacagaaattaaaggaatcagctgtgcgcctcctgcgaagccatcaggacctgaatgcccttttgcttgaggtaagaggaagctggtgtccgtctgcgggcagatttaggttcggggtttttgagtccagccaccgcacagctttcctaagaaaacacccgaggcggcgggcgcggtggcctggcccgcagaggggagggtcgcctgagcccgggagttctggaccaacctgggcaacggggtgagaccccgcctcttttattaaaaacaaaacaacaacaacaaaaaaacaggccgggcgccgtggctcagggctgtaatcccagcttttggggaggccaaggcgggtggatcactcagggtcaggagttcgagaccagcctggccaacatagtgaaacccggtctctactgaaaatacaaaaattagctgggtgtggtggcgcacgcctttaatcccagctactcgggagcctgaggcaggagaattgcttgaacctggacccgggaggcagaaattgcagtgagccgagatcacgccccttgcaatccagtctggattacagagtgagactgtctcacaaaaaaaaaaaaaaaaaaaaaaaaaaaaaaagccgggcgtggtggctcacgcctgtaatcctagccctttgggaggccgaagtgggtagatcacttgaggttaggagttcgagaccagcctgaccaacatggtgaaaccccgtcactacttaaaatacaaaaattagccgggtatggtagcaggtgtctgtaatcccagctgctcaggaggctgaggcaggagaatcgcttgaacctgggaggtggaggtcgccgtgagtgagatcccgccattgcactccagcctggacgacagtgagactccctctcaaaaaagaaaaaaaggaaaatagcccagtagggaagcattacttacacacaggttgtgtttatgcacagatcttgaattttttttatttttattttttattttcatttattttttttgagacaaagtctcacactgtagcctgggctggtatgcagtggggtgatctcggctcactgcagcctccacctcccgggtttaagtgattctcccgtctcagcctcccgagtggctgggactacaggcacgcgccaccatgccctcctaatttttgtatttttagtagagacagggtttcactatgttggccaggctggtctcgaactcttgacctcgtgatctgcccatctcggcctcccaaagtactgggattacaggcgtgagccactacgcctggcctggagcttgaattttttaaatggagtttgttgtgttttggattctaggtagaaggtccactgtgtaaaaaattgtctctcagcaaagtgattgactgtgacagttctgaggcctatgctaatcattctagttcatttataggtaagttatagcttcattttctctattttgaattgcagaagggtttttatatagtaaccatagtttgctaaattaagtagaaatgtaaattttctcaggcgatgggtttccactggtgtgtgtagtcgcaaattctatgggatgtttgtgtgacttgctcttgggcttcttacgatgctgtgtttaaaaacagcgtctgattcaacctgcgactcagaagcagtaggacccagagtgtcccttggaaaaacatgggacatagcaacagcagggatgtgccccttgctcatggaagtagtgagacaggctgtggtgtgcccaggagagcagacgggagaacaattttctaggtacctccttctccccccagtttgagagtgggagatagggtaagttctgggtcaacaacagtaagttattttctgatccttcacgtccttatgtgatgacttgtttctgttaaaataaccttcagtaatagcgctcccttgacaactggtcactgaatgtcattggcaaatgatacagattttcactgccatgattgtatttgaatttcacaaattgcatattatcattccaaggaaccaagctcagccacacagataaacctttaattcattaatttttgagtttgtttttttctgctaaagatatagttagtacatgcacgcacgtgcacacggacacacacacacacacacacacacacagtaaaagacttgtagataaaaaaactttcctatggagacacattggaaacaaatgactagaaattggcattgttggcctggcacagtggctcacgcctataatcgcagcactttgggaggctgaggtgtgcggatcacctgaggtcaggattcgagacgagcctggccaacatggtgaaaccctgtctctactaaaaaacacaaaaattagccgggtgtggtggtgggtgcctgtagtcccagctattcaggaggctgaggcaggagaattgcttgaacgtgggaggcagaggttgcattgagccgagacccctccattgcactccagcctgggcaataagagcaaaactctgtctcagaacagaaaatggcattgtctacttttttttttttttttaacagacagggtctcactctgttgcctggactggagagccgtggtgcaatcacggctcactgcagtcttgacctcctggcctcaagtgatcctcccaccccagcatcttgagtagctgggactacaggtgtgcgccaccatgcctggctaattttttcatagagacagggttttgccatattgcccaggctggtctcaaactcctgagctcaagcaatcagtttacctcagccacccaaggtgttgggattgcaggcatgagccactgtgccccatctgtctacttttctaccgagaatttcaccagcagctgatgatttctcgtactataattttaagcttctagaactattgtaaaattttttttttttttttttgagacgaagtgttgctctgtcgcccaggctggagtgcaatggcgccatctcggctcactacaaactctgcctcctgggttcaagcaattctcctgcctcagcctcccgaatagctgggattataggtgcccgccgccgcacccagctaatttttgtatttttagtagaggcggggtttcaccatcttggccaggctggtctcaaactcctgacctcgtgatcgacccgcctcggcctcctgcagtgttgggattacaggcatgagccaccgcaaccagcctgtaaatgtttttacttatgtattgataatgtgtttttagagccagtacattacaataacaggttcgtactgcagttaacagttttttttttttttttttttttttgagacggagtattgctcttgttacccaggctggagtgcaatggtgtgatctcgactcaccgcaacctctgcctccctagttaaagtgattctcctgcctcagcctcctgagtagctggtattacaggcatgcaccaccacgcctggctaattttgtatttttagtagagatagggtttcaccatgttggtcaggctggtctcaaactcccgacctcaggtgatccacccgcctcggcctcccaaagtgctgggattacaggagggacccactgagcctggcctccagtttttttttgttttgtttttttgagatgaagtctggctctgtcgcccagactgcagtgtagtggcgtgatctcggctcactgcaaactccgcctcctgggttcacgccattcttcgcctcagcctcctgagtagctgggactacaggctcccgtcaccaaacctggctaattttgtttttgtgtctttagtagagacagggtttcaccgtgttagccaggatggtctcgatctcctgaccttgtaatccgcccgcctcggcctcccaaagtgctgggattacaggcgtgagccaccgtgcccggcccggtttctttaaacaattaattttggctcacgtggtggctcacacctgtaatcccagcagtatgggaggccgaggcgggcggattaatgaggttgggaattggagacgagcctagccaacatagtgaaaccccatctctactaaaaatacaaaaaattaactgggcgtagtgacgcgtgcctgtaatcccagctacttgggaggctgaggcaggagaatcgcttgaacctgagaggcggaggttgcagtgagctgagatggcgccgttgcacttcagtccaggcggcagtgtaagacaccattgcaaaaaaataaaacaaaaaaaaattaattttggaagacaaataaattagaaaatgatttcttggcattgcctgcttccaggttgcccaccgtttctcactttattgaatgcagaccagtggctggttgctcaggagaatggtggctgcctgcaggctgttagtgaggttccacttggtggcctgcggactgagcacagctgtgactgcacctgcccaccaggtgcatggcagaatgttgggaaatccctgcctaattttatcacaaccatcaatgtgagtcaacaggggcaggcttatctctgaagtaattagaaaaacaatgtaattgaaagagcctgctgcagttctcaatttattgtgctcctttgtaaaaagatgataaagttcttggtcagaatatatttctttatcttgctccttttgtgtcatgggaaacgtaacaaataccaatgtataactctgggttcaggtgttgccaccagttttattgtgagctgcttggatcatcaaattctcatttttatctcatgtttttccctttgcatctattctccccgtttaaaaggcaattttttttgtgctgcatcttaaaataaggcattttaaacagcaagtctttggttttagattttgtctcatgtgttaagagaaagctatggttttgttttgtgtttaaggctctgctttgcaggatcaagcctcaaggctgggggttcccgtgggtattctctcagccgggatggttgcctctagcgtgggacagatctgcacggctccagcggagaccagtcaccctgtgctgctgactgtggagcagagagtaagacaccagcaaagatgaggaaacctgcccgttgttacttttaagctggttgggaaaataggacatagctttagtattgtttcaggtaatttgttttttaaaaaatgtaatctctcttttcagaagaagctgtcttccctgttagagtttgctcagtatttattggcacacagtatgttctcccgtctttccttctgtcaagaattatggaaaatacaggtaaatttgagattgcaaatctgactctccagtgttccaggcaatgttctgttgatctggatggaggcaacagagtacctgggttttcttgggaattctccaagcttctcattaattacagagagtggatgaaaaagggtttagaaatcatctgtggattggaaagaagtaccttcaattgccattttttgtccctattcacctatcattagtaatatttattagactagaatatattgaaaaacacgtttagccttgggtatattagtatggagaattttccagggtagtatagtaaactattaaaaaaaaatgtatgtaatttttttttccagagacagggtctcgccttgttgcccaggctggtcttttttttttttttttgagacgaagtctcgctctgtcgcacaggctggagtgcagtggcgtgatcttggctcactgcaagccccacctcccaggttcacgccattctcctgcctcagcctcccgagtagctgggactacaggtgactgccaccacgcccagctaattttttgtattttttagcagagacggggtttcaccgtgttagccaggatggtctcgatctcctgacctcgtgatctgcccacctcggcctcccaaagtgctgggattacaagtgtgagccaccgcgcctggcatttatttttatttttgagacagaatattgctctgccgcccaggctggagtgcagtggcgcaatcttggctcactgcaacgtctgcctcccaggttcaagcgattgtcctgcctcagccaccttagtagctgggattacaggcgcgtgccaccatgcccagttaatttttgtatctttttttttttttgagatggagttttgctcttgttgcccaggctggagtgcaatggtgctatcttggcttatcgcaacgtccgcctcccgggttcacgccattctcccgcctcagcctcccgagtagctgggattacaggcatgcgccaccatgcctggctaattttttttgtatttttagtagagacggggtttctccatgttggtcaggctggtctcaaactcctgacctcagatgatctgcccacctcggcctcccaaagtgccgggattacaggtgtgagtcaccgcgccctgcccaatttttgtatctttagtagagatgaggtttcaccatgttggccaggctggtcttcaattcctgacctcaggtgatctgcccatcttggcctcccaagtgctgggattacaggtgtgagccactgcgtccggcctttcccattcttttatccagcatacattatagaattcattagatttttcagttattgctttggtccctgccctcattatcacgtagcttgggaaacaagccactaaatccacaagaagtgcgatgattcatgtgctcacagatttgcgaagaagatgttggacatgcatatcagattggagagttaggaaagccttcctgcacggactgtgaagagtgcgagttaggggccgggcccagtggctcacacctgtaatcccagcactttgggaggccgaggcaggtggatcatgaggtcaggagatcgagcccatcctggctaacacggtgaaaccccgtctctactaaaaaatagaaaaaattagccgggtgtggtggcaggcacctgtagtcccagctactcaggaggctgaggcaggagaatggcgtgaacccgggaggcagagcttacagtgacccgagatggcgccactgcactccagcctgggtgacagagcgcgactctgtctcaaaaaaaaaaaaatagagtgtgagttagggggatgagaaggggaggctgcagggagatcagggcagtgtgacaggcacagtgttcacagtgagtggctaaagcagatcctgttttatcaaatgggagagggttgagtgagaaagacaagggacatgcacagggcacactgaagcctgacctttgtcctggcagcttcgaggagccagtgaaggcttctgaaggagagactgtcatgtcagtgtgtgtaatactgtgttggctgtagtgtggagaaagggttagaagtaggctacagtgcgtaggaagagagaaggaagagaagcaagtgttgggcaacggtgtgtgggtgcccaaaggccagggagtttgaaaaccagtacagctttgtaaaaaaagatgtgtttcaggctctaagtttttgcttgaggttaattttcaatacggcatggttaagaacctaagttgaacattttgtaggaaaatgcattcataaaggactcagaatgctgggggtttttttgtttttgtttttgtttgttttgttttgtttttcagagttctttgttgcttgaagcggtgtggcatcttcacgtacaaggcattgtgagcctgcaagagctgctggaaaggtagcgtgctaatgatgattcagtgttactgtttttgcagtctagtctagtataaattatatttcaaagcccagaatcagacgggtttgatttctggctttgacatataatttgtactagactagattgcattgcatatttatactagactagacctggaggaactattgctttattatttcaagagaacgtttatggtgttttggttttgtttgctttttgtctgttttttttttgagacggagtctcgctctgtggcccaggtgggagtgcagtggcacgatttcagctcactacaacctccacctccagggttcaagcaattctcctgcctcagcctcccaagtcgctgggattacaggcgcccgccaccacacgcagctaatttttgttatgtatttattttttttagggacagagtctcgttctgtcacccaggctggagtgcagtgacgtgatgtcggctcactgcaggctccacctcccgggttcacgccattctcctgcctcagcttcccgagtagctgggactacaggcgtccgccaccacgcctggctaatttttgtatttttagtagagactgggtttcaccatgttagccaggatgggctccatctcctgacttcaggatctgcccgcctctgcctcccaaagcgctgggattacaggcatgaaccactgtgcctggcaatttttgttatttttagtagagatgtggtttcgccatgttagccaggctggtgtcaaactcctaacctcaggtgattcccctgcctcggcctcccaaagtgctgggattacaggcatgagccacctcgcgcggcctttttttttctttttgagacagagacctgctatgtcgccaggctggagtgcagtggtgagatctgggctcgctgcaacctccgcttcccggattcaagcaattctgcccctgcctcctcagtagctgggactacaggcgcgtgccaccacacccggctaatttttgtatgtttagtagagatggggtttcaccatgttggctaggctggtctcgaactcctgatcttgtgatcctcccgcctcggcctagagcagaatttcatctcaaaaaaaaaaaaaaaaagaaaaacctgcttcctaggatatacacatcttatctcagcaccaaaatctatgaagcaaaaatggccagaattaaagggagaagtagacatttcagcaataatcattagaggtttcaatactcccctttcagtaatgggtagaacaagttagattaagaatgatatagaacagccgccccgtccgggagggaggtgggggagtcagccccccgcccggccagccgccctgtccaggaggtgaggggcgcctctgcccggccgcccatactgggaagtgaggagcccctctacccggccaccaccccgtctgggaggtgtacccaacagctcattgagaacgggccatgatgacaatggcggttttatggaatacaaaggggggaagggtggggaaaagattgcgaaatcagatggttgctgtgtctgtgtagaaagaagtagacacgggagacttttcattttgttctgtactaagagaaattcttctgccttgggatcctgttgatctgtgaccttgcccccaaccctgtgctctctgaaacatgtgctgtgtccactcagggttaaatggattaagggcggtgcaagatatgctttgttaaacagatgcttgaaggcagcatgctcgttaagagtcatcaccactccctaatctcaagtacccagggacacaaacactgcagaaggcctcagggtcctctgcctaggaaaaccagagacctttgttcacttgtttatctgctgaccttccctccaccattgtcctatgaccctgccaaatccccctctgcgagaaacacccaagaatgatcaattaaaaaaaaaaaaaaaaaaaagaatgatatagaagttgaatgctgcaaaccagctgacctgactgactgtggagcactctacccagtagtagcagagtgtgtattcgtaagtccaaatggaacagtccccaggatacagcataaggttcaggccaaggccaggtgcggtggctcacacctgtaatcccagcactttgggaggctgaggcgggcagatcacctgaggtcaggagttcaagaccagcctgtccaacgtggtgaaaccctgtctctactaaaattacaaaaattagctgggcaaggtggcaggtgcctgtaatcccagccgttgtggaggctgaggcaggagaatcgcttgaacttgggaggcggaggttgtagtgagctgagattgtgccattgcactccagcctggatgacaagagcaaaactgtttcaagagaaaaaaaaaaggttcaggccataaaacaaagaggaataaatttagaagggctgaaatcattcaaaatatgttctctaaccacaaatgaatttaattagaataaacaacagaagggaattgggaaaatccacaatatttgaaagttaacataatgagtcaaagaagtcacaagggaaattagaaaataacttgagactgggcacagtgccacaccagtcatcccagcactttgggagggcaaggtgggagattgttttgagcccgggagtttgagtccagcctgggcaaagtagtaagacctccagctgggcgtggtggtatgcgcctgttgtcccaactactcaggaggctgaggtggaaggattgcttgagcctgggaggtcgagggtgcagtgactgattgcgccactgcactccagcctcagtgacagcaaaaaactgtctcaaaaaaaaaattgggacatatggctcaactcaatcccctgatgatgggatttagttgagccttacgtctgcctctgtgtgtgtctccagccatcccgacatgcatgctgtgggatcgtggctcttcaggaatctgtgctgcctttgtgaacagatggaagcatcctgccagcatgctgacgtcgccagggccatgctttctggtgcgttcatgacaagatgcgggttcttgggtaaaactcattttgatctgtgataatgccttctgctctcaagagctctgcgaggcagaacagcctgtctctccgtggccgtgggaacctggcatgacagactcccagtctcagcctgttgtggggttgcattttacttgactgatgtggaaatactagtaagtcggccttgacatgagtttaagtgtttccattcacctttcccatagagtgaccgcagctgcttccttctgtcgcccaggctggagtacagtggcgcgatctcagctcactgcaacctccgcctcctgggttcaagtgattctctgcctcaacctccttagtagctgggactgcaggcacgtggcaccatgcccggctaattttttttttgtatttttagtagagacggggtttcattaggttggccaggctgctcttgaactcctgacctcgtgatgcacccccctcggcctcccaaagtgctgggattataggcgtgagccactatgcctggccttcctgaggaatgatattatgagaaaaacttgggactgtaatgtccccccacaaactaagaaggtgctgagagaccagaggatggctcagactagggaccaacccagtttgaggagtagttgggtttgtcagaagatggcttggaccagagtccagcttgaggagtagttgggcttgtcagaggatggctcggaccagagtccagcttgaggagtagttgggcttgtcagagaatggcttggaccaatccagcttgaggagtagttgggtttgtcaggacttatattcagcgcactcctggacggcggcaggacagctctagagaaccgccccaccacctgtctctaaggtgcattgaagctcgttttctggctctttgcctgctgtgtttgagtgatgagactcttttccttggtgagttctcagatcctctctgggatatttgggttctgaggaacacctgctgggagacccatcccactacaagtgacacctacaaataaaaattagatgagaaactgatctgtacagtagcttgtgggttttttcctttttcctaaagctttttggtggcatgagcgacttagcattcctgagctactataacctggtaccagataggttaaatttaaatcaaagttagaaaatcttgtggatttcagtcctcttggtcttattttttaaaaagctaagaatgcctttcctcccccatcacattcctcagaataggatgcttctgggtccctctagaccctctggtattggagattggcaggcaagacaatccataagacctcccttggaaaccacttttatttaagagaaaaaaattgggctgggtggggtgactcatgccagtaatcccagcactttgggaggccaaggcaggtggatcatgaggtcaggagttcaagaccaacctggccaagatggtgaaaccccatctctactaaaaatacaaaaattagctgggtgtggtggcggcgcctatattcccagctactggtgaggctgaggcagagaattgcttgaacctgggaggcggaggttgcagtgagcgagatcataccattgcactcaagcccaggcgacagagcaagcctccgtctcacaaaaaaaaaaaaaaagaaaaaaatctgactataaacttgttccctttcaaatagaagtgcaagaggaaaaaatctggttcatctaagggtcctgattgggtttggtgaacgctagtgtagctgtggtcaggtgagcagtaacttctgcagcgttcctcaggttaggagcagctcacaggggtcctggtgggcccaagccatatgctcacccgcccctctgaagtggatggtctgtgccattcacagttgcttggagaccatgatgtccataaataactttggttttatggtttttcagattttgttcaaatgtttgttttgaggggatttcagaaaaactcagatctgagaagaactgtggagcctgaaaaaatgccgcaggtaggaggaaaagtcaagtgaagagtttagcggaaggagccgtccttattccaagtgttgaaatgtatttacgtgtctctctattgaaacgtgctgtttgtacctatttacggggtacatgtgatacttgttttgtgcatagagtgtaatgatcaagtcagggtgtttagagtctccgtcacctccagtatgtatcatttctgtgtgttggcaacatttcacatgttgcagttactttgaaatatacaatctgttgttaactatagccgcctcactctgctgtggaacattagaacttacttcttctgtctagctgtatgtttgtacccattaaccaactctcttcgttcccccactgcatatacccttctcatctctggtatctctcgttctactctctacctccacaagagccactttttagctcccacatatttgtgataacatgcaatatttgtccttctgtgcctggcttatttcacttaacataatggccttcagttgcattcctgttgctgtgaatgacaggatttcactttaaaaaaaaagaatagctggccgggcatggtggctcatgcctgtaatcccagcactttgggaggacgaggcgggcggatcacaaggtcaggagatcgagaccatcctggctaacatggtaaaatcccgtctctactaaaaaaatagaaaaaattagccgggcctggtggcaggcacctgtggacccagccactcaggaggctgaggcaggagaatggcgtgaaacctggaggcggagcttgcagtgagcccagatcgtgtcactgtattccagcctaggcgacagagactccatctcagaaaaagaaaaaaatagctgaggttgggctcaatggctcatgcctataatccagcactttgggaggctgagactggtggatcccctgaggtcaggagttcaagaccagcctgaccaacatggtgaaaccctgtctctagtaaaaaaaaaaaaaaaatagccgggcgtggtggcacatgcctgtagtcccagctacaggcgtggaggcaggagaattgcttgaacccaggaggcggaggttgcagtgagccaagattgcgccttgcactctagcctgggtgacagagcgagactccgttaaagctgaccagtattccgttgtgtgtatataccacgttttctgtatccggtcatctcttgttgggcacacaggttgatttcatatcttggctattgttaatagtgccacaataaatgtaggagtacagatgtctcttcagctggctgatttcctttcctttggctgtaagcccagtaatgggattgctggatcatatggcagttctggttttttttttgtttttttgtgtttttttgagacggtgtctctctctgttgctcaggctagagtgcagtggcgcgatttcggctcactgcaacctctgcctcccaggttcaaccgattctcctgcctcagcctcccgaatagctgggattacaggcatgcaccaccatgcccagctaatttttgtatttttagtagaggtgaggtttcactctgttggctaggatggtctcgatctcttgacctcatgatctgcctgccttggcctcctgaagtgctgggattacagatgtgatccaccatgcctggtgaaagtgagaccctctgggctggtagttctgtttttagaactacccaactatttagaaatctccatactattttccataatggctgtattaatttacattctcactgatagcatataagagttctgtttgcattctcaccagcatttgttattttttgttttcttgataatgataattctaactggagtgaaataatagctcattgtggctttgacttgtatttccctgatgattagtgacattggcttttttttttttttttttgagacagagtcttgctctgtcgcccgggctggagtgcagtggcgcgatctcggctcactgcaagctccgcctccggggttcacgccattctcctgcctcagcctcctgaatagctgggactacaggcgcccaccaccactcccggctagtttttctatttttagtagagatgggctttcacagtgttggtcaggctggtctcgaacttctgatctcatgacccgcccaccttggcctctcaaagtgttgggattataggcgtgggctaccgtgcctggcctttttttttcttttttcttttttttttttttgagatggagtcttgctctgtctcccaggctggagtgcagtggtgccatcttggttcactgcaagctccgcctaccgggttcaagctattctcctgcctcagtctcccgagtagctgggactatagacacccgccaccgcacctagctaatttttttgtatttttagtagagacagggtttcaccttgttggtcaggctggtctagaactcctgacctcaggtgatccacccacctcgacttccgaaagtgctgggattacaggcgtgggccacagttcccggcctgtttctgggttctctatcctgttccgttggtctgtgtgtatgtttatatcaacctcatgctgttttcatttctgtagcctcgtagtatattttgacctcaggcagtgtgatttctatattctatagctttgttctttttcctcaggattgctttgcttatctgtgttctattttggttccatgtgaattttagaatctttttttctatttctgggaagaacgttattggtattttgatagggattgcattgaatctgtagatagttttggatacgtcccaaatttttattcccttttggaggttcctgagccagtggctcccattttgcctacactgcagtctgtgggctttgtttgaggaagtctgttttattgttaccatgagttgctctctgagtagtggtatgctttaagcccaggagatgtgaagaagggaaatggacaatggtaccttctcaccgtcttctggctccagaggcatcaagggtgaaagtccttagttccacagcccagattcaaggcctgagctttcctctcttcactgaagtacttcagcaaaactctgcgtgcaaaagtgtcctgcccagccctaggctcatggcctcaggccatgctgagagcagtcttagggtaattccagaaagttcagccttttcactctgtctaggtcccttcggtactggagtaatttctaggtctatgagggtttttaaagttgatctctttgtaaagtccatttctttttcttttttccgagacggagtctggctctttcgcccgggccggactgcagtggcactatctcagctcactggaagctctgcctcccgggttcacgccattctcctgcctcagcctcccgagtagctgagactacagggcgtccgccactgcgcccggctaattttttgtatttttagtagagacggggtttcaccatgttagccaggatggtctcgatctcctgacctcgtgatccgcccgcctcggcctcctgaagtgccgtttctttactttagagtaacaagtaataattctcttgtgtgatgcaggtatcacacaaattacagaagattaccaagatggtaactcacattctattttgacaggtcacggttgatgtactgcagagaatgctgatttgtaagttaattgcactgcagcccagactgtaaatgacttagtttgcttattagcaattgtatcagttttctgcctttccatttgaggtatttctcctctgtatgtttcactgtgcagagtcctggtactggaatgcccttgttttggcattttcagagctgtgaagggatacctcatgaatctgtgggtcacagggaagcattttcttgtctgtgtgttttgattaaggcctacagattgtagaagtcttgatggatgtgggccctctggggggttgaagtggatctgttgtctgaaagcgcctggggattgtttctggtgggctgccgccgtgtgctgacatctgttttctgttcctggctctgtcttcagttgcacttgacgctttggctgctggagtacaggaggagtcctccactcacaagatcgtgaggtgctggtatgttcctgagggtggcctgcctgagtgtgcagcagggaggtgtctgccaaattaaagagccaagatattttaaacacttccagagcttcagcagcccgctcctgagcacacttcctctgccagttacgataacgtgcgtgaggaggaggcgaccatgggaaagcccggggaacgctctggtcagccttttcctgtgaggatgaggtcggaaggtgcgcccactgcagtatcctgttccgcctctggaagtcctgcaccaatgtttgtcccactcactgtgacctcctcctgtgtggagtctccccttgctcctccttccctgggtgtgattcaggctctagagctggccctgcctctcagccccccacatttctagaacacactgtagctgtgcctctacagactcccgctgcctggcctccacagatcctgctcagattcaccagtaggcaaagcttggccctattagctttttctctccatggctctgtggagatgtgcggagacccttacaggtcgggaggcggaagctgaggagtgggggctgggtggaaggtggacatcggggtttggtggaaatggggctctggggtttgcttccctctagtgtgggcaggggaccttgaagtgaagtcttgagaaaccagtagaatttgccactgtttccaggccttgtcaaccttttcattctttattttgctcctcatttcccatccctcacagtaactgtttaactgctcaattaaatgtgttgtaccgttcggtacttttactgaaa

SEQ ID NO: 11939 - DNA, 1694 bp, Homo sapiens
gggctgtaggcgccaaggccatgtccgactcgtgggtcccgaactccgcctcgggccaggacccagggggccgccggagggcctgggccgagctgctggcgggaagggtcaagagggaaaaatataatcctgaaagggcacagaaattaaaggaatcagctgtgcgcctcctgcgaagccatcaggacctgaatgcccttttgcttgaggtagaaggtccactgtgtaaaaaattgtctctcagcaaagtgattgactgtgacagttctgaggcctatgctaatcattctagttcatttataggctctgctttgcaggatcaagcctcaaggctgggggttcccgtgggtattctctcagccgggatggttgcctctagcgtgggacagatctgcacggctccagcggagaccagtcaccctgtgctgctgactgtggagcagagaaagaagctgtcttccctgttagagtttgctcagtatttattggcacacagtatgttctcccgtctttccttctgtcaagaattatggaaaatacagagttctttgttgcttgaagcggtgtggcatcttcacgtacaaggcattgtgagcctgcaagagctgctggaaagccatcccgacatgcatgctgtgggatcgtggctcttcaggaatctgtgctgcctttgtgaacagatggaagcatcctgccagcatgctgacgtcgccagggccatgctttctgattttgttcaaatgtttgttttgaggggatttcagaaaaactcagatctgagaagaactgtggagcctgaaaaaatgccgcaggtcacggttgatgtactgcagagaatgctgatttttgcacttgacgctttggctgctggagtacaggaggagtcctccactcacaagatcgtgaggtgctggtatgttcctgagggtggcctgcctgagtgtgcagcagggaggtgtctgccaaattaaagagccaagatattttaaacacttccagagcttcagcagcccgctcctgagcacacttcctctgccagttacgataacgtgcgtgaggaggaggcgaccatgggaaagcccggggaacgctctggtcagccttttcctgtgaggatgaggtcggaaggtgcgcccactgcagtatcctgttccgcctctggaagtcctgcaccaatgtttgtcccactcactgtgacctcctcctgtgtggagtctccccttgctcctccttccctgggtgtgattcaggctctagagctggccctgcctctcagccccccacatttctagaacacactgtagctgtgcctctacagactcccgctgcctggcctccacagatcctgctcagattcaccagtaggcaaagcttggccctattagctttttctctccatggctctgtggagatgtgcggagacccttacaggtcgggaggcggaagctgaggagtgggggctgggtggaaggtggacatcggggtttggtggaaatggggctctggggtttgcttccctctagtgtgggcaggggaccttgaagtgaagtcttgagaaaccagtagaatttgccactgtttccaggccttgtcaaccttttcattctttattttgctcctcatttcccatccctcacagtaactgtttaactgctcaattaaatgtgttgtaccgttcggtacttttactgaaa

SEQ ID NO: 11940 - DNA, 968 bp, Homo sapiens
acgcaggaggttcactggcagagagtgctctcctttgtgtctgccctggttgtctgctttccagaagcgcagcagctgcttgaaggtgagcttttacgcgagcccggtggtgctggtcaagagtgtgtgtaggggggtgtcagcagagtcccagctgactgtgggtgagcctctcagtgaagcccttccctacctgcccggaacctgcagtgcctcctgtcgatggaacattctttgtcagacgcttccataagcactgactgctgctctgagaggccagagtgtccactgctgcttcattcaggtctctagtggtttgcacttgacatgctgtaattgctgtgtagtcttttaaaacttggtgtttgggtgtgcacagtctccttctggaatacttgatcacccagcataactcacgtcatgttcctgctggctgcccttgccttgctgtgactatgtcatggttcttaactagactgggtggcgcgtttgatggcccaggcattcgagagctgccagctggacagcatggtcactgcgttcctggttgtgcgccaggcagcactggagggcccctctgcgttcctgtcatatgcagactggttcaaggtaagtgacctgccaatcggctacctaatacctgatcttcccagaaggcctgggagtggggaccatgctgtccccacctgattctctgtcatgtgagtgagcaaccttgctgtcagctttgccgagtggccttggcagatcttcctctgcgtgtgccgaggagcctgggttctccctgtcggggcctcagcggatcttcctctgcatgttccgaggagcctgggttctccctgtcggggcctcagctccttcccctggtttctgtctcacttagttgacggagcctcctgctgtcttttataagaaaattagcgaaatcaagcctggacaccatagtgaaacctcatctccaccaaaaa

SEQ ID NO: 11941 - DNA, 578 bp, Homo sapiens
acgcaggaggttcactggcagagagtgctctcctttgtgtctgccctggttgtctgctttccagaagcgcagcagctgcttgaagactgggtggcgcgtttgatggcccaggcattcgagagctgccagctggacagcatggtcactgcgttcctggttgtgcgccaggcagcactggagggcccctctgcgttcctgtcatatgcagactggttcaaggtaagtgacctgccaatcggctacctaatacctgatcttcccagaaggcctgggagtggggaccatgctgtccccacctgattctctgtcatgtgagtgagcaaccttgctgtcagctttgccgagtggccttggcagatcttcctctgcgtgtgccgaggagcctgggttctccctgtcggggcctcagcggatcttcctctgcatgttccgaggagcctgggttctccctgtcggggcctcagctccttcccctggtttctgtctcacttagttgacggagcctcctgctgtcttttataagaaaattagcgaaatcaagcctggacaccatagtgaaacctcatctccaccaaaaa

SEQ ID NO: 11942 - DNA, 4151 bp, Homo sapiens
ggctctcagctgctgcactgcactttgcgattcaacaagtcagggaagaaaacatcaggaagcagctaaagaagctggactgcgagagagaggaggcaagataggaaattcttttactgatttattttctcgcaagcttggtttcaatcagtgctatttctctgggcttgtctgatgaactgtttttctaaagacaaatatgtggcttggagcaagactttttttttttttttttttttttgtatttttagtagagacggggtttcactgtgttagccaggatggtctcgatctcctgaccccgtgatcctcccgccttggcctcccaaagtgctgggattacaggcgtgagccaccacgcccagctggcttggagtaagactttgactatcaagtttactagtaaaaataataatttcagttttttaaatggttgtatgtagttgagacagggtctcactgtcgcccaggctggagtgcagtggtgcagtcagctcactgcagcctcttctgggctcaagccatcctcttacctcagcctctggagtagctcagactacaggtgtgtgccaccatgcccggctaattttgtaattttttctgagatgggggtctgtagtccaggcatggtggctcatgcctgtaatcccaacacttagggaggccgaggcaggcggatcacttggtgtcaggagtttgagaccagcttgggcaacatggtgaaaccctgtctctactaaaaacacaaaaattagtcgggtgtggtggtgcgcacctacaatcccatagcctgtaaagctactcaggaggctgaggcaggaggatcacttgaacccagggggcagaggctgcagtgagccaagatcacgccactgccctgcagtctgggtgacagagcgagacttgtctcaaaaaaaaaaaatttgtttaaagtaaaaattaaaagagatgggggtctcactgtgttgcccaggcttgaagtgcgtttcttcagcttatttttatcctcatcacagcccagcgtaaatgctgtcagccttcaagtggtgccttctgtgttcatgctgcagtagccttgattcatgtgctgagggacagccccagataagcttgcagtgagacagctcagacctggggtgctggggacaagaggcagcaaggatgggaccgtctgcagccataggcatagggaaaggagtgggagaggctgctcttgaattccaggccagggaccatgttcgactcagacccactgcccacctggttgctgcaccctggaaagcctgactgcccccacaagaccagtgacacccacacagctctctgtgcagggagccaagggtggtgtgtgcagaacaggaacagaaacaagcatcccacaagagagctggaggcagcagccctctgtgcccagcccgagatccgcaacgcataggtgccatgtcagcacacaacttacaccagctcaaagctggatcgacagcagcgcccagggttttggtgattataaccaccctgcaggggttcttctgagtacgtcttcaggtttcttgtgtagttttgttagaagggattttagtggctccagggccttaggaccctagtgtgcagcgaggagtgtccacagagaccctgcccagtcaggccctactttaggctggagcctgtgggcttatcttcaaggattttacaaacacttctgacaggaggccttgcagggagatgatgctgagttgggactgcgcacagccaaggagaccgcagcagtcttctctttctggctcttgtcactttttcaaactgtttctagctttgtttaaaggcaagtgtgaaatgacccagccagtagtaattaattctcaattaagctgtctctctagaagtgattggaaagttttctaagatccacttaaaggatttatggcctagatgtaaaaaatttcaattaaagaggaatgtgtcagccttatttagaatgacagcacaggtaattttaatgtaataataagtgcacgtttttatttacagctattggttttccttttcttcttctccttgatgggcctgctgtcgtcacatctgacctcaaatgtaagtcagaccttaccagccaaggtgtcctctcccactgtgggccaggcaggggcaccaggcagccagcttccaagtcagggtttccagactagctcaggagctccttgtgtttgcggaagtgtgagtgagaactcccaggccgtgggttttttttttttttttttgagatgggggtctcactctgtcacccaggctggagtgcagtggtgtgatctcagctcactgcaacctcagcctcctgggttcaagcaattctcctgcatcagcctcccgagtagctgggattacaggcgtgagtctgtcacacccggctaatttttgtatttttagtagagacggggtttcaccatattgccaggctggtcttgaactggcctcagtgatccgccgacctcggcctcccaaagtgttgggattacaggcatgagccactgcatccggcctgtgggcctttcttttaatgtcttatttgaggacgtggtgcagcagccttggtgtgggtgctcgaagtccctggcctcctacctgagcctcttctgtccagaggcccagtattaccttctataggtaaaactgtcaccagttttaagacttacaataagcaaagaggaaatgccctcttctgtgctgagggctgtaccctcctacccatgggagcaccaggtcggccattctcagggttggtctcctgcggtttacagagcaccacagacctgccaaaggctttccacgtttgtgcagcaatcctcgagtgtttagagaagaggaagatatcctggctggcactctttcagttgacagagagtggtaagaaacacgctgctgaggcacaaatgcggagggccgctcttttcagaggcatcttgcaaatggttaagaacgagccctccttgaggttccttgctaagtaagtttataagctccattttagttgggacagattaagcacaaacttgtttaaagcaataagataatttactggctcactggtcaaccccaggaccaatgggcctatcatggggactgcctctctctgcaccacacccaccctcctgcaagaggtcgacccccccatcctctcccagctgctgacaggtacctgggtatcctcagctcaggctgttcgccccacactatccccacagccaggcctcccagggtacacgtcccgacccccaggggtgtccccagcactgataataggcagagatgtccagagttgcctgagccacttcttggtgttgcagacctcaggctggggcggctcctcctccgtgtggccccggatcagcacaccaggctgctgcctttcgctttttacaggtacctccacccacagggctggtcagggctgggcagtgtttcccagacccccatctcagcacctctgggtcccgccagatgggaagggttgtctgtgcctctgctccacagatgagcagtatcccttggcatcacctgctacctttccagcagtctgtagccatttgtcactatgtctttacctctagtcttctctcctacttccatgaagacgcggccatcagggaagaggccttcctgcatgttgctgtggacatgtacttgaagctggtccagctcttcgtggctggggatacaagcacagtttcacctccagctggcaggagcctggagctcaagggtcaggcaggtgcaagggccagtcccacctccaggggagctccccccagccggaggctccttctgccaaagaatgttccggcacagcatgcagactatgggggacacaccagccctgtttctgtatgtcttctaacctgtgagtttgcctgttttctctctagggcaaccccgtggaactgataacaaaagctcgtctttttctgctgcagttaatacctcggtgcccgaaaaagagcttctcacacgtggcagaggtaacgtcaagatgcccaccttgggccatgtgggggacatgagaattgacagctgcctgggccatgtgcctgcctggctggcaatacaactcgactatttctgccagagcccctcccctgtggtctgaggcctagtgg

SEQ ID NO: 11943 - DNA, 732 bp, Homo sapiens
ggctctcagctgctgcactgcactttgcgattcaacaagtcagggaagaaaacatcaggaagcagctaaagaagctggactgcgagagagaggagctattggttttccttttcttcttctccttgatgggcctgctgtcgtcacatctgacctcaaatagcaccacagacctgccaaaggctttccacgtttgtgcagcaatcctcgagtgtttagagaagaggaagatatcctggctggcactctttcagttgacagagagtgacctcaggctggggcggctcctcctccgtgtggccccggatcagcacaccaggctgctgcctttcgctttttacagtcttctctcctacttccatgaagacgcggccatcagggaagaggccttcctgcatgttgctgtggacatgtacttgaagctggtccagctcttcgtggctggggatacaagcacagtttcacctccagctggcaggagcctggagctcaagggtcaggcagggcaaccccgtggaactgataacaaaagctcgtctttttctgctgcagttaatacctcggtgcccgaaaaagagcttctcacacgtggcagaggtaacgtcaagatgcccaccttgggccatgtgggggacatgagaattgacagctgcctgggccatgtgcctgcctggctggcaatacaactcgactatttctgccagagcccctcccctgtggtctgaggcctagtgg

SEQ ID NO: 11944 - DNA, 3946 bp, Homo sapiens
taaagaagctggactgcgagagagaggaggcaagataggaaattcttttactgatttattttctcgcaagcttggtttcaatcagtgctatttctctgggcttgtctgatgaactgtttttctaaagacaaatatgtggcttggagcaagactttttttttttttttttttttttgtatttttagtagagacggggtttcactgtgttagccaggatggtctcgatctcctgaccccgtgatcctcccgccttggcctcccaaagtgctgggattacaggcgtgagccaccacgcccagctggcttggagtaagactttgactatcaagtttactagtaaaaataataatttcagttttttaaatggttgtatgtagttgagacagggtctcactgtcgcccaggctggagtgcagtggtgcagtcagctcactgcagcctcttctgggctcaagccatcctcttacctcagcctctggagtagctcagactacaggtgtgtgccaccatgcccggctaattttgtaattttttctgagatgggggtctgtagtccaggcatggtggctcatgcctgtaatcccaacacttagggaggccgaggcaggcggatcacttggtgtcaggagtttgagaccagcttgggcaacatggtgaaaccctgtctctactaaaaacacaaaaattagtcgggtgtggtggtgcgcacctacaatcccatagcctgtaaagctactcaggaggctgaggcaggaggatcacttgaacccagggggcagaggctgcagtgagccaagatcacgccactgccctgcagtctgggtgacagagcgagacttgtctcaaaaaaaaaaaatttgtttaaagtaaaaattaaaagagatgggggtctcactgtgttgcccaggcttgaagtgcgtttcttcagcttatttttatcctcatcacagcccagcgtaaatgctgtcagccttcaagtggtgccttctgtgttcatgctgcagtagccttgattcatgtgctgagggacagccccagataagcttgcagtgagacagctcagacctggggtgctggggacaagaggcagcaaggatgggaccgtctgcagccataggcatagggaaaggagtgggagaggctgctcttgaattccaggccagggaccatgttcgactcagacccactgcccacctggttgctgcaccctggaaagcctgactgcccccacaagaccagtgacacccacacagctctctgtgcagggagccaagggtggtgtgtgcagaacaggaacagaaacaagcatcccacaagagagctggaggcagcagccctctgtgcccagcccgagatccgcaacgcataggtgccatgtcagcacacaacttacaccagctcaaagctggatcgacagcagcgcccagggttttggtgattataaccaccctgcaggggttcttctgagtacgtcttcaggtttcttgtgtagttttgttagaagggattttagtggctccagggccttaggaccctagtgtgcagcgaggagtgtccacagagaccctgcccagtcaggccctactttaggctggagcctgtgggcttatcttcaaggattttacaaacacttctgacaggaggccttgcagggagatgatgctgagttgggactgcgcacagccaaggagaccgcagcagtcttctctttctggctcttgtcactttttcaaactgtttctagctttgtttaaaggcaagtgtgaaatgacccagccagtagtaattaattctcaattaagctgtctctctagaagtgattggaaagttttctaagatccacttaaaggatttatggcctagatgtaaaaaatttcaattaaagaggaatgtgtcagccttatttagaatgacagcacaggtaattttaatgtaataataagtgcacgtttttatttacagctattggttttccttttcttcttctccttgatgggcctgctgtcgtcacatctgacctcaaatgtaagtcagaccttaccagccaaggtgtcctctcccactgtgggccaggcaggggcaccaggcagccagcttccaagtcagggtttccagactagctcaggagctccttgtgtttgcggaagtgtgagtgagaactcccaggccgtgggttttttttttttttttttgagatgggggtctcactctgtcacccaggctggagtgcagtggtgtgatctcagctcactgcaacctcagcctcctgggttcaagcaattctcctgcatcagcctcccgagtagctgggattacaggcgtgagtctgtcacacccggctaatttttgtatttttagtagagacggggtttcaccatattgccaggctggtcttgaactggcctcagtgatccgccgacctcggcctcccaaagtgttgggattacaggcatgagccactgcatccggcctgtgggcctttcttttaatgtcttatttgaggacgtggtgcagcagccttggtgtgggtgctcgaagtccctggcctcctacctgagcctcttctgtccagaggcccagtattaccttctataggtaaaactgtcaccagttttaagacttacaataagcaaagaggaaatgccctcttctgtgctgagggctgtaccctcctacccatgggagcaccaggtcggccattctcagggttggtctcctgcggtttacagagcaccacagacctgccaaaggctttccacgtttgtgcagcaatcctcgagtgtttagagaagaggaagatatcctggctggcactctttcagttgacagagagtggtaagaaacacgctgctgaggcacaaatgcggagggccgctcttttcagaggcatcttgcaaatggttaagaacgagccctccttgaggttccttgctaagtaagtttataagctccattttagttgggacagattaagcacaaacttgtttaaagcaataagataatttactggctcactggtcaaccccaggaccaatgggcctatcatggggactgcctctctctgcaccacacccaccctcctgcaagaggtcgacccccccatcctctcccagctgctgacaggtacctgggtatcctcagctcaggctgttcgccccacactatccccacagccaggcctcccagggtacacgtcccgacccccaggggtgtccccagcactgataataggcagagatgtccagagttgcctgagccacttcttggtgttgcagacctcaggctggggcggctcctcctccgtgtggccccggatcagcacaccaggctgctgcctttcgctttttacaggtacctccacccacagggctggtcagggctgggcagtgtttcccagacccccatctcagcacctctgggtcccgccagatgggaagggttgtctgtgcctctgctccacagatgagcagtatcccttggcatcacctgctacctttccagcagtctgtagccatttgtcactatgtctttacctctagtcttctctcctacttccatgaagacgcggccatcagggaagaggccttcctgcatgttgctgtggacatgtacttgaagctggtccagctcttcgtggctggggatacaagcacagtttcacctccagctggcaggagcctggagctcaagggtcaggcaggtgcaagggccagtcccacctccaggggagctccccccagccggaggctccttctgccaaagaatgttccggcacagcatgcagactatgggggacacaccagccctgtttctgtatgtcttctaacctgtgagtttgcctgttttctctctagggcaaccccgtggaactgataacaaaagctcgtctttttctgctgcagttaatacctcggtgcccgaaaaagagcttctcacacgtggcaga

SEQ ID NO: 11945 - DNA, 460 bp, Homo sapiens
taaagaagctggactgcgagagagaggagagcaccacagacctgccaaaggctttccacgtttgtgcagcaatcctcgagtgtttagagaagaggaagatatcctggctggcactctttcagttgacagagagtgacctcaggctggggcggctcctcctccgtgtggccccggatcagcacaccaggctgctgcctttcgctttttacagtcttctctcctacttccatgaagacgcggccatcagggaagaggccttcctgcatgttgctgtggacatgtacttgaagctggtccagctcttcgtggctggggatacaagcacagtttcacctccagctggcaggagcctggagctcaagggtcagggcaaccccgtggaactgataacaaaagctcgtctttttctgctgcagttaatacctcggtgcccgaaaaagagcttctcacacgtggcaga

SEQ ID NO: 11946 - DNA, 5646 bp, Homo sapiens
ctgccccgggaactgcagaagctacaagaaggccggcagtttgccagcgagtacgtgtgggtggtgagatggggtgtgcccgcccagatgcacttcgggacctgctcaaggtcatctcctaaacaccctggcttgcttgagagaagcggtgtgggcagcctctcgtgtgagcagggagaaaagaaccgagttctcgtggtggtgggcgcctgtaatcccaactactggggaggccgaggcaggagaatcagttgaacccaggaggtggagtttccagtgagccgagatcactccaacggccaatagagcaagactctgtccagaaaaaaaacaaaaaaaaaaacagcctctgccagtgtctcgtctgagtgaggaacggcctctcccaggctcccgtctgagtgaggagctcgagtgattcctttgcacctgctccccttcctcttaaatctaatgtgggctcctagagtgcaccgcgtgctggtagggtcagtgtcatggggacctcagggatgcagattctcagcctaccctgacctgtcgaccccagtcagatattcacgggtccttgcaaaccatcaagctcctggcgcaatccaggctcacacacccttctgaggaccacagagctgacagccactccacctgctgaatgtgggtgccgtgttcttaaggggtcgtcagagggcactgctagtacccatcctgcctccttggagaacaccttactttgtgactagttttgaatcactgatgccacaccgggtcccctcagggtttggctgctcgccgtctgctgaaagaagagaagagggccccggcgcggtggcgcacacctgtaatcccagcactttgggaggccaaggcaggtggatcacctgaggtcaggagtttgagaccagcctggccaacatgtgaaacaatctctactgaaaatacagaaatgagctgggtgtgatagtgtgcgcctgtagtcccagctactcaggaggctgaggcaggagaattgcttgaacccaggaggtggaggttgcagtgagccgagatcatgccattgtagtccagcatgggcaatgagagagaaactccatctcaaaaaaggagaaagcaggtcacacctccagttctaattctacaaacacagatcagattgtctgaagttttgttttttgttttgttttgtttgagacagagtttcactcttgtcacccaccctagagtgagatggcacgatctcggctcaccatgacctccgcctcccaggttcaagcgatcctcctgcctcagtctcctgagtagctgggattacaggcgtgagccaccatgcctggctaattttgtatttttagtagagacagggtttctccacgttggtcaggctggtctcgaactcccgacctcaggtgatctgcctgcctcagcctcccaaagtgctgggattacaggcgtgaaccaccacgccctgcctcgtttttgtttatttgagattgagtctcactgtgttgcccaggcagatctcaaactgctgggcttaagcgatcctcctgaagtgctatgattgcagatgtgaaccgtcatgcccagcttatttaaagtctcttaaaccacagcattgtttcattaatttcctaccaattttttaaccagccagaaaactcagacaccacactggggccagagccaggcagtcctttgttctctgttgtaggagggaatgcctgatccacagggccaggcatgggcaactgaggaaaatgaggcctcttcttccaaaatgtaggcagctggggcccaagagcacagggcaaggtagacaggaccaggccagctgcctgctcagtcagcagctctcagaacgccaggatgctgtgggggcagcaccagcacctgcccacactctcacgtggacctgggggatgcagacctagtttctgatggtcctgaaacccttctctgtcctctgatggaaaggcaggccccaaaggtgacaggtgggaataaggacttggtttctatggcgtggttgtatggttgtaaggccctgcaatgaccccgttctctctgtcccagtttcctctcccctgaggctgcctccccagcacccaacccggactggctctcagctgctgcactgcactttgcgattcaacaagtcagggaagaaaacatcaggaagcagctaaagaagctggactgcgagagagaggaggcaagataggaaattcttttactgatttattttctcgcaagcttggtttcaatcagtgctatttctctgggcttgtctgatgaactgtttttctaaagacaaatatgtggcttggagcaagactttttttttttttttttttttttgtatttttagtagagacggggtttcactgtgttagccaggatggtctcgatctcctgaccccgtgatcctcccgccttggcctcccaaagtgctgggattacaggcgtgagccaccacgcccagctggcttggagtaagactttgactatcaagtttactagtaaaaataataatttcagttttttaaatggttgtatgtagttgagacagggtctcactgtcgcccaggctggagtgcagtggtgcagtcagctcactgcagcctcttctgggctcaagccatcctcttacctcagcctctggagtagctcagactacaggtgtgtgccaccatgcccggctaattttgtaattttttctgagatgggggtctgtagtccaggcatggtggctcatgcctgtaatcccaacacttagggaggccgaggcaggcggatcacttggtgtcaggagtttgagaccagcttgggcaacatggtgaaaccctgtctctactaaaaacacaaaaattagtcgggtgtggtggtgcgcacctacaatcccatagcctgtaaagctactcaggaggctgaggcaggaggatcacttgaacccagggggcagaggctgcagtgagccaagatcacgccactgccctgcagtctgggtgacagagcgagacttgtctcaaaaaaaaaaaatttgtttaaagtaaaaattaaaagagatgggggtctcactgtgttgcccaggcttgaagtgcgtttcttcagcttatttttatcctcatcacagcccagcgtaaatgctgtcagccttcaagtggtgccttctgtgttcatgctgcagtagccttgattcatgtgctgagggacagccccagataagcttgcagtgagacagctcagacctggggtgctggggacaagaggcagcaaggatgggaccgtctgcagccataggcatagggaaaggagtgggagaggctgctcttgaattccaggccagggaccatgttcgactcagacccactgcccacctggttgctgcaccctggaaagcctgactgcccccacaagaccagtgacacccacacagctctctgtgcagggagccaagggtggtgtgtgcagaacaggaacagaaacaagcatcccacaagagagctggaggcagcagccctctgtgcccagcccgagatccgcaacgcataggtgccatgtcagcacacaacttacaccagctcaaagctggatcgacagcagcgcccagggttttggtgattataaccaccctgcaggggttcttctgagtacgtcttcaggtttcttgtgtagttttgttagaagggattttagtggctccagggccttaggaccctagtgtgcagcgaggagtgtccacagagaccctgcccagtcaggccctactttaggctggagcctgtgggcttatcttcaaggattttacaaacacttctgacaggaggccttgcagggagatgatgctgagttgggactgcgcacagccaaggagaccgcagcagtcttctctttctggctcttgtcactttttcaaactgtttctagctttgtttaaaggcaagtgtgaaatgacccagccagtagtaattaattctcaattaagctgtctctctagaagtgattggaaagttttctaagatccacttaaaggatttatggcctagatgtaaaaaatttcaattaaagaggaatgtgtcagccttatttagaatgacagcacaggtaattttaatgtaataataagtgcacgtttttatttacagctattggttttccttttcttcttctccttgatgggcctgctgtcgtcacatctgacctcaaatgtaagtcagaccttaccagccaaggtgtcctctcccactgtgggccaggcaggggcaccaggcagccagcttccaagtcagggtttccagactagctcaggagctccttgtgtttgcggaagtgtgagtgagaactcccaggccgtgggttttttttttttttttttgagatgggggtctcactctgtcacccaggctggagtgcagtggtgtgatctcagctcactgcaacctcagcctcctgggttcaagcaattctcctgcatcagcctcccgagtagctgggattacaggcgtgagtctgtcacacccggctaatttttgtatttttagtagagacggggtttcaccatattgccaggctggtcttgaactggcctcagtgatccgccgacctcggcctcccaaagtgttgggattacaggcatgagccactgcatccggcctgtgggcctttcttttaatgtcttatttgaggacgtggtgcagcagccttggtgtgggtgctcgaagtccctggcctcctacctgagcctcttctgtccagaggcccagtattaccttctataggtaaaactgtcaccagttttaagacttacaataagcaaagaggaaatgccctcttctgtgctgagggctgtaccctcctacccatgggagcaccaggtcggccattctcagggttggtctcctgcggtttacagagcaccacagacctgccaaaggctttccacgtttgtgcagcaatcctcgagtgtttagagaagaggaagatatcctggctggcactctttcagttgacagagagtggtaagaaacacgctgctgaggcacaaatgcggagggccgctcttttcagaggcatcttgcaaatggttaagaacgagccctccttgaggttccttgctaagtaagtttataagctccattttagttgggacagattaagcacaaacttgtttaaagcaataagataatttactggctcactggtcaaccccaggaccaatgggcctatcatggggactgcctctctctgcaccacacccaccctcctgcaagaggtcgacccccccatcctctcccagctgctgacaggtacctgggtatcctcagctcaggctgttcgccccacactatccccacagccaggcctcccagggtacacgtcccgacccccaggggtgtccccagcactgataataggcagagatgtccagagttgcctgagccacttcttggtgttgcagacctcaggctggggcggctcctcctccgtgtggccccggatcagcacaccaggctgctgcctttcgctttttacaggtacctccacccacagggctggtcagggctgggcagtgtttcccagacccccatctcagcacctctgggtcccgccagatgggaagggttgtctgtgcctctgctccacagatga

SEQ ID NO: 11947 - DNA, 850 bp, Homo sapiens
ctgccccgggaactgcagaagctacaagaaggccggcagtttgccagcgactattggttttccttttcttcttctccttgatgggcctgctgtcgtcacatctgacctcaaatagcaccacagacctgccaaaggctttccacgtttgtgcagcaatcctcgagtgtttagagaagaggaagatatcctggctggcactctttcagttgacagagagtggtaagaaacacgctgctgaggcacaaatgcggagggccgctcttttcagaggcatcttgcaaatggttaagaacgagccctccttgaggttccttgctaagtaagtttataagctccattttagttgggacagattaagcacaaacttgtttaaagcaataagataatttactggctcactggtcaaccccaggaccaatgggcctatcatggggactgcctctctctgcaccacacccaccctcctgcaagaggtcgacccccccatcctctcccagctgctgacaggtacctgggtatcctcagctcaggctgttcgccccacactatccccacagccaggcctcccagggtacacgtcccgacccccaggggtgtccccagcactgataataggcagagatgtccagagttgcctgagccacttcttggtgttgcagacctcaggctggggcggctcctcctccgtgtggccccggatcagcacaccaggctgctgcctttcgctttttacaggtacctccacccacagggctggtcagggctgggcagtgtttcccagacccccatctcagcacctctgggtcccgccagatgggaagggttgtctgtgcctctgctccacagatga

SEQ ID NO: 11948 - DNA, 16988 bp, Homo sapiens
gtcaagagggaaaaatataatcctgaaagggcacagaaattaaaggaatcagctgtgcgcctcctgcgaagccatcaggacctgaatgcccttttgcttgaggtaagaggaagctggtgtccgtctgcgggcagatttaggttcggggtttttgagtccagccaccgcacagctttcctaagaaaacacccgaggcggcgggcgcggtggcctggcccgcagaggggagggtcgcctgagcccgggagttctggaccaacctgggcaacggggtgagaccccgcctcttttattaaaaacaaaacaacaacaacaaaaaaacaggccgggcgccgtggctcagggctgtaatcccagcttttggggaggccaaggcgggtggatcactcagggtcaggagttcgagaccagcctggccaacatagtgaaacccggtctctactgaaaatacaaaaattagctgggtgtggtggcgcacgcctttaatcccagctactcgggagcctgaggcaggagaattgcttgaacctggacccgggaggcagaaattgcagtgagccgagatcacgccccttgcaatccagtctggattacagagtgagactgtctcacaaaaaaaaaaaaaaaaaaaaaaaaaaaaaaagccgggcgtggtggctcacgcctgtaatcctagccctttgggaggccgaagtgggtagatcacttgaggttaggagttcgagaccagcctgaccaacatggtgaaaccccgtcactacttaaaatacaaaaattagccgggtatggtagcaggtgtctgtaatcccagctgctcaggaggctgaggcaggagaatcgcttgaacctgggaggtggaggtcgccgtgagtgagatcccgccattgcactccagcctggacgacagtgagactccctctcaaaaaagaaaaaaaggaaaatagcccagtagggaagcattacttacacacaggttgtgtttatgcacagatcttgaattttttttatttttattttttattttcatttattttttttgagacaaagtctcacactgtagcctgggctggtatgcagtggggtgatctcggctcactgcagcctccacctcccgggtttaagtgattctcccgtctcagcctcccgagtggctgggactacaggcacgcgccaccatgccctcctaatttttgtatttttagtagagacagggtttcactatgttggccaggctggtctcgaactcttgacctcgtgatctgcccatctcggcctcccaaagtactgggattacaggcgtgagccactacgcctggcctggagcttgaattttttaaatggagtttgttgtgttttggattctaggtagaaggtccactgtgtaaaaaattgtctctcagcaaagtgattgactgtgacagttctgaggcctatgctaatcattctagttcatttataggtaagttatagcttcattttctctattttgaattgcagaagggtttttatatagtaaccatagtttgctaaattaagtagaaatgtaaattttctcaggcgatgggtttccactggtgtgtgtagtcgcaaattctatgggatgtttgtgtgacttgctcttgggcttcttacgatgctgtgtttaaaaacagcgtctgattcaacctgcgactcagaagcagtaggacccagagtgtcccttggaaaaacatgggacatagcaacagcagggatgtgccccttgctcatggaagtagtgagacaggctgtggtgtgcccaggagagcagacgggagaacaattttctaggtacctccttctccccccagtttgagagtgggagatagggtaagttctgggtcaacaacagtaagttattttctgatccttcacgtccttatgtgatgacttgtttctgttaaaataaccttcagtaatagcgctcccttgacaactggtcactgaatgtcattggcaaatgatacagattttcactgccatgattgtatttgaatttcacaaattgcatattatcattccaaggaaccaagctcagccacacagataaacctttaattcattaatttttgagtttgtttttttctgctaaagatatagttagtacatgcacgcacgtgcacacggacacacacacacacacacacacacacagtaaaagacttgtagataaaaaaactttcctatggagacacattggaaacaaatgactagaaattggcattgttggcctggcacagtggctcacgcctataatcgcagcactttgggaggctgaggtgtgcggatcacctgaggtcaggattcgagacgagcctggccaacatggtgaaaccctgtctctactaaaaaacacaaaaattagccgggtgtggtggtgggtgcctgtagtcccagctattcaggaggctgaggcaggagaattgcttgaacgtgggaggcagaggttgcattgagccgagacccctccattgcactccagcctgggcaataagagcaaaactctgtctcagaacagaaaatggcattgtctacttttttttttttttttaacagacagggtctcactctgttgcctggactggagagccgtggtgcaatcacggctcactgcagtcttgacctcctggcctcaagtgatcctcccaccccagcatcttgagtagctgggactacaggtgtgcgccaccatgcctggctaattttttcatagagacagggttttgccatattgcccaggctggtctcaaactcctgagctcaagcaatcagtttacctcagccacccaaggtgttgggattgcaggcatgagccactgtgccccatctgtctacttttctaccgagaatttcaccagcagctgatgatttctcgtactataattttaagcttctagaactattgtaaaattttttttttttttttttgagacgaagtgttgctctgtcgcccaggctggagtgcaatggcgccatctcggctcactacaaactctgcctcctgggttcaagcaattctcctgcctcagcctcccgaatagctgggattataggtgcccgccgccgcacccagctaatttttgtatttttagtagaggcggggtttcaccatcttggccaggctggtctcaaactcctgacctcgtgatcgacccgcctcggcctcctgcagtgttgggattacaggcatgagccaccgcaaccagcctgtaaatgtttttacttatgtattgataatgtgtttttagagccagtacattacaataacaggttcgtactgcagttaacagttttttttttttttttttttttttgagacggagtattgctcttgttacccaggctggagtgcaatggtgtgatctcgactcaccgcaacctctgcctccctagttaaagtgattctcctgcctcagcctcctgagtagctggtattacaggcatgcaccaccacgcctggctaattttgtatttttagtagagatagggtttcaccatgttggtcaggctggtctcaaactcccgacctcaggtgatccacccgcctcggcctcccaaagtgctgggattacaggagggacccactgagcctggcctccagtttttttttgttttgtttttttgagatgaagtctggctctgtcgcccagactgcagtgtagtggcgtgatctcggctcactgcaaactccgcctcctgggttcacgccattcttcgcctcagcctcctgagtagctgggactacaggctcccgtcaccaaacctggctaattttgtttttgtgtctttagtagagacagggtttcaccgtgttagccaggatggtctcgatctcctgaccttgtaatccgcccgcctcggcctcccaaagtgctgggattacaggcgtgagccaccgtgcccggcccggtttctttaaacaattaattttggctcacgtggtggctcacacctgtaatcccagcagtatgggaggccgaggcgggcggattaatgaggttgggaattggagacgagcctagccaacatagtgaaaccccatctctactaaaaatacaaaaaattaactgggcgtagtgacgcgtgcctgtaatcccagctacttgggaggctgaggcaggagaatcgcttgaacctgagaggcggaggttgcagtgagctgagatggcgccgttgcacttcagtccaggcggcagtgtaagacaccattgcaaaaaaataaaacaaaaaaaaattaattttggaagacaaataaattagaaaatgatttcttggcattgcctgcttccaggttgcccaccgtttctcactttattgaatgcagaccagtggctggttgctcaggagaatggtggctgcctgcaggctgttagtgaggttccacttggtggcctgcggactgagcacagctgtgactgcacctgcccaccaggtgcatggcagaatgttgggaaatccctgcctaattttatcacaaccatcaatgtgagtcaacaggggcaggcttatctctgaagtaattagaaaaacaatgtaattgaaagagcctgctgcagttctcaatttattgtgctcctttgtaaaaagatgataaagttcttggtcagaatatatttctttatcttgctccttttgtgtcatgggaaacgtaacaaataccaatgtataactctgggttcaggtgttgccaccagttttattgtgagctgcttggatcatcaaattctcatttttatctcatgtttttccctttgcatctattctccccgtttaaaaggcaattttttttgtgctgcatcttaaaataaggcattttaaacagcaagtctttggttttagattttgtctcatgtgttaagagaaagctatggttttgttttgtgtttaaggctctgctttgcaggatcaagcctcaaggctgggggttcccgtgggtattctctcagccgggatggttgcctctagcgtgggacagatctgcacggctccagcggagaccagtcaccctgtgctgctgactgtggagcagagagtaagacaccagcaaagatgaggaaacctgcccgttgttacttttaagctggttgggaaaataggacatagctttagtattgtttcaggtaatttgttttttaaaaaatgtaatctctcttttcagaagaagctgtcttccctgttagagtttgctcagtatttattggcacacagtatgttctcccgtctttccttctgtcaagaattatggaaaatacaggtaaatttgagattgcaaatctgactctccagtgttccaggcaatgttctgttgatctggatggaggcaacagagtacctgggttttcttgggaattctccaagcttctcattaattacagagagtggatgaaaaagggtttagaaatcatctgtggattggaaagaagtaccttcaattgccattttttgtccctattcacctatcattagtaatatttattagactagaatatattgaaaaacacgtttagccttgggtatattagtatggagaattttccagggtagtatagtaaactattaaaaaaaaatgtatgtaatttttttttccagagacagggtctcgccttgttgcccaggctggtcttttttttttttttttgagacgaagtctcgctctgtcgcacaggctggagtgcagtggcgtgatcttggctcactgcaagccccacctcccaggttcacgccattctcctgcctcagcctcccgagtagctgggactacaggtgactgccaccacgcccagctaattttttgtattttttagcagagacggggtttcaccgtgttagccaggatggtctcgatctcctgacctcgtgatctgcccacctcggcctcccaaagtgctgggattacaagtgtgagccaccgcgcctggcatttatttttatttttgagacagaatattgctctgccgcccaggctggagtgcagtggcgcaatcttggctcactgcaacgtctgcctcccaggttcaagcgattgtcctgcctcagccaccttagtagctgggattacaggcgcgtgccaccatgcccagttaatttttgtatctttttttttttttgagatggagttttgctcttgttgcccaggctggagtgcaatggtgctatcttggcttatcgcaacgtccgcctcccgggttcacgccattctcccgcctcagcctcccgagtagctgggattacaggcatgcgccaccatgcctggctaattttttttgtatttttagtagagacggggtttctccatgttggtcaggctggtctcaaactcctgacctcagatgatctgcccacctcggcctcccaaagtgccgggattacaggtgtgagtcaccgcgccctgcccaatttttgtatctttagtagagatgaggtttcaccatgttggccaggctggtcttcaattcctgacctcaggtgatctgcccatcttggcctcccaagtgctgggattacaggtgtgagccactgcgtccggcctttcccattcttttatccagcatacattatagaattcattagatttttcagttattgctttggtccctgccctcattatcacgtagcttgggaaacaagccactaaatccacaagaagtgcgatgattcatgtgctcacagatttgcgaagaagatgttggacatgcatatcagattggagagttaggaaagccttcctgcacggactgtgaagagtgcgagttaggggccgggcccagtggctcacacctgtaatcccagcactttgggaggccgaggcaggtggatcatgaggtcaggagatcgagcccatcctggctaacacggtgaaaccccgtctctactaaaaaatagaaaaaattagccgggtgtggtggcaggcacctgtagtcccagctactcaggaggctgaggcaggagaatggcgtgaacccgggaggcagagcttacagtgacccgagatggcgccactgcactccagcctgggtgacagagcgcgactctgtctcaaaaaaaaaaaaatagagtgtgagttagggggatgagaaggggaggctgcagggagatcagggcagtgtgacaggcacagtgttcacagtgagtggctaaagcagatcctgttttatcaaatgggagagggttgagtgagaaagacaagggacatgcacagggcacactgaagcctgacctttgtcctggcagcttcgaggagccagtgaaggcttctgaaggagagactgtcatgtcagtgtgtgtaatactgtgttggctgtagtgtggagaaagggttagaagtaggctacagtgcgtaggaagagagaaggaagagaagcaagtgttgggcaacggtgtgtgggtgcccaaaggccagggagtttgaaaaccagtacagctttgtaaaaaaagatgtgtttcaggctctaagtttttgcttgaggttaattttcaatacggcatggttaagaacctaagttgaacattttgtaggaaaatgcattcataaaggactcagaatgctgggggtttttttgtttttgtttttgtttgttttgttttgtttttcagagttctttgttgcttgaagcggtgtggcatcttcacgtacaaggcattgtgagcctgcaagagctgctggaaaggtagcgtgctaatgatgattcagtgttactgtttttgcagtctagtctagtataaattatatttcaaagcccagaatcagacgggtttgatttctggctttgacatataatttgtactagactagattgcattgcatatttatactagactagacctggaggaactattgctttattatttcaagagaacgtttatggtgttttggttttgtttgctttttgtctgttttttttttgagacggagtctcgctctgtggcccaggtgggagtgcagtggcacgatttcagctcactacaacctccacctccagggttcaagcaattctcctgcctcagcctcccaagtcgctgggattacaggcgcccgccaccacacgcagctaatttttgttatgtatttattttttttagggacagagtctcgttctgtcacccaggctggagtgcagtgacgtgatgtcggctcactgcaggctccacctcccgggttcacgccattctcctgcctcagcttcccgagtagctgggactacaggcgtccgccaccacgcctggctaatttttgtatttttagtagagactgggtttcaccatgttagccaggatgggctccatctcctgacttcaggatctgcccgcctctgcctcccaaagcgctgggattacaggcatgaaccactgtgcctggcaatttttgttatttttagtagagatgtggtttcgccatgttagccaggctggtgtcaaactcctaacctcaggtgattcccctgcctcggcctcccaaagtgctgggattacaggcatgagccacctcgcgcggcctttttttttctttttgagacagagacctgctatgtcgccaggctggagtgcagtggtgagatctgggctcgctgcaacctccgcttcccggattcaagcaattctgcccctgcctcctcagtagctgggactacaggcgcgtgccaccacacccggctaatttttgtatgtttagtagagatggggtttcaccatgttggctaggctggtctcgaactcctgatcttgtgatcctcccgcctcggcctagagcagaatttcatctcaaaaaaaaaaaaaaaaagaaaaacctgcttcctaggatatacacatcttatctcagcaccaaaatctatgaagcaaaaatggccagaattaaagggagaagtagacatttcagcaataatcattagaggtttcaatactcccctttcagtaatgggtagaacaagttagattaagaatgatatagaacagccgccccgtccgggagggaggtgggggagtcagccccccgcccggccagccgccctgtccaggaggtgaggggcgcctctgcccggccgcccatactgggaagtgaggagcccctctacccggccaccaccccgtctgggaggtgtacccaacagctcattgagaacgggccatgatgacaatggcggttttatggaatacaaaggggggaagggtggggaaaagattgcgaaatcagatggttgctgtgtctgtgtagaaagaagtagacacgggagacttttcattttgttctgtactaagagaaattcttctgccttgggatcctgttgatctgtgaccttgcccccaaccctgtgctctctgaaacatgtgctgtgtccactcagggttaaatggattaagggcggtgcaagatatgctttgttaaacagatgcttgaaggcagcatgctcgttaagagtcatcaccactccctaatctcaagtacccagggacacaaacactgcagaaggcctcagggtcctctgcctaggaaaaccagagacctttgttcacttgtttatctgctgaccttccctccaccattgtcctatgaccctgccaaatccccctctgcgagaaacacccaagaatgatcaattaaaaaaaaaaaaaaaaaaaagaatgatatagaagttgaatgctgcaaaccagctgacctgactgactgtggagcactctacccagtagtagcagagtgtgtattcgtaagtccaaatggaacagtccccaggatacagcataaggttcaggccaaggccaggtgcggtggctcacacctgtaatcccagcactttgggaggctgaggcgggcagatcacctgaggtcaggagttcaagaccagcctgtccaacgtggtgaaaccctgtctctactaaaattacaaaaattagctgggcaaggtggcaggtgcctgtaatcccagccgttgtggaggctgaggcaggagaatcgcttgaacttgggaggcggaggttgtagtgagctgagattgtgccattgcactccagcctggatgacaagagcaaaactgtttcaagagaaaaaaaaaaggttcaggccataaaacaaagaggaataaatttagaagggctgaaatcattcaaaatatgttctctaaccacaaatgaatttaattagaataaacaacagaagggaattgggaaaatccacaatatttgaaagttaacataatgagtcaaagaagtcacaagggaaattagaaaataacttgagactgggcacagtgccacaccagtcatcccagcactttgggagggcaaggtgggagattgttttgagcccgggagtttgagtccagcctgggcaaagtagtaagacctccagctgggcgtggtggtatgcgcctgttgtcccaactactcaggaggctgaggtggaaggattgcttgagcctgggaggtcgagggtgcagtgactgattgcgccactgcactccagcctcagtgacagcaaaaaactgtctcaaaaaaaaaattgggacatatggctcaactcaatcccctgatgatgggatttagttgagccttacgtctgcctctgtgtgtgtctccagccatcccgacatgcatgctgtgggatcgtggctcttcaggaatctgtgctgcctttgtgaacagatggaagcatcctgccagcatgctgacgtcgccagggccatgctttctggtgcgttcatgacaagatgcgggttcttgggtaaaactcattttgatctgtgataatgccttctgctctcaagagctctgcgaggcagaacagcctgtctctccgtggccgtgggaacctggcatgacagactcccagtctcagcctgttgtggggttgcattttacttgactgatgtggaaatactagtaagtcggccttgacatgagtttaagtgtttccattcacctttcccatagagtgaccgcagctgcttccttctgtcgcccaggctggagtacagtggcgcgatctcagctcactgcaacctccgcctcctgggttcaagtgattctctgcctcaacctccttagtagctgggactgcaggcacgtggcaccatgcccggctaattttttttttgtatttttagtagagacggggtttcattaggttggccaggctgctcttgaactcctgacctcgtgatgcacccccctcggcctcccaaagtgctgggattataggcgtgagccactatgcctggccttcctgaggaatgatattatgagaaaaacttgggactgtaatgtccccccacaaactaagaaggtgctgagagaccagaggatggctcagactagggaccaacccagtttgaggagtagttgggtttgtcagaagatggcttggaccagagtccagcttgaggagtagttgggcttgtcagaggatggctcggaccagagtccagcttgaggagtagttgggcttgtcagagaatggcttggaccaatccagcttgaggagtagttgggtttgtcaggacttatattcagcgcactcctggacggcggcaggacagctctagagaaccgccccaccacctgtctctaaggtgcattgaagctcgttttctggctctttgcctgctgtgtttgagtgatgagactcttttccttggtgagttctcagatcctctctgggatatttgggttctgaggaacacctgctgggagacccatcccactacaagtgacacctacaaataaaaattagatgagaaactgatctgtacagtagcttgtgggttttttcctttttcctaaagctttttggtggcatgagcgacttagcattcctgagctactataacctggtaccagataggttaaatttaaatcaaagttagaaaatcttgtggatttcagtcctcttggtcttattttttaaaaagctaagaatgcctttcctcccccatcacattcctcagaataggatgcttctgggtccctctagaccctctggtattggagattggcaggcaagacaatccataagacctcccttggaaaccacttttatttaagagaaaaaaattgggctgggtggggtgactcatgccagtaatcccagcactttgggaggccaaggcaggtggatcatgaggtcaggagttcaagaccaacctggccaagatggtgaaaccccatctctactaaaaatacaaaaattagctgggtgtggtggcggcgcctatattcccagctactggtgaggctgaggcagagaattgcttgaacctgggaggcggaggttgcagtgagcgagatcataccattgcactcaagcccaggcgacagagcaagcctccgtctcacaaaaaaaaaaaaaaagaaaaaaatctgactataaacttgttccctttcaaatagaagtgcaagaggaaaaaatctggttcatctaagggtcctgattgggtttggtgaacgctagtgtagctgtggtcaggtgagcagtaacttctgcagcgttcctcaggttaggagcagctcacaggggtcctggtgggcccaagccatatgctcacccgcccctctgaagtggatggtctgtgccattcacagttgcttggagaccatgatgtccataaataactttggttttatggtttttcagattttgttcaaatgtttgttttgaggggatttcagaaaaactcagatctgagaagaactgtggagcctgaaaaaatgccgcaggtaggaggaaaagtcaagtgaagagtttagcggaaggagccgtccttattccaagtgttgaaatgtatttacgtgtctctctattgaaacgtgctgtttgtacctatttacggggtacatgtgatacttgttttgtgcatagagtgtaatgatcaagtcagggtgtttagagtctccgtcacctccagtatgtatcatttctgtgtgttggcaacatttcacatgttgcagttactttgaaatatacaatctgttgttaactatagccgcctcactctgctgtggaacattagaacttacttcttctgtctagctgtatgtttgtacccattaaccaactctcttcgttcccccactgcatatacccttctcatctctggtatctctcgttctactctctacctccacaagagccactttttagctcccacatatttgtgataacatgcaatatttgtccttctgtgcctggcttatttcacttaacataatggccttcagttgcattcctgttgctgtgaatgacaggatttcactttaaaaaaaaagaatagctggccgggcatggtggctcatgcctgtaatcccagcactttgggaggacgaggcgggcggatcacaaggtcaggagatcgagaccatcctggctaacatggtaaaatcccgtctctactaaaaaaatagaaaaaattagccgggcctggtggcaggcacctgtggacccagccactcaggaggctgaggcaggagaatggcgtgaaacctggaggcggagcttgcagtgagcccagatcgtgtcactgtattccagcctaggcgacagagactccatctcagaaaaagaaaaaaatagctgaggttgggctcaatggctcatgcctataatccagcactttgggaggctgagactggtggatcccctgaggtcaggagttcaagaccagcctgaccaacatggtgaaaccctgtctctagtaaaaaaaaaaaaaaaatagccgggcgtggtggcacatgcctgtagtcccagctacaggcgtggaggcaggagaattgcttgaacccaggaggcggaggttgcagtgagccaagattgcgccttgcactctagcctgggtgacagagcgagactccgttaaagctgaccagtattccgttgtgtgtatataccacgttttctgtatccggtcatctcttgttgggcacacaggttgatttcatatcttggctattgttaatagtgccacaataaatgtaggagtacagatgtctcttcagctggctgatttcctttcctttggctgtaagcccagtaatgggattgctggatcatatggcagttctggttttttttttgtttttttgtgtttttttgagacggtgtctctctctgttgctcaggctagagtgcagtggcgcgatttcggctcactgcaacctctgcctcccaggttcaaccgattctcctgcctcagcctcccgaatagctgggattacaggcatgcaccaccatgcccagctaatttttgtatttttagtagaggtgaggtttcactctgttggctaggatggtctcgatctcttgacctcatgatctgcctgccttggcctcctgaagtgctgggattacagatgtgatccaccatgcctggtgaaagtgagaccctctgggctggtagttctgtttttagaactacccaactatttagaaatctccatactattttccataatggctgtattaatttacattctcactgatagcatataagagttctgtttgcattctcaccagcatttgttattttttgttttcttgataatgataattctaactggagtgaaataatagctcattgtggctttgacttgtatttccctgatgattagtgacattggcttttttttttttttttttgagacagagtcttgctctgtcgcccgggctggagtgcagtggcgcgatctcggctcactgcaagctccgcctccggggttcacgccattctcctgcctcagcctcctgaatagctgggactacaggcgcccaccaccactcccggctagtttttctatttttagtagagatgggctttcacagtgttggtcaggctggtctcgaacttctgatctcatgacccgcccaccttggcctctcaaagtgttgggattataggcgtgggctaccgtgcctggcctttttttttcttttttcttttttttttttttgagatggagtcttgctctgtctcccaggctggagtgcagtggtgccatcttggttcactgcaagctccgcctaccgggttcaagctattctcctgcctcagtctcccgagtagctgggactatagacacccgccaccgcacctagctaatttttttgtatttttagtagagacagggtttcaccttgttggtcaggctggtctagaactcctgacctcaggtgatccacccacctcgacttccgaaagtgctgggattacaggcgtgggccacagttcccggcctgtttctgggttctctatcctgttccgttggtctgtgtgtatgtttatatcaacctcatgctgttttcatttctgtagcctcgtagtatattttgacctcaggcagtgtgatttctatattctatagctttgttctttttcctcaggattgctttgcttatctgtgttctattttggttccatgtgaattttagaatctttttttctatttctgggaagaacgttattggtattttgatagggattgcattgaatctgtagatagttttggatacgtcccaaatttttattcccttttggaggttcctgagccagtggctcccattttgcctacactgcagtctgtgggctttgtttgaggaagtctgttttattgttaccatgagttgctctctgagtagtggtatgctttaagcccaggagatgtgaagaagggaaatggacaatggtaccttctcaccgtcttctggctccagaggcatcaagggtgaaagtccttagttccacagcccagattcaaggcctgagctttcctctcttcactgaagtacttcagcaaaactctgcgtgcaaaagtgtcctgcccagccctaggctcatggcctcaggccatgctgagagcagtcttagggtaattccagaaagttcagccttttcactctgtctaggtcccttcggtactggagtaatttctaggtctatgagggtttttaaagttgatctctttgtaaagtccatttctttttcttttttccgagacggagtctggctctttcgcccgggccggactgcagtggcactatctcagctcactggaagctctgcctcccgggttcacgccattctcctgcctcagcctcccgagtagctgagactacagggcgtccgccactgcgcccggctaattttttgtatttttagtagagacggggtttcaccatgttagccaggatggtctcgatctcctgacctcgtgatccgcccgcctcggcctcctgaagtgccgtttctttactttagagtaacaagtaataattctcttgtgtgatgcaggtatcacacaaattacagaagattaccaagatggtaactcacattctattttgacaggtcacggttgatgtactgcagagaatgctgatttgtaagttaattgcactgcagcccagactgtaaatgacttagtttgcttattagcaattgtatcagttttctgcctttccatttgaggtatttctcctctgtatgtttcactgtgcagagtcctggtactggaatgcccttgttttggcattttcagagctgtgaagggatacctcatgaatctgtgggtcacagggaagcattttcttgtctgtgtgttttgattaaggcctacagattgtagaagtcttgatggatgtgggccctctggggggttgaagtggatctgttgtctgaaagcgcctggggattgtttctggtgggctgccgccgtgtgctgacatctgttttctgttcctggctctgtcttcagttgcacttgacgctttggctgctggagtacaggaggagtcctccactcacaagatcgtgaggtgctggtatgttcctgagggtggcctgcctgagtgtgcagcagggaggtgtctgccaaattaaagagccaagatattttaaacacttccagagcttcagcagcccgctcctgagcacacttcctctgccagttacgataacgtgcgtgaggaggaggcgaccatgggaaagcccggggaa

SEQ ID NO: 11949 - DNA, 812 bp, Homo sapiens
gtcaagagggaaaaatataatcctgaaagggcacagaaattaaaggaatcagctgtgcgcctcctgcgaagccatcaggacctgaatgcccttttgcttgaggtagaaggtccactgtgtaaaaaattgtctctcagcaaagtgattgactgtgacagttctgaggcctatgctaatcattctagttcatttataggctctgctttgcaggatcaagcctcaaggctgggggttcccgtgggtattctctcagccgggatggttgcctctagcgtgggacagatctgcacggctccagcggagaccagtcaccctgtgctgctgactgtggagcagagaaagaagctgtcttccctgttagagtttgctcagtatttattggcacacagtatgttctcccgtctttccttctgtcaagaattatggaaaatacagagttctttgttgcttgaagcggtgtggcatcttcacgtacaaggcattgtgagcctgcaagagctgctggaaagccatcccgacatgcatgctgtgggatcgtggctcttcaggaatctgtgctgcctttgtgaacagatggaagcatcctgccagcatgctgacgtcgccagggccatgctttctggtcacggttgatgtactgcagagaatgctgatttttgcacttgacgctttggctgctggagtacaggaggagtcctccactcacaagatcgtgaggtgctgagcttcagcagcccgctcctgagcacacttcctctgccagttacgataacgtgcgtgaggaggaggcgaccatgggaaagcccggggaa

SEQ ID NO: 11950 - DNA, 1163 bp, Homo sapiens
tggtcccccgggcccagctgtcttgtcttttatctctttgtcttgtatctttctttctacactctctcgtcgccgcacacggggagagacccaccgaccctgtggggctggtccttaacaaaaacccacaactttttgatctctgacttgaagtttttgtctgtttctccccctgcagcatctgatgctgttcagatgcagagagagtggagctttgcgcggacacaccctctgctcacctcactgtaccgcagggtgagtggatgtggtattatacctgcttctgagctcgtggcggggggattaagatctgcctagtacttgtcatgctgcctgccgtggacggcacatcgagaggttcagggatgtctggtgagatgtggctgtcctcatcaaggccaccactcaggtcaggagactgaacttgtcccttgggccgagcccctcctccttgagatagggagaattctctccaagcaggtgctggccactgtgaggggagagacgccacggtgtgagctgtcacagctccatgtgttacctttgcagtgggaagtgagggggctgcggtggccaccggctgggaggaaggtgaggggtcatctgtcgcacattggtttgcttggatattgaagggagcggatgcttttatttcagctctttgtgatgctgagtgcagaggagttggttggccatttgcaagaagttctggaaacgcaggaggttcactggcagagagtgctctcctttgtgtctgccctggttgtctgctttccagaagcgcagcagctgcttgaaggtgagcttttacgcgagcccggtggtgctggtcaagagtgtgtgtaggggggtgtcagcagagtcccagctgactgtgggtgagcctctcagtgaagcccttccctacctgcccggaacctgcagtgcctcctgtcgatggaacattctttgtcagacgcttccataagcactgactgctgctctgagaggccagagtgtccactgctgcttcattcaggtctctagtggtttgcacttgacatgctgtaattgctgtgtagtcttttaaaacttggtgtttgggtgtgcacagtctccttctggaatacttgatcacccagcataactcacgtcatgttcctgctggctgcccttgccttgct

SEQ ID NO: 11951 - DNA, 761 bp, Homo sapiens
tggtcccccgggcccagctgtcttgtcttttatctctttgtcttgtatctttctttctacactctctcgtcgccgcacacggggagagacccaccgaccctgtggggctggtccttaacaaaaacccacaactttttgatctctgacttgaagtttttgtctgtttctccccctgcagcatctgatgctgttcagatgcagagagagtggagctttgcgcggacacaccctctgctcacctcactgtaccgcaggctctttgtgatgctgagtgcagaggagttggttggccatttgcaagaagttctggaaacgcaggaggttcactggcagagagtgctctcctttgtgtctgccctggttgtctgctttccagaagcgcagcagctgcttgaaggtgagcttttacgcgagcccggtggtgctggtcaagagtgtgtgtaggggggtgtcagcagagtcccagctgactgtgggtgagcctctcagtgaagcccttccctacctgcccggaacctgcagtgcctcctgtcgatggaacattctttgtcagacgcttccataagcactgactgctgctctgagaggccagagtgtccactgctgcttcattcaggtctctagtggtttgcacttgacatgctgtaattgctgtgtagtcttttaaaacttggtgtttgggtgtgcacagtctccttctggaatacttgatcacccagcataactcacgtcatgttcctgctggctgcccttgccttgct

SEQ ID NO: 11952 - DNA, 3327 bp, Homo sapiens
ttgcacttgacgctttggctgctggagtacaggaggagtcctccactcacaagatcgtgaggtgctggtatgttcctgagggtggcctgcctgagtgtgcagcagggaggtgtctgccaaattaaagagccaagatattttaaacacttccagagcttcagcagcccgctcctgagcacacttcctctgccagttacgataacgtgcgtgaggaggaggcgaccatgggaaagcccggggaacgctctggtcagccttttcctgtgaggatgaggtcggaaggtgcgcccactgcagtatcctgttccgcctctggaagtcctgcaccaatgtttgtcccactcactgtgacctcctcctgtgtggagtctccccttgctcctccttccctgggtgtgattcaggctctagagctggccctgcctctcagccccccacatttctagaacacactgtagctgtgcctctacagactcccgctgcctggcctccacagatcctgctcagattcaccagtaggcaaagcttggccctattagctttttctctccatggctctgtggagatgtgcggagacccttacaggtcgggaggcggaagctgaggagtgggggctgggtggaaggtggacatcggggtttggtggaaatggggctctggggtttgcttccctctagtgtgggcaggggaccttgaagtgaagtcttgagaaaccagtagaatttgccactgtttccaggccttgtcaaccttttcattctttattttgctcctcatttcccatccctcacagtaactgtttaactgctcaattaaatgtgttgtaccgttcggtacttttactgaaacagtgaataaagcactgtgtgatttcctgaatgtttacatgtgcatcagttagcttgggctgctgtaacaaagtgccagagactgcggtgtggacggcagatgtgttctcacagcagtggaggctggaagttggaggtcagggtgcccctagggttgggttctggtgaggaccctcttcctggcttgcaggagacctactttttctgtgtcttcatgaggtagagaggggagagcaagccctctggtgtcttctccgggcagtcatctcatcatcacctcagccttatcaacaccccaccttgagaggctgggcttcaacagaggaactttgtggggatacagtttagtctgtggcaagggcttttttttataatctgtgtgataagattactcacactgatgtcctgagagtcaggtaacaaccactgacctgccgatttttatattttgtaattagttgccaattatttatttatttatttatttttgagacagagttttattcttgttgcccaggctggagtgcagtggtgagatctctgctcactgcaacctctgcctcccaggttcaatcaattcttctgcctcagcctcctgagtagctgggattacaggcatgcaccaccacacctggcacaagcctatagttttgtattttctatttttaagtagacatggggtttcactatattggtcaggctggtctcgaactcctgacctcaagtgataacacccacctcagcctcccaaagtactgggattacaggcgtgagccaccgcacctggcctgccaataatttaaaatcagacatcctccaacagtcttggtggccagcttcccttgcacactgggggctgtggtgtcccaaagccctgccctgtgaggaaggacagcagggctgagaagtgaatctccacgatgtcccacaccctgttgtgtgagtgtcttgagtttgcacagagccgacgtggcctcgttgggtgtgtgaccctggggcagttcactgaaccgccaggacccttgattttctttctttctttctttatttttttgagacagagtctcactgtgtcgcccaggctggagtgcagtggcacgatctcggtttactacaacctatgcctcctgggttcaagcgattctcctgcctcagcctcccacatagctgggactataggtgtgtgccaccatgcctggctaattttttttatttttctttttttgagacagaatttcgctctgtcgcccatgctggagtgcagtggtgcgatctctgctcactgcaagctccgctccctgggttcacaccattctcctgcctcagtctcccgagtagctggaactacaggtgcccaccaccatgcccggctaattttttctatttttttagtagagatggggtttcgttgggttggccgggatggtctcgagctcctgaccttgtcatctgccccccttggcctcccaaagtgctgggattacaggtgtgagccaatgcgcctggcctaatattttggtatttttagtgtagatggggtttcaccatgttagccagggtagtcttgatctcctgaccttgtgatctgcccgcctcagcctcccagagtgctgggattacaggcatgagccaccgtgcccggctggacccttgattttcttacctggggaatcggcataaagtgccgcttgctggttgcaggttgtaagcctcacgagagggtctgggtttggtttggtggtctgtataggcctgctgggatgtggcaggctaacagacctcaagtgctcttgccacctggctctgtgaccccattcacccccagaacatcgtgttctctcacacagatggcccaggaaaccttagtcccttccattccttcctcatcttcatggacagagctggcctcagtccctgttgtgactgtttgaggccctggtgtgctgggctcttctctcaggcttggcacgaccctctgggggagttccgtgtcacagagggtgccgctgaggccccgtcgggttggctcccggggctccactcccgggtgcggcgcggcctgcccttcccaacctgtttccttctgctccactcccgggtgtggcgcggcctgcccttccccacctgtttccttctgctccttcgcttctctgctccgtgggtttcgccgttgccttgccccctttctcgttgaactgccacctccttggattcagtttcaagtctgtggttatagtggcctggccaagaaagccccttccttgcttaaagaagggatgagcctgagccacagtttgtgctgggattggtgggtggcgtgcaaggcaccctccctttcctgacccctctttctgctgcattggcaggttcggagtgttcagtggacacacgcttggcagtgtaatttccacagatcctctgaagaggttcttcagtcataccctgactcagatactcactcacagccctgtgctgaaag

SEQ ID NO: 11953 - DNA, 395 bp, Homo sapiens
ttgcacttgacgctttggctgctggagtacaggaggagtcctccactcacaagatcgtgaggtgctggtatgttcctgagggtggcctgcctgagtgtgcagcagggaggtgtctgccaaattaaagagccaagatattttaaacacttccagagcttcagcagcccgctcctgagcacacttcctctgccagttacgataacgtgcgtgaggaggaggcgaccatgggaaagcccggggaacgctctggtcagccttttcctgtgaggatgaggtcggaaggttcggagtgttcagtggacacacgcttggcagtgtaatttccacagatcctctgaagaggttcttcagtcataccctgactcagatactcactcacagccctgtgctgaaag

SEQ ID NO: 11954 - DNA, 18294 bp, Homo sapiens
gagccgccgccggggctgtaggcgccaaggccatgtccgactcgtgggtcccgaactccgcctcgggccaggacccagggggccgccggagggcctgggccgagctgctgggtaggtgggcgcggcaggccgcgggagtgggcggcgtccggcccgggacggtttcgccggttccccgatcccttcccgccagagcctccgccggtcggatccccggacgccgcgcccggggggctgtgcggggtgggcgcccggctggggcggcgcggctgcctcggacccggcccctcctgcgcctgggcggacgcccccagccgccgcccgcggggcgctcccttctttcccgaacgccgcccccgccggccgccctgtcaggcgggcctggggtgcgcggcctggggctcccctcagcgcagaggccgcccctcgccagccgtccccgggctcccctgcctcgggccctcctgggccgtcttccccggcgtccgcggtggggccgtctccgttagtttcccgagacctgcgccctggggaggagccccggcccctcttcgggagggtgtcgctggtgggtttctccgcggcgtccacctgcgcgtcgggccggggaccccgtgtgtgaattgtgctgtgatggtttcgaaccgacttctctccgtagcgggaagggtcaagagggaaaaatataatcctgaaagggcacagaaattaaaggaatcagctgtgcgcctcctgcgaagccatcaggacctgaatgcccttttgcttgaggtaagaggaagctggtgtccgtctgcgggcagatttaggttcggggtttttgagtccagccaccgcacagctttcctaagaaaacacccgaggcggcgggcgcggtggcctggcccgcagaggggagggtcgcctgagcccgggagttctggaccaacctgggcaacggggtgagaccccgcctcttttattaaaaacaaaacaacaacaacaaaaaaacaggccgggcgccgtggctcagggctgtaatcccagcttttggggaggccaaggcgggtggatcactcagggtcaggagttcgagaccagcctggccaacatagtgaaacccggtctctactgaaaatacaaaaattagctgggtgtggtggcgcacgcctttaatcccagctactcgggagcctgaggcaggagaattgcttgaacctggacccgggaggcagaaattgcagtgagccgagatcacgccccttgcaatccagtctggattacagagtgagactgtctcacaaaaaaaaaaaaaaaaaaaaaaaaaaaaaaagccgggcgtggtggctcacgcctgtaatcctagccctttgggaggccgaagtgggtagatcacttgaggttaggagttcgagaccagcctgaccaacatggtgaaaccccgtcactacttaaaatacaaaaattagccgggtatggtagcaggtgtctgtaatcccagctgctcaggaggctgaggcaggagaatcgcttgaacctgggaggtggaggtcgccgtgagtgagatcccgccattgcactccagcctggacgacagtgagactccctctcaaaaaagaaaaaaaggaaaatagcccagtagggaagcattacttacacacaggttgtgtttatgcacagatcttgaattttttttatttttattttttattttcatttattttttttgagacaaagtctcacactgtagcctgggctggtatgcagtggggtgatctcggctcactgcagcctccacctcccgggtttaagtgattctcccgtctcagcctcccgagtggctgggactacaggcacgcgccaccatgccctcctaatttttgtatttttagtagagacagggtttcactatgttggccaggctggtctcgaactcttgacctcgtgatctgcccatctcggcctcccaaagtactgggattacaggcgtgagccactacgcctggcctggagcttgaattttttaaatggagtttgttgtgttttggattctaggtagaaggtccactgtgtaaaaaattgtctctcagcaaagtgattgactgtgacagttctgaggcctatgctaatcattctagttcatttataggtaagttatagcttcattttctctattttgaattgcagaagggtttttatatagtaaccatagtttgctaaattaagtagaaatgtaaattttctcaggcgatgggtttccactggtgtgtgtagtcgcaaattctatgggatgtttgtgtgacttgctcttgggcttcttacgatgctgtgtttaaaaacagcgtctgattcaacctgcgactcagaagcagtaggacccagagtgtcccttggaaaaacatgggacatagcaacagcagggatgtgccccttgctcatggaagtagtgagacaggctgtggtgtgcccaggagagcagacgggagaacaattttctaggtacctccttctccccccagtttgagagtgggagatagggtaagttctgggtcaacaacagtaagttattttctgatccttcacgtccttatgtgatgacttgtttctgttaaaataaccttcagtaatagcgctcccttgacaactggtcactgaatgtcattggcaaatgatacagattttcactgccatgattgtatttgaatttcacaaattgcatattatcattccaaggaaccaagctcagccacacagataaacctttaattcattaatttttgagtttgtttttttctgctaaagatatagttagtacatgcacgcacgtgcacacggacacacacacacacacacacacacacagtaaaagacttgtagataaaaaaactttcctatggagacacattggaaacaaatgactagaaattggcattgttggcctggcacagtggctcacgcctataatcgcagcactttgggaggctgaggtgtgcggatcacctgaggtcaggattcgagacgagcctggccaacatggtgaaaccctgtctctactaaaaaacacaaaaattagccgggtgtggtggtgggtgcctgtagtcccagctattcaggaggctgaggcaggagaattgcttgaacgtgggaggcagaggttgcattgagccgagacccctccattgcactccagcctgggcaataagagcaaaactctgtctcagaacagaaaatggcattgtctacttttttttttttttttaacagacagggtctcactctgttgcctggactggagagccgtggtgcaatcacggctcactgcagtcttgacctcctggcctcaagtgatcctcccaccccagcatcttgagtagctgggactacaggtgtgcgccaccatgcctggctaattttttcatagagacagggttttgccatattgcccaggctggtctcaaactcctgagctcaagcaatcagtttacctcagccacccaaggtgttgggattgcaggcatgagccactgtgccccatctgtctacttttctaccgagaatttcaccagcagctgatgatttctcgtactataattttaagcttctagaactattgtaaaattttttttttttttttttgagacgaagtgttgctctgtcgcccaggctggagtgcaatggcgccatctcggctcactacaaactctgcctcctgggttcaagcaattctcctgcctcagcctcccgaatagctgggattataggtgcccgccgccgcacccagctaatttttgtatttttagtagaggcggggtttcaccatcttggccaggctggtctcaaactcctgacctcgtgatcgacccgcctcggcctcctgcagtgttgggattacaggcatgagccaccgcaaccagcctgtaaatgtttttacttatgtattgataatgtgtttttagagccagtacattacaataacaggttcgtactgcagttaacagttttttttttttttttttttttttgagacggagtattgctcttgttacccaggctggagtgcaatggtgtgatctcgactcaccgcaacctctgcctccctagttaaagtgattctcctgcctcagcctcctgagtagctggtattacaggcatgcaccaccacgcctggctaattttgtatttttagtagagatagggtttcaccatgttggtcaggctggtctcaaactcccgacctcaggtgatccacccgcctcggcctcccaaagtgctgggattacaggagggacccactgagcctggcctccagtttttttttgttttgtttttttgagatgaagtctggctctgtcgcccagactgcagtgtagtggcgtgatctcggctcactgcaaactccgcctcctgggttcacgccattcttcgcctcagcctcctgagtagctgggactacaggctcccgtcaccaaacctggctaattttgtttttgtgtctttagtagagacagggtttcaccgtgttagccaggatggtctcgatctcctgaccttgtaatccgcccgcctcggcctcccaaagtgctgggattacaggcgtgagccaccgtgcccggcccggtttctttaaacaattaattttggctcacgtggtggctcacacctgtaatcccagcagtatgggaggccgaggcgggcggattaatgaggttgggaattggagacgagcctagccaacatagtgaaaccccatctctactaaaaatacaaaaaattaactgggcgtagtgacgcgtgcctgtaatcccagctacttgggaggctgaggcaggagaatcgcttgaacctgagaggcggaggttgcagtgagctgagatggcgccgttgcacttcagtccaggcggcagtgtaagacaccattgcaaaaaaataaaacaaaaaaaaattaattttggaagacaaataaattagaaaatgatttcttggcattgcctgcttccaggttgcccaccgtttctcactttattgaatgcagaccagtggctggttgctcaggagaatggtggctgcctgcaggctgttagtgaggttccacttggtggcctgcggactgagcacagctgtgactgcacctgcccaccaggtgcatggcagaatgttgggaaatccctgcctaattttatcacaaccatcaatgtgagtcaacaggggcaggcttatctctgaagtaattagaaaaacaatgtaattgaaagagcctgctgcagttctcaatttattgtgctcctttgtaaaaagatgataaagttcttggtcagaatatatttctttatcttgctccttttgtgtcatgggaaacgtaacaaataccaatgtataactctgggttcaggtgttgccaccagttttattgtgagctgcttggatcatcaaattctcatttttatctcatgtttttccctttgcatctattctccccgtttaaaaggcaattttttttgtgctgcatcttaaaataaggcattttaaacagcaagtctttggttttagattttgtctcatgtgttaagagaaagctatggttttgttttgtgtttaaggctctgctttgcaggatcaagcctcaaggctgggggttcccgtgggtattctctcagccgggatggttgcctctagcgtgggacagatctgcacggctccagcggagaccagtcaccctgtgctgctgactgtggagcagagagtaagacaccagcaaagatgaggaaacctgcccgttgttacttttaagctggttgggaaaataggacatagctttagtattgtttcaggtaatttgttttttaaaaaatgtaatctctcttttcagaagaagctgtcttccctgttagagtttgctcagtatttattggcacacagtatgttctcccgtctttccttctgtcaagaattatggaaaatacaggtaaatttgagattgcaaatctgactctccagtgttccaggcaatgttctgttgatctggatggaggcaacagagtacctgggttttcttgggaattctccaagcttctcattaattacagagagtggatgaaaaagggtttagaaatcatctgtggattggaaagaagtaccttcaattgccattttttgtccctattcacctatcattagtaatatttattagactagaatatattgaaaaacacgtttagccttgggtatattagtatggagaattttccagggtagtatagtaaactattaaaaaaaaatgtatgtaatttttttttccagagacagggtctcgccttgttgcccaggctggtcttttttttttttttttgagacgaagtctcgctctgtcgcacaggctggagtgcagtggcgtgatcttggctcactgcaagccccacctcccaggttcacgccattctcctgcctcagcctcccgagtagctgggactacaggtgactgccaccacgcccagctaattttttgtattttttagcagagacggggtttcaccgtgttagccaggatggtctcgatctcctgacctcgtgatctgcccacctcggcctcccaaagtgctgggattacaagtgtgagccaccgcgcctggcatttatttttatttttgagacagaatattgctctgccgcccaggctggagtgcagtggcgcaatcttggctcactgcaacgtctgcctcccaggttcaagcgattgtcctgcctcagccaccttagtagctgggattacaggcgcgtgccaccatgcccagttaatttttgtatctttttttttttttgagatggagttttgctcttgttgcccaggctggagtgcaatggtgctatcttggcttatcgcaacgtccgcctcccgggttcacgccattctcccgcctcagcctcccgagtagctgggattacaggcatgcgccaccatgcctggctaattttttttgtatttttagtagagacggggtttctccatgttggtcaggctggtctcaaactcctgacctcagatgatctgcccacctcggcctcccaaagtgccgggattacaggtgtgagtcaccgcgccctgcccaatttttgtatctttagtagagatgaggtttcaccatgttggccaggctggtcttcaattcctgacctcaggtgatctgcccatcttggcctcccaagtgctgggattacaggtgtgagccactgcgtccggcctttcccattcttttatccagcatacattatagaattcattagatttttcagttattgctttggtccctgccctcattatcacgtagcttgggaaacaagccactaaatccacaagaagtgcgatgattcatgtgctcacagatttgcgaagaagatgttggacatgcatatcagattggagagttaggaaagccttcctgcacggactgtgaagagtgcgagttaggggccgggcccagtggctcacacctgtaatcccagcactttgggaggccgaggcaggtggatcatgaggtcaggagatcgagcccatcctggctaacacggtgaaaccccgtctctactaaaaaatagaaaaaattagccgggtgtggtggcaggcacctgtagtcccagctactcaggaggctgaggcaggagaatggcgtgaacccgggaggcagagcttacagtgacccgagatggcgccactgcactccagcctgggtgacagagcgcgactctgtctcaaaaaaaaaaaaatagagtgtgagttagggggatgagaaggggaggctgcagggagatcagggcagtgtgacaggcacagtgttcacagtgagtggctaaagcagatcctgttttatcaaatgggagagggttgagtgagaaagacaagggacatgcacagggcacactgaagcctgacctttgtcctggcagcttcgaggagccagtgaaggcttctgaaggagagactgtcatgtcagtgtgtgtaatactgtgttggctgtagtgtggagaaagggttagaagtaggctacagtgcgtaggaagagagaaggaagagaagcaagtgttgggcaacggtgtgtgggtgcccaaaggccagggagtttgaaaaccagtacagctttgtaaaaaaagatgtgtttcaggctctaagtttttgcttgaggttaattttcaatacggcatggttaagaacctaagttgaacattttgtaggaaaatgcattcataaaggactcagaatgctgggggtttttttgtttttgtttttgtttgttttgttttgtttttcagagttctttgttgcttgaagcggtgtggcatcttcacgtacaaggcattgtgagcctgcaagagctgctggaaaggtagcgtgctaatgatgattcagtgttactgtttttgcagtctagtctagtataaattatatttcaaagcccagaatcagacgggtttgatttctggctttgacatataatttgtactagactagattgcattgcatatttatactagactagacctggaggaactattgctttattatttcaagagaacgtttatggtgttttggttttgtttgctttttgtctgttttttttttgagacggagtctcgctctgtggcccaggtgggagtgcagtggcacgatttcagctcactacaacctccacctccagggttcaagcaattctcctgcctcagcctcccaagtcgctgggattacaggcgcccgccaccacacgcagctaatttttgttatgtatttattttttttagggacagagtctcgttctgtcacccaggctggagtgcagtgacgtgatgtcggctcactgcaggctccacctcccgggttcacgccattctcctgcctcagcttcccgagtagctgggactacaggcgtccgccaccacgcctggctaatttttgtatttttagtagagactgggtttcaccatgttagccaggatgggctccatctcctgacttcaggatctgcccgcctctgcctcccaaagcgctgggattacaggcatgaaccactgtgcctggcaatttttgttatttttagtagagatgtggtttcgccatgttagccaggctggtgtcaaactcctaacctcaggtgattcccctgcctcggcctcccaaagtgctgggattacaggcatgagccacctcgcgcggcctttttttttctttttgagacagagacctgctatgtcgccaggctggagtgcagtggtgagatctgggctcgctgcaacctccgcttcccggattcaagcaattctgcccctgcctcctcagtagctgggactacaggcgcgtgccaccacacccggctaatttttgtatgtttagtagagatggggtttcaccatgttggctaggctggtctcgaactcctgatcttgtgatcctcccgcctcggcctagagcagaatttcatctcaaaaaaaaaaaaaaaaagaaaaacctgcttcctaggatatacacatcttatctcagcaccaaaatctatgaagcaaaaatggccagaattaaagggagaagtagacatttcagcaataatcattagaggtttcaatactcccctttcagtaatgggtagaacaagttagattaagaatgatatagaacagccgccccgtccgggagggaggtgggggagtcagccccccgcccggccagccgccctgtccaggaggtgaggggcgcctctgcccggccgcccatactgggaagtgaggagcccctctacccggccaccaccccgtctgggaggtgtacccaacagctcattgagaacgggccatgatgacaatggcggttttatggaatacaaaggggggaagggtggggaaaagattgcgaaatcagatggttgctgtgtctgtgtagaaagaagtagacacgggagacttttcattttgttctgtactaagagaaattcttctgccttgggatcctgttgatctgtgaccttgcccccaaccctgtgctctctgaaacatgtgctgtgtccactcagggttaaatggattaagggcggtgcaagatatgctttgttaaacagatgcttgaaggcagcatgctcgttaagagtcatcaccactccctaatctcaagtacccagggacacaaacactgcagaaggcctcagggtcctctgcctaggaaaaccagagacctttgttcacttgtttatctgctgaccttccctccaccattgtcctatgaccctgccaaatccccctctgcgagaaacacccaagaatgatcaattaaaaaaaaaaaaaaaaaaaagaatgatatagaagttgaatgctgcaaaccagctgacctgactgactgtggagcactctacccagtagtagcagagtgtgtattcgtaagtccaaatggaacagtccccaggatacagcataaggttcaggccaaggccaggtgcggtggctcacacctgtaatcccagcactttgggaggctgaggcgggcagatcacctgaggtcaggagttcaagaccagcctgtccaacgtggtgaaaccctgtctctactaaaattacaaaaattagctgggcaaggtggcaggtgcctgtaatcccagccgttgtggaggctgaggcaggagaatcgcttgaacttgggaggcggaggttgtagtgagctgagattgtgccattgcactccagcctggatgacaagagcaaaactgtttcaagagaaaaaaaaaaggttcaggccataaaacaaagaggaataaatttagaagggctgaaatcattcaaaatatgttctctaaccacaaatgaatttaattagaataaacaacagaagggaattgggaaaatccacaatatttgaaagttaacataatgagtcaaagaagtcacaagggaaattagaaaataacttgagactgggcacagtgccacaccagtcatcccagcactttgggagggcaaggtgggagattgttttgagcccgggagtttgagtccagcctgggcaaagtagtaagacctccagctgggcgtggtggtatgcgcctgttgtcccaactactcaggaggctgaggtggaaggattgcttgagcctgggaggtcgagggtgcagtgactgattgcgccactgcactccagcctcagtgacagcaaaaaactgtctcaaaaaaaaaattgggacatatggctcaactcaatcccctgatgatgggatttagttgagccttacgtctgcctctgtgtgtgtctccagccatcccgacatgcatgctgtgggatcgtggctcttcaggaatctgtgctgcctttgtgaacagatggaagcatcctgccagcatgctgacgtcgccagggccatgctttctggtgcgttcatgacaagatgcgggttcttgggtaaaactcattttgatctgtgataatgccttctgctctcaagagctctgcgaggcagaacagcctgtctctccgtggccgtgggaacctggcatgacagactcccagtctcagcctgttgtggggttgcattttacttgactgatgtggaaatactagtaagtcggccttgacatgagtttaagtgtttccattcacctttcccatagagtgaccgcagctgcttccttctgtcgcccaggctggagtacagtggcgcgatctcagctcactgcaacctccgcctcctgggttcaagtgattctctgcctcaacctccttagtagctgggactgcaggcacgtggcaccatgcccggctaattttttttttgtatttttagtagagacggggtttcattaggttggccaggctgctcttgaactcctgacctcgtgatgcacccccctcggcctcccaaagtgctgggattataggcgtgagccactatgcctggccttcctgaggaatgatattatgagaaaaacttgggactgtaatgtccccccacaaactaagaaggtgctgagagaccagaggatggctcagactagggaccaacccagtttgaggagtagttgggtttgtcagaagatggcttggaccagagtccagcttgaggagtagttgggcttgtcagaggatggctcggaccagagtccagcttgaggagtagttgggcttgtcagagaatggcttggaccaatccagcttgaggagtagttgggtttgtcaggacttatattcagcgcactcctggacggcggcaggacagctctagagaaccgccccaccacctgtctctaaggtgcattgaagctcgttttctggctctttgcctgctgtgtttgagtgatgagactcttttccttggtgagttctcagatcctctctgggatatttgggttctgaggaacacctgctgggagacccatcccactacaagtgacacctacaaataaaaattagatgagaaactgatctgtacagtagcttgtgggttttttcctttttcctaaagctttttggtggcatgagcgacttagcattcctgagctactataacctggtaccagataggttaaatttaaatcaaagttagaaaatcttgtggatttcagtcctcttggtcttattttttaaaaagctaagaatgcctttcctcccccatcacattcctcagaataggatgcttctgggtccctctagaccctctggtattggagattggcaggcaagacaatccataagacctcccttggaaaccacttttatttaagagaaaaaaattgggctgggtggggtgactcatgccagtaatcccagcactttgggaggccaaggcaggtggatcatgaggtcaggagttcaagaccaacctggccaagatggtgaaaccccatctctactaaaaatacaaaaattagctgggtgtggtggcggcgcctatattcccagctactggtgaggctgaggcagagaattgcttgaacctgggaggcggaggttgcagtgagcgagatcataccattgcactcaagcccaggcgacagagcaagcctccgtctcacaaaaaaaaaaaaaaagaaaaaaatctgactataaacttgttccctttcaaatagaagtgcaagaggaaaaaatctggttcatctaagggtcctgattgggtttggtgaacgctagtgtagctgtggtcaggtgagcagtaacttctgcagcgttcctcaggttaggagcagctcacaggggtcctggtgggcccaagccatatgctcacccgcccctctgaagtggatggtctgtgccattcacagttgcttggagaccatgatgtccataaataactttggttttatggtttttcagattttgttcaaatgtttgttttgaggggatttcagaaaaactcagatctgagaagaactgtggagcctgaaaaaatgccgcaggtaggaggaaaagtcaagtgaagagtttagcggaaggagccgtccttattccaagtgttgaaatgtatttacgtgtctctctattgaaacgtgctgtttgtacctatttacggggtacatgtgatacttgttttgtgcatagagtgtaatgatcaagtcagggtgtttagagtctccgtcacctccagtatgtatcatttctgtgtgttggcaacatttcacatgttgcagttactttgaaatatacaatctgttgttaactatagccgcctcactctgctgtggaacattagaacttacttcttctgtctagctgtatgtttgtacccattaaccaactctcttcgttcccccactgcatatacccttctcatctctggtatctctcgttctactctctacctccacaagagccactttttagctcccacatatttgtgataacatgcaatatttgtccttctgtgcctggcttatttcacttaacataatggccttcagttgcattcctgttgctgtgaatgacaggatttcactttaaaaaaaaagaatagctggccgggcatggtggctcatgcctgtaatcccagcactttgggaggacgaggcgggcggatcacaaggtcaggagatcgagaccatcctggctaacatggtaaaatcccgtctctactaaaaaaatagaaaaaattagccgggcctggtggcaggcacctgtggacccagccactcaggaggctgaggcaggagaatggcgtgaaacctggaggcggagcttgcagtgagcccagatcgtgtcactgtattccagcctaggcgacagagactccatctcagaaaaagaaaaaaatagctgaggttgggctcaatggctcatgcctataatccagcactttgggaggctgagactggtggatcccctgaggtcaggagttcaagaccagcctgaccaacatggtgaaaccctgtctctagtaaaaaaaaaaaaaaaatagccgggcgtggtggcacatgcctgtagtcccagctacaggcgtggaggcaggagaattgcttgaacccaggaggcggaggttgcagtgagccaagattgcgccttgcactctagcctgggtgacagagcgagactccgttaaagctgaccagtattccgttgtgtgtatataccacgttttctgtatccggtcatctcttgttgggcacacaggttgatttcatatcttggctattgttaatagtgccacaataaatgtaggagtacagatgtctcttcagctggctgatttcctttcctttggctgtaagcccagtaatgggattgctggatcatatggcagttctggttttttttttgtttttttgtgtttttttgagacggtgtctctctctgttgctcaggctagagtgcagtggcgcgatttcggctcactgcaacctctgcctcccaggttcaaccgattctcctgcctcagcctcccgaatagctgggattacaggcatgcaccaccatgcccagctaatttttgtatttttagtagaggtgaggtttcactctgttggctaggatggtctcgatctcttgacctcatgatctgcctgccttggcctcctgaagtgctgggattacagatgtgatccaccatgcctggtgaaagtgagaccctctgggctggtagttctgtttttagaactacccaactatttagaaatctccatactattttccataatggctgtattaatttacattctcactgatagcatataagagttctgtttgcattctcaccagcatttgttattttttgttttcttgataatgataattctaactggagtgaaataatagctcattgtggctttgacttgtatttccctgatgattagtgacattggcttttttttttttttttttgagacagagtcttgctctgtcgcccgggctggagtgcagtggcgcgatctcggctcactgcaagctccgcctccggggttcacgccattctcctgcctcagcctcctgaatagctgggactacaggcgcccaccaccactcccggctagtttttctatttttagtagagatgggctttcacagtgttggtcaggctggtctcgaacttctgatctcatgacccgcccaccttggcctctcaaagtgttgggattataggcgtgggctaccgtgcctggcctttttttttcttttttcttttttttttttttgagatggagtcttgctctgtctcccaggctggagtgcagtggtgccatcttggttcactgcaagctccgcctaccgggttcaagctattctcctgcctcagtctcccgagtagctgggactatagacacccgccaccgcacctagctaatttttttgtatttttagtagagacagggtttcaccttgttggtcaggctggtctagaactcctgacctcaggtgatccacccacctcgacttccgaaagtgctgggattacaggcgtgggccacagttcccggcctgtttctgggttctctatcctgttccgttggtctgtgtgtatgtttatatcaacctcatgctgttttcatttctgtagcctcgtagtatattttgacctcaggcagtgtgatttctatattctatagctttgttctttttcctcaggattgctttgcttatctgtgttctattttggttccatgtgaattttagaatctttttttctatttctgggaagaacgttattggtattttgatagggattgcattgaatctgtagatagttttggatacgtcccaaatttttattcccttttggaggttcctgagccagtggctcccattttgcctacactgcagtctgtgggctttgtttgaggaagtctgttttattgttaccatgagttgctctctgagtagtggtatgctttaagcccaggagatgtgaagaagggaaatggacaatggtaccttctcaccgtcttctggctccagaggcatcaagggtgaaagtccttagttccacagcccagattcaaggcctgagctttcctctcttcactgaagtacttcagcaaaactctgcgtgcaaaagtgtcctgcccagccctaggctcatggcctcaggccatgctgagagcagtcttagggtaattccagaaagttcagccttttcactctgtctaggtcccttcggtactggagtaatttctaggtctatgagggtttttaaagttgatctctttgtaaagtccatttctttttcttttttccgagacggagtctggctctttcgcccgggccggactgcagtggcactatctcagctcactggaagctctgcctcccgggttcacgccattctcctgcctcagcctcccgagtagctgagactacagggcgtccgccactgcgcccggctaattttttgtatttttagtagagacggggtttcaccatgttagccaggatggtctcgatctcctgacctcgtgatccgcccgcctcggcctcctgaagtgccgtttctttactttagagtaacaagtaataattctcttgtgtgatgcaggtatcacacaaattacagaagattaccaagatggtaactcacattctattttgacaggtcacggttgatgtactgcagagaatgctgatttgtaagttaattgcactgcagcccagactgtaaatgacttagtttgcttattagcaattgtatcagttttctgcctttccatttgaggtatttctcctctgtatgtttcactgtgcagagtcctggtactggaatgcccttgttttggcattttcagagctgtgaagggatacctcatgaatctgtgggtcacagggaagcattttcttgtctgtgtgttttgattaaggcctacagattgtagaagtcttgatggatgtgggccctctggggggttgaagtggatctgttgtctgaaagcgcctggggattgtttctggtgggctgccgccgtgtgctgacatctgttttctgttcctggctctgtcttcagttgcacttgacgctttggctgctggagtacaggaggagtcctccactcacaagatcgtgaggtgctggtatgttcctgagggtggcctgcctgagtgtgcagcagggaggtgtctgccaaattaaagagccaagatattttaaacacttccagagcttcagcagcccgctcctgagcacacttcctctgccagttacgataacgtgcgtgaggaggaggcgaccatgggaaagcccggggaacgctctggtcagccttttcctgtgaggatgaggtcggaaggtgcgcccactgcagtatcctgttccgcctctggaagtcctgcaccaatgtttgtcccactcactgtgacctcctcctgtgtggagtctccccttgctcctccttccctgggtgtgattcaggctctagagctggccctgcctctcagccccccacatttctagaacacactgtagctgtgcctctacagactcccgctgcctggcctccacagatcctgctcagattcaccagtaggcaaagcttggccctattagctttttctctccatggctctgtggagatgtgcggagacccttacaggtcgggaggcggaagctgaggagtgggggctgggtggaaggtggacatcggggtttggtggaaatggggctctggggtttgcttccctctagtgtgggcaggggaccttgaagtgaagtcttgagaaaccagtagaatttgccactgtttccaggccttgtcaaccttttcattctttattttgctcctcatttcccatccctcacagtaactgtttaactgctcaattaaatgtgttgtaccgttcggtacttttactgaaacagtgaataaagcactgtgtgatttcctgaa

SEQ ID NO: 11955 - DNA, 2201 bp, Homo sapiens
gagccgccgccggggctgtaggcgccaaggccatgtccgactcgtgggtcccgaactccgcctcgggccaggacccagggggccgccggagggcctgggccgagctgctgggtaggtgggcgcggcaggccgcgggagtgggcggcgtccggcccgggacggtttcgccggttccccgatcccttcccgccagagcctccgccggtcggatccccggacgccgcgcccggggggctgtgcggggtgggcgcccggctggggcggcgcggctgcctcggacccggcccctcctgcgcctgggcggacgcccccagccgccgcccgcggggcgctcccttctttcccgaacgccgcccccgccggccgccctgtcaggcgggcctggggtgcgcggcctggggctcccctcagcgcagaggccgcccctcgccagccgtccccgggctcccctgcctcgggccctcctgggccgtcttccccggcgtccgcggtggggccgtctccgttagtttcccgagacctgcgccctggggaggagccccggcccctcttcgggagggtgtcgctggtgggtttctccgcggcgtccacctgcgcgtcgggccggggaccccgtgtgtgaattgtgctgtgatggtttcgaaccgacttctctccgtagcgggaagggtcaagagggaaaaatataatcctgaaagggcacagaaattaaaggaatcagctgtgcgcctcctgcgaagccatcaggacctgaatgcccttttgcttgaggtagaaggtccactgtgtaaaaaattgtctctcagcaaagtgattgactgtgacagttctgaggcctatgctaatcattctagttcatttataggctctgctttgcaggatcaagcctcaaggctgggggttcccgtgggtattctctcagccgggatggttgcctctagcgtgggacagatctgcacggctccagcggagaccagtcaccctgtgctgctgactgtggagcagagaaagaagctgtcttccctgttagagtttgctcagtatttattggcacacagtatgttctcccgtctttccttctgtcaagaattatggaaaatacagagttctttgttgcttgaagcggtgtggcatcttcacgtacaaggcattgtgagcctgcaagagctgctggaaagccatcccgacatgcatgctgtgggatcgtggctcttcaggaatctgtgctgcctttgtgaacagatggaagcatcctgccagcatgctgacgtcgccagggccatgctttctgattttgttcaaatgtttgttttgaggggatttcagaaaaactcagatctgagaagaactgtggagcctgaaaaaatgccgcaggtcacggttgatgtactgcagagaatgctgatttttgcacttgacgctttggctgctggagtacaggaggagtcctccactcacaagatcgtgaggtgctgagcttcagcagcccgctcctgagcacacttcctctgccagttacgataacgtgcgtgaggaggaggcgaccatgggaaagcccggggaacgctctggtcagccttttcctgtgaggatgaggtcggaaggtgcgcccactgcagtatcctgttccgcctctggaagtcctgcaccaatgtttgtcccactcactgtgacctcctcctgtgtggagtctccccttgctcctccttccctgggtgtgattcaggctctagagctggccctgcctctcagccccccacatttctagaacacactgtagctgtgcctctacagactcccgctgcctggcctccacagatcctgctcagattcaccagtaggcaaagcttggccctattagctttttctctccatggctctgtggagatgtgcggagacccttacaggtcgggaggcggaagctgaggagtgggggctgggtggaaggtggacatcggggtttggtggaaatggggctctggggtttgcttccctctagtgtgggcaggggaccttgaagtgaagtcttgagaaaccagtagaatttgccactgtttccaggccttgtcaaccttttcattctttattttgctcctcatttcccatccctcacagtaactgtttaactgctcaattaaatgtgttgtaccgttcggtacttttactgaaacagtgaataaagcactgtgtgatttcctgaa

SEQ ID NO: 11956 - DNA, 2883 bp, Homo sapiens
ggcccgagcctgagtgccccacatgtgctggggttggctgccctggccgtgcacctgggtgagtccaggtctgcgctcccagaggtggatgtgggtcctcctgcacctggtgctggccttcctgtccctgcgctctttgacagcctcctgacctgtaggacgagggattccttgttcttctgcctgaagtgagctcttcttccacagtcgcgtcttctctcctctctctcgaaaagtgacacatgctcgtttgataaaattagaagagacagacatgcagacataccacccaaagataaccactttttagcattttggtatatatccttccagaattttatctgtcatttgtttataatatgcgtgcgtttgtttctttgttcataaaaatgagatcatattatactaaactgctgaaattaatagtagatagtaactgtctatatcgttaagcattctttgatgtcctggtgagagctgctttgttttgtcttggtcccttgtctggcccttggttggaccagctccctctggtcaggttcttcggcaccccatggtgagtagcttcccagtgtgtacacctcgggctgtttctctagggctcagcagatggggccatgtgctgaggtgaggaaggaccctgtggttaagaatggtctgctcagtgcctcaagggctccctgcagctgccacgcacaggcagaagccaggacagaatcccttcagctgccactcagaggcggaagccaggacagagggctgggagactctggtgggagttgctggctggggcttggcttgtagcttctggtctcttgggcagaggtagcccaggtcgggacagagccctgttgcggtgccggagaccctgtgcgggaaaggggagatctgacattatgacagggtctgaataacagagaacttagaagaggcgcaagaaatgtacgtggagcaaggagagggagtcagatggcagctgtgcggatcccacacctcagacatgggcctcggggagcaggcactcggtactccggggatacagagtccctcctaggcgcttggccacaccagacagtccccactcaccccaggccccaaacactgagtactgggtgttggcatgagaggcacacagccaatggagaagttgggagctggtgaggagggaggcatccaggtggcttgggggagacagggccatcctctcttagaaacacagagatgcctcaggatatatatccaggtgaagaaagcaaaatactgaactcggtctcagatgctactttttgcataagaaagggagaatgaaatatatatttggtgtgtgttttgtttttttttttgttttttggtttttggtttttgttttgagacagagtctcactctatcgtccaggctggagtgcagtagcgtgatcttggctcactgtaacctccgcctcccgggttcaagcagttcttgtgcctcagcttcctgagtagctgagactacaggtgtgcaccaccatgcccagctaatttatgtatttttagtagagatggggttttgccatgttggccaggctggtcttgaactcctgacctcaagtgatctgcccacttcagttaggattacaggtgtgagcctccacgcccagctcaaatatgtattagtaaaacagaagtattagaactgtaagaacaccatgacagtgctttgacatctccattgcctcatggaatctcattctgagcttccttggttacaagtgagaatttttcacatgggtattgctgtaggtatgtatgttgagtaaatgacacaggtctcactgtgtcccccaggctgaagtgatcttcccacctcagcctcccagtagctgagaccacaggtgcacacccacacacccagctagtgagagatggggtctcactgtgttgcccaagctggtcttgaacttctgggtttaagtgatcccctgagctgtgattgtgcgactgcactccagcctgggcatcagagtaaggccctgtataaaacaaaaaataaaccgagggctgggccaggcacggtggctaacgctgtaatcccagcactttgagtggctgaggtgggcagatcacttgaggtcagcagttcgagaccagcctgtccaacatggggaaaccccgtctctactaaaaaaaattaaaaactcgactggttgcagtgactcatgcctgtaagcccagcattttgggaggctgaggtgggcggagcacgaagtcaggagatcgagaccatcctcgctaacacggtgaaaccccatctctactaaaaatacaaaaaattagctgggcatggaggctggcacctgtagtcccagctactcgggagactgaggcaggagaattgcttgaacctgggaggtggagggtgcagtgagccgaaatcgcaccactctactccggcttggcaacagagcaagactccctctcaaaaaaaaagcactaacaacaactacaacagaatcagctgggcatggtgggagatgcctgtaatcccagctacctgggaggctgaggcaggagactcgcttgaacccgggaggcagagattgcagtgagcccaggtggtgccactgcactccagcctgggcggcagagcaagactgtctcacaacaaacgaaccaaaaaacgaaggaccaatgctcaggccatccagttcggaatgcactaaattcagttttatgaaattcaaagtaactttttccttcatcccttattttgtatggattacatttatatgttataatttctgttttcagattttgtacagcagcaatttcttactctctctgcaagttttcttcccagtcacgagatactttgtgcagctgcttatctccaggccttattaaaaa

SEQ ID NO: 11957 - DNA, 413 bp, Homo sapiens
ggcccgagcctgagtgccccacatgtgctggggttggctgccctggccgtgcacctgggtgagtccaggtctgcgctcccagaggtggatgtgggtcctcctgcacctggtgctggccttcctgtccctgcgctctttgacagcctcctgacctgtaggacgagggattccttgttcttctgcctgaagtgagctcttcttccacagtcgcgtcttctctcctctctctcgaaaagtgacacatgctcgtttgataaaattagaagagacagacatgcagacataccacccaaagataaccactttttagcattttgattttgtacagcagcaatttcttactctctctgcaagttttcttcccagtcacgagatactttgtgcagctgcttatctccaggccttattaaaaa

SEQ ID NO: 11958 - DNA, 8421 bp, Homo sapiens
ctccccaaagtccctgactcccgtgtggcgtttatagagtctctgaagaggtatgcagcaacggttagaaggggatgactacttccaggtttcttctgacaatgcgaagaattgtggatcttctgtagagaaatttgttagaccactattgtgttttattggtaaaatattggctccaaaattggttggttacttttttttttttttttttttttttttttttagttggagtctcactctgtcacccaggcttggagtgcagaggcgagatcttggctcactgcaacctccacatcttaggttcaagcgattctcttgcttcagcctcctgagtagctgggattacaagcctgtgcctggctaagtttttttttttttttttttttagatggagtctcgctctgttgcccaggctggagtgcaattgcacaatcttggctcactgcaagctctgcctcctgggttggagcaattgtcctgcctcagcctcctgagtagctgggattataggtatgcaccaccacgccctgctaatttttgtatttttagtacagacagggttttgccatattggccaggcggttctcaaactcctgagctcagaagatgatctacccacctcatcctcacagagtgctgggattacagatgtgagccaccgctcctggcctttttttttttttttttttgagatgaagtctcactctgttgcccaggctggagtgcagtggtgcgatcttggctcactgcaccctccacctcctgggttcaaggaattctcctgcctcagcctcctgagtagctgggattacaggcgcgcaccaccacgcccggctaatttttgtatttttagtagagacggggtttcaccatgttagtcaggctggtcttgaactcctgggctcaagcgatctgcccacctcggcctcccaaagtgctgggattataggcgtgagctaccgcacccggctgcatcattcttcagtgaaagaaaatgtttcagtacataatgattgtgcagagaggagaactgaaggaaaatgaaagagctctgggaaagcctcatgctgcagaacttgagagtagacctggaagttattgtttagaataataaggtatccttggatcacttacattgcaggtttctagtaagaaagttggttggtatcaaccaactttggaagaaataggaaagtataagtcctatattccagcaaaatttataaagttctgggacctgtaagaagataaacacaaagagccttttttttttctttttttgtatttttagtagagacagggtttcactatgttggccagactggtctcaaactcctgatcttgtgatccacccacctcggcctcccaaagtgctgggattacaagcgtgagccaccatgctctgcaaaaataattttttaaatcttaaaataagtttattctctgggatccttactttcatttgttttgagacagggtcccactctgtcacccaggctggaatgcagcggtgcagtcatggcttactacagccttgacctcctgggcttcaacagtccttccctctccgcctcccaagtagctgggtctagaggcgtgctccaccacacccagccagccttgatctcctgggcttcaacaatccttccccctccgcctcccaagtagcagggtctagaggcgcgatccaccacacctggccagccttgacctcctgggtttcaacaatccttccccctctgcctcccaagtagctgggtctagaggcgcgctccaccacacccagccattttgtaaatgctttgaggacacggattttcgctgtgttgcccaggcttctctctctcttggcctcaaataatcctcctgcttcaacttcccaaagtgctgggattacaaatatgagccactgtacctggcttaccctttatcatgttaagaaagttccctcttactaatttgctaaggatttttagcatgaactaatgcgttttatttttttttctttaatttattttttgagtcggagtctcggtttgtcagccagtctgcagtgcagtggcgcaatctcggctcactgcaagctccaccttctgggttcatgccattctcccacctcagcctaccaagtagctgagactgcaggcgcccgccaccacgcccggctaattttgtttttgtatttttagtagacacagggtttcactgtgttagccaggatggtctcaatctcctgacctcctgatctgcctgcctcggcctcccaaagtgctgggattacaggcgggatccaccgcgcctggcccaattttgcatatttttaatgacacgaactaaacgtttttcttagtattaatcattaaaattaacaaagattcatgttttgctgggcgtggtggctcacgcctgtaatcccagcactttgggaggctgaggcaggtgaatcacaaggtcacgagttcgaggccagcctggtgaacatggtgaaactccgtctctactaaaaatacaaaaaattagctgggcctggtggcaggcgcctgtaatcccacctactcgggagggtgaggcaggagaattgcttgaacctgggaggcggaggttgcagtgagccgagatcgcaccactgcactccagtgtgggtgatagtgggagactctgtctcaaaaaaaaaaaaaaaaaaaaaaaaaagaaaaacaaagattcgtgttttgaatttggaaattaccaaaaattgtatgagagaaatagaaataatttataatttcactgcccagggataatcactggtggtattttgtggtctagctccttagatattaatatatgattaatatgatatattttgaaacagtgctttttaaatctatatatattttttaatatttttttgtaaaaacaggctcatactgtacacagtatttataatttatttaaatttaatatgtttttattttataatagatttggggattgtaatcttgaattaatttaagccatagctgacttaattgtattgttttcctgtgatccagagcagataaaatccccccatctctgtactccacctactgccaggcctgctctgctgctgaagagaagccagaaggtaagttcctgggccgcttgtccactctgggacttgtgcttttccattttcctaaccttgagtgtctgttgtgctacaccacccgagtgagctcgggggtggctgtgccagctcaagccggtgctttgggtacagggtccgcccaccatgctgacgcccagtgccagctgtggcacagactcttacctgggggtcctgaagaatcacttagcaccttccggaaaggagtgtgtgcagtgcacagccccactttgtcactcgtcatcttcctgtgggccgcactgaggtgtttgtacaggcttcagactcgggtgctctctcagcggccaccttggggcccacagcgctggctcgagcctgtcgtagggagtgtcatgcagcacttttctgttgcacagtgcaggtaggagtagaagtcaggctcttttggcctgtggggagcagtggtgcagctgtcggtcagacctacgccctcattgggaatccgtgaaaggctgcactcaggcagcagtgggagatgccatcatgaggctggtttttcttgaagtgtgtggctttatctccagtagaagccagcatctccctgtgggagccgctatgagctgaagacatagatctgaggctgctgcttccctgtgggctttttttttttgagacagagtctcgctctgtggctgtggactgcagtggcgcgattttggctcgctgaaacctctgccccctgggttcaagcagttctcctgcctcagcctctgtaatagctgggattataggcacgcactactacgccttgctagtttttgtatttttagtagagatggggtttcgccatgttggacaagctggtctcgaactcctgacctcaactgatccgcctgcctcggcctttcaaagtgctgggattacaggcatgagcaaccgtacccagccccttgtgtgctcttctagatccccttccacctgcagggccagggaggctcgttgagatttttttttttttttttttttttttgagacagagtctcgctctgttgcccaggctggagtgcagtggcgcaatctcagctcgctgtaagctccgcctcccaggttcatgccattctcctgcctcagcctcccgagtggctgggactacaggcgcccgccaccacacccggctaattttttgtgtttttagtagagacagggtttcaccgtgttagccagaatggtctcaatctcctgacctcgtgatccacccgcctcggcctcccacagtgctgggattacaggtgggagcccccatgcccggccgacccaccctgagagcatgacctctcagttgtgctggggatgccacaggggcctcagggctgtgtaccctgcggtgtgaggcgtttgcttctcttgagaggtgtcctccttcccccaggatcctccttcccctggggtccacttgttcgtagcttttggtggcttccagaatggtttctaatcatttgtctgatgaggcttatgcacagactcctagagcctatgatttctagagcctgtgatttctggtttcattttggctgtggctgtgcatagcagtgcattttcatgcttgtgtcttctccagcaaccccagaacttgaaggttttttactttaaaaacatatgcagcgtatcttcctttttatattgaaagtggtggctgggcgcagtggctcatgcccgtaatcccagcactttgagaggccaaggcgggcaaatcatgaggtcaggagatcgagaccatcttggccaacgtggtgaaatcccgtctctactaaaaatacaaaaaattagctggatgtggtggtgcgtgcctgtagtcccagctactcgggaggctgaggcaggatgatttgaacccgggaggcggaggttacagtgagccgagatcgcaccactgcactccagcgtggtgacagagcaagagtccatctcaaaaaaaaaaaaaaaaaagtttgaggaaccaggggactaaatggtcacctatccgtgatcctgtccccaccctcgccagccctcgatcctccttgttttcttccgtgtgtatgcttctcacggtggtggagtggtattgatggtgcacacagaaccgctttttttcttaaacttgtttataaatgtaattttttatgaaactcgtttataattgtaattttcgatgtggcatccagcatcagggaagacacctcatttacctcctcagagactcccagtccctccgtctgccacacacagcagcttggaagttcacagctctgtatttgactgtgtgaagtttctatttttgcagtgaagagtcctgttgagtgtctttccatctggtttcttccttcttctcacagatgcagccctgggagtgagggcagaacccaactctgctgaggagcccctgggacagctcacagctgcactgggagagctgagagcctccatgacagaccccagccagcgtgatggtgaggatggatgggagctcatgctgtgtctcatgtgtgcagcctgtggttggagctctgtggctgggccattttccccatagtgacatcaggctggtgtgtcttcctagtagtccagtagtttaaagattgaccccgggctggcgggtgtggaaccttttttgagacaaggtggaaggctagtcctactgaagctgtcacagacccttggcagaaggtgaatattcggctagttgcatctgagtaggacgaatgatgatagagaagaaaacgcgtgactaggatgcctgttttcccgctcatcctgcctgccggagtcgatgtcacatcagacacacagggtctctgccctgtgatcctgcttccatgtgatggttttctgtaaaatccagagtaagaaatgttcatctgtggattgagaacatgcagtttcttttttcttttttttttttgagacagagtctcactctgtcccccaggctggagtgcagtggcgccatctcggctcactgcaacctccgcctcctgggttcaagcaattctcccgcctcagcctcccaagttgctaggattacaggtgactgcctccatgtctggctaattttttgtattttttagtagagatggggtttcaccatgttggccaggctggttttgaaatcctgacctcaggtgatccacctgtgttggcctcccaaagtgctgggatttcagtgtgagccaccgtgcctggcctacatggaggtgatatatatatatttttttgagacggagtcttgctctgtcacccaggctggagtgcagtggcgtgatctcagctcactgcaagctccgcatggaggcaatgttaacacagcttggttagcgctagctggggctgcagcgccttggcggtcttcactcagaccaagtgcgccagttcctgagtgcagccttccggtgattcaatgatggcttgtgcagaatgtggtacatgggggacatggaggaaaagttccagtgcttaagcaagaggttgatacatgtcaggtgagtcctgtttctaaaagcaaagcggttttcacctttaaatgatgtagttgggctatgtgtggcccatttccctgggccaacatggaacctctggcatgcgcttaggcagatgtggtgtctggagggctggcatgggatttcagatggggaggttcatgttggtgaatgaacatgtccccctctcagccaatcaggaaaaggtagtggatggcgtctggccccatttgccatgacacatgctgcaccacaaggctgcaaatcctgcggggcgaacaaacactggtgttcagcacctggctgggggatgtgtgcagtcagcaggatccgtggaatcgtacttgacgggaggcggagctctctaggccgcagctgtatccctcctttcggggttcttgtcatccctaactagtttcttccttcgcagttatatcggcacaggtggcagtgatttctgaaagactgagggctgtcctgggccacaatgaggatgacagcagcgttgagatatcaaagattcagctcagcatcaacacgccgagactggagccacgggaacacatggtaggtgtaggggctcagaacaaagcagggggtcttcaccattttccattaggcagaggcattagacgcatggagccttctctcaatttctgtttgacttgctcagttagtgtcgtatcagatgttccagggccaggcagcggtgtaccagggtcagctgccacagtctgtttgtgtatgaagagctccttttacattttatttatttatttaattttggagacagggtcttgctttgttgcccaggctggagtgcagtggtgcaatcatggctcactacagctttgacatcctgggctcaagtgatcctcttgtctcagcctcccgagtagctgggactacaggcgtgcatcaccacacccggctaatttctgcattttttgtacagttggggtttctctgtgttgcctcgactggtctagaagtcctgaggtcaagtgatctgtctgcctcagcctcccaaagtgttgggattataggcataagccacggcacttggcctctttttttttttttttttttgactgagtcttctctgttgcccaggctggagtggacgatcttggctcactgcagcctccacctcctgggttcaagcagttctcttgcctcagcttcctgggtagctgggattacaggtgcacaccactacgcccagctaatttttgtatttttagtaaagacagggtttcatcatgttgaccaggttgggctcgactgcctctttagaatatgcgacagaggctgtttctggccccaaaacctaaaatatttttctggccccttacacacaaggtttgccagtcccgcctgctgctgtagaattttgtgattggcgattacttgagggctgctattcccaagattggggaatgggggccctgggcaccagtttgcattgtaacatgccctccaaacaagcctgttttggaggtctttttgcaaagcagaattgcgatgtctgtggcgggagcgctggccggcttccttcctgctgctcccgtccccaggacaccacgctcatgagaactgtgtctctgcaggctgtggacctcctgctgacgtctttctgtcagaacctgatggctgcctccagtgtcgctcccccggagaggtgaaggcgcgggcagctccctgagtggtggggctcctctgggtgccacctcttgctgggccaagtctgcagaccagggactcatgagctcgtctccgcaggagcatgcggcgatgctgagtttcatcaaatag

SEQ ID NO: 11959 - DNA, 479 bp, Homo sapiens
ctccccaaagtccctgactcccgtgtggcgtttatagagtctctgaagagagcagataaaatccccccatctctgtactccacctactgccaggcctgctctgctgctgaagagaagccagaagatgcagccctgggagtgagggcagaacccaactctgctgaggagcccctgggacagctcacagctgcactgggagagctgagagcctccatgacagaccccagccagcgtgatgttatatcggcacaggtggcagtgatttctgaaagactgagggctgtcctgggccacaatgaggatgacagcagcgttgagatatcaaagattcagctcagcatcaacacgccgagactggagccacgggaacacatggctgtggacctcctgctgacgtctttctgtcagaacctgatggctgcctccagtgtcgctcccccggagaggagcatgcggcgatgctgagtttcatcaaatag

SEQ ID NO: 11960 - DNA, 6638 bp, Homo sapiens
ccccacagccaagctcttcaggatgttgaaaaggccatcatggtgtttgagcatacggggaacatcccagtcaccgtcatggaggccaggtaggctgggctgccgaaaaggcctctagcagctgcagtgtgtgcagaccgcgctctgatgcctgcagtatgtgcagactctgctctgatgcctgcagggtgtgcagactccgctctgatgcctgccagcgtctggggctctttggagtgtgtcccatttctgcccagagccacatggggcaggttggccactgtctattcagagagagacaggagtcagggctgtgaatcgaggatcctgccgttaagggatacggggtgaggtcaagagctgtgcatttgctgtgaaacattttttcctctgtaaaagcaggtgatgcccctcccgtgctgaagcagccaacaggaactgctgattggggagcttgcactgggagggaaggcagtggggccatgatgtttttttttttatcaatgccttctttgtgaccaatatggagtcagtaacagagagctgaatagcacagctttattgaatttggtatgatctcaaaacatcttgaattctggtggttacacatgtggatgagctgattgcagctcccagggttttgaaatttagctccaaggaaattgccccaaatggaccttacatggtcctcgtggcctcagattgatccaggctccacgttcaagcccagggagcaggccgaatgtggtcctgattcccacggactcagggctgggctagcacggcctgccctacacatgccttgtcccggaactgtgcacaagaagacttcataatgcatcgtggctttggagtgagccctcgcagtccactctctgaaacaccggtcaccgtctgtgggaattgccttctcgctgctctgactgatgcactgtctgcttctctgtgttgcagcatattcaggaggccttactacgtgtcccacttcctccccgccctgctcacacctcgagtggtcagtatgcgtctccatgagtttgtgaccagttgtgtagaaagcaaggactttccttgtcagtctctcacaggtctcttctcttcccacagctccccaaagtccctgactcccgtgtggcgtttatagagtctctgaagaggtatgcagcaacggttagaaggggatgactacttccaggtttcttctgacaatgcgaagaattgtggatcttctgtagagaaatttgttagaccactattgtgttttattggtaaaatattggctccaaaattggttggttacttttttttttttttttttttttttttttttagttggagtctcactctgtcacccaggcttggagtgcagaggcgagatcttggctcactgcaacctccacatcttaggttcaagcgattctcttgcttcagcctcctgagtagctgggattacaagcctgtgcctggctaagtttttttttttttttttttttagatggagtctcgctctgttgcccaggctggagtgcaattgcacaatcttggctcactgcaagctctgcctcctgggttggagcaattgtcctgcctcagcctcctgagtagctgggattataggtatgcaccaccacgccctgctaatttttgtatttttagtacagacagggttttgccatattggccaggcggttctcaaactcctgagctcagaagatgatctacccacctcatcctcacagagtgctgggattacagatgtgagccaccgctcctggcctttttttttttttttttttgagatgaagtctcactctgttgcccaggctggagtgcagtggtgcgatcttggctcactgcaccctccacctcctgggttcaaggaattctcctgcctcagcctcctgagtagctgggattacaggcgcgcaccaccacgcccggctaatttttgtatttttagtagagacggggtttcaccatgttagtcaggctggtcttgaactcctgggctcaagcgatctgcccacctcggcctcccaaagtgctgggattataggcgtgagctaccgcacccggctgcatcattcttcagtgaaagaaaatgtttcagtacataatgattgtgcagagaggagaactgaaggaaaatgaaagagctctgggaaagcctcatgctgcagaacttgagagtagacctggaagttattgtttagaataataaggtatccttggatcacttacattgcaggtttctagtaagaaagttggttggtatcaaccaactttggaagaaataggaaagtataagtcctatattccagcaaaatttataaagttctgggacctgtaagaagataaacacaaagagccttttttttttctttttttgtatttttagtagagacagggtttcactatgttggccagactggtctcaaactcctgatcttgtgatccacccacctcggcctcccaaagtgctgggattacaagcgtgagccaccatgctctgcaaaaataattttttaaatcttaaaataagtttattctctgggatccttactttcatttgttttgagacagggtcccactctgtcacccaggctggaatgcagcggtgcagtcatggcttactacagccttgacctcctgggcttcaacagtccttccctctccgcctcccaagtagctgggtctagaggcgtgctccaccacacccagccagccttgatctcctgggcttcaacaatccttccccctccgcctcccaagtagcagggtctagaggcgcgatccaccacacctggccagccttgacctcctgggtttcaacaatccttccccctctgcctcccaagtagctgggtctagaggcgcgctccaccacacccagccattttgtaaatgctttgaggacacggattttcgctgtgttgcccaggcttctctctctcttggcctcaaataatcctcctgcttcaacttcccaaagtgctgggattacaaatatgagccactgtacctggcttaccctttatcatgttaagaaagttccctcttactaatttgctaaggatttttagcatgaactaatgcgttttatttttttttctttaatttattttttgagtcggagtctcggtttgtcagccagtctgcagtgcagtggcgcaatctcggctcactgcaagctccaccttctgggttcatgccattctcccacctcagcctaccaagtagctgagactgcaggcgcccgccaccacgcccggctaattttgtttttgtatttttagtagacacagggtttcactgtgttagccaggatggtctcaatctcctgacctcctgatctgcctgcctcggcctcccaaagtgctgggattacaggcgggatccaccgcgcctggcccaattttgcatatttttaatgacacgaactaaacgtttttcttagtattaatcattaaaattaacaaagattcatgttttgctgggcgtggtggctcacgcctgtaatcccagcactttgggaggctgaggcaggtgaatcacaaggtcacgagttcgaggccagcctggtgaacatggtgaaactccgtctctactaaaaatacaaaaaattagctgggcctggtggcaggcgcctgtaatcccacctactcgggagggtgaggcaggagaattgcttgaacctgggaggcggaggttgcagtgagccgagatcgcaccactgcactccagtgtgggtgatagtgggagactctgtctcaaaaaaaaaaaaaaaaaaaaaaaaaagaaaaacaaagattcgtgttttgaatttggaaattaccaaaaattgtatgagagaaatagaaataatttataatttcactgcccagggataatcactggtggtattttgtggtctagctccttagatattaatatatgattaatatgatatattttgaaacagtgctttttaaatctatatatattttttaatatttttttgtaaaaacaggctcatactgtacacagtatttataatttatttaaatttaatatgtttttattttataatagatttggggattgtaatcttgaattaatttaagccatagctgacttaattgtattgttttcctgtgatccagagcagataaaatccccccatctctgtactccacctactgccaggcctgctctgctgctgaagagaagccagaaggtaagttcctgggccgcttgtccactctgggacttgtgcttttccattttcctaaccttgagtgtctgttgtgctacaccacccgagtgagctcgggggtggctgtgccagctcaagccggtgctttgggtacagggtccgcccaccatgctgacgcccagtgccagctgtggcacagactcttacctgggggtcctgaagaatcacttagcaccttccggaaaggagtgtgtgcagtgcacagccccactttgtcactcgtcatcttcctgtgggccgcactgaggtgtttgtacaggcttcagactcgggtgctctctcagcggccaccttggggcccacagcgctggctcgagcctgtcgtagggagtgtcatgcagcacttttctgttgcacagtgcaggtaggagtagaagtcaggctcttttggcctgtggggagcagtggtgcagctgtcggtcagacctacgccctcattgggaatccgtgaaaggctgcactcaggcagcagtgggagatgccatcatgaggctggtttttcttgaagtgtgtggctttatctccagtagaagccagcatctccctgtgggagccgctatgagctgaagacatagatctgaggctgctgcttccctgtgggctttttttttttgagacagagtctcgctctgtggctgtggactgcagtggcgcgattttggctcgctgaaacctctgccccctgggttcaagcagttctcctgcctcagcctctgtaatagctgggattataggcacgcactactacgccttgctagtttttgtatttttagtagagatggggtttcgccatgttggacaagctggtctcgaactcctgacctcaactgatccgcctgcctcggcctttcaaagtgctgggattacaggcatgagcaaccgtacccagccccttgtgtgctcttctagatccccttccacctgcagggccagggaggctcgttgagatttttttttttttttttttttttttgagacagagtctcgctctgttgcccaggctggagtgcagtggcgcaatctcagctcgctgtaagctccgcctcccaggttcatgccattctcctgcctcagcctcccgagtggctgggactacaggcgcccgccaccacacccggctaattttttgtgtttttagtagagacagggtttcaccgtgttagccagaatggtctcaatctcctgacctcgtgatccacccgcctcggcctcccacagtgctgggattacaggtgggagcccccatgcccggccgacccaccctgagagcatgacctctcagttgtgctggggatgccacaggggcctcagggctgtgtaccctgcggtgtgaggcgtttgcttctcttgagaggtgtcctccttcccccaggatcctccttcccctggggtccacttgttcgtagcttttggtggcttccagaatggtttctaatcatttgtctgatgaggcttatgcacagactcctagagcctatgatttctagagcctgtgatttctggtttcattttggctgtggctgtgcatagcagtgcattttcatgcttgtgtcttctccagcaaccccagaacttgaaggttttttactttaaaaacatatgcagcgtatcttcctttttatattgaaagtggtggctgggcgcagtggctcatgcccgtaatcccagcactttgagaggccaaggcgggcaaatcatgaggtcaggagatcgagaccatcttggccaacgtggtgaaatcccgtctctactaaaaatacaaaaaattagctggatgtggtggtgcgtgcctgtagtcccagctactcgggaggctgaggcaggatgatttgaacccgggaggcggaggttacagtgagccgagatcgcaccactgcactccagcgtggtgacagagcaagagtccatctcaaaaaaaaaaaaaaaaaagtttgaggaaccaggggactaaatggtcacctatccgtgatcctgtccccaccctcgccagccctcgatcctccttgttttcttccgtgtgtatgcttctcacggtggtggagtggtattgatggtgcacacagaaccgctttttttcttaaacttgtttataaatgtaattttttatgaaactcgtttataattgtaattttcgatgtggcatccagcatcagggaagacacctcatttacctcctcagagactcccagtccctccgtctgccacacacagcagcttggaagttcacagctctgtatttgactgtgtgaagtttctatttttgcagtgaagagtcctgttgagtgtctttccatctggtttcttccttcttctcacagatgcagccctgggagtgagggcagaacccaactctgctgaggagcccctgggacagctcacagct

SEQ ID NO: 11961 - DNA, 461 bp, Homo sapiens
ccccacagccaagctcttcaggatgttgaaaaggccatcatggtgtttgagcatacggggaacatcccagtcaccgtcatggaggccagcatattcaggaggccttactacgtgtcccacttcctccccgccctgctcacacctcgagtgctccccaaagtccctgactcccgtgtggcgtttatagagtctctgaagagatggagtctcgctctgttgcccaggctggagtgcaattgcacaatcttggctcactgcaagctctgcctcctgggttggagcaattgtcctgcctcagcctcctgagtagctgggattatagagcagataaaatccccccatctctgtactccacctactgccaggcctgctctgctgctgaagagaagccagaagatgcagccctgggagtgagggcagaacccaactctgctgaggagcccctgggacagctcacagct

SEQ ID NO: 11962 - DNA, 16859 bp, Homo sapiens
gttctttgttgcttgaagcggtgtggcatcttcacgtacaaggcattgtgagcctgcaagagctgctggaaaggtagcgtgctaatgatgattcagtgttactgtttttgcagtctagtctagtataaattatatttcaaagcccagaatcagacgggtttgatttctggctttgacatataatttgtactagactagattgcattgcatatttatactagactagacctggaggaactattgctttattatttcaagagaacgtttatggtgttttggttttgtttgctttttgtctgttttttttttgagacggagtctcgctctgtggcccaggtgggagtgcagtggcacgatttcagctcactacaacctccacctccagggttcaagcaattctcctgcctcagcctcccaagtcgctgggattacaggcgcccgccaccacacgcagctaatttttgttatgtatttattttttttagggacagagtctcgttctgtcacccaggctggagtgcagtgacgtgatgtcggctcactgcaggctccacctcccgggttcacgccattctcctgcctcagcttcccgagtagctgggactacaggcgtccgccaccacgcctggctaatttttgtatttttagtagagactgggtttcaccatgttagccaggatgggctccatctcctgacttcaggatctgcccgcctctgcctcccaaagcgctgggattacaggcatgaaccactgtgcctggcaatttttgttatttttagtagagatgtggtttcgccatgttagccaggctggtgtcaaactcctaacctcaggtgattcccctgcctcggcctcccaaagtgctgggattacaggcatgagccacctcgcgcggcctttttttttctttttgagacagagacctgctatgtcgccaggctggagtgcagtggtgagatctgggctcgctgcaacctccgcttcccggattcaagcaattctgcccctgcctcctcagtagctgggactacaggcgcgtgccaccacacccggctaatttttgtatgtttagtagagatggggtttcaccatgttggctaggctggtctcgaactcctgatcttgtgatcctcccgcctcggcctagagcagaatttcatctcaaaaaaaaaaaaaaaaagaaaaacctgcttcctaggatatacacatcttatctcagcaccaaaatctatgaagcaaaaatggccagaattaaagggagaagtagacatttcagcaataatcattagaggtttcaatactcccctttcagtaatgggtagaacaagttagattaagaatgatatagaacagccgccccgtccgggagggaggtgggggagtcagccccccgcccggccagccgccctgtccaggaggtgaggggcgcctctgcccggccgcccatactgggaagtgaggagcccctctacccggccaccaccccgtctgggaggtgtacccaacagctcattgagaacgggccatgatgacaatggcggttttatggaatacaaaggggggaagggtggggaaaagattgcgaaatcagatggttgctgtgtctgtgtagaaagaagtagacacgggagacttttcattttgttctgtactaagagaaattcttctgccttgggatcctgttgatctgtgaccttgcccccaaccctgtgctctctgaaacatgtgctgtgtccactcagggttaaatggattaagggcggtgcaagatatgctttgttaaacagatgcttgaaggcagcatgctcgttaagagtcatcaccactccctaatctcaagtacccagggacacaaacactgcagaaggcctcagggtcctctgcctaggaaaaccagagacctttgttcacttgtttatctgctgaccttccctccaccattgtcctatgaccctgccaaatccccctctgcgagaaacacccaagaatgatcaattaaaaaaaaaaaaaaaaaaaagaatgatatagaagttgaatgctgcaaaccagctgacctgactgactgtggagcactctacccagtagtagcagagtgtgtattcgtaagtccaaatggaacagtccccaggatacagcataaggttcaggccaaggccaggtgcggtggctcacacctgtaatcccagcactttgggaggctgaggcgggcagatcacctgaggtcaggagttcaagaccagcctgtccaacgtggtgaaaccctgtctctactaaaattacaaaaattagctgggcaaggtggcaggtgcctgtaatcccagccgttgtggaggctgaggcaggagaatcgcttgaacttgggaggcggaggttgtagtgagctgagattgtgccattgcactccagcctggatgacaagagcaaaactgtttcaagagaaaaaaaaaaggttcaggccataaaacaaagaggaataaatttagaagggctgaaatcattcaaaatatgttctctaaccacaaatgaatttaattagaataaacaacagaagggaattgggaaaatccacaatatttgaaagttaacataatgagtcaaagaagtcacaagggaaattagaaaataacttgagactgggcacagtgccacaccagtcatcccagcactttgggagggcaaggtgggagattgttttgagcccgggagtttgagtccagcctgggcaaagtagtaagacctccagctgggcgtggtggtatgcgcctgttgtcccaactactcaggaggctgaggtggaaggattgcttgagcctgggaggtcgagggtgcagtgactgattgcgccactgcactccagcctcagtgacagcaaaaaactgtctcaaaaaaaaaattgggacatatggctcaactcaatcccctgatgatgggatttagttgagccttacgtctgcctctgtgtgtgtctccagccatcccgacatgcatgctgtgggatcgtggctcttcaggaatctgtgctgcctttgtgaacagatggaagcatcctgccagcatgctgacgtcgccagggccatgctttctggtgcgttcatgacaagatgcgggttcttgggtaaaactcattttgatctgtgataatgccttctgctctcaagagctctgcgaggcagaacagcctgtctctccgtggccgtgggaacctggcatgacagactcccagtctcagcctgttgtggggttgcattttacttgactgatgtggaaatactagtaagtcggccttgacatgagtttaagtgtttccattcacctttcccatagagtgaccgcagctgcttccttctgtcgcccaggctggagtacagtggcgcgatctcagctcactgcaacctccgcctcctgggttcaagtgattctctgcctcaacctccttagtagctgggactgcaggcacgtggcaccatgcccggctaattttttttttgtatttttagtagagacggggtttcattaggttggccaggctgctcttgaactcctgacctcgtgatgcacccccctcggcctcccaaagtgctgggattataggcgtgagccactatgcctggccttcctgaggaatgatattatgagaaaaacttgggactgtaatgtccccccacaaactaagaaggtgctgagagaccagaggatggctcagactagggaccaacccagtttgaggagtagttgggtttgtcagaagatggcttggaccagagtccagcttgaggagtagttgggcttgtcagaggatggctcggaccagagtccagcttgaggagtagttgggcttgtcagagaatggcttggaccaatccagcttgaggagtagttgggtttgtcaggacttatattcagcgcactcctggacggcggcaggacagctctagagaaccgccccaccacctgtctctaaggtgcattgaagctcgttttctggctctttgcctgctgtgtttgagtgatgagactcttttccttggtgagttctcagatcctctctgggatatttgggttctgaggaacacctgctgggagacccatcccactacaagtgacacctacaaataaaaattagatgagaaactgatctgtacagtagcttgtgggttttttcctttttcctaaagctttttggtggcatgagcgacttagcattcctgagctactataacctggtaccagataggttaaatttaaatcaaagttagaaaatcttgtggatttcagtcctcttggtcttattttttaaaaagctaagaatgcctttcctcccccatcacattcctcagaataggatgcttctgggtccctctagaccctctggtattggagattggcaggcaagacaatccataagacctcccttggaaaccacttttatttaagagaaaaaaattgggctgggtggggtgactcatgccagtaatcccagcactttgggaggccaaggcaggtggatcatgaggtcaggagttcaagaccaacctggccaagatggtgaaaccccatctctactaaaaatacaaaaattagctgggtgtggtggcggcgcctatattcccagctactggtgaggctgaggcagagaattgcttgaacctgggaggcggaggttgcagtgagcgagatcataccattgcactcaagcccaggcgacagagcaagcctccgtctcacaaaaaaaaaaaaaaagaaaaaaatctgactataaacttgttccctttcaaatagaagtgcaagaggaaaaaatctggttcatctaagggtcctgattgggtttggtgaacgctagtgtagctgtggtcaggtgagcagtaacttctgcagcgttcctcaggttaggagcagctcacaggggtcctggtgggcccaagccatatgctcacccgcccctctgaagtggatggtctgtgccattcacagttgcttggagaccatgatgtccataaataactttggttttatggtttttcagattttgttcaaatgtttgttttgaggggatttcagaaaaactcagatctgagaagaactgtggagcctgaaaaaatgccgcaggtaggaggaaaagtcaagtgaagagtttagcggaaggagccgtccttattccaagtgttgaaatgtatttacgtgtctctctattgaaacgtgctgtttgtacctatttacggggtacatgtgatacttgttttgtgcatagagtgtaatgatcaagtcagggtgtttagagtctccgtcacctccagtatgtatcatttctgtgtgttggcaacatttcacatgttgcagttactttgaaatatacaatctgttgttaactatagccgcctcactctgctgtggaacattagaacttacttcttctgtctagctgtatgtttgtacccattaaccaactctcttcgttcccccactgcatatacccttctcatctctggtatctctcgttctactctctacctccacaagagccactttttagctcccacatatttgtgataacatgcaatatttgtccttctgtgcctggcttatttcacttaacataatggccttcagttgcattcctgttgctgtgaatgacaggatttcactttaaaaaaaaagaatagctggccgggcatggtggctcatgcctgtaatcccagcactttgggaggacgaggcgggcggatcacaaggtcaggagatcgagaccatcctggctaacatggtaaaatcccgtctctactaaaaaaatagaaaaaattagccgggcctggtggcaggcacctgtggacccagccactcaggaggctgaggcaggagaatggcgtgaaacctggaggcggagcttgcagtgagcccagatcgtgtcactgtattccagcctaggcgacagagactccatctcagaaaaagaaaaaaatagctgaggttgggctcaatggctcatgcctataatccagcactttgggaggctgagactggtggatcccctgaggtcaggagttcaagaccagcctgaccaacatggtgaaaccctgtctctagtaaaaaaaaaaaaaaaatagccgggcgtggtggcacatgcctgtagtcccagctacaggcgtggaggcaggagaattgcttgaacccaggaggcggaggttgcagtgagccaagattgcgccttgcactctagcctgggtgacagagcgagactccgttaaagctgaccagtattccgttgtgtgtatataccacgttttctgtatccggtcatctcttgttgggcacacaggttgatttcatatcttggctattgttaatagtgccacaataaatgtaggagtacagatgtctcttcagctggctgatttcctttcctttggctgtaagcccagtaatgggattgctggatcatatggcagttctggttttttttttgtttttttgtgtttttttgagacggtgtctctctctgttgctcaggctagagtgcagtggcgcgatttcggctcactgcaacctctgcctcccaggttcaaccgattctcctgcctcagcctcccgaatagctgggattacaggcatgcaccaccatgcccagctaatttttgtatttttagtagaggtgaggtttcactctgttggctaggatggtctcgatctcttgacctcatgatctgcctgccttggcctcctgaagtgctgggattacagatgtgatccaccatgcctggtgaaagtgagaccctctgggctggtagttctgtttttagaactacccaactatttagaaatctccatactattttccataatggctgtattaatttacattctcactgatagcatataagagttctgtttgcattctcaccagcatttgttattttttgttttcttgataatgataattctaactggagtgaaataatagctcattgtggctttgacttgtatttccctgatgattagtgacattggcttttttttttttttttttgagacagagtcttgctctgtcgcccgggctggagtgcagtggcgcgatctcggctcactgcaagctccgcctccggggttcacgccattctcctgcctcagcctcctgaatagctgggactacaggcgcccaccaccactcccggctagtttttctatttttagtagagatgggctttcacagtgttggtcaggctggtctcgaacttctgatctcatgacccgcccaccttggcctctcaaagtgttgggattataggcgtgggctaccgtgcctggcctttttttttcttttttcttttttttttttttgagatggagtcttgctctgtctcccaggctggagtgcagtggtgccatcttggttcactgcaagctccgcctaccgggttcaagctattctcctgcctcagtctcccgagtagctgggactatagacacccgccaccgcacctagctaatttttttgtatttttagtagagacagggtttcaccttgttggtcaggctggtctagaactcctgacctcaggtgatccacccacctcgacttccgaaagtgctgggattacaggcgtgggccacagttcccggcctgtttctgggttctctatcctgttccgttggtctgtgtgtatgtttatatcaacctcatgctgttttcatttctgtagcctcgtagtatattttgacctcaggcagtgtgatttctatattctatagctttgttctttttcctcaggattgctttgcttatctgtgttctattttggttccatgtgaattttagaatctttttttctatttctgggaagaacgttattggtattttgatagggattgcattgaatctgtagatagttttggatacgtcccaaatttttattcccttttggaggttcctgagccagtggctcccattttgcctacactgcagtctgtgggctttgtttgaggaagtctgttttattgttaccatgagttgctctctgagtagtggtatgctttaagcccaggagatgtgaagaagggaaatggacaatggtaccttctcaccgtcttctggctccagaggcatcaagggtgaaagtccttagttccacagcccagattcaaggcctgagctttcctctcttcactgaagtacttcagcaaaactctgcgtgcaaaagtgtcctgcccagccctaggctcatggcctcaggccatgctgagagcagtcttagggtaattccagaaagttcagccttttcactctgtctaggtcccttcggtactggagtaatttctaggtctatgagggtttttaaagttgatctctttgtaaagtccatttctttttcttttttccgagacggagtctggctctttcgcccgggccggactgcagtggcactatctcagctcactggaagctctgcctcccgggttcacgccattctcctgcctcagcctcccgagtagctgagactacagggcgtccgccactgcgcccggctaattttttgtatttttagtagagacggggtttcaccatgttagccaggatggtctcgatctcctgacctcgtgatccgcccgcctcggcctcctgaagtgccgtttctttactttagagtaacaagtaataattctcttgtgtgatgcaggtatcacacaaattacagaagattaccaagatggtaactcacattctattttgacaggtcacggttgatgtactgcagagaatgctgatttgtaagttaattgcactgcagcccagactgtaaatgacttagtttgcttattagcaattgtatcagttttctgcctttccatttgaggtatttctcctctgtatgtttcactgtgcagagtcctggtactggaatgcccttgttttggcattttcagagctgtgaagggatacctcatgaatctgtgggtcacagggaagcattttcttgtctgtgtgttttgattaaggcctacagattgtagaagtcttgatggatgtgggccctctggggggttgaagtggatctgttgtctgaaagcgcctggggattgtttctggtgggctgccgccgtgtgctgacatctgttttctgttcctggctctgtcttcagttgcacttgacgctttggctgctggagtacaggaggagtcctccactcacaagatcgtgaggtgctggtatgttcctgagggtggcctgcctgagtgtgcagcagggaggtgtctgccaaattaaagagccaagatattttaaacacttccagagcttcagcagcccgctcctgagcacacttcctctgccagttacgataacgtgcgtgaggaggaggcgaccatgggaaagcccggggaacgctctggtcagccttttcctgtgaggatgaggtcggaaggtgcgcccactgcagtatcctgttccgcctctggaagtcctgcaccaatgtttgtcccactcactgtgacctcctcctgtgtggagtctccccttgctcctccttccctgggtgtgattcaggctctagagctggccctgcctctcagccccccacatttctagaacacactgtagctgtgcctctacagactcccgctgcctggcctccacagatcctgctcagattcaccagtaggcaaagcttggccctattagctttttctctccatggctctgtggagatgtgcggagacccttacaggtcgggaggcggaagctgaggagtgggggctgggtggaaggtggacatcggggtttggtggaaatggggctctggggtttgcttccctctagtgtgggcaggggaccttgaagtgaagtcttgagaaaccagtagaatttgccactgtttccaggccttgtcaaccttttcattctttattttgctcctcatttcccatccctcacagtaactgtttaactgctcaattaaatgtgttgtaccgttcggtacttttactgaaacagtgaataaagcactgtgtgatttcctgaatgtttacatgtgcatcagttagcttgggctgctgtaacaaagtgccagagactgcggtgtggacggcagatgtgttctcacagcagtggaggctggaagttggaggtcagggtgcccctagggttgggttctggtgaggaccctcttcctggcttgcaggagacctactttttctgtgtcttcatgaggtagagaggggagagcaagccctctggtgtcttctccgggcagtcatctcatcatcacctcagccttatcaacaccccaccttgagaggctgggcttcaacagaggaactttgtggggatacagtttagtctgtggcaagggcttttttttataatctgtgtgataagattactcacactgatgtcctgagagtcaggtaacaaccactgacctgccgatttttatattttgtaattagttgccaattatttatttatttatttatttttgagacagagttttattcttgttgcccaggctggagtgcagtggtgagatctctgctcactgcaacctctgcctcccaggttcaatcaattcttctgcctcagcctcctgagtagctgggattacaggcatgcaccaccacacctggcacaagcctatagttttgtattttctatttttaagtagacatggggtttcactatattggtcaggctggtctcgaactcctgacctcaagtgataacacccacctcagcctcccaaagtactgggattacaggcgtgagccaccgcacctggcctgccaataatttaaaatcagacatcctccaacagtcttggtggccagcttcccttgcacactgggggctgtggtgtcccaaagccctgccctgtgaggaaggacagcagggctgagaagtgaatctccacgatgtcccacaccctgttgtgtgagtgtcttgagtttgcacagagccgacgtggcctcgttgggtgtgtgaccctggggcagttcactgaaccgccaggacccttgattttctttctttctttctttatttttttgagacagagtctcactgtgtcgcccaggctggagtgcagtggcacgatctcggtttactacaacctatgcctcctgggttcaagcgattctcctgcctcagcctcccacatagctgggactataggtgtgtgccaccatgcctggctaattttttttatttttctttttttgagacagaatttcgctctgtcgcccatgctggagtgcagtggtgcgatctctgctcactgcaagctccgctccctgggttcacaccattctcctgcctcagtctcccgagtagctggaactacaggtgcccaccaccatgcccggctaattttttctatttttttagtagagatggggtttcgttgggttggccgggatggtctcgagctcctgaccttgtcatctgccccccttggcctcccaaagtgctgggattacaggtgtgagccaatgcgcctggcctaatattttggtatttttagtgtagatggggtttcaccatgttagccagggtagtcttgatctcctgaccttgtgatctgcccgcctcagcctcccagagtgctgggattacaggcatgagccaccgtgcccggctggacccttgattttcttacctggggaatcggcataaagtgccgcttgctggttgcaggttgtaagcctcacgagagggtctgggtttggtttggtggtctgtataggcctgctgggatgtggcaggctaacagacctcaagtgctcttgccacctggctctgtgaccccattcacccccagaacatcgtgttctctcacacagatggcccaggaaaccttagtcccttccattccttcctcatcttcatggacagagctggcctcagtccctgttgtgactgtttgaggccctggtgtgctgggctcttctctcaggcttggcacgaccctctgggggagttccgtgtcacagagggtgccgctgaggccccgtcgggttggctcccggggctccactcccgggtgcggcgcggcctgcccttcccaacctgtttccttctgctccactcccgggtgtggcgcggcctgcccttccccacctgtttccttctgctccttcgcttctctgctccgtgggtttcgccgttgccttgccccctttctcgttgaactgccacctccttggattcagtttcaagtctgtggttatagtggcctggccaagaaagccccttccttgcttaaagaagggatgagcctgagccacagtttgtgctgggattggtgggtggcgtgcaaggcaccctccctttcctgacccctctttctgctgcattggcaggttcggagtgttcagtggacacacgcttggcagtgtaatttccacagatcctctgaagaggttcttcagtcataccctgactcagatactcactcacagccctgtgctgaaaggtaggcccagtgtggaggctgctcagttgctacccattttggggattgctgttgccttgttgccttggtaacgctgactggagatgccaggaattctaggacctcttttacgtctgtcttgaaccagagactgggtcctcagatgcctgagattgttactaaatatccttttacctgaaagcaacagatttttataagaaaattcagaattatgagtggacaaaataattgtcattaaaatagaaatatcttttttgtttgtttgtttgagtcagagtctcactcacttgcccatgctggagtgcagtggcgtgatctcagctcactgcaacctctgcctcccaggttcaagcaattctcgtgtctcagcctctcaagtagctgggactacaggcgccaaccaccacacccggttaattttttgtatttttagtagagactgggtttcaccatgttggccaggctggcctcgaactcctgaccttcggtgctccacctgccttggcttcccagagtgtcgaagtgttgggattacaggtgtgagccaccgcacccagcgtaaaatagaaatatctttattttatttatttatttatttatttatttatttatttatttattggagatggagtcttgctctgttgccaggttggagtacagtggcgtgatttgggctcactgcaacctccacctcccgggttcaaaccattctcctgcctcagcctccacagtagctgggattacgggcatgtgccaccatgcccggctaatttttgtatttttagtagagacgggctttcaccatgttggccaggctggtctcgaactcctaatctcaggtaatccgcccgtctcggcctcccaaaatactgggattacaggcgtgtgccgctgtgcccagccgctgtctagtcttttaaaacttggtgtttgagcatgcacattctccttctggaatacctgatcacccagcacaactcacgttatctttctgctggctacccttgccttgctgtgactgtgtcatggttctcagctagactcggtggcgtgtttgatggcccaggcatcgtctgcccagtgggtgtcctgttacccatgtatgacagactgtacccaagatatcagtcttacgaataaggccacgatgaacactttgagctttttctgtatctagcatatccccagggtagatgctcaggcaggaaactggtgggagatgagggatacacagatggctcccaacaggtgctgtgaggtgctcaggagtttatcatcacttgactgagctgagcttcctttgaacagcatccccaccatgattggtttattcccagtttatcttattttatgtatttatttatttttttgagacagagtcttactctgttgcccaggctggagtgtggtggtgcgatctcagctcactgcaacctctgccgcctgggttcaagctattccctgccaagcttgaattacaggcgcctgccaccatgcccagctactttttgtattttgagtagagacagggtttcaccatcttggccaggctggtctagaactcctgaccttgtgatccacccacttcggcctcccaaagtggtgggattacaggcgtgagccacctagcctgaccttactgacagtttaaaagcaggaaaattgaaatgcagttggtacattggaaaatatttattgtgaatatgacaaagcattacaagtaagtaaccgggcctgagaaacagaattgatgatatagcaaataggcaacaaacagggagatggtgaactttaataactgaaaaagtacatattaagatctgtcttcacactgaagctttgaaacacaactttttggccaggagcagtggctcacgcctgtaatcccagcattttgggaggctgagacgggcaggtcacgaggtcagaagttcgagaccagcctggccaaaagagtgaaaccccatctctactaaaaaatacaaaaattagccgggcgtggtggtgggcgcctgtagtcccagctactcgggaggctgaggcaggagaatcgcttgaacccgagaggcagagcttgcagtgagccgagattgtaccactgcactccagcctgggtgacagagtgagactcagcatcaaaaaaataaaaatacaaaaagtatctgggtatggtggcacacgcctgtggtcgcagctacttgggagactgaggcaggtggattgcttgagccagggaggtcgaggctgtggtgagcactgcactccagcctgggtgatagtgagaccctgtccaaaaacaaaacctgtgggcggcaagccacccaggcaccaaggcaagagaccgaggacacgagctgttctagtataataaaatataaaacaagaatagttataccagatatagatcttagatatgattacatatgaatatcattaatcattagttggtagtaattactgtttattgcaatattataataatcctcgctctataatcataacctaggaaaagccaggccatacagagacaggagctgaggggacatggtgagaagtgaccataagacaagagtgtgagccttctgttatgcccggacagggccaccagagggctccttggtctagcggtgacggcagcgtctgggaagacgcccgtcaccaagcggatcgtggtccagcggtagcaaaaggtgtcaaggaacaccactcactacttagaccgggaaagggactctccctttccccccgggagtttagagaagactctgctcctccacctcttgtggagggcctgacatcagtcaggctcacccacagttatccggaggcctaaccgtctccctgtgatgctgtgcttcagtggtcacgctcctagtccaccttcatgttccatcctgtacacctggctctgccttctagatagcagtagtaaattagtgaaagtactaaaagtctctgatatgcagaaataatggcataagctgtctttgtctctatctcctctccctctctgcctcggcttccaggcagggaagggccccctatccagtggacacgtgaccttacctatcattggagatgactcacactctttaccctgccccttttgctttgtatccaataaataacagcacaaccagacattcagggccactaccggtctccgcgcattgatggtagtggtcccccgggcccagctgtcttgtcttttatctctttgtcttgtatctttctttctacactctctcgtcgccgcacacggggagagacccaccgaccctgtggggctggtccttaacaaaaacccacaactttttgatctctgacttgaagtttttgtctgtttctccccctgcagcatctgatgctgttcagatgcagagagagtggagctttgcgcggacacaccctctgctcacctcactgtaccgcagggtgagtggatgtggtattatacctgcttctgagctcgtggcggggggattaagatctgcctagtacttgtcatgctgcctgccgtggacggcacatcgagaggttcagggatgtctggtgagatgtggctgtcctcatcaaggccaccactcaggtcaggagactgaacttgtcccttgggccgagcccctcctccttgagatagggagaattctctccaagcaggtgctggccactgtgaggggagagacgccacggtgtgagctgtcacagctccatgtgttacctttgcagtgggaagtgagggggctgcggtggccaccggctgggaggaaggtgaggggtcatctgtcgcacattggtttgcttggatattgaagggagcggatgcttttatttcagctctttgtgatgctgagtgcagaggagttggttggccatttgcaagaagttctggaaacgcaggaggttcactggcagagagtgctctcctttgtgtctgccctggttgtctgctttccagaagcgcagcagctgcttgaaggtgagcttttacgcgagcccggtggtgctggtcaagagtgtgtgtaggggggtgtcagcagagtcccagctgactgtgggtgagcctctcagtgaagcccttccctacctgcccggaacctgcagtgcctcctgtcgatggaacattctttgtcagacgcttccataagcactgactgctgctctgagaggccagagtgtccactgctgcttcattcaggtctctagtggtttgcacttgacatgctgtaattgctgtgtagtcttttaaaacttggtgtttgggtgtgcacagtctccttctggaatacttgatcacccagcataactcacgtcatgttcctgctggctgcccttgccttgctgtgactatgtcatggttcttaactagactgggtggcgcgtttgatggcccaggca

SEQ ID NO: 11963 - DNA, 618 bp, Homo sapiens
gttctttgttgcttgaagcggtgtggcatcttcacgtacaaggcattgtgagcctgcaagagctgctggaaagccatcccgacatgcatgctgtgggatcgtggctcttcaggaatctgtgctgcctttgtgaacagatggaagcatcctgccagcatgctgacgtcgccagggccatgctttctgattttgttcaaatgtttgttttgaggggatttcagaaaaactcagatctgagaagaactgtggagcctgaaaaaatgccgcaggtcacggttgatgtactgcagagaatgctgatttttgcacttgacgctttggctgctggagtacaggaggagtcctccactcacaagatcgtgaggtgctgcatctgatgctgttcagatgcagagagagtggagctttgcgcggacacaccctctgctcacctcactgtaccgcaggctctttgtgatgctgagtgcagaggagttggttggccatttgcaagaagttctggaaacgcaggaggttcactggcagagagtgctctcctttgtgtctgccctggttgtctgctttccagaagcgcagcagctgcttgaagactgggtggcgcgtttgatggcccaggca

SEQ ID NO: 11964 - DNA, 6433 bp, Homo sapiens
ccgagcctggagcctgtgctgctctgccggtggaggagacactgccagagcccgctgccccgggaactgcagaagctacaagaaggccggcagtttgccagcgagtacgtgtgggtggtgagatggggtgtgcccgcccagatgcacttcgggacctgctcaaggtcatctcctaaacaccctggcttgcttgagagaagcggtgtgggcagcctctcgtgtgagcagggagaaaagaaccgagttctcgtggtggtgggcgcctgtaatcccaactactggggaggccgaggcaggagaatcagttgaacccaggaggtggagtttccagtgagccgagatcactccaacggccaatagagcaagactctgtccagaaaaaaaacaaaaaaaaaaacagcctctgccagtgtctcgtctgagtgaggaacggcctctcccaggctcccgtctgagtgaggagctcgagtgattcctttgcacctgctccccttcctcttaaatctaatgtgggctcctagagtgcaccgcgtgctggtagggtcagtgtcatggggacctcagggatgcagattctcagcctaccctgacctgtcgaccccagtcagatattcacgggtccttgcaaaccatcaagctcctggcgcaatccaggctcacacacccttctgaggaccacagagctgacagccactccacctgctgaatgtgggtgccgtgttcttaaggggtcgtcagagggcactgctagtacccatcctgcctccttggagaacaccttactttgtgactagttttgaatcactgatgccacaccgggtcccctcagggtttggctgctcgccgtctgctgaaagaagagaagagggccccggcgcggtggcgcacacctgtaatcccagcactttgggaggccaaggcaggtggatcacctgaggtcaggagtttgagaccagcctggccaacatgtgaaacaatctctactgaaaatacagaaatgagctgggtgtgatagtgtgcgcctgtagtcccagctactcaggaggctgaggcaggagaattgcttgaacccaggaggtggaggttgcagtgagccgagatcatgccattgtagtccagcatgggcaatgagagagaaactccatctcaaaaaaggagaaagcaggtcacacctccagttctaattctacaaacacagatcagattgtctgaagttttgttttttgttttgttttgtttgagacagagtttcactcttgtcacccaccctagagtgagatggcacgatctcggctcaccatgacctccgcctcccaggttcaagcgatcctcctgcctcagtctcctgagtagctgggattacaggcgtgagccaccatgcctggctaattttgtatttttagtagagacagggtttctccacgttggtcaggctggtctcgaactcccgacctcaggtgatctgcctgcctcagcctcccaaagtgctgggattacaggcgtgaaccaccacgccctgcctcgtttttgtttatttgagattgagtctcactgtgttgcccaggcagatctcaaactgctgggcttaagcgatcctcctgaagtgctatgattgcagatgtgaaccgtcatgcccagcttatttaaagtctcttaaaccacagcattgtttcattaatttcctaccaattttttaaccagccagaaaactcagacaccacactggggccagagccaggcagtcctttgttctctgttgtaggagggaatgcctgatccacagggccaggcatgggcaactgaggaaaatgaggcctcttcttccaaaatgtaggcagctggggcccaagagcacagggcaaggtagacaggaccaggccagctgcctgctcagtcagcagctctcagaacgccaggatgctgtgggggcagcaccagcacctgcccacactctcacgtggacctgggggatgcagacctagtttctgatggtcctgaaacccttctctgtcctctgatggaaaggcaggccccaaaggtgacaggtgggaataaggacttggtttctatggcgtggttgtatggttgtaaggccctgcaatgaccccgttctctctgtcccagtttcctctcccctgaggctgcctccccagcacccaacccggactggctctcagctgctgcactgcactttgcgattcaacaagtcagggaagaaaacatcaggaagcagctaaagaagctggactgcgagagagaggaggcaagataggaaattcttttactgatttattttctcgcaagcttggtttcaatcagtgctatttctctgggcttgtctgatgaactgtttttctaaagacaaatatgtggcttggagcaagactttttttttttttttttttttttgtatttttagtagagacggggtttcactgtgttagccaggatggtctcgatctcctgaccccgtgatcctcccgccttggcctcccaaagtgctgggattacaggcgtgagccaccacgcccagctggcttggagtaagactttgactatcaagtttactagtaaaaataataatttcagttttttaaatggttgtatgtagttgagacagggtctcactgtcgcccaggctggagtgcagtggtgcagtcagctcactgcagcctcttctgggctcaagccatcctcttacctcagcctctggagtagctcagactacaggtgtgtgccaccatgcccggctaattttgtaattttttctgagatgggggtctgtagtccaggcatggtggctcatgcctgtaatcccaacacttagggaggccgaggcaggcggatcacttggtgtcaggagtttgagaccagcttgggcaacatggtgaaaccctgtctctactaaaaacacaaaaattagtcgggtgtggtggtgcgcacctacaatcccatagcctgtaaagctactcaggaggctgaggcaggaggatcacttgaacccagggggcagaggctgcagtgagccaagatcacgccactgccctgcagtctgggtgacagagcgagacttgtctcaaaaaaaaaaaatttgtttaaagtaaaaattaaaagagatgggggtctcactgtgttgcccaggcttgaagtgcgtttcttcagcttatttttatcctcatcacagcccagcgtaaatgctgtcagccttcaagtggtgccttctgtgttcatgctgcagtagccttgattcatgtgctgagggacagccccagataagcttgcagtgagacagctcagacctggggtgctggggacaagaggcagcaaggatgggaccgtctgcagccataggcatagggaaaggagtgggagaggctgctcttgaattccaggccagggaccatgttcgactcagacccactgcccacctggttgctgcaccctggaaagcctgactgcccccacaagaccagtgacacccacacagctctctgtgcagggagccaagggtggtgtgtgcagaacaggaacagaaacaagcatcccacaagagagctggaggcagcagccctctgtgcccagcccgagatccgcaacgcataggtgccatgtcagcacacaacttacaccagctcaaagctggatcgacagcagcgcccagggttttggtgattataaccaccctgcaggggttcttctgagtacgtcttcaggtttcttgtgtagttttgttagaagggattttagtggctccagggccttaggaccctagtgtgcagcgaggagtgtccacagagaccctgcccagtcaggccctactttaggctggagcctgtgggcttatcttcaaggattttacaaacacttctgacaggaggccttgcagggagatgatgctgagttgggactgcgcacagccaaggagaccgcagcagtcttctctttctggctcttgtcactttttcaaactgtttctagctttgtttaaaggcaagtgtgaaatgacccagccagtagtaattaattctcaattaagctgtctctctagaagtgattggaaagttttctaagatccacttaaaggatttatggcctagatgtaaaaaatttcaattaaagaggaatgtgtcagccttatttagaatgacagcacaggtaattttaatgtaataataagtgcacgtttttatttacagctattggttttccttttcttcttctccttgatgggcctgctgtcgtcacatctgacctcaaatgtaagtcagaccttaccagccaaggtgtcctctcccactgtgggccaggcaggggcaccaggcagccagcttccaagtcagggtttccagactagctcaggagctccttgtgtttgcggaagtgtgagtgagaactcccaggccgtgggttttttttttttttttttgagatgggggtctcactctgtcacccaggctggagtgcagtggtgtgatctcagctcactgcaacctcagcctcctgggttcaagcaattctcctgcatcagcctcccgagtagctgggattacaggcgtgagtctgtcacacccggctaatttttgtatttttagtagagacggggtttcaccatattgccaggctggtcttgaactggcctcagtgatccgccgacctcggcctcccaaagtgttgggattacaggcatgagccactgcatccggcctgtgggcctttcttttaatgtcttatttgaggacgtggtgcagcagccttggtgtgggtgctcgaagtccctggcctcctacctgagcctcttctgtccagaggcccagtattaccttctataggtaaaactgtcaccagttttaagacttacaataagcaaagaggaaatgccctcttctgtgctgagggctgtaccctcctacccatgggagcaccaggtcggccattctcagggttggtctcctgcggtttacagagcaccacagacctgccaaaggctttccacgtttgtgcagcaatcctcgagtgtttagagaagaggaagatatcctggctggcactctttcagttgacagagagtggtaagaaacacgctgctgaggcacaaatgcggagggccgctcttttcagaggcatcttgcaaatggttaagaacgagccctccttgaggttccttgctaagtaagtttataagctccattttagttgggacagattaagcacaaacttgtttaaagcaataagataatttactggctcactggtcaaccccaggaccaatgggcctatcatggggactgcctctctctgcaccacacccaccctcctgcaagaggtcgacccccccatcctctcccagctgctgacaggtacctgggtatcctcagctcaggctgttcgccccacactatccccacagccaggcctcccagggtacacgtcccgacccccaggggtgtccccagcactgataataggcagagatgtccagagttgcctgagccacttcttggtgttgcagacctcaggctggggcggctcctcctccgtgtggccccggatcagcacaccaggctgctgcctttcgctttttacaggtacctccacccacagggctggtcagggctgggcagtgtttcccagacccccatctcagcacctctgggtcccgccagatgggaagggttgtctgtgcctctgctccacagatgagcagtatcccttggcatcacctgctacctttccagcagtctgtagccatttgtcactatgtctttacctctagtcttctctcctacttccatgaagacgcggccatcagggaagaggccttcctgcatgttgctgtggacatgtacttgaagctggtccagctcttcgtggctggggatacaagcacagtttcacctccagctggcaggagcctggagctcaagggtcaggcaggtgcaagggccagtcccacctccaggggagctccccccagccggaggctccttctgccaaagaatgttccggcacagcatgcagactatgggggacacaccagccctgtttctgtatgtcttctaacctgtgagtttgcctgttttctctctagggcaaccccgtggaactgataacaaaagctcgtctttttctgctgcagttaatacctcggtgcccgaaaaagagcttctcacacgtggcagaggtaacgtcaagatgcccaccttgggccatgtgggggacatgagaattgacagctgcctgggccatgtgcctgcctggctggcaatacaactcgactatttctgccagagcccctcccctgtggtctgaggcctagtgggcggcatgggctgaggacctgctcctctctcacagctgctggctgatcgtggggactgcgacccagaggtgagcgccgccctccagagcagacagcaggctgcccctgacgctg

SEQ ID NO: 11965 - DNA, 713 bp, Homo sapiens
ccgagcctggagcctgtgctgctctgccggtggaggagacactgccagagcccgctgccccgggaactgcagaagctacaagaaggccggcagtttgccagcgatttcctctcccctgaggctgcctccccagcacccaacccggactggctctcagctgctgcactgcactttgcgattcaacaagtcagggaagaaaacatcaggaagcagctaaagaagctggactgcgagagagaggagctattggttttccttttcttcttctccttgatgggcctgctgtcgtcacatctgacctcaaatagcaccacagacctgccaaaggctttccacgtttgtgcagcaatcctcgagtgtttagagaagaggaagatatcctggctggcactctttcagttgacagagagtgacgcggccatcagggaagaggccttcctgcatgttgctgtggacatgtacttgaagctggtccagctcttcgtggctggggatacaagcacagtttcacctccagctggcaggagcctggagctcaaggggcaaccccgtggaactgataacaaaagctcgtctttttctgctgcagttaatacctcggtgcccgaaaaagagcttctcacacgtggcagagctgctggctgatcgtggggactgcgacccagaggtgagcgccgccctccagagcagacagcaggctgcccctgacgctg

SEQ ID NO: 11966 - DNA, 6037 bp, Homo sapiens
actcgtgggtcccgaactccgcctcgggccaggacccagggggccgccggagggcctgggccgagctgctgggtaggtgggcgcggcaggccgcgggagtgggcggcgtccggcccgggacggtttcgccggttccccgatcccttcccgccagagcctccgccggtcggatccccggacgccgcgcccggggggctgtgcggggtgggcgcccggctggggcggcgcggctgcctcggacccggcccctcctgcgcctgggcggacgcccccagccgccgcccgcggggcgctcccttctttcccgaacgccgcccccgccggccgccctgtcaggcgggcctggggtgcgcggcctggggctcccctcagcgcagaggccgcccctcgccagccgtccccgggctcccctgcctcgggccctcctgggccgtcttccccggcgtccgcggtggggccgtctccgttagtttcccgagacctgcgccctggggaggagccccggcccctcttcgggagggtgtcgctggtgggtttctccgcggcgtccacctgcgcgtcgggccggggaccccgtgtgtgaattgtgctgtgatggtttcgaaccgacttctctccgtagcgggaagggtcaagagggaaaaatataatcctgaaagggcacagaaattaaaggaatcagctgtgcgcctcctgcgaagccatcaggacctgaatgcccttttgcttgaggtaagaggaagctggtgtccgtctgcgggcagatttaggttcggggtttttgagtccagccaccgcacagctttcctaagaaaacacccgaggcggcgggcgcggtggcctggcccgcagaggggagggtcgcctgagcccgggagttctggaccaacctgggcaacggggtgagaccccgcctcttttattaaaaacaaaacaacaacaacaaaaaaacaggccgggcgccgtggctcagggctgtaatcccagcttttggggaggccaaggcgggtggatcactcagggtcaggagttcgagaccagcctggccaacatagtgaaacccggtctctactgaaaatacaaaaattagctgggtgtggtggcgcacgcctttaatcccagctactcgggagcctgaggcaggagaattgcttgaacctggacccgggaggcagaaattgcagtgagccgagatcacgccccttgcaatccagtctggattacagagtgagactgtctcacaaaaaaaaaaaaaaaaaaaaaaaaaaaaaaagccgggcgtggtggctcacgcctgtaatcctagccctttgggaggccgaagtgggtagatcacttgaggttaggagttcgagaccagcctgaccaacatggtgaaaccccgtcactacttaaaatacaaaaattagccgggtatggtagcaggtgtctgtaatcccagctgctcaggaggctgaggcaggagaatcgcttgaacctgggaggtggaggtcgccgtgagtgagatcccgccattgcactccagcctggacgacagtgagactccctctcaaaaaagaaaaaaaggaaaatagcccagtagggaagcattacttacacacaggttgtgtttatgcacagatcttgaattttttttatttttattttttattttcatttattttttttgagacaaagtctcacactgtagcctgggctggtatgcagtggggtgatctcggctcactgcagcctccacctcccgggtttaagtgattctcccgtctcagcctcccgagtggctgggactacaggcacgcgccaccatgccctcctaatttttgtatttttagtagagacagggtttcactatgttggccaggctggtctcgaactcttgacctcgtgatctgcccatctcggcctcccaaagtactgggattacaggcgtgagccactacgcctggcctggagcttgaattttttaaatggagtttgttgtgttttggattctaggtagaaggtccactgtgtaaaaaattgtctctcagcaaagtgattgactgtgacagttctgaggcctatgctaatcattctagttcatttataggtaagttatagcttcattttctctattttgaattgcagaagggtttttatatagtaaccatagtttgctaaattaagtagaaatgtaaattttctcaggcgatgggtttccactggtgtgtgtagtcgcaaattctatgggatgtttgtgtgacttgctcttgggcttcttacgatgctgtgtttaaaaacagcgtctgattcaacctgcgactcagaagcagtaggacccagagtgtcccttggaaaaacatgggacatagcaacagcagggatgtgccccttgctcatggaagtagtgagacaggctgtggtgtgcccaggagagcagacgggagaacaattttctaggtacctccttctccccccagtttgagagtgggagatagggtaagttctgggtcaacaacagtaagttattttctgatccttcacgtccttatgtgatgacttgtttctgttaaaataaccttcagtaatagcgctcccttgacaactggtcactgaatgtcattggcaaatgatacagattttcactgccatgattgtatttgaatttcacaaattgcatattatcattccaaggaaccaagctcagccacacagataaacctttaattcattaatttttgagtttgtttttttctgctaaagatatagttagtacatgcacgcacgtgcacacggacacacacacacacacacacacacacagtaaaagacttgtagataaaaaaactttcctatggagacacattggaaacaaatgactagaaattggcattgttggcctggcacagtggctcacgcctataatcgcagcactttgggaggctgaggtgtgcggatcacctgaggtcaggattcgagacgagcctggccaacatggtgaaaccctgtctctactaaaaaacacaaaaattagccgggtgtggtggtgggtgcctgtagtcccagctattcaggaggctgaggcaggagaattgcttgaacgtgggaggcagaggttgcattgagccgagacccctccattgcactccagcctgggcaataagagcaaaactctgtctcagaacagaaaatggcattgtctacttttttttttttttttaacagacagggtctcactctgttgcctggactggagagccgtggtgcaatcacggctcactgcagtcttgacctcctggcctcaagtgatcctcccaccccagcatcttgagtagctgggactacaggtgtgcgccaccatgcctggctaattttttcatagagacagggttttgccatattgcccaggctggtctcaaactcctgagctcaagcaatcagtttacctcagccacccaaggtgttgggattgcaggcatgagccactgtgccccatctgtctacttttctaccgagaatttcaccagcagctgatgatttctcgtactataattttaagcttctagaactattgtaaaattttttttttttttttttgagacgaagtgttgctctgtcgcccaggctggagtgcaatggcgccatctcggctcactacaaactctgcctcctgggttcaagcaattctcctgcctcagcctcccgaatagctgggattataggtgcccgccgccgcacccagctaatttttgtatttttagtagaggcggggtttcaccatcttggccaggctggtctcaaactcctgacctcgtgatcgacccgcctcggcctcctgcagtgttgggattacaggcatgagccaccgcaaccagcctgtaaatgtttttacttatgtattgataatgtgtttttagagccagtacattacaataacaggttcgtactgcagttaacagttttttttttttttttttttttttgagacggagtattgctcttgttacccaggctggagtgcaatggtgtgatctcgactcaccgcaacctctgcctccctagttaaagtgattctcctgcctcagcctcctgagtagctggtattacaggcatgcaccaccacgcctggctaattttgtatttttagtagagatagggtttcaccatgttggtcaggctggtctcaaactcccgacctcaggtgatccacccgcctcggcctcccaaagtgctgggattacaggagggacccactgagcctggcctccagtttttttttgttttgtttttttgagatgaagtctggctctgtcgcccagactgcagtgtagtggcgtgatctcggctcactgcaaactccgcctcctgggttcacgccattcttcgcctcagcctcctgagtagctgggactacaggctcccgtcaccaaacctggctaattttgtttttgtgtctttagtagagacagggtttcaccgtgttagccaggatggtctcgatctcctgaccttgtaatccgcccgcctcggcctcccaaagtgctgggattacaggcgtgagccaccgtgcccggcccggtttctttaaacaattaattttggctcacgtggtggctcacacctgtaatcccagcagtatgggaggccgaggcgggcggattaatgaggttgggaattggagacgagcctagccaacatagtgaaaccccatctctactaaaaatacaaaaaattaactgggcgtagtgacgcgtgcctgtaatcccagctacttgggaggctgaggcaggagaatcgcttgaacctgagaggcggaggttgcagtgagctgagatggcgccgttgcacttcagtccaggcggcagtgtaagacaccattgcaaaaaaataaaacaaaaaaaaattaattttggaagacaaataaattagaaaatgatttcttggcattgcctgcttccaggttgcccaccgtttctcactttattgaatgcagaccagtggctggttgctcaggagaatggtggctgcctgcaggctgttagtgaggttccacttggtggcctgcggactgagcacagctgtgactgcacctgcccaccaggtgcatggcagaatgttgggaaatccctgcctaattttatcacaaccatcaatgtgagtcaacaggggcaggcttatctctgaagtaattagaaaaacaatgtaattgaaagagcctgctgcagttctcaatttattgtgctcctttgtaaaaagatgataaagttcttggtcagaatatatttctttatcttgctccttttgtgtcatgggaaacgtaacaaataccaatgtataactctgggttcaggtgttgccaccagttttattgtgagctgcttggatcatcaaattctcatttttatctcatgtttttccctttgcatctattctccccgtttaaaaggcaattttttttgtgctgcatcttaaaataaggcattttaaacagcaagtctttggttttagattttgtctcatgtgttaagagaaagctatggttttgttttgtgtttaaggctctgctttgcaggatcaagcctcaaggctgggggttcccgtgggtattctctcagccgggatggttgcctctagcgtgggacagatctgcacggctccagcggagaccagtcaccctgtgctgctgactgtggagcagagagtaagacaccagcaaagatgaggaaacctgcccgttgttacttttaagctggttgggaaaataggacatagctttagtattgtttcaggtaatttgttttttaaaaaatgtaatctctcttttcagaagaagctgtcttccctgttagagtttgctcagtatttattggcacacagtatgttctcccgtctttccttctgtcaagaattatggaaaatacaggtaaatttgagattgcaaatctgactctccagtgttccaggcaatgttctgttgatctggatggaggcaacagagtacctgggttttcttgggaattctccaagcttctcattaattacagagagtggatgaaaa

SEQ ID NO: 11967 - DNA, 650 bp, Homo sapiens
actcgtgggtcccgaactccgcctcgggccaggacccagggggccgccggagggcctgggccgagctgctggcgggaagggtcaagagggaaaaatataatcctgaaagggcacagaaattaaaggaatcagctgtgcgcctcctgcgaagccatcaggacctgaatgcccttttgcttgaggtagaaggtccactgtgtaaaaaattgtctctcagcaaagtgattgactgtgacagttctgaggcctatgctaatcattctagttcatttataggctctgctttgcaggatcaagcctcaaggctgggggttcccgtgggtattctctcagccgggatggttgcctctagcgtgggacagatctgcacggctccagcggagaccagtcaccctgtgctgctgactgtggagcagagaaagaagctgtcttccctgttagagtttgctcagtatttattggcacacagtatgttctcccgtctttccttctgtcaagaattatggaaaatacaggtaaatttgagattgcaaatctgactctccagtgttccaggcaatgttctgttgatctggatggaggcaacagagtacctgggttttcttgggaattctccaagcttctcattaattacagagagtggatgaaaa

SEQ ID NO: 11968 - DNA, 5664 bp, Homo sapiens
ggagccgccgccggggctgtaggcgccaaggccatgtccgactcgtgggtcccgaactccgcctcgggccaggacccagggggccgccggagggcctgggccgagctgctgggtaggtgggcgcggcaggccgcgggagtgggcggcgtccggcccgggacggtttcgccggttccccgatcccttcccgccagagcctccgccggtcggatccccggacgccgcgcccggggggctgtgcggggtgggcgcccggctggggcggcgcggctgcctcggacccggcccctcctgcgcctgggcggacgcccccagccgccgcccgcggggcgctcccttctttcccgaacgccgcccccgccggccgccctgtcaggcgggcctggggtgcgcggcctggggctcccctcagcgcagaggccgcccctcgccagccgtccccgggctcccctgcctcgggccctcctgggccgtcttccccggcgtccgcggtggggccgtctccgttagtttcccgagacctgcgccctggggaggagccccggcccctcttcgggagggtgtcgctggtgggtttctccgcggcgtccacctgcgcgtcgggccggggaccccgtgtgtgaattgtgctgtgatggtttcgaaccgacttctctccgtagcgggaagggtcaagagggaaaaatataatcctgaaagggcacagaaattaaaggaatcagctgtgcgcctcctgcgaagccatcaggacctgaatgcccttttgcttgaggtaagaggaagctggtgtccgtctgcgggcagatttaggttcggggtttttgagtccagccaccgcacagctttcctaagaaaacacccgaggcggcgggcgcggtggcctggcccgcagaggggagggtcgcctgagcccgggagttctggaccaacctgggcaacggggtgagaccccgcctcttttattaaaaacaaaacaacaacaacaaaaaaacaggccgggcgccgtggctcagggctgtaatcccagcttttggggaggccaaggcgggtggatcactcagggtcaggagttcgagaccagcctggccaacatagtgaaacccggtctctactgaaaatacaaaaattagctgggtgtggtggcgcacgcctttaatcccagctactcgggagcctgaggcaggagaattgcttgaacctggacccgggaggcagaaattgcagtgagccgagatcacgccccttgcaatccagtctggattacagagtgagactgtctcacaaaaaaaaaaaaaaaaaaaaaaaaaaaaaaagccgggcgtggtggctcacgcctgtaatcctagccctttgggaggccgaagtgggtagatcacttgaggttaggagttcgagaccagcctgaccaacatggtgaaaccccgtcactacttaaaatacaaaaattagccgggtatggtagcaggtgtctgtaatcccagctgctcaggaggctgaggcaggagaatcgcttgaacctgggaggtggaggtcgccgtgagtgagatcccgccattgcactccagcctggacgacagtgagactccctctcaaaaaagaaaaaaaggaaaatagcccagtagggaagcattacttacacacaggttgtgtttatgcacagatcttgaattttttttatttttattttttattttcatttattttttttgagacaaagtctcacactgtagcctgggctggtatgcagtggggtgatctcggctcactgcagcctccacctcccgggtttaagtgattctcccgtctcagcctcccgagtggctgggactacaggcacgcgccaccatgccctcctaatttttgtatttttagtagagacagggtttcactatgttggccaggctggtctcgaactcttgacctcgtgatctgcccatctcggcctcccaaagtactgggattacaggcgtgagccactacgcctggcctggagcttgaattttttaaatggagtttgttgtgttttggattctaggtagaaggtccactgtgtaaaaaattgtctctcagcaaagtgattgactgtgacagttctgaggcctatgctaatcattctagttcatttataggtaagttatagcttcattttctctattttgaattgcagaagggtttttatatagtaaccatagtttgctaaattaagtagaaatgtaaattttctcaggcgatgggtttccactggtgtgtgtagtcgcaaattctatgggatgtttgtgtgacttgctcttgggcttcttacgatgctgtgtttaaaaacagcgtctgattcaacctgcgactcagaagcagtaggacccagagtgtcccttggaaaaacatgggacatagcaacagcagggatgtgccccttgctcatggaagtagtgagacaggctgtggtgtgcccaggagagcagacgggagaacaattttctaggtacctccttctccccccagtttgagagtgggagatagggtaagttctgggtcaacaacagtaagttattttctgatccttcacgtccttatgtgatgacttgtttctgttaaaataaccttcagtaatagcgctcccttgacaactggtcactgaatgtcattggcaaatgatacagattttcactgccatgattgtatttgaatttcacaaattgcatattatcattccaaggaaccaagctcagccacacagataaacctttaattcattaatttttgagtttgtttttttctgctaaagatatagttagtacatgcacgcacgtgcacacggacacacacacacacacacacacacacagtaaaagacttgtagataaaaaaactttcctatggagacacattggaaacaaatgactagaaattggcattgttggcctggcacagtggctcacgcctataatcgcagcactttgggaggctgaggtgtgcggatcacctgaggtcaggattcgagacgagcctggccaacatggtgaaaccctgtctctactaaaaaacacaaaaattagccgggtgtggtggtgggtgcctgtagtcccagctattcaggaggctgaggcaggagaattgcttgaacgtgggaggcagaggttgcattgagccgagacccctccattgcactccagcctgggcaataagagcaaaactctgtctcagaacagaaaatggcattgtctacttttttttttttttttaacagacagggtctcactctgttgcctggactggagagccgtggtgcaatcacggctcactgcagtcttgacctcctggcctcaagtgatcctcccaccccagcatcttgagtagctgggactacaggtgtgcgccaccatgcctggctaattttttcatagagacagggttttgccatattgcccaggctggtctcaaactcctgagctcaagcaatcagtttacctcagccacccaaggtgttgggattgcaggcatgagccactgtgccccatctgtctacttttctaccgagaatttcaccagcagctgatgatttctcgtactataattttaagcttctagaactattgtaaaattttttttttttttttttgagacgaagtgttgctctgtcgcccaggctggagtgcaatggcgccatctcggctcactacaaactctgcctcctgggttcaagcaattctcctgcctcagcctcccgaatagctgggattataggtgcccgccgccgcacccagctaatttttgtatttttagtagaggcggggtttcaccatcttggccaggctggtctcaaactcctgacctcgtgatcgacccgcctcggcctcctgcagtgttgggattacaggcatgagccaccgcaaccagcctgtaaatgtttttacttatgtattgataatgtgtttttagagccagtacattacaataacaggttcgtactgcagttaacagttttttttttttttttttttttttgagacggagtattgctcttgttacccaggctggagtgcaatggtgtgatctcgactcaccgcaacctctgcctccctagttaaagtgattctcctgcctcagcctcctgagtagctggtattacaggcatgcaccaccacgcctggctaattttgtatttttagtagagatagggtttcaccatgttggtcaggctggtctcaaactcccgacctcaggtgatccacccgcctcggcctcccaaagtgctgggattacaggagggacccactgagcctggcctccagtttttttttgttttgtttttttgagatgaagtctggctctgtcgcccagactgcagtgtagtggcgtgatctcggctcactgcaaactccgcctcctgggttcacgccattcttcgcctcagcctcctgagtagctgggactacaggctcccgtcaccaaacctggctaattttgtttttgtgtctttagtagagacagggtttcaccgtgttagccaggatggtctcgatctcctgaccttgtaatccgcccgcctcggcctcccaaagtgctgggattacaggcgtgagccaccgtgcccggcccggtttctttaaacaattaattttggctcacgtggtggctcacacctgtaatcccagcagtatgggaggccgaggcgggcggattaatgaggttgggaattggagacgagcctagccaacatagtgaaaccccatctctactaaaaatacaaaaaattaactgggcgtagtgacgcgtgcctgtaatcccagctacttgggaggctgaggcaggagaatcgcttgaacctgagaggcggaggttgcagtgagctgagatggcgccgttgcacttcagtccaggcggcagtgtaagacaccattgcaaaaaaataaaacaaaaaaaaattaattttggaagacaaataaattagaaaatgatttcttggcattgcctgcttccaggttgcccaccgtttctcactttattgaatgcagaccagtggctggttgctcaggagaatggtggctgcctgcaggctgttagtgaggttccacttggtggcctgcggactgagcacagctgtgactgcacctgcccaccaggtgcatggcagaatgttgggaaatccctgcctaattttatcacaaccatcaatgtgagtcaacaggggcaggcttatctctgaagtaattagaaaaacaatgtaattgaaagagcctgctgcagttctcaatttattgtgctcctttgtaaaaagatgataaagttcttggtcagaatatatttctttatcttgctccttttgtgtcatgggaaacgtaacaaataccaatgtataactctgggttcaggtgttgccaccagttttattgtgagctgcttggatcatcaaattctcatttttatctcatgtttttccctttgcatctattctccccgtttaaaaggcaattttttttgtgctgcatcttaaaataaggcattttaaacagcaagtctttggttttagattttgtctcatgtgttaagagaaagctatggttttgttttgtgtttaaggctctgctttgcaggatcaagcctcaaggctgggggttcccgtgggtattctctcagccgggatggttgcctctagcgtgggacaga

SEQ ID NO: 11969 - DNA, 860 bp, Homo sapiens
ggagccgccgccggggctgtaggcgccaaggccatgtccgactcgtgggtcccgaactccgcctcgggccaggacccagggggccgccggagggcctgggccgagctgctgggtaggtgggcgcggcaggccgcgggagtgggcggcgtccggcccgggacggtttcgccggttccccgatcccttcccgccagagcctccgccggtcggatccccggacgccgcgcccggggggctgtgcggggtgggcgcccggctggggcggcgcggctgcctcggacccggcccctcctgcgcctgggcggacgcccccagccgccgcccgcggggcgctcccttctttcccgaacgccgcccccgccggccgccctgtcaggcgggcctggggtgcgcggcctggggctcccctcagcgcagaggccgcccctcgccagccgtccccgggctcccctgcctcgggccctcctgggccgtcttccccggcgtccgcggtggggccgtctccgttagtttcccgagacctgcgccctggggaggagccccggcccctcttcgggagggtgtcgctgcgggaagggtcaagagggaaaaatataatcctgaaagggcacagaaattaaaggaatcagctgtgcgcctcctgcgaagccatcaggacctgaatgcccttttgcttgaggtagaaggtccactgtgtaaaaaattgtctctcagcaaagtgattgactgtgacagttctgaggcctatgctaatcattctagttcatttataggctctgctttgcaggatcaagcctcaaggctgggggttcccgtgggtattctctcagccgggatggttgcctctagcgtgggacaga

SEQ ID NO: 11970 - DNA, 22103 bp, Homo sapiens
agccagcctttcctggagacccttgcaccttccttctgcagactggcagagagctgccctctctctctggacacacagaaccttccgagaggtgttgaaagaggaagatgttcacgtaggtgaccgttccttctcctgcatcatgccacgtcctgagtctagggtttgtgtgtgctcctcgggcaagaacagcagcacgtaggtgaccgttccttcccctgcatcatgccacgtcccgagtctagggtgtgtgtgtgccgactgtctcctcgtctcgagtctagggtgcgtgtgccgactgtctcctcagaggcaagaacagcagcacttagatggtttgattggaatcttgactaaaatcgttgtggcctcatgtgcagctcttaagaaattatacagatactgggcacggtgctcacacctgtgatcccagcactgtgggaggccaaggcgggttgatcacctgaactcaggagttcaagaccagcccgggcaacatagtgaaaccccatctctacaaagaatgcaaaaattagctgggcacagttgtgtgcacctttggttccagctacttgggaggctgaggcaagagaaatcacttgagcccaggaggtggaggttgcagtgagccaagatcacgccactctattccagccaggatgacacagcaagaccctgtctcaaaaaaatatattaataaatacagagaaaccctgctatactttctcagtttctcccaacacgaacttctttttttatttttactgatatattttttgagacaacgtctcgctgtgctcagtggtgcagtcttggctcactgcagcctctgcctcctgggttcaagcaattctcatgcctcagcctctccagtagctgggactacaggcgcctgccaccacgcccgactaattttggtatctttagtacagacggggtttcaccatgttgtccaggctggtcttaaactcctggcctcaaattacccacacgccttggcctcccaaaatgctggaattacaggcgtgagccattgcgcccgagaacttgttttttgttgttgttgttgttttgttttttttttctggtggagtcttactctggggcacagtggcgcaatcttggctcactgcagcctctgcctctctggttcaagtgattctcctgcctcagcctcccaagtagctgggactacaggcgcgcaccaccacgcctggctaagttttgtatttttagtagagatggggtttcaccatgttaggctggtctcgacctcctgacctcgtgatctgcccgccttggcctcccaaagtgctgggattacaggtgtgagccactgcgctcggcccctgggaacttgttttaaacatgtctgccaggctgtgtggtggtcactcagggtctctgggctcacccatgtgtgcctggttactggagctggcattgctctcaccagtgtgccttggtactgatttatttctgaggatgtttgcctggttgttttggtctttagaaaagaatttcaaggtggctgggcacagtggctcatgcctataatcccagcactttgggaggctgagatgtcaggagattgagaccatcctgggtaacacgatgaagccccatctctactaaaaataggaaaaagtgatccttctgctttggcctgccaatatgttgagattgcaagtgtgagccactgtgccaagccttttgtgaaattattttattatttttaaattattatttttttttttggagatggaatcttcctctgttgcccaggctggagtgcagtggcacaatcttgggtcactgcaacctcagccttctgggttcaagggattctcctgactcggcctcccaagtagctgggaccacaggtgcacgccaccgcgcccagctaactttttgtatttttagtagagatggggtttcactgtgttagccaggatggtctcaatctcctgacctcatcatcctcccgcctcggcctcccaaagtgctgggattacaggtgtgagccaccacgcccaaccctttttttttttttttttcgtatttttagtagaaacagggtttcaccgtgttagctaggatggtctcaatctgctgacctcgtgatctgcctgcctcggcctcccaaagtgctgggattacaggcatgagccaccgtgctcggcctcctaaaaatgtttttaaaaaacttagctggtcatggtgatgtgcacctgcagtcccagccatctgagaggctgagggggagaattctggagttcaggaggcagagtctgcagcgagctacgattgcaccactgcacacactccagcctgggcaacagaacctgtttccaaaaataaatgaaggtatgctactgtgaatagctgtagaatgttgttgttttgttagtttcttttttcttttttttttttttcctttttatagatagttctcactctgttactcactgcagccttgacctcctgggctcaagagatcctcctgcctcagcctcccaagaggctgggaccacacacatgtgccaccacacctggctgatttttaaatcttttgtagagacggggtgtcaccatgttgcctaggctggtgtcaaactcctaggctcaagcaatctgctggcctcagcctcccaaagtgctgggattacaggcatgagccaccgtgcccaggtaatttttaaatgagatgaggtcttactatgttgcccagactaaaatagccgttttatacttagaaagaaggattacagtactaacatctttgtgctagggaaatcctgtaagaaatcattcttgataaaactaaggtttctttcctgtggaactctcagctgcaatttcattataacacagggacatggaggactgcgtatgagatgaaatgacaaactggtttataaacctgtcggtggattgtgtgttctgtcctcattgtattgaattgcttgctctctttctcagttaacttaccaagactggttacacctggagctggaaattcaacctgaagctgatgctctttcagatactgaacggtaagtgttgaaaagagctaccctggccaggcatgatggctcacacctataatcccagcactttgggaggctgaggcaggagatctcttgaatccaggagtttgaggtcagcctgggcaacatggggaaactccatttctacaaaaaatagaaaagaaattagccggacatgcggcacgttccagtcatcacagccacttgggaagctgagcaggagcattgcttgagcctgggaggtagaggctgcagcgagctgagatcacaccactgcactttagcctgtgcaacggagtgagaccctatctcaaaagaaaaaggagcttccctttaaaatgttacacggttttccacattgccttaaagcctatgtttcgtcattttatcctcaatttaatgtttggtttacctgttaatctttgagcacaatttcaattttttttttttcggtggcaagatttattaaagcaaaagcgaaagtaaagcttccacgcggtggcaatttctgtttttctttttttttttttttttctgagacagagtcttgctctgtcacccaggctggaatgcagtggcgcgatctcggctcactgcaacctccacctcccgggttcacgccattctcctggctcagcctcccgagtagctgggactacaggcgcccgccaccatacccagctaattttttgtatttttggtagagacggggtttcaccgtgttaaccagggtggtctcaatctcctgacctcgtgatccacttgccttggcctcccaaagtgctggcattacaggcgtgagccaccgcgcctggccaggttgcccaatttcggttgttattcctttatttaagaaacatttactgagctcctaccatgtggcagacaattctagagtgttctagaagcagggagtatagaggggaataaacaagcctgcccatatggcacctttgtatcaatgagggcagatgtggcacgtataaggcacccacttagacttcaccctaccctggctgggctatggctgctgtccgggagctgtacacctgtgtccaggccctggcaacacacaggtagatacagaagtggattaaaggtaggaatgagccctggagataacagacagggccgtgtgagaggaaatgaccaggcaggagcagaggctggtgtggagcaggtggtgcagactttgaggagtgatgccagccttgacttgggggcaccaagaagtgggtaaatgaagcagtgaacccccatgagtcccagggctgatgactgagaccatttgagactatttgagaggccagatgtgctgttctgggcataggagtagggagcccagaggaccgttgggtttaagggtgtggagtttagggtggaggtcagggagaggggaatgtggtcactgcagatatggagtatcctggtgggtatatgggcctcagggtgcctgccacacctagactcaggagagggttggcaacagccaccctgtgctcctcgtccttccggccatcaggggccttccaggcacatgcagcactgtcgcctgcacctggatcctggtatcagattctggatgaaaccaatggaagtaataggaaaaggaaaacataggggccacaaaaagaaaactcgctgctgcctgcggcaaaacacgtgctgatggttcaggtcgtgccaagcccgctctgcaggcgcttccttcactcacccccgtttctcctcccggctgctctctggggtggagtctaaggaggaggtcagagggaggggcttgtctgctgcatgaggtcatgctgcatcaggtcaccgctgcgtggaagttgtgttgagatgtgttgcgggattttctttcttttctgaattacttaagtgatacttagatacattctgtgccagttccagacagtgtgggtggagcaccccagttccggacagcgtgggtggagcaccccggtcccggacagcgtgggtggagcaccccggtcccgcacagcgtgggtggagcacccaggtcccgcacagcgtgggtggagcaccccagtcccggacagtgtgaggagagcacacactccctagcactcacatttgcagggtcgtgtggagcgttttcctggttgtggctctttctgcataaatggattgcggtattgatggttctgtgcactgcggatttgtttgtttgtttgagacagggtctcactctgttggccaggatggagtacagtgatgcactcacggctcacggcagcttccctctccagagctcgagtgatcctcctgcctcagcctcctgagtagctgggaccacaggtgggcactactatgcccagctaatttttttattttttgtaggaatggggtctccctttgttgctcaggctgatgtcagactcctgggctcaagtgatcctcccaccttggcctcccacagtgctgggattacaggtgtagccactgcagttttgagtcagtgtctccttgagccccttcccatccgtatccacagagtccacagtctggatgcaggttgcttcaccatccccttctggtgggcctgtgagtagctcaggtgccctcaggtgactttccaggctactttttttttttttttttttttttttttttttagacggagtctcgctctgttgcccaagcaggagtgcagtggcatgatctcagctcactgcaagctccacctcccaggttcataccattctcctgcctcagcctcctgagtagctgggactacaggcgcccaccaccacgcccggctaattttttgtattttgagtagagacgaggtttcaccgtgttacccaggatggtctcgatctcctaacctcgtgatccgcccgcctgagcctcccaaagtgctgggattacaggcatgagccactgcacctgccccagcctacatttttgtgcttgcctattctgttcaccaagctcatgtgctgtgtggccagcagttaccccgtgggatgtcatcctgagtggcctttgatccgtggaaggtggggtcacaaaggtcactcctgagaccaggcctttcccacatccccaggcatcccaccctgcagacagtgaggtctcatccctactccaaggtcccgagccgccagtctcaacccagctctcactagtgctgtgtgtcccttactatgggcctattccctggttatggggaaccgctggccacgaagcatttctcagaattgatagcagtgtttgctgttctaggcaggacttccaccagtgggcgatccatgagcactttctccctgagtcctcggcttcagggggctgtgacggagacctgcaggctgcgtgtaccattcttgtcaacgcactgatggatttccaccaaaggttagcagcacacactgtattagggttctctggagggacaggactaataggatatatataaaggggagtttctggccatgctggtgcccatctaattagcttagggtgggtctgcctttcccagcctatacccaaatgtcagtctcctttggcaacaccctcacagacacactcaggatcaatgctttgcatccttcagtccagtcacgttgacactcagtattaaccatcacacaccgatgaggccttacttttaatcatggtagttctaagaatgcatttttctctcagtccaattttggtatgcaaagtacacttgagcctatcacatagcaaatctatgtcaatacaaaataaagccaagcttcctgcatcggttgtttctttatgtgtatagacttgtcagaagcgacaacttcgggctgggcgtggtggctcacacctgtaatcccagcacttcgggaggctgaggtgggtggattacctcaggtcaggagttagagaccagcctggcctacatggtgaaacctccctctctactaaaaatacaaaaattagctgagtgtggtggcgggtgcctgtaatcccagctacttgggaggctgaggcaggaggattgcttgaacctgggaggcagaggttgcagtgagccgactgggcgacagagcaagactctgtctcaaaaaaaagataaaaatagcaacaacgttgtttttctgttctgtcacctggtattcaaggtgagcatgtgtgaagcacggcacaaatggcctagtagatcctgggcatcacagcctctctccatctgagagggattctcaggacagagcagttcctgaggtgttgcatgtgggccagaaggatggacggagtgtacctggggctgtccaggctttgtccccaggggctcttgtttgcagcttcacactgttgtgttacagctgcagcattcagtacagatggcaagtgtgtatgcagcttccccccatgtctcctgcctgcggcaaccacgaatccattttatgttcatggatttgcctgtttgggatgtttaatatcaacagaatcatgtagtatgtggccctttgtgtctggcttctttggctgagcagaatgtttctgaggctcatctgtgttgtagcacatatcagcatacccttccttcttatggctgactgatgctcacagaaggtatggaggctgacgcacctccatcgtgggtgacttcttgttaaccctactccaagaatgcctcctgagatttcccatttatctgctgttaccttaaatcccactcttaggtcaaaacaaccttgaggctgggcgcagtggctcatgcctggaatctcagcactgggaggccaaggcaggcggatcatctgagctcaggagctcgagaccagcctggtgaaaccgtctagacaaaaaaaaaaattagccaggcatggtagtgtgtgcctatggtcccagctactcgtgaggctgaggtgggattgcatgagccggggaggcagaggttgcaatgagctgtgaaaacaccactacattccagcctgtgtgacagagtgagactccatctcaaaacaaaaaagcaaatcttccaccataaatccagcggttagattcacagagcattcttgcctttccctgaggggttgacttcaatagtccttccctgtggtatagaagccctgcctgggggtaacagtgcagggatgcatcgtctctctaggctgcctgagacatggtttctgtctgtaagtccttaaacgtttctgtctgagaaactggattattcagcctctcttcagccttccagcttccccagcctttatgggtaggtttgcacagagctgctcactgcggaacagaaagatcagccatattttgtttatccattcactttgtttgtttgttttttgagatagtcttactttgtcttatttatatttattttgaaactgggtctttctttgtcacccaggctggggtacagtgactgcagcccactgcagcctcgacctcctgggctcaagtgatcctcctgcttcagcccctcaagtagctgggaccacaggcaccaccatacctggcaaatttttgtagttgtagtagagatggggtttcaccatgttggccagactggtcttgaacttctgacctcaggtgatctgcccgcctcggcctcccaaagtgctgggattacaggcgtgaacctctgccaggcctgacttgatggtagccatcctagtgggtattaagtgctatttgatagtggtttcgatttgcacttccctaatgggtagtgattttgaacatctttccattttcttattggccattttagattttttttggagaaatctgttcacatccttagcccatttgaaaactgggtcacattcatgtactgcataagaatgttctggttaacaacgagccacatatatgacagtaatcccacatagccataattttttgtaccttttttttaaactgtgtttttaccgtaccttttctatgtttagatacacaaatactgttgtgttacagttgcggcatgcaatacagttacatgctatgccggtttatagcctgggagcggtgggccgtgccatgtggcctaggtgtgcgggggctctggtctgtttctgcgcggtgggccgtgccgtgtggcctaggtgtgcgggcggctccggtctgtgtctgtgcggtgggccgtgccgtgtggcctaggtgtgcggggggctctggtctgtgtctgtgctcttggatgttcacgtgatgaaaccacctaaagatgtgtttctcagaatggatccttgtcattgagcagttcatgactgtatttgtcttactgagttgtatgagttctttatatattttagataaagttcttatcaaatatatgatttgtaaatattttttcccattctgttaattcttttttcactctcttgatagtatcgtttaatgcacaaaggttttaaatttttataaagtccagatcatttatttttagtttagctctttaggattttgattcattttgatggatcagaaaacattttgggccagccacggtggctcacgcctgtaatcccagcactttgggaggctgaggcgggcagatcacttgatgtcaggagttcgagaccagcctggccaacatggcgaaactaaaaaaatacaaaaactagccaggcatggtggcaggcgcctgtaatcccagctactcgggaggctgaggcggcaggagacttgcttgaacctgggaggcggaggttgcaatgagcccagattgtgccactgcactccagcctgggcgacagagtgagagactgtctcaaaaaaaaaaaaaaaattgttgtgtgaggtcatccagctttattctgttgcttgtggccatgcagttgtcccagcaccatttgttgaaaacacttctttccccactgaatggtcttggcacccttgtcaaaagttagatggctgctcgtgtgagggtttgtttctggctctcattgtgttcccttggtctgtatgtccatatgcactgcgtcattgggatgaagctttgtagtaggttttaaaattgggaagtgtgaggcctccaacttggttcttctttttcaggatggtttggcttttctaggtgctttgtagttgtgtcttaattttgggatgagcttgtcagtttcgacaaaagtagctgggaccctgatacggactgcatgtggggcagtattgccatctcagtgatagcgagtcttctttccttttgaatcatttgttgctaacgtatagaaacaccagtgattcttgtatattcattggctctagtcatttattagttctaagagtgtttttgtatcgattccttagggctttgtatatataagatcgtgtctggccaggcatggtggctcatgcctgtaatcccagcactttgggagggtgaagtgggcggatcatgaggtcaggagttggagaccagcctggccaacatggtgaaaccccatctctactaaaaatacaaaaattagccgggcatcgtggtgggctcctgtaatccgttacttgggaggctgaggcagaagaatcacttgaactcaggaggcagaggttgcagtgagttgagatcatgccactgcaactccagcctgggcgacaagagtgaaactcagtctcaaaacaaaaaaacaaaagaaagatcatataatatgtgaagagagatagtttcactttttcctttcctatctggatgctttttctttttcttgttgaattgccccggcttgaactccccgggcagtgttgttttttttgttgttgttttgttttgtttttttttttctgagacggagtctcgctctgtcacccaggctggagtgcagtggtgcaatctcggcttaccgaaaccttcgcctctcaggttcaagcgattctcctgcctcagcctcccgagtagctgggattacaggcacccgccaccatgcccagctaatttttgtttgtttgtttttgagacagagtgtcgctgtgtgtcccaggctggagtacagtggcactatctcagctgtctgcaacctccgccttccaggttcaggcaattctgctgcctcagcctcccaataggtgggattactggcgtccgctaacacgcccgtctaatttttgtatttttagtagagatagggtttcgccacattggccaggatggtctcgatctcctgacctcagatgatctgcctgcctcggcctcccaaagtgctgggattacaggcgtgagccaccgtgtctgtccccagtgcagtgttgagtagaggcagcgacactgttctgagtgtagagaggacatccttgttgcccctgatcttaggagaacagctttcagtctttcctcattaaatctgacgtttgctgtgggttttcatccatgccaggcactagattgagaagatttcctttgttcctggttgattgagtgtttttatcacaaaaggatgtcacatttcgtcaagtgctttttctacatctattgagataatcttacggtttttgctttttattttattgataactgcgttatattggtttggggatcttaagctatccttgtgtagggaccagccccggagggtcggtgggtctctccctgtgtgcggcgatgagagagtgtagaaataaagacacaagacagagataagagaaaaggcagctgggcccgggggaccactaccaccaatgcgcggagaccggtagtggccccgagtgtcgggctgcgctgttacttattggatacaaggcagaaggggcagggtaaacaatgtgagtcacctccaatgataggtaaggtcacgtgggtcacatgtccactggacagggggcccgtccctgcctggcagctgaggcagagagggagaggagacagagagaaagacagcttacgccattatttctgcatatcagggactattagtattttcactaatttgctactgctatctggaaggcagagccaggtgtacaggatggaacatgaaggtggactaggagcatgaccactgaagcacagcatcacagggagacggtgaggcctccggataactgcgggcgagtctgactgatgtcaggccctccacaagaggtggaggagcagagtcttctctaaactccccgggggaaagggagactccctttcccggtctgctaagtagtgggtgttgttccttgacaccttttgctaccgctggaccacgatccgcttggtgacgggcgtcttcccagacgctggcatcaccgctagaccaaggagccctctggtggccctgtccgggcacaacagaaggctcgcactcttgtcttctggtcacacctcagtatatcccctcagctcctatctctgtatggcctggtttttcctaggctatgattattgagtgaggattatcataatattggaataaaaagtaattgctaccaactaatgattaatgatattcatatgtaatcatatctaagatctatatctggtataactattcttgttttatattttattatactggaacagctcgtgtcctctgtctcttgccttggtgcctgggtggcttgccacccacatccttgcattcttgggataagcctccttggtcatggtacataatttttgtatttcctaggttggggttggtagtattttgtggcagtttttgttgtttattgttgactaatgtgagggtcacactgtcagagaagcacagccatcactcagctccggaggcaggaggagaactgggaacttcagcactattaggcgatactgaggaggattttattgtattttcatttcagctcaaggagttatgaccactcagaaaattctgatttggtctttggtggccgcacaggaaatgaggatattatttccagattgcaggtgagtttgagggtgccacaactcagtgcattcacttcatttaagccgcgtgctattaagatatttattgccaggcgcggtggctcacgcctgtaatcccagaactttgggaggccgaggcaggcggatcacacagtcaggagatcgagaccatgctggctaacacgatgagaccccgtctctactaaaaatacaaaaatttagccgggcgtggtggcgggcacctgtagccccacctactcgggaggctgaggcaggagaatggcatgaacccaggaggcggagcttgcagtgagccgagattgtgccactgcactccagcctgggcgggcgacagagtgagactccgtctcaaaaaaaaaaaaaagatatttattgttggctcaggcttgtaatcccagtactttgggagtccgaggctggtggatcacctgaagtctatacaggtaggcagcatgtacctgtgtgggttcactgtcagtcaacaggcatttactggtgctggccacccgtgcgtcttctgtgccaggcccctgtctctccctccgccagctctggggcctcccaactccttagccagatgctttccctagacccacctggctccttctcagtgagaccatctgctttttcctcttaattgtaatcataattattattattattgggacagggtcttgctctgtcacccaggctagagtacagtggtgcgatcatatctctctgcagccttgacttcctgggctcaagcaatcctgacagcgtgcacctgtgtgcgccaccacacccagctgattttttgtagagacggagttttgccatgttgcccaggcttgtctcgaactcctgggcccaagtgaaccacccatctcggtctccaaaattgttggattacaggcgtgagccactgcacctgatctttattcttctttaaaaaatacagccggccaggcacggtggcttatgcctgtaatcccagcactttgggaggctgaggtggctagatcacttgaggtcaggggctcaagaccagtttggccaacatggtgaaaccccatctctactaaaaatacaaaacactagtcaagcatggtggtgtgtacctatagtcccagctactcaggaagctgacttaggagaatcagctgagctcgagagtcaaggctgccataagccaagactgcactgccgcactccagcctgggcaaccggactgagactgtcctaacaacaacaacaacaacaaaagacttgtgaggcaaaaatgatgtgtggggtaaaatgttagccagaggttaatctgggtgaagggcacatgagtgtcctcctgctgtttttttttgttgttgttttgttttgttttgtctgtttgtttttgagacagagtcttgctctggagtgcagtggcgggatcttggctcactgcagcctctacctcccgggttcaaactattctcctgcctctgcctcctgattagctgggattacaggcgcctgccaccacacccagctaatttttgtatggctaattttgttggccaggctggtcttggactcctgacctcaggtaatccatctgtcttggcctcccaaagttctgggattacaggcgtgagccaccatacctggctgtttttttttgtttgtttttttttgagacggagtctcactctgttgcccagtctgaagtgcagtggtgcgatctgggctcactgcaagctccacctcccgggttcacgccattctcctgcctcagccgcctgagtcgctgggactacaggcacccgccaccatgcccagctaatttttttgtattttttagtagcgacagggtttcaccatgttagccaggatggtctccatctcctgacctcgtgatcctcctgccttggcctcccaaagtgctgggattacaggcatgagccaccacgcccagctgttttttcttaattgataagtagttgataagtagtactgtaactcctgggctcaaggaatctgcctgcctcggcctcccaaagtgctggcattacagacgtgagccacagcacccggcctgcactgttctatatttgcaatttcaaagtgatttccaattgaaatagcttgccccacttgttccttcttgccctgtccactgtggagacctctccctgacccctgacgtctgggtccccgactggctgggcagtgagccccgaggccttcctgtgccagcatactgctctttttcaggagatggtagctgacctggagctgcagcaagacctcatagtgcctctcggccacaccccttcccaggagcacttcctctttgagattttccgcagacggctccaggctctgacaagcgggtggagcgtggctgccagccttcagagacagagggagctgctaatgtacaaacggtaacacctactaccacctgggcagggcagcaccacctgggcagggcagcatctcatgacggtcctagaggttctttgtagtgagtttgtttcccgttacttacttgtctgtgtgtccccaccccaagcctgtccatttctgtggcacatgccacggagaagaggatctggagggttgaaagtacttttgattaaaaccttccagccaagcgaggtggttcatgcctgtaatcctagcattttgggaggctgaggtgagtggatcacctgaggtcaggagtttgagaccagcctgaccaacatggcgaaacgccatgtctactaaaaatacaaaaaaaatacaaaaaaatttagctaggtgtggtggcgggcacctgtaatcccagctactcgggagactgaggcaggagagtggtgtgaacctgggaggcagaggtttcagtgagccgagatcacgccattgcacaccagcctgggcaacagagcgagactctgtctcaacaacaacaacaaaaccttcctgctcagacgtggagggacgtcgcagaaggagctcttgtgaaagtagggaaaagtgttcagaaatgcccacggcggctgcatttataagaagcagcgtggagtcatttaattttacagtcatagggaattgcttcactagacagactggtgcgtcatccacttggttatcgtgtaactgtcagaagttgttggttattatgtaactgttaaaagttgtttgtttggtaacacattttgaatgcagtgggccaaacacagtataggggaggtgggctcagagtgcaggctttggatgggacagagggacacaggccaaggctctggttccaacagtggccctgggtttcagggtggtggttgctgctctgagagtctgagcccttgggaaggagcagagtgtacgctgtgctgtcgccaccaatacagccccttctttccaggatcctcctccgcctgccttcgtctgtcctctgcggcagcagcttccaggcagaacagcccatcactgccagatgcgagcagttcttccacttggtcaactctgagatggtaggtgccccgtgtgcacgtgtccgtccgatctgtcagtgcctgtggcgctaacagcagctcttgcagcctccatgcgtgtactgaccgtgtgaattactgaggaaagggttcaaagtcaaatagggaacagtgtctggaatgccatgtgagggaggaccccacccacagccaggacggcgaccagcacatcaccaaaccagctgtaggttgccttctcccaagtttgagttcctttagtttccctcaagttttaatgattttgacacatggaatcgtacagaccattttgtgtgccacgcacctcggttcatttatttctaatctcaacatgcttcatgtgtaaaaaaagccttgtggtgatctgactaccgctgttgcctgccaggcagcccagttatcttccattttagacactgcccagcgtgagttgcagggtgatcttaaccagcaggctgggtgcggtggctcacgcccgtaatcccagcactctggaaaggtgggggatcacttgagcccaggagttcgagaccagcctgggcaacatgacaaaaccctgtttctacaaaaaatagaaaaattagctgggtatggtggtgcacgcctgtactcccacctacttgagaggctgggtcaggaggagtaattgagcccaggaggcagagttgcactgagccaagatcccaccactacactccagcctgggtgacagagcgaaactcttgtctcaaataaaaagaagtgacactcgctgtggggacgggcagcgtagggacccagttggtcagagctggggagacggataccagcccctcccactctacagagagcagcttctgctcccgaaggcctttttcttgtttttgaagatgcacaaatgtgagagatggaattcaggttccatgccagctgtgcagcattttatatttttatttatttatttatttatttattttttgagacagagtcttgctctgtcgcccaggctggagtgcagcagtgaaatcttggctcaccctgcaacctccgcctcccaggttcaagcgattctcctgcctcagcctcctgagtagctgggactacaggtgcctgccgccatgaccggctaagttttgtatttttagtagagatgacgttttaccatgttggtcagtctggtcttgaactcctgacctcgtgatccacccgccttggcctcccaaagtgctgggattacaggtgtgagcccggccttgtgcagcacttcaaaatgtgacaaggaaagcagaggacgtgagactagcaaaagctttcagaaaatcactatggtctcctttgaattcttatgaatggctgtttttcagaaagctctcagttggcacgtgacagccgacagacaggaaaacaccatagacagcacttggttagtgaagggaccagaggatggttggcccttggtattagtgtcgtcctcaccacagttctacgctccgggtgcgtccccttccctgcggctgcttgtgcctccctggcttcttcctggagcctacaagactgtttgggccagagctggtgggctgcaggatctggccgcccagggaagccgttaagtttcaggacagcacagccagggcgccaggcccggtcagcccaggagcaccatccatggtggccacgccaagccttagcgagtgtttttctcaaaactgaatccacagcagccactctgcatgttggtctcgcctctcttcctgtgggcttttcttacctgccttgaactcttttgcagagaaacttctgctcccacggaggtgccctgacacaggacatcactgcccacttcttcagggtgagatgctccctcagcccctctcgtggccttctcagaacgccgtgggtggatcctcctgtcagcttcctgtgagttccttcactctactagttgtgggtcctcacaaaccgctgacctcctgctgcgttctctcctgcagggcctcctgaacgcctgtctgcggagcagagacccctccctgatggtcgacttcatactggccaagtgccagacgaaatgccccttaattttgacctctgctctggtgggtcagctgtcttgtttggtgttttgttttggggatgagtgggagactccacagctgcctctggcatctctgcagcacgtctccatcacgggtgttaccatctcagggaaaatgcatcaggagacatggaagccacagttaaagatgccagctcatagcagatgagggccgcacatcctgagttcccagaaccgtccctgcccccaccgccgtcaccatggcacccgcaggacttctcccctgtggaccccactcagaccccacgggcaccttcatgtccacaggggtgcagggcttgtttgttcacggtcttgggttgtgcactggctggaggctgtacggtggctgcctgtgccccgtcacgagagcatgactgtggcccacttgcgcctgactatgctttcttgggacttcggagcagagacttcacctcagctcccgccagagctcagcaggctcccctagcagcccagggtcccgagagtgggaggagggcagcatttccctcacttccctggcggctcacttagtcctgaagaccacagctgtcgcccttccttctcggtcatcagggacaggagggcctttttctccgcagcacggcatgttccccagggagctccccaagcaggctgcatttgcaccgagttgtagctcagttggtggaattcgtgagaaatgaactcttcggtgtttagaacgccacctctcagctgagggcatccaaggaccaggcattcccagctcagggcagtgtggtctcttcactgtttcgttcccagctcagaggagtgtggtcccttcactgtttcgttcccagctcagggcagtgtggtcccttcactgttttgttcccagctcagaggagtgtggtcccttcactgttttgttcccagctcagggcagtgtggtcccttcactgttttgttcccagctcagaggagtgtggtcccttcactgtttcgttcccagctcagggcagtgtggtcccttcactgttttgttcccagctcagaggagtgtggtcccttcactgtttcgttcccagctcagggcagtgtggtcccttcactgtttcgttcccagctcagaggagtgtggtcccttcactgttttgttcccagctcagaggagtgtggtcccttcactgttttgttcccagctcagaggagtgtggtcccttcactgtttcattcccagctcaggggactgtggtcccttcactgtttcgttcccagctcaggggagtgtggtcccttcactgttgcgttaggccaggctcttccttctccaaattccacgtcttccatgagtgtgggtaataaatgcctcatggaactgctttgagccttaattgacgtaaaaaatactggctttggagttccagagcgcagggcgagtgtgggcctgtagtggcctgtaggagcactgggggcttgtcatggctggggcagcggaggtgtgtccatctcagccaccctcatctgtgtgctggtgctctctccataggtgtggtggccgagcctggagcctgtgctgctctgccggtggaggagacactgccagagcccgctgccccgggaactgcagaagctacaagaaggccggcagtttgccagcgagtacgtgtgggtggtgagatggggtgtgcccgcccagatgcacttcgggacctgctcaaggtcatctcctaaacaccctggcttgcttgagagaagcggtgtgggcagcctctcgtgtgagcagggagaaaagaaccgagttctcgtggtggtgggcgcctgtaatcccaactactggggaggccgaggcaggagaatcagttgaacccaggaggtggagtttccagtgagccgagatcactccaacggccaatagagcaagactctgtccagaaaaaaaacaaaaaaaaaaacagcctctgccagtgtctcgtctgagtgaggaacggcctctcccaggctcccgtctgagtgaggagctcgagtgattcctttgcacctgctccccttcctcttaaatctaatgtgggctcctagagtgcaccgcgtgctggtagggtcagtgtcatggggacctcagggatgcagattctcagcctaccctgacctgtcgaccccagtcagatattcacgggtccttgcaaaccatcaagctcctggcgcaatccaggctcacacacccttctgaggaccacagagctgacagccactccacctgctgaatgtgggtgccgtgttcttaaggggtcgtcagagggcactgctagtacccatcctgcctccttggagaacaccttactttgtgactagttttgaatcactgatgccacaccgggtcccctcagggtttggctgctcgccgtctgctgaaagaagagaagagggccccggcgcggtggcgcacacctgtaatcccagcactttgggaggccaaggcaggtggatcacctgaggtcaggagtttgagaccagcctggccaacatgtgaaacaatctctactgaaaatacagaaatgagctgggtgtgatagtgtgcgcctgtagtcccagctactcaggaggctgaggcaggagaattgcttgaacccaggaggtggaggttgcagtgagccgagatcatgccattgtagtccagcatgggcaatgagagagaaactccatctcaaaaaaggagaaagcaggtcacacctccagttctaattctacaaacacagatcagattgtctgaagttttgttttttgttttgttttgtttgagacagagtttcactcttgtcacccaccctagagtgagatggcacgatctcggctcaccatgacctccgcctcccaggttcaagcgatcctcctgcctcagtctcctgagtagctgggattacaggcgtgagccaccatgcctggctaattttgtatttttagtagagacagggtttctccacgttggtcaggctggtctcgaactcccgacctcaggtgatctgcctgcctcagcctcccaaagtgctgggattacaggcgtgaaccaccacgccctgcctcgtttttgtttatttgagattgagtctcactgtgttgcccaggcagatctcaaactgctgggcttaagcgatcctcctgaagtgctatgattgcagatgtgaaccgtcatgcccagcttatttaaagtctcttaaaccacagcattgtttcattaatttcctaccaattttttaaccagccagaaaactcagacaccacactggggccagagccaggcagtcctttgttctctgttgtaggagggaatgcctgatccacagggccaggcatgggcaactgaggaaaatgaggcctcttcttccaaaatgtaggcagctggggcccaagagcacagggcaaggtagacaggaccaggccagctgcctgctcagtcagcagctctcagaacgccaggatgctgtgggggcagcaccagcacctgcccacactctcacgtggacctgggggatgcagacctagtttctgatggtcctgaaacccttctctgtcctctgatggaaaggcaggccccaaaggtgacaggtgggaataaggacttggtttctatggcgtggttgtatggttgtaaggccctgcaatgaccccgttctctctgtcccagtttcctctcccctgaggctgcctccccagcacccaac

SEQ ID NO: 11971 - DNA, 915 bp, Homo sapiens
agccagcctttcctggagacccttgcaccttccttctgcagactggcagagagctgccctctctctctggacacacagaaccttccgagaggtgttgaaagaggaagatgttcacttaacttaccaagactggttacacctggagctggaaattcaacctgaagctgatgctctttcagatactgaacggcaggacttccaccagtgggcgatccatgagcactttctccctgagtcctcggcttcagggggctgtgacggagacctgcaggctgcgtgtaccattcttgtcaacgcactgatggatttccaccaaaggagatggtagctgacctggagctgcagcaagacctcatagtgcctctcggccacaccccttcccaggagcacttcctctttgagattttccgcagacggctccaggctctgacaagcgggtggagcgtggctgccagccttcagagacagagggagctgctaatgtacaaacggatcctcctccgcctgccttcgtctgtcctctgcggcagcagcttccaggcagaacagcccatcactgccagatgcgagcagttcttccacttggtcaactctgagatgagaaacttctgctcccacggaggtgccctgacacaggacatcactgcccacttcttcaggggcctcctgaacgcctgtctgcggagcagagacccctccctgatggtcgacttcatactggccaagtgccagacgaaatgccccttaattttgacctctgctctggtgtggtggccgagcctggagcctgtgctgctctgccggtggaggagacactgccagagcccgctgccccgggaactgcagaagctacaagaaggccggcagtttgccagcgatttcctctcccctgaggctgcctccccagcacccaac

SEQ ID NO: 11972 - DNA, 4601 bp, Homo sapiens
agccgccgccggggctgtaggcgccaaggccatgtccgactcgtgggtcccgaactccgcctcgggccaggacccagggggccgccggagggcctgggccgagctgctggcgggaagggtcaagagggaaaaatataatcctgaaagggcacagaaattaaaggaatcagctgtgcgcctcctgcgaagccatcaggacctgaatgcccttttgcttgaggtagaaggtccactgtgtaaaaaattgtctctcagcaaagtgattgactgtgacagttctgaggcctatgctaatcattctagttcatttataggctctgctttgcaggatcaagcctcaaggctgggggttcccgtgggtattctctcagccgggatggttgcctctagcgtgggacagatctgcacggctccagcggagaccagtcaccctgtgctgctgactgtggagcagagaaagaagctgtcttccctgttagagtttgctcagtatttattggcacacagtatgttctcccgtctttccttctgtcaagaattatggaaaatacagagttctttgttgcttgaagcggtgtggcatcttcacgtacaaggcattgtgagcctgcaagagctgctggaaagccatcccgacatgcatgctgtgggatcgtggctcttcaggaatctgtgctgcctttgtgaacagatggaagcatcctgccagcatgctgacgtcgccagggccatgctttctgattttgttcaaatgtttgttttgaggggatttcagaaaaactcagatctgagaagaactgtggagcctgaaaaaatgccgcaggtcacggttgatgtactgcagagaatgctgatttttgcacttgacgctttggctgctggagtacaggaggagtcctccactcacaagatcgtgaggtgctggttcggagtgttcagtggacacacgcttggcagtgtaatttccacagatcctctgaagaggttcttcagtcataccctgactcagatactcactcacagccctgtgctgaaagcatctgatgctgttcagatgcagagagagtggagctttgcgcggacacaccctctgctcacctcactgtaccgcaggctctttgtgatgctgagtgcagaggagttggttggccatttgcaagaagttctggaaacgcaggaggttcactggcagagagtgctctcctttgtgtctgccctggttgtctgctttccagaagcgcagcagctgcttgaagactgggtggcgcgtttgatggcccaggcattcgagagctgccagctggacagcatggtcactgcgttcctggttgtgcgccaggcagcactggagggcccctctgcgttcctgtcatatgcagactggttcaaggcctcctttgggagcacacgaggctaccatggctgcagcaagaaggccctggtcttcctgtttacgttcttgtcagaactcgtgccttttgagtctccccggtacctgcaggtgcacattctccacccacccctggttcccggcaagtaccgctccctcctcacagactacatctcattggccaagacacggctggccgacctcaaggtttctatagaaaacatgggactctacgaggatttgtcatcagctggggacattactgagccccacagccaagctcttcaggatgttgaaaaggccatcatggtgtttgagcatacggggaacatcccagtcaccgtcatggaggccagcatattcaggaggccttactacgtgtcccacttcctccccgccctgctcacacctcgagtgctccccaaagtccctgactcccgtgtggcgtttatagagtctctgaagagagcagataaaatccccccatctctgtactccacctactgccaggcctgctctgctgctgaagagaagccagaagatgcagccctgggagtgagggcagaacccaactctgctgaggagcccctgggacagctcacagctgcactgggagagctgagagcctccatgacagaccccagccagcgtgatgttatatcggcacaggtggcagtgatttctgaaagactgagggctgtcctgggccacaatgaggatgacagcagcgttgagatatcaaagattcagctcagcatcaacacgccgagactggagccacgggaacacatggctgtggacctcctgctgacgtctttctgtcagaacctgatggctgcctccagtgtcgctcccccggagaggcagggtccctgggctgccctcttcgtgaggaccatgtgtggacgtgtgctccctgcagtgctcacccggctctgccagctgctccgtcaccagggcccgagcctgagtgccccacatgtgctggggttggctgccctggccgtgcacctgggtgagtccaggtctgcgctcccagaggtggatgtgggtcctcctgcacctggtgctggccttcctgtccctgcgctctttgacagcctcctgacctgtaggacgagggattccttgttcttctgcctgaaattttgtacagcagcaatttcttactctctctgcaagttttcttcccagtcacgagatactttgtgcagctgcttatctccaggccttattaaaaagtttcagttcctcatgttcagattgttctcagaggcccgacagcctctttctgaggaggacgtagccagcctttcctggagacccttgcaccttccttctgcagactggcagagagctgccctctctctctggacacacagaaccttccgagaggtgttgaaagaggaagatgttcacttaacttaccaagactggttacacctggagctggaaattcaacctgaagctgatgctctttcagatactgaacggcaggacttccaccagtgggcgatccatgagcactttctccctgagtcctcggcttcagggggctgtgacggagacctgcaggctgcgtgtaccattcttgtcaacgcactgatggatttccaccaaagctcaaggagttatgaccactcagaaaattctgatttggtctttggtggccgcacaggaaatgaggatattatttccagattgcaggagatggtagctgacctggagctgcagcaagacctcatagtgcctctcggccacaccccttcccaggagcacttcctctttgagattttccgcagacggctccaggctctgacaagcgggtggagcgtggctgccagccttcagagacagagggagctgctaatgtacaaacggatcctcctccgcctgccttcgtctgtcctctgcggcagcagcttccaggcagaacagcccatcactgccagatgcgagcagttcttccacttggtcaactctgagatgagaaacttctgctcccacggaggtgccctgacacaggacatcactgcccacttcttcaggggcctcctgaacgcctgtctgcggagcagagacccctccctgatggtcgacttcatactggccaagtgccagacgaaatgccccttaattttgacctctgctctggtgtggtggccgagcctggagcctgtgctgctctgccggtggaggagacactgccagagcccgctgccccgggaactgcagaagctacaagaaggccggcagtttgccagcgatttcctctcccctgaggctgcctccccagcacccaacccggactggctctcagctgctgcactgcactttgcgattcaacaagtcagggaagaaaacatcaggaagcagctaaagaagctggactgcgagagagaggagctattggttttccttttcttcttctccttgatgggcctgctgtcgtcacatctgacctcaaatagcaccacagacctgccaaaggctttccacgtttgtgcagcaatcctcgagtgtttagagaagaggaagatatcctggctggcactctttcagttgacagagagtgacctcaggctggggcggctcctcctccgtgtggccccggatcagcacaccaggctgctgcctttcgctttttacagtcttctctcctacttccatgaagacgcggccatcagggaagaggccttcctgcatgttgctgtggacatgtacttgaagctggtccagctcttcgtggctggggatacaagcacagtttcacctccagctggcaggagcctggagctcaagggtcaggcagggcaaccccgtggaactgataacaaaagctcgtctttttctgctgcagttaatacctcggtgcccgaaaaagagcttctcacacgtggcagagctgctggctgatcgtggggactgcgacccagaggtgagcgccgccctccagagcagacagcaggctgcccctgacgctgacctgtcccaggagcctcatctcttctgacgggacctgccactgcacaccagcccagctcccgtgtaaataatttattacaagcataacatggagctcttgttgcactaaaaagtggattacaaatctcctcgactgctttagtggggaaaggaatcaattatttatgaactgtccggccccgagtcactcagcgtttgcgggaaaataaaccactggtcccagagc

SEQ ID NO: 11973 - DNA, 10535 bp, Homo sapiens
tttccgcagacggctccaggctctgacaagcgggtggagcgtggctgccagccttcagagacagagggagctgctaatgtacaaacggtaacacctactaccacctgggcagggcagcaccacctgggcagggcagcatctcatgacggtcctagaggttctttgtagtgagtttgtttcccgttacttacttgtctgtgtgtccccaccccaagcctgtccatttctgtggcacatgccacggagaagaggatctggagggttgaaagtacttttgattaaaaccttccagccaagcgaggtggttcatgcctgtaatcctagcattttgggaggctgaggtgagtggatcacctgaggtcaggagtttgagaccagcctgaccaacatggcgaaacgccatgtctactaaaaatacaaaaaaaatacaaaaaaatttagctaggtgtggtggcgggcacctgtaatcccagctactcgggagactgaggcaggagagtggtgtgaacctgggaggcagaggtttcagtgagccgagatcacgccattgcacaccagcctgggcaacagagcgagactctgtctcaacaacaacaacaaaaccttcctgctcagacgtggagggacgtcgcagaaggagctcttgtgaaagtagggaaaagtgttcagaaatgcccacggcggctgcatttataagaagcagcgtggagtcatttaattttacagtcatagggaattgcttcactagacagactggtgcgtcatccacttggttatcgtgtaactgtcagaagttgttggttattatgtaactgttaaaagttgtttgtttggtaacacattttgaatgcagtgggccaaacacagtataggggaggtgggctcagagtgcaggctttggatgggacagagggacacaggccaaggctctggttccaacagtggccctgggtttcagggtggtggttgctgctctgagagtctgagcccttgggaaggagcagagtgtacgctgtgctgtcgccaccaatacagccccttctttccaggatcctcctccgcctgccttcgtctgtcctctgcggcagcagcttccaggcagaacagcccatcactgccagatgcgagcagttcttccacttggtcaactctgagatggtaggtgccccgtgtgcacgtgtccgtccgatctgtcagtgcctgtggcgctaacagcagctcttgcagcctccatgcgtgtactgaccgtgtgaattactgaggaaagggttcaaagtcaaatagggaacagtgtctggaatgccatgtgagggaggaccccacccacagccaggacggcgaccagcacatcaccaaaccagctgtaggttgccttctcccaagtttgagttcctttagtttccctcaagttttaatgattttgacacatggaatcgtacagaccattttgtgtgccacgcacctcggttcatttatttctaatctcaacatgcttcatgtgtaaaaaaagccttgtggtgatctgactaccgctgttgcctgccaggcagcccagttatcttccattttagacactgcccagcgtgagttgcagggtgatcttaaccagcaggctgggtgcggtggctcacgcccgtaatcccagcactctggaaaggtgggggatcacttgagcccaggagttcgagaccagcctgggcaacatgacaaaaccctgtttctacaaaaaatagaaaaattagctgggtatggtggtgcacgcctgtactcccacctacttgagaggctgggtcaggaggagtaattgagcccaggaggcagagttgcactgagccaagatcccaccactacactccagcctgggtgacagagcgaaactcttgtctcaaataaaaagaagtgacactcgctgtggggacgggcagcgtagggacccagttggtcagagctggggagacggataccagcccctcccactctacagagagcagcttctgctcccgaaggcctttttcttgtttttgaagatgcacaaatgtgagagatggaattcaggttccatgccagctgtgcagcattttatatttttatttatttatttatttatttattttttgagacagagtcttgctctgtcgcccaggctggagtgcagcagtgaaatcttggctcaccctgcaacctccgcctcccaggttcaagcgattctcctgcctcagcctcctgagtagctgggactacaggtgcctgccgccatgaccggctaagttttgtatttttagtagagatgacgttttaccatgttggtcagtctggtcttgaactcctgacctcgtgatccacccgccttggcctcccaaagtgctgggattacaggtgtgagcccggccttgtgcagcacttcaaaatgtgacaaggaaagcagaggacgtgagactagcaaaagctttcagaaaatcactatggtctcctttgaattcttatgaatggctgtttttcagaaagctctcagttggcacgtgacagccgacagacaggaaaacaccatagacagcacttggttagtgaagggaccagaggatggttggcccttggtattagtgtcgtcctcaccacagttctacgctccgggtgcgtccccttccctgcggctgcttgtgcctccctggcttcttcctggagcctacaagactgtttgggccagagctggtgggctgcaggatctggccgcccagggaagccgttaagtttcaggacagcacagccagggcgccaggcccggtcagcccaggagcaccatccatggtggccacgccaagccttagcgagtgtttttctcaaaactgaatccacagcagccactctgcatgttggtctcgcctctcttcctgtgggcttttcttacctgccttgaactcttttgcagagaaacttctgctcccacggaggtgccctgacacaggacatcactgcccacttcttcagggtgagatgctccctcagcccctctcgtggccttctcagaacgccgtgggtggatcctcctgtcagcttcctgtgagttccttcactctactagttgtgggtcctcacaaaccgctgacctcctgctgcgttctctcctgcagggcctcctgaacgcctgtctgcggagcagagacccctccctgatggtcgacttcatactggccaagtgccagacgaaatgccccttaattttgacctctgctctggtgggtcagctgtcttgtttggtgttttgttttggggatgagtgggagactccacagctgcctctggcatctctgcagcacgtctccatcacgggtgttaccatctcagggaaaatgcatcaggagacatggaagccacagttaaagatgccagctcatagcagatgagggccgcacatcctgagttcccagaaccgtccctgcccccaccgccgtcaccatggcacccgcaggacttctcccctgtggaccccactcagaccccacgggcaccttcatgtccacaggggtgcagggcttgtttgttcacggtcttgggttgtgcactggctggaggctgtacggtggctgcctgtgccccgtcacgagagcatgactgtggcccacttgcgcctgactatgctttcttgggacttcggagcagagacttcacctcagctcccgccagagctcagcaggctcccctagcagcccagggtcccgagagtgggaggagggcagcatttccctcacttccctggcggctcacttagtcctgaagaccacagctgtcgcccttccttctcggtcatcagggacaggagggcctttttctccgcagcacggcatgttccccagggagctccccaagcaggctgcatttgcaccgagttgtagctcagttggtggaattcgtgagaaatgaactcttcggtgtttagaacgccacctctcagctgagggcatccaaggaccaggcattcccagctcagggcagtgtggtctcttcactgtttcgttcccagctcagaggagtgtggtcccttcactgtttcgttcccagctcagggcagtgtggtcccttcactgttttgttcccagctcagaggagtgtggtcccttcactgttttgttcccagctcagggcagtgtggtcccttcactgttttgttcccagctcagaggagtgtggtcccttcactgtttcgttcccagctcagggcagtgtggtcccttcactgttttgttcccagctcagaggagtgtggtcccttcactgtttcgttcccagctcagggcagtgtggtcccttcactgtttcgttcccagctcagaggagtgtggtcccttcactgttttgttcccagctcagaggagtgtggtcccttcactgttttgttcccagctcagaggagtgtggtcccttcactgtttcattcccagctcaggggactgtggtcccttcactgtttcgttcccagctcaggggagtgtggtcccttcactgttgcgttaggccaggctcttccttctccaaattccacgtcttccatgagtgtgggtaataaatgcctcatggaactgctttgagccttaattgacgtaaaaaatactggctttggagttccagagcgcagggcgagtgtgggcctgtagtggcctgtaggagcactgggggcttgtcatggctggggcagcggaggtgtgtccatctcagccaccctcatctgtgtgctggtgctctctccataggtgtggtggccgagcctggagcctgtgctgctctgccggtggaggagacactgccagagcccgctgccccgggaactgcagaagctacaagaaggccggcagtttgccagcgagtacgtgtgggtggtgagatggggtgtgcccgcccagatgcacttcgggacctgctcaaggtcatctcctaaacaccctggcttgcttgagagaagcggtgtgggcagcctctcgtgtgagcagggagaaaagaaccgagttctcgtggtggtgggcgcctgtaatcccaactactggggaggccgaggcaggagaatcagttgaacccaggaggtggagtttccagtgagccgagatcactccaacggccaatagagcaagactctgtccagaaaaaaaacaaaaaaaaaaacagcctctgccagtgtctcgtctgagtgaggaacggcctctcccaggctcccgtctgagtgaggagctcgagtgattcctttgcacctgctccccttcctcttaaatctaatgtgggctcctagagtgcaccgcgtgctggtagggtcagtgtcatggggacctcagggatgcagattctcagcctaccctgacctgtcgaccccagtcagatattcacgggtccttgcaaaccatcaagctcctggcgcaatccaggctcacacacccttctgaggaccacagagctgacagccactccacctgctgaatgtgggtgccgtgttcttaaggggtcgtcagagggcactgctagtacccatcctgcctccttggagaacaccttactttgtgactagttttgaatcactgatgccacaccgggtcccctcagggtttggctgctcgccgtctgctgaaagaagagaagagggccccggcgcggtggcgcacacctgtaatcccagcactttgggaggccaaggcaggtggatcacctgaggtcaggagtttgagaccagcctggccaacatgtgaaacaatctctactgaaaatacagaaatgagctgggtgtgatagtgtgcgcctgtagtcccagctactcaggaggctgaggcaggagaattgcttgaacccaggaggtggaggttgcagtgagccgagatcatgccattgtagtccagcatgggcaatgagagagaaactccatctcaaaaaaggagaaagcaggtcacacctccagttctaattctacaaacacagatcagattgtctgaagttttgttttttgttttgttttgtttgagacagagtttcactcttgtcacccaccctagagtgagatggcacgatctcggctcaccatgacctccgcctcccaggttcaagcgatcctcctgcctcagtctcctgagtagctgggattacaggcgtgagccaccatgcctggctaattttgtatttttagtagagacagggtttctccacgttggtcaggctggtctcgaactcccgacctcaggtgatctgcctgcctcagcctcccaaagtgctgggattacaggcgtgaaccaccacgccctgcctcgtttttgtttatttgagattgagtctcactgtgttgcccaggcagatctcaaactgctgggcttaagcgatcctcctgaagtgctatgattgcagatgtgaaccgtcatgcccagcttatttaaagtctcttaaaccacagcattgtttcattaatttcctaccaattttttaaccagccagaaaactcagacaccacactggggccagagccaggcagtcctttgttctctgttgtaggagggaatgcctgatccacagggccaggcatgggcaactgaggaaaatgaggcctcttcttccaaaatgtaggcagctggggcccaagagcacagggcaaggtagacaggaccaggccagctgcctgctcagtcagcagctctcagaacgccaggatgctgtgggggcagcaccagcacctgcccacactctcacgtggacctgggggatgcagacctagtttctgatggtcctgaaacccttctctgtcctctgatggaaaggcaggccccaaaggtgacaggtgggaataaggacttggtttctatggcgtggttgtatggttgtaaggccctgcaatgaccccgttctctctgtcccagtttcctctcccctgaggctgcctccccagcacccaacccggactggctctcagctgctgcactgcactttgcgattcaacaagtcagggaagaaaacatcaggaagcagctaaagaagctggactgcgagagagaggaggcaagataggaaattcttttactgatttattttctcgcaagcttggtttcaatcagtgctatttctctgggcttgtctgatgaactgtttttctaaagacaaatatgtggcttggagcaagactttttttttttttttttttttttgtatttttagtagagacggggtttcactgtgttagccaggatggtctcgatctcctgaccccgtgatcctcccgccttggcctcccaaagtgctgggattacaggcgtgagccaccacgcccagctggcttggagtaagactttgactatcaagtttactagtaaaaataataatttcagttttttaaatggttgtatgtagttgagacagggtctcactgtcgcccaggctggagtgcagtggtgcagtcagctcactgcagcctcttctgggctcaagccatcctcttacctcagcctctggagtagctcagactacaggtgtgtgccaccatgcccggctaattttgtaattttttctgagatgggggtctgtagtccaggcatggtggctcatgcctgtaatcccaacacttagggaggccgaggcaggcggatcacttggtgtcaggagtttgagaccagcttgggcaacatggtgaaaccctgtctctactaaaaacacaaaaattagtcgggtgtggtggtgcgcacctacaatcccatagcctgtaaagctactcaggaggctgaggcaggaggatcacttgaacccagggggcagaggctgcagtgagccaagatcacgccactgccctgcagtctgggtgacagagcgagacttgtctcaaaaaaaaaaaatttgtttaaagtaaaaattaaaagagatgggggtctcactgtgttgcccaggcttgaagtgcgtttcttcagcttatttttatcctcatcacagcccagcgtaaatgctgtcagccttcaagtggtgccttctgtgttcatgctgcagtagccttgattcatgtgctgagggacagccccagataagcttgcagtgagacagctcagacctggggtgctggggacaagaggcagcaaggatgggaccgtctgcagccataggcatagggaaaggagtgggagaggctgctcttgaattccaggccagggaccatgttcgactcagacccactgcccacctggttgctgcaccctggaaagcctgactgcccccacaagaccagtgacacccacacagctctctgtgcagggagccaagggtggtgtgtgcagaacaggaacagaaacaagcatcccacaagagagctggaggcagcagccctctgtgcccagcccgagatccgcaacgcataggtgccatgtcagcacacaacttacaccagctcaaagctggatcgacagcagcgcccagggttttggtgattataaccaccctgcaggggttcttctgagtacgtcttcaggtttcttgtgtagttttgttagaagggattttagtggctccagggccttaggaccctagtgtgcagcgaggagtgtccacagagaccctgcccagtcaggccctactttaggctggagcctgtgggcttatcttcaaggattttacaaacacttctgacaggaggccttgcagggagatgatgctgagttgggactgcgcacagccaaggagaccgcagcagtcttctctttctggctcttgtcactttttcaaactgtttctagctttgtttaaaggcaagtgtgaaatgacccagccagtagtaattaattctcaattaagctgtctctctagaagtgattggaaagttttctaagatccacttaaaggatttatggcctagatgtaaaaaatttcaattaaagaggaatgtgtcagccttatttagaatgacagcacaggtaattttaatgtaataataagtgcacgtttttatttacagctattggttttccttttcttcttctccttgatgggcctgctgtcgtcacatctgacctcaaatgtaagtcagaccttaccagccaaggtgtcctctcccactgtgggccaggcaggggcaccaggcagccagcttccaagtcagggtttccagactagctcaggagctccttgtgtttgcggaagtgtgagtgagaactcccaggccgtgggttttttttttttttttttgagatgggggtctcactctgtcacccaggctggagtgcagtggtgtgatctcagctcactgcaacctcagcctcctgggttcaagcaattctcctgcatcagcctcccgagtagctgggattacaggcgtgagtctgtcacacccggctaatttttgtatttttagtagagacggggtttcaccatattgccaggctggtcttgaactggcctcagtgatccgccgacctcggcctcccaaagtgttgggattacaggcatgagccactgcatccggcctgtgggcctttcttttaatgtcttatttgaggacgtggtgcagcagccttggtgtgggtgctcgaagtccctggcctcctacctgagcctcttctgtccagaggcccagtattaccttctataggtaaaactgtcaccagttttaagacttacaataagcaaagaggaaatgccctcttctgtgctgagggctgtaccctcctacccatgggagcaccaggtcggccattctcagggttggtctcctgcggtttacagagcaccacagacctgccaaaggctttccacgtttgtgcagcaatcctcgagtgtttagagaagaggaagatatcctggctggcactctttcagttgacagagagtggtaagaaacacgctgctgaggcacaaatgcggagggccgctcttttcagaggcatcttgcaaatggttaagaacgagccctccttgaggttccttgctaagtaagtttataagctccattttagttgggacagattaagcacaaacttgtttaaagcaataagataatttactggctcactggtcaaccccaggaccaatgggcctatcatggggactgcctctctctgcaccacacccaccctcctgcaagaggtcgacccccccatcctctcccagctgctgacaggtacctgggtatcctcagctcaggctgttcgccccacactatccccacagccaggcctcccagggtacacgtcccgacccccaggggtgtccccagcactgataataggcagagatgtccagagttgcctgagccacttcttggtgttgcagacctcaggctggggcggctcctcctccgtgtggccccggatcagcacaccaggctgctgcctttcgctttttacaggtacctccacccacagggctggtcagggctgggcagtgtttcccagacccccatctcagcacctctgggtcccgccagatgggaagggttgtctgtgcctctgctccacagatgagcagtatcccttggcatcacctgctacctttccagcagtctgtagccatttgtcactatgtctttacctctagtcttctct

SEQ ID NO: 11974 - DNA, 727 bp, Homo sapiens
tttccgcagacggctccaggctctgacaagcgggtggagcgtggctgccagccttcagagacagagggagctgctaatgtacaaacggatcctcctccgcctgccttcgtctgtcctctgcggcagcagcttccaggcagaacagcccatcactgccagatgcgagcagttcttccacttggtcaactctgagatgagaaacttctgctcccacggaggtgccctgacacaggacatcactgcccacttcttcaggggcctcctgaacgcctgtctgcggagcagagacccctccctgatggtcgacttcatactggccaagtgccagacgaaatgccccttaattttgacctctgctctggtgtggtggccgagcctggagcctgtgctgctctgccggtggaggagacactgccagagcccgctgccccgggaactgcagaagctacaagaaggccggcagtttgccagcgactattggttttccttttcttcttctccttgatgggcctgctgtcgtcacatctgacctcaaatagcaccacagacctgccaaaggctttccacgtttgtgcagcaatcctcgagtgtttagagaagaggaagatatcctggctggcactctttcagttgacagagagtgacctcaggctggggcggctcctcctccgtgtggccccggatcagcacaccaggctgctgcctttcgctttttacagtcttctct

SEQ ID NO: 11975 - DNA, 5110 bp, Homo sapiens
ctctgacaagcgggtggagcgtggctgccagccttcagagacagagggagctgctaatgtacaaacggtaacacctactaccacctgggcagggcagcaccacctgggcagggcagcatctcatgacggtcctagaggttctttgtagtgagtttgtttcccgttacttacttgtctgtgtgtccccaccccaagcctgtccatttctgtggcacatgccacggagaagaggatctggagggttgaaagtacttttgattaaaaccttccagccaagcgaggtggttcatgcctgtaatcctagcattttgggaggctgaggtgagtggatcacctgaggtcaggagtttgagaccagcctgaccaacatggcgaaacgccatgtctactaaaaatacaaaaaaaatacaaaaaaatttagctaggtgtggtggcgggcacctgtaatcccagctactcgggagactgaggcaggagagtggtgtgaacctgggaggcagaggtttcagtgagccgagatcacgccattgcacaccagcctgggcaacagagcgagactctgtctcaacaacaacaacaaaaccttcctgctcagacgtggagggacgtcgcagaaggagctcttgtgaaagtagggaaaagtgttcagaaatgcccacggcggctgcatttataagaagcagcgtggagtcatttaattttacagtcatagggaattgcttcactagacagactggtgcgtcatccacttggttatcgtgtaactgtcagaagttgttggttattatgtaactgttaaaagttgtttgtttggtaacacattttgaatgcagtgggccaaacacagtataggggaggtgggctcagagtgcaggctttggatgggacagagggacacaggccaaggctctggttccaacagtggccctgggtttcagggtggtggttgctgctctgagagtctgagcccttgggaaggagcagagtgtacgctgtgctgtcgccaccaatacagccccttctttccaggatcctcctccgcctgccttcgtctgtcctctgcggcagcagcttccaggcagaacagcccatcactgccagatgcgagcagttcttccacttggtcaactctgagatggtaggtgccccgtgtgcacgtgtccgtccgatctgtcagtgcctgtggcgctaacagcagctcttgcagcctccatgcgtgtactgaccgtgtgaattactgaggaaagggttcaaagtcaaatagggaacagtgtctggaatgccatgtgagggaggaccccacccacagccaggacggcgaccagcacatcaccaaaccagctgtaggttgccttctcccaagtttgagttcctttagtttccctcaagttttaatgattttgacacatggaatcgtacagaccattttgtgtgccacgcacctcggttcatttatttctaatctcaacatgcttcatgtgtaaaaaaagccttgtggtgatctgactaccgctgttgcctgccaggcagcccagttatcttccattttagacactgcccagcgtgagttgcagggtgatcttaaccagcaggctgggtgcggtggctcacgcccgtaatcccagcactctggaaaggtgggggatcacttgagcccaggagttcgagaccagcctgggcaacatgacaaaaccctgtttctacaaaaaatagaaaaattagctgggtatggtggtgcacgcctgtactcccacctacttgagaggctgggtcaggaggagtaattgagcccaggaggcagagttgcactgagccaagatcccaccactacactccagcctgggtgacagagcgaaactcttgtctcaaataaaaagaagtgacactcgctgtggggacgggcagcgtagggacccagttggtcagagctggggagacggataccagcccctcccactctacagagagcagcttctgctcccgaaggcctttttcttgtttttgaagatgcacaaatgtgagagatggaattcaggttccatgccagctgtgcagcattttatatttttatttatttatttatttatttattttttgagacagagtcttgctctgtcgcccaggctggagtgcagcagtgaaatcttggctcaccctgcaacctccgcctcccaggttcaagcgattctcctgcctcagcctcctgagtagctgggactacaggtgcctgccgccatgaccggctaagttttgtatttttagtagagatgacgttttaccatgttggtcagtctggtcttgaactcctgacctcgtgatccacccgccttggcctcccaaagtgctgggattacaggtgtgagcccggccttgtgcagcacttcaaaatgtgacaaggaaagcagaggacgtgagactagcaaaagctttcagaaaatcactatggtctcctttgaattcttatgaatggctgtttttcagaaagctctcagttggcacgtgacagccgacagacaggaaaacaccatagacagcacttggttagtgaagggaccagaggatggttggcccttggtattagtgtcgtcctcaccacagttctacgctccgggtgcgtccccttccctgcggctgcttgtgcctccctggcttcttcctggagcctacaagactgtttgggccagagctggtgggctgcaggatctggccgcccagggaagccgttaagtttcaggacagcacagccagggcgccaggcccggtcagcccaggagcaccatccatggtggccacgccaagccttagcgagtgtttttctcaaaactgaatccacagcagccactctgcatgttggtctcgcctctcttcctgtgggcttttcttacctgccttgaactcttttgcagagaaacttctgctcccacggaggtgccctgacacaggacatcactgcccacttcttcagggtgagatgctccctcagcccctctcgtggccttctcagaacgccgtgggtggatcctcctgtcagcttcctgtgagttccttcactctactagttgtgggtcctcacaaaccgctgacctcctgctgcgttctctcctgcagggcctcctgaacgcctgtctgcggagcagagacccctccctgatggtcgacttcatactggccaagtgccagacgaaatgccccttaattttgacctctgctctggtgggtcagctgtcttgtttggtgttttgttttggggatgagtgggagactccacagctgcctctggcatctctgcagcacgtctccatcacgggtgttaccatctcagggaaaatgcatcaggagacatggaagccacagttaaagatgccagctcatagcagatgagggccgcacatcctgagttcccagaaccgtccctgcccccaccgccgtcaccatggcacccgcaggacttctcccctgtggaccccactcagaccccacgggcaccttcatgtccacaggggtgcagggcttgtttgttcacggtcttgggttgtgcactggctggaggctgtacggtggctgcctgtgccccgtcacgagagcatgactgtggcccacttgcgcctgactatgctttcttgggacttcggagcagagacttcacctcagctcccgccagagctcagcaggctcccctagcagcccagggtcccgagagtgggaggagggcagcatttccctcacttccctggcggctcacttagtcctgaagaccacagctgtcgcccttccttctcggtcatcagggacaggagggcctttttctccgcagcacggcatgttccccagggagctccccaagcaggctgcatttgcaccgagttgtagctcagttggtggaattcgtgagaaatgaactcttcggtgtttagaacgccacctctcagctgagggcatccaaggaccaggcattcccagctcagggcagtgtggtctcttcactgtttcgttcccagctcagaggagtgtggtcccttcactgtttcgttcccagctcagggcagtgtggtcccttcactgttttgttcccagctcagaggagtgtggtcccttcactgttttgttcccagctcagggcagtgtggtcccttcactgttttgttcccagctcagaggagtgtggtcccttcactgtttcgttcccagctcagggcagtgtggtcccttcactgttttgttcccagctcagaggagtgtggtcccttcactgtttcgttcccagctcagggcagtgtggtcccttcactgtttcgttcccagctcagaggagtgtggtcccttcactgttttgttcccagctcagaggagtgtggtcccttcactgttttgttcccagctcagaggagtgtggtcccttcactgtttcattcccagctcaggggactgtggtcccttcactgtttcgttcccagctcaggggagtgtggtcccttcactgttgcgttaggccaggctcttccttctccaaattccacgtcttccatgagtgtgggtaataaatgcctcatggaactgctttgagccttaattgacgtaaaaaatactggctttggagttccagagcgcagggcgagtgtgggcctgtagtggcctgtaggagcactgggggcttgtcatggctggggcagcggaggtgtgtccatctcagccaccctcatctgtgtgctggtgctctctccataggtgtggtggccgagcctggagcctgtgctgctctgccggtggaggagacactgccagagcccgctgccccgggaactgcagaagctacaagaaggccggcagtttgccagcgagtacgtgtgggtggtgagatggggtgtgcccgcccagatgcacttcgggacctgctcaaggtcatctcctaaacaccctggcttgcttgagagaagcggtgtgggcagcctctcgtgtgagcagggagaaaagaaccgagttctcgtggtggtgggcgcctgtaatcccaactactggggaggccgaggcaggagaatcagttgaacccaggaggtggagtttccagtgagccgagatcactccaacggccaatagagcaagactctgtcca

SEQ ID NO: 11976 - DNA, 726 bp, Homo sapiens
ctctgacaagcgggtggagcgtggctgccagccttcagagacagagggagctgctaatgtacaaacggatcctcctccgcctgccttcgtctgtcctctgcggcagcagcttccaggcagaacagcccatcactgccagatgcgagcagttcttccacttggtcaactctgagatgagaaacttctgctcccacggaggtgccctgacacaggacatcactgcccacttcttcaggggcctcctgaacgcctgtctgcggagcagagacccctccctgatggtcgacttcatactggccaagtgccagacgaaatgccccttaattttgacctctgctctggtgtggtggccgagcctggagcctgtgctgctctgccggtggaggagacactgccagagcccgctgccccgggaactgcagaagctacaagaaggccggcagtttgccagcgagtacgtgtgggtggtgagatggggtgtgcccgcccagatgcacttcgggacctgctcaaggtcatctcctaaacaccctggcttgcttgagagaagcggtgtgggcagcctctcgtgtgagcagggagaaaagaaccgagttctcgtggtggtgggcgcctgtaatcccaactactggggaggccgaggcaggagaatcagttgaacccaggaggtggagtttccagtgagccgagatcactccaacggccaatagagcaagactctgtcca

SEQ ID NO: 11977 - DNA, 4186 bp, Homo sapiens
atctaggggctgctgggaagatggcggactcggtggctagccgatgaggaggccgcggggggaacccggcccccgggccccgagaccgactgagggagcgacctgcgcagggcccggggagtcatgtaggggtggcgcctgcggggagggctgcgggagggcagcgggagctggtgttagcggcagcggccacggtctcctggcgtccctgggccggggtgggtgttggggcccccgacttcgccgactccgcgccatcgcaaagcggtgcactcgggctccacgcgcgccctgcgaggtgggcgctgcgttttcatttcacgggtgaggagacttagagagacgaagccacttgtccaaggtcacgccgctggtgagtgggagcgcccagcatggaacccagcaccgtccagccgcggagcccgcgttccaccctctgtgccgccgccgcctcctgtgggagagggaggtggtcgggagagtgcacgccggtgccgcctgggctccagactgggcgcgaccactaacccggttaatgacctcgggcttaacttaaccccttcgctgctctgggcctgcgtttctccaccggtgaaatgaggtaatgccagccctgcctactcttcatgggcgtgtaaggagcatcagagatggtgcatgtggaattgctttgcaagtagtgctgcgctgagcgcactgaggattatgattgctgtttcaaaggcgtggaaggaggcagaggggcggggtggggaagaggcccagagcagtcacaaaggcttgctctgaccacaggccccctaaatgaggagtgaggtaagcagtaggtagcaggtctttctcccctttggagaaaacctcacccccttttttgggctgcccctcagggtctccatcacccaactccatgcttcgagtcctgctctctgctcagacctcccctgctcggctgtctggcctgctgctgatccctccagtacagccctgctgtttggggcccagcaaatggggggaccggcctgttggaggaggccccagtgcaggtcctgtgcaaggactgcagcggcttctggaacaggcgaagagccctggggagctgctgcgctggctgggccagaaccccagcaaggtgcgcgcccaccactactcggtggcgcttcgtcgtctgggccagctcttggggtctcggccacggccccctcctgtggagcaggtcacactgcaggacttgagtcagctcatcatccgaaactgcccctcctttgacattcacaccatccacgtgtgtctgcaccttgcagtcttacttggtgaggaggggcttgaggtgggcgcctggggggctaggtgttaatgaagaatagggagaacagtagaggaccacggacagagacccagcctctcaggcgtttgcccaggaacgcttgctcctgctcccgtcctatgtctgcggcagacatcatgagtcgaacgcactccttccggcctcgctagggtgccaccccagattcctgctaatagagtgccctaggaagccaccataatttgtcacaattggtatgagatgaaagcctatttgccatctttgtatgtactccctacaaaccgtttcgatacctcatagccacatgatactttacatgtctctagtgtttgcacttaaactctagcacaccttcccgctcaggaaacgggagaggagaaaggtggagaattcaccaagtaaccccatgataagaacagcagcacagctctgttaccaggctgccttttacctctccccctcaggctttccatctgatggtcccctggtgtgtgccctggaacaggagcgaaggctccgcctccctccgaagccacctccccctttgcagccccttctccgaggtgggcaagggttggaagctgctctaagctgcccccgttttctgcggtatccacggcagcatctgatcagcagcctggcaggtgctggagggggttaaaatcagatgggggtggggagggctgacaggaggaggaaggtgggctcagttggctgggctgaggtggaattgagccagccggaggtccggctgaggcccagcgtgacaggctgctcttcacagaggcaaggccagaggaactgactccccacgtgatggtgctcctggcccagcacctggcccggcaccggttgcgggagccccagcttctggaagccattgcccacttcctggtggttcaggaaacgcaactcagcagcaaggtgggcttgccacccaccctccagtgcatctctgtcattctcagggaccttgtcaggcccagcgcctcgtgcagctcggctatccttttcctgaagcagacacaccctctctgtcccctgggacctgcatcttttctacaccctttctgtggcttgcccacctcctgtcagcagcatgcattcctggaaatctgcagtttcccaaagcactcttagcagcatcctagctccacccatccctctcgaagtcttcagggccagaccccacagcgatgtcccctctgcctgtctggtgattagtcacgtgcagctcgtgactgctttgctgttgaactgtgaggccggagggactgtcctgtctttacagcagtgttgtaaacctgagggctaagcctctctaaggcttagcttgtaaaagatgactgcagaaatacttgacactgggtaatgaactgctcttcctccacaggtggtacagaagttggtcctgccctttgggcgactgaactacctgcccctggaacagcagtttatgccctgccttgagaggatcctggctcgggaagcaggggtggcacccctggctacagtcaacatcttgatgtcactgtgccaactgcggtgcctgcccttcagagccctgcactttgttttttcccctggcttcatcaactacatcagtggtacgcagccaggatggctggctgggcccctgagggctggagaggcaggggagcagggtggcctgcagcccagagccccagtccccgcctccccacaggcacccctcatgctctgattgtgcgtcgctacctctccctgctggacacggccgtggagctggagctcccaggataccggggtccccgccttccccgaaggcagcaagtgcccatctttccccagcctctcatcaccgaccgtgcccgctgcaagtacaggtggatggggcagcctggggcaaggggaggggccagcctgggaccagcagagtggaaaagccagagggaccatgaagcgccaaagctaaggagctctcggccaccataaaactgggccctgaagcagcagagggctttgcccagggtggtggcactagactgggacagattaggatgaggtgccgggcccttcctgctactggtgtcctttctcctcagtcacaaggacatagtagctgaggggttgcgccagctgctgggggaggagaaataccgccaggacctgactgtgcctccaggctactgcacaggtgagcaaggggcaggcggcaggcccggggagacggagccctggctaaggccgccggccctgctcccctccagacttcctgctgtgcgccagcagctctggtgctgtgcttcccgtgaggacccaggaccccttcctgccatacccaccaaggtcctgcccacagggccaggctgcctctagcgccactactcgagaccctgcccagaggtaaaggaggcagggtgggggagccctggccaccttgcccgccatgccctgagccacgtccctccccctgcagggtggtgctggtgttgcgggaacgctggcatttctgccgggacggccgggtgctgctgggctcgagggccctgagggagcggcacctaggcctgatgggctaccagctcctgccggtgagtggccctggcctggcccgtggcgcatcctcactcccagcctgcgggtaacctgccgccctctcctctccccacagctacccttcgaggaactggagtcccagagaggcctgccccagctcaagagctacctgaggcagaagctccaggccctgggcctgcgctgggggcctgaagggggctgaggggttgatgtggggttcaggatggcccccccatggggggtggatgatttgcactttggttccctgtgttttgatttctcattaaagttcctttccttccc

SEQ ID NO: 11978 - DNA, 1794 bp, Homo sapiens
atctaggggctgctgggaagatggcggactcggtggctagccgatgaggaggccgcggggggaacccggcccccgggccccgagaccgactgagggagcgacctgcgcagggcccggggagtcatggtctccatcacccaactccatgcttcgagtcctgctctctgctcagacctcccctgctcggctgtctggcctgctgctgatccctccagtacagccctgctgtttggggcccagcaaatggggggaccggcctgttggaggaggccccagtgcaggtcctgtgcaaggactgcagcggcttctggaacaggcgaagagccctggggagctgctgcgctggctgggccagaaccccagcaaggtgcgcgcccaccactactcggtggcgcttcgtcgtctgggccagctcttggggtctcggccacggccccctcctgtggagcaggtcacactgcaggacttgagtcagctcatcatccgaaactgcccctcctttgacattcacaccatccacgtgtgtctgcaccttgcagtcttacttggctttccatctgatggtcccctggtgtgtgccctggaacaggagcgaaggctccgcctccctccgaagccacctccccctttgcagccccttctccgaggtgggcaagggttggaagctgctctaagctgcccccgttttctgcggtatccacggcagcatctgatcagcagcctggcagaggcaaggccagaggaactgactccccacgtgatggtgctcctggcccagcacctggcccggcaccggttgcgggagccccagcttctggaagccattgcccacttcctggtggttcaggaaacgcaactcagcagcaaggtggtacagaagttggtcctgccctttgggcgactgaactacctgcccctggaacagcagtttatgccctgccttgagaggatcctggctcgggaagcaggggtggcacccctggctacagtcaacatcttgatgtcactgtgccaactgcggtgcctgcccttcagagccctgcactttgttttttcccctggcttcatcaactacatcagtggcacccctcatgctctgattgtgcgtcgctacctctccctgctggacacggccgtggagctggagctcccaggataccggggtccccgccttccccgaaggcagcaagtgcccatctttccccagcctctcatcaccgaccgtgcccgctgcaagtacagtcacaaggacatagtagctgaggggttgcgccagctgctgggggaggagaaataccgccaggacctgactgtgcctccaggctactgcacagacttcctgctgtgcgccagcagctctggtgctgtgcttcccgtgaggacccaggaccccttcctgccatacccaccaaggtcctgcccacagggccaggctgcctctagcgccactactcgagaccctgcccagagggtggtgctggtgttgcgggaacgctggcatttctgccgggacggccgggtgctgctgggctcgagggccctgagggagcggcacctaggcctgatgggctaccagctcctgccgctacccttcgaggaactggagtcccagagaggcctgccccagctcaagagctacctgaggcagaagctccaggccctgggcctgcgctgggggcctgaagggggctgaggggttgatgtggggttcaggatggcccccccatggggggtggatgatttgcactttggttccctgtgttttgatttctcattaaagttcctttccttccc

SEQ ID NO: 11979 - DNA, 4217 bp, Homo sapiens
gatagctgcttcgggattggcgtccgggcggctatctaggggctgctgggaagatggcggactcggtggctagccgatgaggaggccgcggggggaacccggcccccgggccccgagaccgactgagggagcgacctgcgcagggcccggggagtcatgtaggggtggcgcctgcggggagggctgcgggagggcagcgggagctggtgttagcggcagcggccacggtctcctggcgtccctgggccggggtgggtgttggggcccccgacttcgccgactccgcgccatcgcaaagcggtgcactcgggctccacgcgcgccctgcgaggtgggcgctgcgttttcatttcacgggtgaggagacttagagagacgaagccacttgtccaaggtcacgccgctggtgagtgggagcgcccagcatggaacccagcaccgtccagccgcggagcccgcgttccaccctctgtgccgccgccgcctcctgtgggagagggaggtggtcgggagagtgcacgccggtgccgcctgggctccagactgggcgcgaccactaacccggttaatgacctcgggcttaacttaaccccttcgctgctctgggcctgcgtttctccaccggtgaaatgaggtaatgccagccctgcctactcttcatgggcgtgtaaggagcatcagagatggtgcatgtggaattgctttgcaagtagtgctgcgctgagcgcactgaggattatgattgctgtttcaaaggcgtggaaggaggcagaggggcggggtggggaagaggcccagagcagtcacaaaggcttgctctgaccacaggccccctaaatgaggagtgaggtaagcagtaggtagcaggtctttctcccctttggagaaaacctcacccccttttttgggctgcccctcagggtctccatcacccaactccatgcttcgagtcctgctctctgctcagacctcccctgctcggctgtctggcctgctgctgatccctccagtacagccctgctgtttggggcccagcaaatggggggaccggcctgttggaggaggccccagtgcaggtcctgtgcaaggactgcagcggcttctggaacaggcgaagagccctggggagctgctgcgctggctgggccagaaccccagcaaggtgcgcgcccaccactactcggtggcgcttcgtcgtctgggccagctcttggggtctcggccacggccccctcctgtggagcaggtcacactgcaggacttgagtcagctcatcatccgaaactgcccctcctttgacattcacaccatccacgtgtgtctgcaccttgcagtcttacttggtgaggaggggcttgaggtgggcgcctggggggctaggtgttaatgaagaatagggagaacagtagaggaccacggacagagacccagcctctcaggcgtttgcccaggaacgcttgctcctgctcccgtcctatgtctgcggcagacatcatgagtcgaacgcactccttccggcctcgctagggtgccaccccagattcctgctaatagagtgccctaggaagccaccataatttgtcacaattggtatgagatgaaagcctatttgccatctttgtatgtactccctacaaaccgtttcgatacctcatagccacatgatactttacatgtctctagtgtttgcacttaaactctagcacaccttcccgctcaggaaacgggagaggagaaaggtggagaattcaccaagtaaccccatgataagaacagcagcacagctctgttaccaggctgccttttacctctccccctcaggctttccatctgatggtcccctggtgtgtgccctggaacaggagcgaaggctccgcctccctccgaagccacctccccctttgcagccccttctccgaggtgggcaagggttggaagctgctctaagctgcccccgttttctgcggtatccacggcagcatctgatcagcagcctggcaggtgctggagggggttaaaatcagatgggggtggggagggctgacaggaggaggaaggtgggctcagttggctgggctgaggtggaattgagccagccggaggtccggctgaggcccagcgtgacaggctgctcttcacagaggcaaggccagaggaactgactccccacgtgatggtgctcctggcccagcacctggcccggcaccggttgcgggagccccagcttctggaagccattgcccacttcctggtggttcaggaaacgcaactcagcagcaaggtgggcttgccacccaccctccagtgcatctctgtcattctcagggaccttgtcaggcccagcgcctcgtgcagctcggctatccttttcctgaagcagacacaccctctctgtcccctgggacctgcatcttttctacaccctttctgtggcttgcccacctcctgtcagcagcatgcattcctggaaatctgcagtttcccaaagcactcttagcagcatcctagctccacccatccctctcgaagtcttcagggccagaccccacagcgatgtcccctctgcctgtctggtgattagtcacgtgcagctcgtgactgctttgctgttgaactgtgaggccggagggactgtcctgtctttacagcagtgttgtaaacctgagggctaagcctctctaaggcttagcttgtaaaagatgactgcagaaatacttgacactgggtaatgaactgctcttcctccacaggtggtacagaagttggtcctgccctttgggcgactgaactacctgcccctggaacagcagtttatgccctgccttgagaggatcctggctcgggaagcaggggtggcacccctggctacagtcaacatcttgatgtcactgtgccaactgcggtgcctgcccttcagagccctgcactttgttttttcccctggcttcatcaactacatcagtggtacgcagccaggatggctggctgggcccctgagggctggagaggcaggggagcagggtggcctgcagcccagagccccagtccccgcctccccacaggcacccctcatgctctgattgtgcgtcgctacctctccctgctggacacggccgtggagctggagctcccaggataccggggtccccgccttccccgaaggcagcaagtgcccatctttccccagcctctcatcaccgaccgtgcccgctgcaagtacaggtggatggggcagcctggggcaaggggaggggccagcctgggaccagcagagtggaaaagccagagggaccatgaagcgccaaagctaaggagctctcggccaccataaaactgggccctgaagcagcagagggctttgcccagggtggtggcactagactgggacagattaggatgaggtgccgggcccttcctgctactggtgtcctttctcctcagtcacaaggacatagtagctgaggggttgcgccagctgctgggggaggagaaataccgccaggacctgactgtgcctccaggctactgcacaggtgagcaaggggcaggcggcaggcccggggagacggagccctggctaaggccgccggccctgctcccctccagacttcctgctgtgcgccagcagctctggtgctgtgcttcccgtgaggacccaggaccccttcctgccatacccaccaaggtcctgcccacagggccaggctgcctctagcgccactactcgagaccctgcccagaggtaaaggaggcagggtgggggagccctggccaccttgcccgccatgccctgagccacgtccctccccctgcagggtggtgctggtgttgcgggaacgctggcatttctgccgggacggccgggtgctgctgggctcgagggccctgagggagcggcacctaggcctgatgggctaccagctcctgccggtgagtggccctggcctggcccgtggcgcatcctcactcccagcctgcgggtaacctgccgccctctcctctccccacagctacccttcgaggaactggagtcccagagaggcctgccccagctcaagagctacctgaggcagaagctccaggccctgggcctgcgctgggggcctgaagggggctgaggggttgatgtggggttcaggatggcccccccatggggggtggatgatttgcactttggttccctgtgttttgatttctcattaaagttcctttccttc

SEQ ID NO: 11980 - DNA, 1402 bp, Homo sapiens
gatagctgcttcgggattggcgtccgggcggctatctaggggctgctgggaagatggcggactcggtggctagccgatgaggaggccgcggggggaacccggcccccgggccccgagaccgactgagggagcgacctgcgcagggcccggggagtcatgctttccatctgatggtcccctggtgtgtgccctggaacaggagcgaaggctccgcctccctccgaagccacctccccctttgcagccccttctccgaggtgggcaagggttggaagctgctctaagctgcccccgttttctgcggtatccacggcagcatctgatcagcagcctggcagaggcaaggccagaggaactgactccccacgtgatggtgctcctggcccagcacctggcccggcaccggttgcgggagccccagcttctggaagccattgcccacttcctggtggttcaggaaacgcaactcagcagcaaggtggtacagaagttggtcctgccctttgggcgactgaactacctgcccctggaacagcagtttatgccctgccttgagaggatcctggctcgggaagcaggggtggcacccctggctacagtcaacatcttgatgtcactgtgccaactgcggtgcctgcccttcagagccctgcactttgttttttcccctggcttcatcaactacatcagtggcacccctcatgctctgattgtgcgtcgctacctctccctgctggacacggccgtggagctggagctcccaggataccggggtccccgccttccccgaaggcagcaagtgcccatctttccccagcctctcatcaccgaccgtgcccgctgcaagtacagtcacaaggacatagtagctgaggggttgcgccagctgctgggggaggagaaataccgccaggacctgactgtgcctccaggctactgcacagacttcctgctgtgcgccagcagctctggtgctgtgcttcccgtgaggacccaggaccccttcctgccatacccaccaaggtcctgcccacagggccaggctgcctctagcgccactactcgagaccctgcccagagggtggtgctggtgttgcgggaacgctggcatttctgccgggacggccgggtgctgctgggctcgagggccctgagggagcggcacctaggcctgatgggctaccagctcctgccgctacccttcgaggaactggagtcccagagaggcctgccccagctcaagagctacctgaggcagaagctccaggccctgggcctgcgctgggggcctgaagggggctgaggggttgatgtggggttcaggatggcccccccatggggggtggatgatttgcactttggttccctgtgttttgatttctcattaaagttcctttccttc

SEQ ID NO: 11981 - DNA, 522 bp, Homo sapiens
aaactgggccctgaagcagcagagggctttgcccagggtggtggcactagactgggacagattaggatgaggtgccgggcccttcctgctactggtgtcctttctcctcagtcacaaggacatagtagctgaggggttgcgccagctgctgggggaggagaaataccgccaggacctgactgtgcctccaggctactgcacaggtgagcaaggggcaggcggcaggcccggggagacggagccctggctaaggccgccggccctgctcccctccagacttcctgctgtgcgccagcagctctggtgctgtgcttcccgtgaggacccaggaccccttcctgccatacccaccaaggtcctgcccacagggccaggctgcctctagcgccactactcgagaccctgcccagaggtaaaggaggcagggtgggggagccctggccaccttgcccgccatgccctgagccacgtccctccccctgcagggtggtgctggtgttgcgggaacgctggcatttctgc

SEQ ID NO: 11982 - DNA, 449 bp, Homo sapiens
aaactgggccctgaagcagcagagggctttgcccagggtggtggcactagactgggacagattaggatgaggtgccgggcccttcctgctactggtgtcctttctcctcagtcacaaggacatagtagctgaggggttgcgccagctgctgggggaggagaaataccgccaggacctgactgtgcctccaggctactgcacaggtgagcaaggggcaggcggcaggcccggggagacggagccctggctaaggccgccggccctgctcccctccagacttcctgctgtgcgccagcagctctggtgctgtgcttcccgtgaggacccaggaccccttcctgccatacccaccaaggtcctgcccacagggccaggctgcctctagcgccactactcgagaccctgcccagagggtggtgctggtgttgcgggaacgctggcatttctgc

SEQ ID NO: 11983 - DNA, 4238 bp, Homo sapiens
ccgggagccacgtctccgaagaccgatagctgcttcgggattggcgtccgggcggctatctaggggctgctgggaagatggcggactcggtggctagccgatgaggaggccgcggggggaacccggcccccgggccccgagaccgactgagggagcgacctgcgcagggcccggggagtcatgtaggggtggcgcctgcggggagggctgcgggagggcagcgggagctggtgttagcggcagcggccacggtctcctggcgtccctgggccggggtgggtgttggggcccccgacttcgccgactccgcgccatcgcaaagcggtgcactcgggctccacgcgcgccctgcgaggtgggcgctgcgttttcatttcacgggtgaggagacttagagagacgaagccacttgtccaaggtcacgccgctggtgagtgggagcgcccagcatggaacccagcaccgtccagccgcggagcccgcgttccaccctctgtgccgccgccgcctcctgtgggagagggaggtggtcgggagagtgcacgccggtgccgcctgggctccagactgggcgcgaccactaacccggttaatgacctcgggcttaacttaaccccttcgctgctctgggcctgcgtttctccaccggtgaaatgaggtaatgccagccctgcctactcttcatgggcgtgtaaggagcatcagagatggtgcatgtggaattgctttgcaagtagtgctgcgctgagcgcactgaggattatgattgctgtttcaaaggcgtggaaggaggcagaggggcggggtggggaagaggcccagagcagtcacaaaggcttgctctgaccacaggccccctaaatgaggagtgaggtaagcagtaggtagcaggtctttctcccctttggagaaaacctcacccccttttttgggctgcccctcagggtctccatcacccaactccatgcttcgagtcctgctctctgctcagacctcccctgctcggctgtctggcctgctgctgatccctccagtacagccctgctgtttggggcccagcaaatggggggaccggcctgttggaggaggccccagtgcaggtcctgtgcaaggactgcagcggcttctggaacaggcgaagagccctggggagctgctgcgctggctgggccagaaccccagcaaggtgcgcgcccaccactactcggtggcgcttcgtcgtctgggccagctcttggggtctcggccacggccccctcctgtggagcaggtcacactgcaggacttgagtcagctcatcatccgaaactgcccctcctttgacattcacaccatccacgtgtgtctgcaccttgcagtcttacttggtgaggaggggcttgaggtgggcgcctggggggctaggtgttaatgaagaatagggagaacagtagaggaccacggacagagacccagcctctcaggcgtttgcccaggaacgcttgctcctgctcccgtcctatgtctgcggcagacatcatgagtcgaacgcactccttccggcctcgctagggtgccaccccagattcctgctaatagagtgccctaggaagccaccataatttgtcacaattggtatgagatgaaagcctatttgccatctttgtatgtactccctacaaaccgtttcgatacctcatagccacatgatactttacatgtctctagtgtttgcacttaaactctagcacaccttcccgctcaggaaacgggagaggagaaaggtggagaattcaccaagtaaccccatgataagaacagcagcacagctctgttaccaggctgccttttacctctccccctcaggctttccatctgatggtcccctggtgtgtgccctggaacaggagcgaaggctccgcctccctccgaagccacctccccctttgcagccccttctccgaggtgggcaagggttggaagctgctctaagctgcccccgttttctgcggtatccacggcagcatctgatcagcagcctggcaggtgctggagggggttaaaatcagatgggggtggggagggctgacaggaggaggaaggtgggctcagttggctgggctgaggtggaattgagccagccggaggtccggctgaggcccagcgtgacaggctgctcttcacagaggcaaggccagaggaactgactccccacgtgatggtgctcctggcccagcacctggcccggcaccggttgcgggagccccagcttctggaagccattgcccacttcctggtggttcaggaaacgcaactcagcagcaaggtgggcttgccacccaccctccagtgcatctctgtcattctcagggaccttgtcaggcccagcgcctcgtgcagctcggctatccttttcctgaagcagacacaccctctctgtcccctgggacctgcatcttttctacaccctttctgtggcttgcccacctcctgtcagcagcatgcattcctggaaatctgcagtttcccaaagcactcttagcagcatcctagctccacccatccctctcgaagtcttcagggccagaccccacagcgatgtcccctctgcctgtctggtgattagtcacgtgcagctcgtgactgctttgctgttgaactgtgaggccggagggactgtcctgtctttacagcagtgttgtaaacctgagggctaagcctctctaaggcttagcttgtaaaagatgactgcagaaatacttgacactgggtaatgaactgctcttcctccacaggtggtacagaagttggtcctgccctttgggcgactgaactacctgcccctggaacagcagtttatgccctgccttgagaggatcctggctcgggaagcaggggtggcacccctggctacagtcaacatcttgatgtcactgtgccaactgcggtgcctgcccttcagagccctgcactttgttttttcccctggcttcatcaactacatcagtggtacgcagccaggatggctggctgggcccctgagggctggagaggcaggggagcagggtggcctgcagcccagagccccagtccccgcctccccacaggcacccctcatgctctgattgtgcgtcgctacctctccctgctggacacggccgtggagctggagctcccaggataccggggtccccgccttccccgaaggcagcaagtgcccatctttccccagcctctcatcaccgaccgtgcccgctgcaagtacaggtggatggggcagcctggggcaaggggaggggccagcctgggaccagcagagtggaaaagccagagggaccatgaagcgccaaagctaaggagctctcggccaccataaaactgggccctgaagcagcagagggctttgcccagggtggtggcactagactgggacagattaggatgaggtgccgggcccttcctgctactggtgtcctttctcctcagtcacaaggacatagtagctgaggggttgcgccagctgctgggggaggagaaataccgccaggacctgactgtgcctccaggctactgcacaggtgagcaaggggcaggcggcaggcccggggagacggagccctggctaaggccgccggccctgctcccctccagacttcctgctgtgcgccagcagctctggtgctgtgcttcccgtgaggacccaggaccccttcctgccatacccaccaaggtcctgcccacagggccaggctgcctctagcgccactactcgagaccctgcccagaggtaaaggaggcagggtgggggagccctggccaccttgcccgccatgccctgagccacgtccctccccctgcagggtggtgctggtgttgcgggaacgctggcatttctgccgggacggccgggtgctgctgggctcgagggccctgagggagcggcacctaggcctgatgggctaccagctcctgccggtgagtggccctggcctggcccgtggcgcatcctcactcccagcctgcgggtaacctgccgccctctcctctccccacagctacccttcgaggaactggagtcccagagaggcctgccccagctcaagagctacctgaggcagaagctccaggccctgggcctgcgctgggggcctgaagggggctgaggggttgatgtggggttcaggatggcccccccatggggggtggatgatttgcactttggttccctgtgttttgatttctcattaaagttcctttcc

SEQ ID NO: 11984 - DNA, 1521 bp, Homo sapiens
ccgggagccacgtctccgaagaccgatagctgcttcgggattggcgtccgggcggctatctaggggctgctgggaagatggcggactcggtggctagccgatgaggaggccgcggggggaacccggcccccgggccccgagaccgactgagggagcgacctgcgcagggcccggggagtcatgctttccatctgatggtcccctggtgtgtgccctggaacaggagcgaaggctccgcctccctccgaagccacctccccctttgcagccccttctccgaggtgggcaagggttggaagctgctctaagctgcccccgttttctgcggtatccacggcagcatctgatcagcagcctggcagaggcaaggccagaggaactgactccccacgtgatggtgctcctggcccagcacctggcccggcaccggttgcgggagccccagcttctggaagccattgcccacttcctggtggttcaggaaacgcaactcagcagcaaggtggtacagaagttggtcctgccctttgggcgactgaactacctgcccctggaacagcagtttatgccctgccttgagaggatcctggctcgggaagcaggggtggcacccctggctacagtcaacatcttgatgtcactgtgccaactgcggtgcctgcccttcagagccctgcactttgttttttcccctggcttcatcaactacatcagtggtacgcagccaggatggctggctgggcccctgagggctggagaggcaggggagcagggtggcctgcagcccagagccccagtccccgcctccccacaggcacccctcatgctctgattgtgcgtcgctacctctccctgctggacacggccgtggagctggagctcccaggataccggggtccccgccttccccgaaggcagcaagtgcccatctttccccagcctctcatcaccgaccgtgcccgctgcaagtacagtcacaaggacatagtagctgaggggttgcgccagctgctgggggaggagaaataccgccaggacctgactgtgcctccaggctactgcacagacttcctgctgtgcgccagcagctctggtgctgtgcttcccgtgaggacccaggaccccttcctgccatacccaccaaggtcctgcccacagggccaggctgcctctagcgccactactcgagaccctgcccagagggtggtgctggtgttgcgggaacgctggcatttctgccgggacggccgggtgctgctgggctcgagggccctgagggagcggcacctaggcctgatgggctaccagctcctgccgctacccttcgaggaactggagtcccagagaggcctgccccagctcaagagctacctgaggcagaagctccaggccctgggcctgcgctgggggcctgaagggggctgaggggttgatgtggggttcaggatggcccccccatggggggtggatgatttgcactttggttccctgtgttttgatttctcattaaagttcctttcc

SEQ ID NO: 11985 - DNA, 3075 bp, Homo sapiens
gaccgatagctgcttcgggattggcgtccgggcggctatctaggggctgctgggaagatggcggactcggtggctagccgatgaggaggccgcggggggaacccggcccccgggccccgagaccgactgagggagcgacctgcgcagggcccggggagtcatgtaggggtggcgcctgcggggagggctgcgggagggcagcgggagctggtgttagcggcagcggccacggtctcctggcgtccctgggccggggtgggtgttggggcccccgacttcgccgactccgcgccatcgcaaagcggtgcactcgggctccacgcgcgccctgcgaggtgggcgctgcgttttcatttcacgggtgaggagacttagagagacgaagccacttgtccaaggtcacgccgctggtgagtgggagcgcccagcatggaacccagcaccgtccagccgcggagcccgcgttccaccctctgtgccgccgccgcctcctgtgggagagggaggtggtcgggagagtgcacgccggtgccgcctgggctccagactgggcgcgaccactaacccggttaatgacctcgggcttaacttaaccccttcgctgctctgggcctgcgtttctccaccggtgaaatgaggtaatgccagccctgcctactcttcatgggcgtgtaaggagcatcagagatggtgcatgtggaattgctttgcaagtagtgctgcgctgagcgcactgaggattatgattgctgtttcaaaggcgtggaaggaggcagaggggcggggtggggaagaggcccagagcagtcacaaaggcttgctctgaccacaggccccctaaatgaggagtgaggtaagcagtaggtagcaggtctttctcccctttggagaaaacctcacccccttttttgggctgcccctcagggtctccatcacccaactccatgcttcgagtcctgctctctgctcagacctcccctgctcggctgtctggcctgctgctgatccctccagtacagccctgctgtttggggcccagcaaatggggggaccggcctgttggaggaggccccagtgcaggtcctgtgcaaggactgcagcggcttctggaacaggcgaagagccctggggagctgctgcgctggctgggccagaaccccagcaaggtgcgcgcccaccactactcggtggcgcttcgtcgtctgggccagctcttggggtctcggccacggccccctcctgtggagcaggtcacactgcaggacttgagtcagctcatcatccgaaactgcccctcctttgacattcacaccatccacgtgtgtctgcaccttgcagtcttacttggtgaggaggggcttgaggtgggcgcctggggggctaggtgttaatgaagaatagggagaacagtagaggaccacggacagagacccagcctctcaggcgtttgcccaggaacgcttgctcctgctcccgtcctatgtctgcggcagacatcatgagtcgaacgcactccttccggcctcgctagggtgccaccccagattcctgctaatagagtgccctaggaagccaccataatttgtcacaattggtatgagatgaaagcctatttgccatctttgtatgtactccctacaaaccgtttcgatacctcatagccacatgatactttacatgtctctagtgtttgcacttaaactctagcacaccttcccgctcaggaaacgggagaggagaaaggtggagaattcaccaagtaaccccatgataagaacagcagcacagctctgttaccaggctgccttttacctctccccctcaggctttccatctgatggtcccctggtgtgtgccctggaacaggagcgaaggctccgcctccctccgaagccacctccccctttgcagccccttctccgaggtgggcaagggttggaagctgctctaagctgcccccgttttctgcggtatccacggcagcatctgatcagcagcctggcaggtgctggagggggttaaaatcagatgggggtggggagggctgacaggaggaggaaggtgggctcagttggctgggctgaggtggaattgagccagccggaggtccggctgaggcccagcgtgacaggctgctcttcacagaggcaaggccagaggaactgactccccacgtgatggtgctcctggcccagcacctggcccggcaccggttgcgggagccccagcttctggaagccattgcccacttcctggtggttcaggaaacgcaactcagcagcaaggtgggcttgccacccaccctccagtgcatctctgtcattctcagggaccttgtcaggcccagcgcctcgtgcagctcggctatccttttcctgaagcagacacaccctctctgtcccctgggacctgcatcttttctacaccctttctgtggcttgcccacctcctgtcagcagcatgcattcctggaaatctgcagtttcccaaagcactcttagcagcatcctagctccacccatccctctcgaagtcttcagggccagaccccacagcgatgtcccctctgcctgtctggtgattagtcacgtgcagctcgtgactgctttgctgttgaactgtgaggccggagggactgtcctgtctttacagcagtgttgtaaacctgagggctaagcctctctaaggcttagcttgtaaaagatgactgcagaaatacttgacactgggtaatgaactgctcttcctccacaggtggtacagaagttggtcctgccctttgggcgactgaactacctgcccctggaacagcagtttatgccctgccttgagaggatcctggctcgggaagcaggggtggcacccctggctacagtcaacatcttgatgtcactgtgccaactgcggtgcctgcccttcagagccctgcactttgttttttcccctggcttcatcaactacatcagtggtacgcagccaggatggctggctgggcccctgagggctggagaggcaggggagcagggtggcctgcagcccagagccccagtccccgcctccccacaggcacccctc

SEQ ID NO: 11986 - DNA, 720 bp, Homo sapiens
gaccgatagctgcttcgggattggcgtccgggcggctatctaggggctgctgggaagatggcggactcggtggctagccgatgaggaggccgcggggggaacccggcccccgggccccgagaccgactgagggagcgacctgcgcagggcccggggagtcatgctttccatctgatggtcccctggtgtgtgccctggaacaggagcgaaggctccgcctccctccgaagccacctccccctttgcagccccttctccgaggcaaggccagaggaactgactccccacgtgatggtgctcctggcccagcacctggcccggcaccggttgcgggagccccagcttctggaagccattgcccacttcctggtggttcaggaaacgcaactcagcagcaaggtggtacagaagttggtcctgccctttgggcgactgaactacctgcccctggaacagcagtttatgccctgccttgagaggatcctggctcgggaagcaggggtggcacccctggctacagtcaacatcttgatgtcactgtgccaactgcggtgcctgcccttcagagccctgcactttgttttttcccctggcttcatcaactacatcagtggtacgcagccaggatggctggctgggcccctgagggctggagaggcaggggagcagggtggcctgcagcccagagccccagtccccgcctccccacaggcacccctc

SEQ ID NO: 11987 - DNA, 530 bp, Homo sapiens
cctgcccacagggccaggctgcctctagcgccactactcgagaccctgcccagaggtaaaggaggcagggtgggggagccctggccaccttgcccgccatgccctgagccacgtccctccccctgcagggtggtgctggtgttgcgggaacgctggcatttctgccgggacggccgggtgctgctgggctcgagggccctgagggagcggcacctaggcctgatgggctaccagctcctgccggtgagtggccctggcctggcccgtggcgcatcctcactcccagcctgcgggtaacctgccgccctctcctctccccacagctacccttcgaggaactggagtcccagagaggcctgccccagctcaagagctacctgaggcagaagctccaggccctgggcctgcgctgggggcctgaagggggctgaggggttgatgtggggttcaggatggcccccccatggggggtggatgatttgcactttggttccctgtgttttgatttctcattaaagttcctttccttc

SEQ ID NO: 11988 - DNA, 457 bp, Homo sapiens
cctgcccacagggccaggctgcctctagcgccactactcgagaccctgcccagagggtggtgctggtgttgcgggaacgctggcatttctgccgggacggccgggtgctgctgggctcgagggccctgagggagcggcacctaggcctgatgggctaccagctcctgccggtgagtggccctggcctggcccgtggcgcatcctcactcccagcctgcgggtaacctgccgccctctcctctccccacagctacccttcgaggaactggagtcccagagaggcctgccccagctcaagagctacctgaggcagaagctccaggccctgggcctgcgctgggggcctgaagggggctgaggggttgatgtggggttcaggatggcccccccatggggggtggatgatttgcactttggttccctgtgttttgatttctcattaaagttcctttccttc

SEQ ID NO: 11989 - DNA, 2664 bp, Homo sapiens
ctgctcccgtcctatgtctgcggcagacatcatgagtcgaacgcactccttccggcctcgctagggtgccaccccagattcctgctaatagagtgccctaggaagccaccataatttgtcacaattggtatgagatgaaagcctatttgccatctttgtatgtactccctacaaaccgtttcgatacctcatagccacatgatactttacatgtctctagtgtttgcacttaaactctagcacaccttcccgctcaggaaacgggagaggagaaaggtggagaattcaccaagtaaccccatgataagaacagcagcacagctctgttaccaggctgccttttacctctccccctcaggctttccatctgatggtcccctggtgtgtgccctggaacaggagcgaaggctccgcctccctccgaagccacctccccctttgcagccccttctccgaggtgggcaagggttggaagctgctctaagctgcccccgttttctgcggtatccacggcagcatctgatcagcagcctggcaggtgctggagggggttaaaatcagatgggggtggggagggctgacaggaggaggaaggtgggctcagttggctgggctgaggtggaattgagccagccggaggtccggctgaggcccagcgtgacaggctgctcttcacagaggcaaggccagaggaactgactccccacgtgatggtgctcctggcccagcacctggcccggcaccggttgcgggagccccagcttctggaagccattgcccacttcctggtggttcaggaaacgcaactcagcagcaaggtgggcttgccacccaccctccagtgcatctctgtcattctcagggaccttgtcaggcccagcgcctcgtgcagctcggctatccttttcctgaagcagacacaccctctctgtcccctgggacctgcatcttttctacaccctttctgtggcttgcccacctcctgtcagcagcatgcattcctggaaatctgcagtttcccaaagcactcttagcagcatcctagctccacccatccctctcgaagtcttcagggccagaccccacagcgatgtcccctctgcctgtctggtgattagtcacgtgcagctcgtgactgctttgctgttgaactgtgaggccggagggactgtcctgtctttacagcagtgttgtaaacctgagggctaagcctctctaaggcttagcttgtaaaagatgactgcagaaatacttgacactgggtaatgaactgctcttcctccacaggtggtacagaagttggtcctgccctttgggcgactgaactacctgcccctggaacagcagtttatgccctgccttgagaggatcctggctcgggaagcaggggtggcacccctggctacagtcaacatcttgatgtcactgtgccaactgcggtgcctgcccttcagagccctgcactttgttttttcccctggcttcatcaactacatcagtggtacgcagccaggatggctggctgggcccctgagggctggagaggcaggggagcagggtggcctgcagcccagagccccagtccccgcctccccacaggcacccctcatgctctgattgtgcgtcgctacctctccctgctggacacggccgtggagctggagctcccaggataccggggtccccgccttccccgaaggcagcaagtgcccatctttccccagcctctcatcaccgaccgtgcccgctgcaagtacaggtggatggggcagcctggggcaaggggaggggccagcctgggaccagcagagtggaaaagccagagggaccatgaagcgccaaagctaaggagctctcggccaccataaaactgggccctgaagcagcagagggctttgcccagggtggtggcactagactgggacagattaggatgaggtgccgggcccttcctgctactggtgtcctttctcctcagtcacaaggacatagtagctgaggggttgcgccagctgctgggggaggagaaataccgccaggacctgactgtgcctccaggctactgcacaggtgagcaaggggcaggcggcaggcccggggagacggagccctggctaaggccgccggccctgctcccctccagacttcctgctgtgcgccagcagctctggtgctgtgcttcccgtgaggacccaggaccccttcctgccatacccaccaaggtcctgcccacagggccaggctgcctctagcgccactactcgagaccctgcccagaggtaaaggaggcagggtgggggagccctggccaccttgcccgccatgccctgagccacgtccctccccctgcagggtggtgctggtgttgcgggaacgctggcatttctgccgggacggccgggtgctgctgggctcgagggccctgagggagcggcacctaggcctgatgggctaccagctcctgccggtgagtggccctggcctggcccgtggcgcatcctcactcccagcctgcgggtaacctgccgccctctcctctccccacagctacccttcgaggaactggagtcccagagaggcctgccccagctcaagagctacctgaggcagaagctccaggccctgggcctgcgctgggggcctgaagggggctgaggggttgat

SEQ ID NO: 11990 - DNA, 1894 bp, Homo sapiens
ctgctcccgtcctatgtctgcggcagacatcatgagtcgaacgcactccttccggcctcgctagggtgccaccccagattcctgctaatagagtgccctaggaagccaccataatttgtcacaattggtatgagatgaaagcctatttgccatctttgtatgtactccctacaaaccgtttcgatacctcatagccacatgatactttacatgtctctagtgtttgcacttaaactctagcacaccttcccgctcaggaaacgggagaggagaaaggtggagaattcaccaagtaaccccatgataagaacagcagcacagctctgttaccaggctgccttttacctctccccctcaggctttccatctgatggtcccctggtgtgtgccctggaacaggagcgaaggctccgcctccctccgaagccacctccccctttgcagccccttctccgagaggcaaggccagaggaactgactccccacgtgatggtgctcctggcccagcacctggcccggcaccggttgcgggagccccagcttctggaagccattgcccacttcctggtggttcaggaaacgcaactcagcagcaaggtggtacagaagttggtcctgccctttgggcgactgaactacctgcccctggaacagcagtttatgccctgccttgagaggatcctggctcgggaagcaggggtggcacccctggctacagtcaacatcttgatgtcactgtgccaactgcggtgcctgcccttcagagccctgcactttgttttttcccctggcttcatcaactacatcagtggtacgcagccaggatggctggctgggcccctgagggctggagaggcaggggagcagggtggcctgcagcccagagccccagtccccgcctccccacaggcacccctcatgctctgattgtgcgtcgctacctctccctgctggacacggccgtggagctggagctcccaggataccggggtccccgccttccccgaaggcagcaagtgcccatctttccccagcctctcatcaccgaccgtgcccgctgcaagtacaggtggatggggcagcctggggcaaggggaggggccagcctgggaccagcagagtggaaaagccagagggaccatgaagcgccaaagctaaggagctctcggccaccataaaactgggccctgaagcagcagagggctttgcccagggtggtggcactagactgggacagattaggatgaggtgccgggcccttcctgctactggtgtcctttctcctcagtcacaaggacatagtagctgaggggttgcgccagctgctgggggaggagaaataccgccaggacctgactgtgcctccaggctactgcacaggtgagcaaggggcaggcggcaggcccggggagacggagccctggctaaggccgccggccctgctcccctccagacttcctgctgtgcgccagcagctctggtgctgtgcttcccgtgaggacccaggaccccttcctgccatacccaccaaggtcctgcccacagggccaggctgcctctagcgccactactcgagaccctgcccagaggtaaaggaggcagggtgggggagccctggccaccttgcccgccatgccctgagccacgtccctccccctgcagggtggtgctggtgttgcgggaacgctggcatttctgccgggacggccgggtgctgctgggctcgagggccctgagggagcggcacctaggcctgatgggctaccagctcctgccgctacccttcgaggaactggagtcccagagaggcctgccccagctcaagagctacctgaggcagaagctccaggccctgggcctgcgctgggggcctgaagggggctgaggggttgat

SEQ ID NO: 11991 - DNA, 3871 bp, Homo sapiens
tcatttcacgggtgaggagacttagagagacgaagccacttgtccaaggtcacgccgctggtgagtgggagcgcccagcatggaacccagcaccgtccagccgcggagcccgcgttccaccctctgtgccgccgccgcctcctgtgggagagggaggtggtcgggagagtgcacgccggtgccgcctgggctccagactgggcgcgaccactaacccggttaatgacctcgggcttaacttaaccccttcgctgctctgggcctgcgtttctccaccggtgaaatgaggtaatgccagccctgcctactcttcatgggcgtgtaaggagcatcagagatggtgcatgtggaattgctttgcaagtagtgctgcgctgagcgcactgaggattatgattgctgtttcaaaggcgtggaaggaggcagaggggcggggtggggaagaggcccagagcagtcacaaaggcttgctctgaccacaggccccctaaatgaggagtgaggtaagcagtaggtagcaggtctttctcccctttggagaaaacctcacccccttttttgggctgcccctcagggtctccatcacccaactccatgcttcgagtcctgctctctgctcagacctcccctgctcggctgtctggcctgctgctgatccctccagtacagccctgctgtttggggcccagcaaatggggggaccggcctgttggaggaggccccagtgcaggtcctgtgcaaggactgcagcggcttctggaacaggcgaagagccctggggagctgctgcgctggctgggccagaaccccagcaaggtgcgcgcccaccactactcggtggcgcttcgtcgtctgggccagctcttggggtctcggccacggccccctcctgtggagcaggtcacactgcaggacttgagtcagctcatcatccgaaactgcccctcctttgacattcacaccatccacgtgtgtctgcaccttgcagtcttacttggtgaggaggggcttgaggtgggcgcctggggggctaggtgttaatgaagaatagggagaacagtagaggaccacggacagagacccagcctctcaggcgtttgcccaggaacgcttgctcctgctcccgtcctatgtctgcggcagacatcatgagtcgaacgcactccttccggcctcgctagggtgccaccccagattcctgctaatagagtgccctaggaagccaccataatttgtcacaattggtatgagatgaaagcctatttgccatctttgtatgtactccctacaaaccgtttcgatacctcatagccacatgatactttacatgtctctagtgtttgcacttaaactctagcacaccttcccgctcaggaaacgggagaggagaaaggtggagaattcaccaagtaaccccatgataagaacagcagcacagctctgttaccaggctgccttttacctctccccctcaggctttccatctgatggtcccctggtgtgtgccctggaacaggagcgaaggctccgcctccctccgaagccacctccccctttgcagccccttctccgaggtgggcaagggttggaagctgctctaagctgcccccgttttctgcggtatccacggcagcatctgatcagcagcctggcaggtgctggagggggttaaaatcagatgggggtggggagggctgacaggaggaggaaggtgggctcagttggctgggctgaggtggaattgagccagccggaggtccggctgaggcccagcgtgacaggctgctcttcacagaggcaaggccagaggaactgactccccacgtgatggtgctcctggcccagcacctggcccggcaccggttgcgggagccccagcttctggaagccattgcccacttcctggtggttcaggaaacgcaactcagcagcaaggtgggcttgccacccaccctccagtgcatctctgtcattctcagggaccttgtcaggcccagcgcctcgtgcagctcggctatccttttcctgaagcagacacaccctctctgtcccctgggacctgcatcttttctacaccctttctgtggcttgcccacctcctgtcagcagcatgcattcctggaaatctgcagtttcccaaagcactcttagcagcatcctagctccacccatccctctcgaagtcttcagggccagaccccacagcgatgtcccctctgcctgtctggtgattagtcacgtgcagctcgtgactgctttgctgttgaactgtgaggccggagggactgtcctgtctttacagcagtgttgtaaacctgagggctaagcctctctaaggcttagcttgtaaaagatgactgcagaaatacttgacactgggtaatgaactgctcttcctccacaggtggtacagaagttggtcctgccctttgggcgactgaactacctgcccctggaacagcagtttatgccctgccttgagaggatcctggctcgggaagcaggggtggcacccctggctacagtcaacatcttgatgtcactgtgccaactgcggtgcctgcccttcagagccctgcactttgttttttcccctggcttcatcaactacatcagtggtacgcagccaggatggctggctgggcccctgagggctggagaggcaggggagcagggtggcctgcagcccagagccccagtccccgcctccccacaggcacccctcatgctctgattgtgcgtcgctacctctccctgctggacacggccgtggagctggagctcccaggataccggggtccccgccttccccgaaggcagcaagtgcccatctttccccagcctctcatcaccgaccgtgcccgctgcaagtacaggtggatggggcagcctggggcaaggggaggggccagcctgggaccagcagagtggaaaagccagagggaccatgaagcgccaaagctaaggagctctcggccaccataaaactgggccctgaagcagcagagggctttgcccagggtggtggcactagactgggacagattaggatgaggtgccgggcccttcctgctactggtgtcctttctcctcagtcacaaggacatagtagctgaggggttgcgccagctgctgggggaggagaaataccgccaggacctgactgtgcctccaggctactgcacaggtgagcaaggggcaggcggcaggcccggggagacggagccctggctaaggccgccggccctgctcccctccagacttcctgctgtgcgccagcagctctggtgctgtgcttcccgtgaggacccaggaccccttcctgccatacccaccaaggtcctgcccacagggccaggctgcctctagcgccactactcgagaccctgcccagaggtaaaggaggcagggtgggggagccctggccaccttgcccgccatgccctgagccacgtccctccccctgcagggtggtgctggtgttgcgggaacgctggcatttctgccgggacggccgggtgctgctgggctcgagggccctgagggagcggcacctaggcctgatgggctaccagctcctgccggtgagtggccctggcctggcccgtggcgcatcctcactcccagcctgcgggtaacctgccgccctctcctctccccacagctacccttcgaggaactggagtcccagagaggcctgccccagctcaagagctacctgaggcagaagctccaggccctgggcctgcgctgggggcctgaagggggctgaggggttgatgtggggttcaggatggcccccccatggggggtggatgatttgcactttggttccctgtgttttgatttctcattaaagttcctttccttc

SEQ ID NO: 11992 - DNA, 3011 bp, Homo sapiens
tcatttcacgggtgaggagacttagagagacgaagccacttgtccaaggtcacgccgctggtgagtgggagcgcccagcatggaacccagcaccgtccagccgcggagcccgcgttccaccctctgtgccgccgccgcctcctgtgggagagggaggtggtcgggagagtgcacgccggtgccgcctgggctccagactgggcgcgaccactaacccggttaatgacctcgggcttaacttaaccccttcgctgctctgggcctgcgtttctccaccggtgaaatgaggtaatgccagccctgcctactcttcatgggcgtgtaaggagcatcagagatggtgcatgtggaattgctttgcaagtagtgctgcgctgagcgcactgaggattatgattgctgtttcaaaggcgtggaaggaggcagaggggcggggtggggaagaggcccagagcagtcacaaaggcttgctctgaccacaggccccctaaatgaggagtgaggtaagcagtaggtagcaggtctttctcccctttggagaaaacctcacccccttttttgggctgcccctcagggtctccatcacccaactccatgcttcgagtcctgctctctgctcagacctcccctgctcggctgtctggcctgctgctgatccctccagtacagccctgctgtttggggcccagcaaatggggggaccggcctgttggaggaggccccagtgcaggtcctgtgcaaggactgcagcggcttctggaacaggcgaagagccctggggagctgctgcgctggctgggccagaaccccagcaaggtgcgcgcccaccactactcggtggcgcttcgtcgtctgggccagctcttggggtctcggccacggccccctcctgtggagcaggtcacactgcaggacttgagtcagctcatcatccgaaactgcccctcctttgacattcacaccatccacgtgtgtctgcaccttgcagtcttacttggtgaggaggggcttgaggtgggcgcctggggggctaggtgttaatgaagaatagggagaacagtagaggaccacggacagagacccagcctctcaggcgtttgcccaggaacgcttgctcctgctcccgtcctatgtctgcggcagacatcatgagtcgaacgcactccttccggcctcgctagggtgccaccccagattcctgctaatagagtgccctaggaagccaccataatttgtcacaattggtatgagatgaaagcctatttgccatctttgtatgtactccctacaaaccgtttcgatacctcatagccacatgatactttacatgtctctagtgtttgcacttaaactctagcacaccttcccgctcaggaaacgggagaggagaaaggtggagaattcaccaagtaaccccatgataagaacagcagcacagctctgttaccaggctgccttttacctctccccctcaggctttccatctgatggtcccctggtgtgtgccctggaacaggagcgaaggctccgcctccctccgaagccacctccccctttgcagccccttctccgaggtgggcaagggttggaagctgctctaagctgcccccgttttctgcggtatccacggcagcatctgatcagcagcctggcagaggcaaggccagaggaactgactccccacgtgatggtgctcctggcccagcacctggcccggcaccggttgcgggagccccagcttctggaagccattgcccacttcctggtggttcaggaaacgcaactcagcagcaaggtggtacagaagttggtcctgccctttgggcgactgaactacctgcccctggaacagcagtttatgccctgccttgagaggatcctggctcgggaagcaggggtggcacccctggctacagtcaacatcttgatgtcactgtgccaactgcggtgcctgcccttcagagccctgcactttgttttttcccctggcttcatcaactacatcagtggcacccctcatgctctgattgtgcgtcgctacctctccctgctggacacggccgtggagctggagctcccaggataccggggtccccgccttccccgaaggcagcaagtgcccatctttccccagcctctcatcaccgaccgtgcccgctgcaagtacaggtggatggggcagcctggggcaaggggaggggccagcctgggaccagcagagtggaaaagccagagggaccatgaagcgccaaagctaaggagctctcggccaccataaaactgggccctgaagcagcagagggctttgcccagggtggtggcactagactgggacagattaggatgaggtgccgggcccttcctgctactggtgtcctttctcctcagtcacaaggacatagtagctgaggggttgcgccagctgctgggggaggagaaataccgccaggacctgactgtgcctccaggctactgcacagacttcctgctgtgcgccagcagctctggtgctgtgcttcccgtgaggacccaggaccccttcctgccatacccaccaaggtcctgcccacagggccaggctgcctctagcgccactactcgagaccctgcccagaggtaaaggaggcagggtgggggagccctggccaccttgcccgccatgccctgagccacgtccctccccctgcagggtggtgctggtgttgcgggaacgctggcatttctgccgggacggccgggtgctgctgggctcgagggccctgagggagcggcacctaggcctgatgggctaccagctcctgccgctacccttcgaggaactggagtcccagagaggcctgccccagctcaagagctacctgaggcagaagctccaggccctgggcctgcgctgggggcctgaagggggctgaggggttgatgtggggttcaggatggcccccccatggggggtggatgatttgcactttggttccctgtgttttgatttctcattaaagttcctttccttc

SEQ ID NO: 11993 - DNA, 2691 bp, Homo sapiens
ccggcctcgctagggtgccaccccagattcctgctaatagagtgccctaggaagccaccataatttgtcacaattggtatgagatgaaagcctatttgccatctttgtatgtactccctacaaaccgtttcgatacctcatagccacatgatactttacatgtctctagtgtttgcacttaaactctagcacaccttcccgctcaggaaacgggagaggagaaaggtggagaattcaccaagtaaccccatgataagaacagcagcacagctctgttaccaggctgccttttacctctccccctcaggctttccatctgatggtcccctggtgtgtgccctggaacaggagcgaaggctccgcctccctccgaagccacctccccctttgcagccccttctccgaggtgggcaagggttggaagctgctctaagctgcccccgttttctgcggtatccacggcagcatctgatcagcagcctggcaggtgctggagggggttaaaatcagatgggggtggggagggctgacaggaggaggaaggtgggctcagttggctgggctgaggtggaattgagccagccggaggtccggctgaggcccagcgtgacaggctgctcttcacagaggcaaggccagaggaactgactccccacgtgatggtgctcctggcccagcacctggcccggcaccggttgcgggagccccagcttctggaagccattgcccacttcctggtggttcaggaaacgcaactcagcagcaaggtgggcttgccacccaccctccagtgcatctctgtcattctcagggaccttgtcaggcccagcgcctcgtgcagctcggctatccttttcctgaagcagacacaccctctctgtcccctgggacctgcatcttttctacaccctttctgtggcttgcccacctcctgtcagcagcatgcattcctggaaatctgcagtttcccaaagcactcttagcagcatcctagctccacccatccctctcgaagtcttcagggccagaccccacagcgatgtcccctctgcctgtctggtgattagtcacgtgcagctcgtgactgctttgctgttgaactgtgaggccggagggactgtcctgtctttacagcagtgttgtaaacctgagggctaagcctctctaaggcttagcttgtaaaagatgactgcagaaatacttgacactgggtaatgaactgctcttcctccacaggtggtacagaagttggtcctgccctttgggcgactgaactacctgcccctggaacagcagtttatgccctgccttgagaggatcctggctcgggaagcaggggtggcacccctggctacagtcaacatcttgatgtcactgtgccaactgcggtgcctgcccttcagagccctgcactttgttttttcccctggcttcatcaactacatcagtggtacgcagccaggatggctggctgggcccctgagggctggagaggcaggggagcagggtggcctgcagcccagagccccagtccccgcctccccacaggcacccctcatgctctgattgtgcgtcgctacctctccctgctggacacggccgtggagctggagctcccaggataccggggtccccgccttccccgaaggcagcaagtgcccatctttccccagcctctcatcaccgaccgtgcccgctgcaagtacaggtggatggggcagcctggggcaaggggaggggccagcctgggaccagcagagtggaaaagccagagggaccatgaagcgccaaagctaaggagctctcggccaccataaaactgggccctgaagcagcagagggctttgcccagggtggtggcactagactgggacagattaggatgaggtgccgggcccttcctgctactggtgtcctttctcctcagtcacaaggacatagtagctgaggggttgcgccagctgctgggggaggagaaataccgccaggacctgactgtgcctccaggctactgcacaggtgagcaaggggcaggcggcaggcccggggagacggagccctggctaaggccgccggccctgctcccctccagacttcctgctgtgcgccagcagctctggtgctgtgcttcccgtgaggacccaggaccccttcctgccatacccaccaaggtcctgcccacagggccaggctgcctctagcgccactactcgagaccctgcccagaggtaaaggaggcagggtgggggagccctggccaccttgcccgccatgccctgagccacgtccctccccctgcagggtggtgctggtgttgcgggaacgctggcatttctgccgggacggccgggtgctgctgggctcgagggccctgagggagcggcacctaggcctgatgggctaccagctcctgccggtgagtggccctggcctggcccgtggcgcatcctcactcccagcctgcgggtaacctgccgccctctcctctccccacagctacccttcgaggaactggagtcccagagaggcctgccccagctcaagagctacctgaggcagaagctccaggccctgggcctgcgctgggggcctgaagggggctgaggggttgatgtggggttcaggatggcccccccatggggggtggatgatttgcactttggttccctgtgttttgatttctcattaaag

SEQ ID NO: 11994 - DNA, 1904 bp, Homo sapiens
ccggcctcgctagggtgccaccccagattcctgctaatagagtgccctaggaagccaccataatttgtcacaattggtatgagatgaaagcctatttgccatctttgtatgtactccctacaaaccgtttcgatacctcatagccacatgatactttacatgtctctagtgtttgcacttaaactctagcacaccttcccgctcaggaaacgggagaggagaaaggtggagaattcaccaagtaaccccatgataagaacagcagcacagctctgttaccaggctgccttttacctctccccctcaggctttccatctgatggtcccctggtgtgtgccctggaacaggagcgaaggctccgcctccctccgaagccacctccccctttgcagccccttctccgaggtgggcaagggttggaagctgctctaagctgcccccgttttctgcggtatccacggcagcatctgatcagcagcctggcagaggcaaggccagaggaactgactccccacgtgatggtgctcctggcccagcacctggcccggcaccggttgcgggagccccagcttctggaagccattgcccacttcctggtggttcaggaaacgcaactcagcagcaaggtggtacagaagttggtcctgccctttgggcgactgaactacctgcccctggaacagcagtttatgccctgccttgagaggatcctggctcgggaagcaggggtggcacccctggctacagtcaacatcttgatgtcactgtgccaactgcggtgcctgcccttcagagccctgcactttgttttttcccctggcttcatcaactacatcagtggcacccctcatgctctgattgtgcgtcgctacctctccctgctggacacggccgtggagctggagctcccaggataccggggtccccgccttccccgaaggcagcaagtgcccatctttccccagcctctcatcaccgaccgtgcccgctgcaagtacaggtggatggggcagcctggggcaaggggaggggccagcctgggaccagcagagtggaaaagccagagggaccatgaagcgccaaagctaaggagctctcggccaccataaaactgggccctgaagcagcagagggctttgcccagggtggtggcactagactgggacagattaggatgaggtgccgggcccttcctgctactggtgtcctttctcctcagtcacaaggacatagtagctgaggggttgcgccagctgctgggggaggagaaataccgccaggacctgactgtgcctccaggctactgcacaggtgagcaaggggcaggcggcaggcccggggagacggagccctggctaaggccgccggccctgctcccctccagacttcctgctgtgcgccagcagctctggtgctgtgcttcccgtgaggacccaggaccccttcctgccatacccaccaaggtcctgcccacagggccaggctgcctctagcgccactactcgagaccctgcccagaggtaaaggaggcagggtgggggagccctggccaccttgcccgccatgccctgagccacgtccctccccctgcagggtggtgctggtgttgcgggaacgctggcatttctgccgggacggccgggtgctgctgggctcgagggccctgagggagcggcacctaggcctgatgggctaccagctcctgccgctacccttcgaggaactggagtcccagagaggcctgccccagctcaagagctacctgaggcagaagctccaggccctgggcctgcgctgggggcctgaagggggctgaggggttgatgtggggttcaggatggcccccccatggggggtggatgatttgcactttggttccctgtgttttgatttctcattaaag

SEQ ID NO: 11995 - DNA, 2233 bp, Homo sapiens
gcccctcagggtctccatcacccaactccatgcttcgagtcctgctctctgctcagacctcccctgctcggctgtctggcctgctgctgatccctccagtacagccctgctgtttggggcccagcaaatggggggaccggcctgttggaggaggccccagtgcaggtcctgtgcaaggactgcagcggcttctggaacaggcgaagagccctggggagctgctgcgctggctgggccagaaccccagcaaggtgcgcgcccaccactactcggtggcgcttcgtcgtctgggccagctcttggggtctcggccacggccccctcctgtggagcaggtcacactgcaggacttgagtcagctcatcatccgaaactgcccctcctttgacattcacaccatccacgtgtgtctgcaccttgcagtcttacttggtgaggaggggcttgaggtgggcgcctggggggctaggtgttaatgaagaatagggagaacagtagaggaccacggacagagacccagcctctcaggcgtttgcccaggaacgcttgctcctgctcccgtcctatgtctgcggcagacatcatgagtcgaacgcactccttccggcctcgctagggtgccaccccagattcctgctaatagagtgccctaggaagccaccataatttgtcacaattggtatgagatgaaagcctatttgccatctttgtatgtactccctacaaaccgtttcgatacctcatagccacatgatactttacatgtctctagtgtttgcacttaaactctagcacaccttcccgctcaggaaacgggagaggagaaaggtggagaattcaccaagtaaccccatgataagaacagcagcacagctctgttaccaggctgccttttacctctccccctcaggctttccatctgatggtcccctggtgtgtgccctggaacaggagcgaaggctccgcctccctccgaagccacctccccctttgcagccccttctccgaggtgggcaagggttggaagctgctctaagctgcccccgttttctgcggtatccacggcagcatctgatcagcagcctggcaggtgctggagggggttaaaatcagatgggggtggggagggctgacaggaggaggaaggtgggctcagttggctgggctgaggtggaattgagccagccggaggtccggctgaggcccagcgtgacaggctgctcttcacagaggcaaggccagaggaactgactccccacgtgatggtgctcctggcccagcacctggcccggcaccggttgcgggagccccagcttctggaagccattgcccacttcctggtggttcaggaaacgcaactcagcagcaaggtgggcttgccacccaccctccagtgcatctctgtcattctcagggaccttgtcaggcccagcgcctcgtgcagctcggctatccttttcctgaagcagacacaccctctctgtcccctgggacctgcatcttttctacaccctttctgtggcttgcccacctcctgtcagcagcatgcattcctggaaatctgcagtttcccaaagcactcttagcagcatcctagctccacccatccctctcgaagtcttcagggccagaccccacagcgatgtcccctctgcctgtctggtgattagtcacgtgcagctcgtgactgctttgctgttgaactgtgaggccggagggactgtcctgtctttacagcagtgttgtaaacctgagggctaagcctctctaaggcttagcttgtaaaagatgactgcagaaatacttgacactgggtaatgaactgctcttcctccacaggtggtacagaagttggtcctgccctttgggcgactgaactacctgcccctggaacagcagtttatgccctgccttgagaggatcctggctcgggaagcaggggtggcacccctggctacagtcaacatcttgatgtcactgtgccaactgcggtgcctgcccttcagagccctgcactttgttttttcccctggcttcatcaactacatcagtggtacgcagccaggatggctggctgggcccctgagggctggagaggcaggggagcagggtggcctgcagcccagagccccagtccccgcctccccacaggcacccctcatgctctgattgtgcgtcgctacctctccctgctggacacggccgtggagctggagctcccaggataccgggg

SEQ ID NO: 11996 - DNA, 826 bp, Homo sapiens
gcccctcagggtctccatcacccaactccatgcttcgagtcctgctctctgctcagacctcccctgctcggctgtctggcctgctgctgatccctccagtacagccctgctgtttggggcccagcaaatggggggaccggcctgttggaggaggccccagtgcaggtcctgtgcaaggactgcagcggcttctggaacaggcgaagagccctggggagctgctgcgctggctgggccagaaccccagcaaggtgcgcgcccaccactactcggtggcgcttcgtcgtctgggccagctcttggggtctcggccacggccccctcctgtggagcaggtcacactgcaggacttgagtcagctcatcatccgaaactgcccctcctttgacattcacaccatccacgtgtgtctgcaccttgcagtcttacttggtggtacagaagttggtcctgccctttgggcgactgaactacctgcccctggaacagcagtttatgccctgccttgagaggatcctggctcgggaagcaggggtggcacccctggctacagtcaacatcttgatgtcactgtgccaactgcggtgcctgcccttcagagccctgcactttgttttttcccctggcttcatcaactacatcagtggtacgcagccaggatggctggctgggcccctgagggctggagaggcaggggagcagggtggcctgcagcccagagccccagtccccgcctccccacaggcacccctcatgctctgattgtgcgtcgctacctctccctgctggacacggccgtggagctggagctcccaggataccgggg

SEQ ID NO: 11997 - DNA, 1175 bp, Homo sapiens
caggctgccttttacctctccccctcaggctttccatctgatggtcccctggtgtgtgccctggaacaggagcgaaggctccgcctccctccgaagccacctccccctttgcagccccttctccgaggtgggcaagggttggaagctgctctaagctgcccccgttttctgcggtatccacggcagcatctgatcagcagcctggcaggtgctggagggggttaaaatcagatgggggtggggagggctgacaggaggaggaaggtgggctcagttggctgggctgaggtggaattgagccagccggaggtccggctgaggcccagcgtgacaggctgctcttcacagaggcaaggccagaggaactgactccccacgtgatggtgctcctggcccagcacctggcccggcaccggttgcgggagccccagcttctggaagccattgcccacttcctggtggttcaggaaacgcaactcagcagcaaggtgggcttgccacccaccctccagtgcatctctgtcattctcagggaccttgtcaggcccagcgcctcgtgcagctcggctatccttttcctgaagcagacacaccctctctgtcccctgggacctgcatcttttctacaccctttctgtggcttgcccacctcctgtcagcagcatgcattcctggaaatctgcagtttcccaaagcactcttagcagcatcctagctccacccatccctctcgaagtcttcagggccagaccccacagcgatgtcccctctgcctgtctggtgattagtcacgtgcagctcgtgactgctttgctgttgaactgtgaggccggagggactgtcctgtctttacagcagtgttgtaaacctgagggctaagcctctctaaggcttagcttgtaaaagatgactgcagaaatacttgacactgggtaatgaactgctcttcctccacaggtggtacagaagttggtcctgccctttgggcgactgaactacctgcccctggaacagcagtttatgccctgccttgagaggatcctggctcgggaagcaggggtggcacccctggctacagtcaacatcttgatgtcactgtgccaactgcggtgcctgcccttcagagccctgcactttgttttttcccctggcttcatcaactacatcagtggtac

SEQ ID NO: 11998 - DNA, 706 bp, Homo sapiens
caggctgccttttacctctccccctcaggctttccatctgatggtcccctggtgtgtgccctggaacaggagcgaaggctccgcctccctccgaagccacctccccctttgcagccccttctccgaggtgggcaagggttggaagctgctctaagctgcccccgttttctgcggtatccacggcagcatctgatcagcagcctggcaggtgctggagggggttaaaatcagatgggggtggggagggctgacaggaggaggaaggtgggctcagttggctgggctgaggtggaattgagccagccggaggtccggctgaggcccagcgtgacaggctgctcttcacagaggcaaggccagaggaactgactccccacgtgatggtgctcctggcccagcacctggcccggcaccggttgcgggagccccagcttctggaagccattgcccacttcctggtggttcaggaaacgcaactcagcagcaaggtggtacagaagttggtcctgccctttgggcgactgaactacctgcccctggaacagcagtttatgccctgccttgagaggatcctggctcgggaagcaggggtggcacccctggctacagtcaacatcttgatgtcactgtgccaactgcggtgcctgcccttcagagccctgcactttgttttttcccctggcttcatcaactacatcagtggtac

SEQ ID NO: 11999 - DNA, 4237 bp, Homo sapiens
gagccacgtctccgaagaccgatagctgcttcgggattggcgtccgggcggctatctaggggctgctgggaagatggcggactcggtggctagccgatgaggaggccgcggggggaacccggcccccgggccccgagaccgactgagggagcgacctgcgcagggcccggggagtcatgtaggggtggcgcctgcggggagggctgcgggagggcagcgggagctggtgttagcggcagcggccacggtctcctggcgtccctgggccggggtgggtgttggggcccccgacttcgccgactccgcgccatcgcaaagcggtgcactcgggctccacgcgcgccctgcgaggtgggcgctgcgttttcatttcacgggtgaggagacttagagagacgaagccacttgtccaaggtcacgccgctggtgagtgggagcgcccagcatggaacccagcaccgtccagccgcggagcccgcgttccaccctctgtgccgccgccgcctcctgtgggagagggaggtggtcgggagagtgcacgccggtgccgcctgggctccagactgggcgcgaccactaacccggttaatgacctcgggcttaacttaaccccttcgctgctctgggcctgcgtttctccaccggtgaaatgaggtaatgccagccctgcctactcttcatgggcgtgtaaggagcatcagagatggtgcatgtggaattgctttgcaagtagtgctgcgctgagcgcactgaggattatgattgctgtttcaaaggcgtggaaggaggcagaggggcggggtggggaagaggcccagagcagtcacaaaggcttgctctgaccacaggccccctaaatgaggagtgaggtaagcagtaggtagcaggtctttctcccctttggagaaaacctcacccccttttttgggctgcccctcagggtctccatcacccaactccatgcttcgagtcctgctctctgctcagacctcccctgctcggctgtctggcctgctgctgatccctccagtacagccctgctgtttggggcccagcaaatggggggaccggcctgttggaggaggccccagtgcaggtcctgtgcaaggactgcagcggcttctggaacaggcgaagagccctggggagctgctgcgctggctgggccagaaccccagcaaggtgcgcgcccaccactactcggtggcgcttcgtcgtctgggccagctcttggggtctcggccacggccccctcctgtggagcaggtcacactgcaggacttgagtcagctcatcatccgaaactgcccctcctttgacattcacaccatccacgtgtgtctgcaccttgcagtcttacttggtgaggaggggcttgaggtgggcgcctggggggctaggtgttaatgaagaatagggagaacagtagaggaccacggacagagacccagcctctcaggcgtttgcccaggaacgcttgctcctgctcccgtcctatgtctgcggcagacatcatgagtcgaacgcactccttccggcctcgctagggtgccaccccagattcctgctaatagagtgccctaggaagccaccataatttgtcacaattggtatgagatgaaagcctatttgccatctttgtatgtactccctacaaaccgtttcgatacctcatagccacatgatactttacatgtctctagtgtttgcacttaaactctagcacaccttcccgctcaggaaacgggagaggagaaaggtggagaattcaccaagtaaccccatgataagaacagcagcacagctctgttaccaggctgccttttacctctccccctcaggctttccatctgatggtcccctggtgtgtgccctggaacaggagcgaaggctccgcctccctccgaagccacctccccctttgcagccccttctccgaggtgggcaagggttggaagctgctctaagctgcccccgttttctgcggtatccacggcagcatctgatcagcagcctggcaggtgctggagggggttaaaatcagatgggggtggggagggctgacaggaggaggaaggtgggctcagttggctgggctgaggtggaattgagccagccggaggtccggctgaggcccagcgtgacaggctgctcttcacagaggcaaggccagaggaactgactccccacgtgatggtgctcctggcccagcacctggcccggcaccggttgcgggagccccagcttctggaagccattgcccacttcctggtggttcaggaaacgcaactcagcagcaaggtgggcttgccacccaccctccagtgcatctctgtcattctcagggaccttgtcaggcccagcgcctcgtgcagctcggctatccttttcctgaagcagacacaccctctctgtcccctgggacctgcatcttttctacaccctttctgtggcttgcccacctcctgtcagcagcatgcattcctggaaatctgcagtttcccaaagcactcttagcagcatcctagctccacccatccctctcgaagtcttcagggccagaccccacagcgatgtcccctctgcctgtctggtgattagtcacgtgcagctcgtgactgctttgctgttgaactgtgaggccggagggactgtcctgtctttacagcagtgttgtaaacctgagggctaagcctctctaaggcttagcttgtaaaagatgactgcagaaatacttgacactgggtaatgaactgctcttcctccacaggtggtacagaagttggtcctgccctttgggcgactgaactacctgcccctggaacagcagtttatgccctgccttgagaggatcctggctcgggaagcaggggtggcacccctggctacagtcaacatcttgatgtcactgtgccaactgcggtgcctgcccttcagagccctgcactttgttttttcccctggcttcatcaactacatcagtggtacgcagccaggatggctggctgggcccctgagggctggagaggcaggggagcagggtggcctgcagcccagagccccagtccccgcctccccacaggcacccctcatgctctgattgtgcgtcgctacctctccctgctggacacggccgtggagctggagctcccaggataccggggtccccgccttccccgaaggcagcaagtgcccatctttccccagcctctcatcaccgaccgtgcccgctgcaagtacaggtggatggggcagcctggggcaaggggaggggccagcctgggaccagcagagtggaaaagccagagggaccatgaagcgccaaagctaaggagctctcggccaccataaaactgggccctgaagcagcagagggctttgcccagggtggtggcactagactgggacagattaggatgaggtgccgggcccttcctgctactggtgtcctttctcctcagtcacaaggacatagtagctgaggggttgcgccagctgctgggggaggagaaataccgccaggacctgactgtgcctccaggctactgcacaggtgagcaaggggcaggcggcaggcccggggagacggagccctggctaaggccgccggccctgctcccctccagacttcctgctgtgcgccagcagctctggtgctgtgcttcccgtgaggacccaggaccccttcctgccatacccaccaaggtcctgcccacagggccaggctgcctctagcgccactactcgagaccctgcccagaggtaaaggaggcagggtgggggagccctggccaccttgcccgccatgccctgagccacgtccctccccctgcagggtggtgctggtgttgcgggaacgctggcatttctgccgggacggccgggtgctgctgggctcgagggccctgagggagcggcacctaggcctgatgggctaccagctcctgccggtgagtggccctggcctggcccgtggcgcatcctcactcccagcctgcgggtaacctgccgccctctcctctccccacagctacccttcgaggaactggagtcccagagaggcctgccccagctcaagagctacctgaggcagaagctccaggccctgggcctgcgctgggggcctgaagggggctgaggggttgatgtggggttcaggatggcccccccatggggggtggatgatttgcactttggttccctgtgttttgatttctcattaaagttcctttccttc

SEQ ID NO: 12000 - DNA, 1764 bp, Homo sapiens
gagccacgtctccgaagaccgatagctgcttcgggattggcgtccgggcggctatctaggggctgctgggaagatggcggactcggtggctagccgatgaggaggccgcggggggaacccggcccccgggccccgagaccgactgagggagcgacctgcgcagggcccggggagtcatggtctccatcacccaactccatgcttcgagtcctgctctctgctcagacctcccctgctcggctgtctggcctgctgctgatccctccagtacagccctgctgtttggggcccagcaaatggggggaccggcctgttggaggaggccccagtgcaggtcctgtgcaaggactgcagcggcttctggaacaggcgaagagccctggggagctgctgcgctggctgggccagaaccccagcaaggtgcgcgcccaccactactcggtggcgcttcgtcgtctgggccagctcttggggtctcggccacggccccctcctgtggagcaggtcacactgcaggacttgagtcagctcatcatccgaaactgcccctcctttgacattcacaccatccacgtgtgtctgcaccttgcagtcttacttggctttccatctgatggtcccctggtgtgtgccctggaacaggagcgaaggctccgcctccctccgaagccacctccccctttgcagccccttctccgagaggcaaggccagaggaactgactccccacgtgatggtgctcctggcccagcacctggcccggcaccggttgcgggagccccagcttctggaagccattgcccacttcctggtggttcaggaaacgcaactcagcagcaaggtggtacagaagttggtcctgccctttgggcgactgaactacctgcccctggaacagcagtttatgccctgccttgagaggatcctggctcgggaagcaggggtggcacccctggctacagtcaacatcttgatgtcactgtgccaactgcggtgcctgcccttcagagccctgcactttgttttttcccctggcttcatcaactacatcagtggcacccctcatgctctgattgtgcgtcgctacctctccctgctggacacggccgtggagctggagctcccaggataccggggtccccgccttccccgaaggcagcaagtgcccatctttccccagcctctcatcaccgaccgtgcccgctgcaagtacagtcacaaggacatagtagctgaggggttgcgccagctgctgggggaggagaaataccgccaggacctgactgtgcctccaggctactgcacagacttcctgctgtgcgccagcagctctggtgctgtgcttcccgtgaggacccaggaccccttcctgccatacccaccaaggtcctgcccacagggccaggctgcctctagcgccactactcgagaccctgcccagagggtggtgctggtgttgcgggaacgctggcatttctgccgggacggccgggtgctgctgggctcgagggccctgagggagcggcacctaggcctgatgggctaccagctcctgccgctacccttcgaggaactggagtcccagagaggcctgccccagctcaagagctacctgaggcagaagctccaggccctgggcctgcgctgggggcctgaagggggctgaggggttgatgtggggttcaggatggcccccccatggggggtggatgatttgcactttggttccctgtgttttgatttctcattaaagttcctttccttc

SEQ ID NO: 12001 - DNA, 4145 bp, Homo sapiens
gatggcggactcggtggctagccgatgaggaggccgcggggggaacccggcccccgggccccgagaccgactgagggagcgacctgcgcagggcccggggagtcatgtaggggtggcgcctgcggggagggctgcgggagggcagcgggagctggtgttagcggcagcggccacggtctcctggcgtccctgggccggggtgggtgttggggcccccgacttcgccgactccgcgccatcgcaaagcggtgcactcgggctccacgcgcgccctgcgaggtgggcgctgcgttttcatttcacgggtgaggagacttagagagacgaagccacttgtccaaggtcacgccgctggtgagtgggagcgcccagcatggaacccagcaccgtccagccgcggagcccgcgttccaccctctgtgccgccgccgcctcctgtgggagagggaggtggtcgggagagtgcacgccggtgccgcctgggctccagactgggcgcgaccactaacccggttaatgacctcgggcttaacttaaccccttcgctgctctgggcctgcgtttctccaccggtgaaatgaggtaatgccagccctgcctactcttcatgggcgtgtaaggagcatcagagatggtgcatgtggaattgctttgcaagtagtgctgcgctgagcgcactgaggattatgattgctgtttcaaaggcgtggaaggaggcagaggggcggggtggggaagaggcccagagcagtcacaaaggcttgctctgaccacaggccccctaaatgaggagtgaggtaagcagtaggtagcaggtctttctcccctttggagaaaacctcacccccttttttgggctgcccctcagggtctccatcacccaactccatgcttcgagtcctgctctctgctcagacctcccctgctcggctgtctggcctgctgctgatccctccagtacagccctgctgtttggggcccagcaaatggggggaccggcctgttggaggaggccccagtgcaggtcctgtgcaaggactgcagcggcttctggaacaggcgaagagccctggggagctgctgcgctggctgggccagaaccccagcaaggtgcgcgcccaccactactcggtggcgcttcgtcgtctgggccagctcttggggtctcggccacggccccctcctgtggagcaggtcacactgcaggacttgagtcagctcatcatccgaaactgcccctcctttgacattcacaccatccacgtgtgtctgcaccttgcagtcttacttggtgaggaggggcttgaggtgggcgcctggggggctaggtgttaatgaagaatagggagaacagtagaggaccacggacagagacccagcctctcaggcgtttgcccaggaacgcttgctcctgctcccgtcctatgtctgcggcagacatcatgagtcgaacgcactccttccggcctcgctagggtgccaccccagattcctgctaatagagtgccctaggaagccaccataatttgtcacaattggtatgagatgaaagcctatttgccatctttgtatgtactccctacaaaccgtttcgatacctcatagccacatgatactttacatgtctctagtgtttgcacttaaactctagcacaccttcccgctcaggaaacgggagaggagaaaggtggagaattcaccaagtaaccccatgataagaacagcagcacagctctgttaccaggctgccttttacctctccccctcaggctttccatctgatggtcccctggtgtgtgccctggaacaggagcgaaggctccgcctccctccgaagccacctccccctttgcagccccttctccgaggtgggcaagggttggaagctgctctaagctgcccccgttttctgcggtatccacggcagcatctgatcagcagcctggcaggtgctggagggggttaaaatcagatgggggtggggagggctgacaggaggaggaaggtgggctcagttggctgggctgaggtggaattgagccagccggaggtccggctgaggcccagcgtgacaggctgctcttcacagaggcaaggccagaggaactgactccccacgtgatggtgctcctggcccagcacctggcccggcaccggttgcgggagccccagcttctggaagccattgcccacttcctggtggttcaggaaacgcaactcagcagcaaggtgggcttgccacccaccctccagtgcatctctgtcattctcagggaccttgtcaggcccagcgcctcgtgcagctcggctatccttttcctgaagcagacacaccctctctgtcccctgggacctgcatcttttctacaccctttctgtggcttgcccacctcctgtcagcagcatgcattcctggaaatctgcagtttcccaaagcactcttagcagcatcctagctccacccatccctctcgaagtcttcagggccagaccccacagcgatgtcccctctgcctgtctggtgattagtcacgtgcagctcgtgactgctttgctgttgaactgtgaggccggagggactgtcctgtctttacagcagtgttgtaaacctgagggctaagcctctctaaggcttagcttgtaaaagatgactgcagaaatacttgacactgggtaatgaactgctcttcctccacaggtggtacagaagttggtcctgccctttgggcgactgaactacctgcccctggaacagcagtttatgccctgccttgagaggatcctggctcgggaagcaggggtggcacccctggctacagtcaacatcttgatgtcactgtgccaactgcggtgcctgcccttcagagccctgcactttgttttttcccctggcttcatcaactacatcagtggtacgcagccaggatggctggctgggcccctgagggctggagaggcaggggagcagggtggcctgcagcccagagccccagtccccgcctccccacaggcacccctcatgctctgattgtgcgtcgctacctctccctgctggacacggccgtggagctggagctcccaggataccggggtccccgccttccccgaaggcagcaagtgcccatctttccccagcctctcatcaccgaccgtgcccgctgcaagtacaggtggatggggcagcctggggcaaggggaggggccagcctgggaccagcagagtggaaaagccagagggaccatgaagcgccaaagctaaggagctctcggccaccataaaactgggccctgaagcagcagagggctttgcccagggtggtggcactagactgggacagattaggatgaggtgccgggcccttcctgctactggtgtcctttctcctcagtcacaaggacatagtagctgaggggttgcgccagctgctgggggaggagaaataccgccaggacctgactgtgcctccaggctactgcacaggtgagcaaggggcaggcggcaggcccggggagacggagccctggctaaggccgccggccctgctcccctccagacttcctgctgtgcgccagcagctctggtgctgtgcttcccgtgaggacccaggaccccttcctgccatacccaccaaggtcctgcccacagggccaggctgcctctagcgccactactcgagaccctgcccagaggtaaaggaggcagggtgggggagccctggccaccttgcccgccatgccctgagccacgtccctccccctgcagggtggtgctggtgttgcgggaacgctggcatttctgccgggacggccgggtgctgctgggctcgagggccctgagggagcggcacctaggcctgatgggctaccagctcctgccggtgagtggccctggcctggcccgtggcgcatcctcactcccagcctgcgggtaacctgccgccctctcctctccccacagctacccttcgaggaactggagtcccagagaggcctgccccagctcaagagctacctgaggcagaagctccaggccctgggcctgcgctgggggcctgaagggggctgaggggttgatgtggggttcaggatggcccccccatggggggtggatgatttgcactttggttccctgtgttttgatttct

SEQ ID NO: 12002 - DNA, 1826 bp, Homo sapiens
gatggcggactcggtggctagccgatgaggaggccgcggggggaacccggcccccgggccccgagaccgactgagggagcgacctgcgcagggcccggggagtcatggtctccatcacccaactccatgcttcgagtcctgctctctgctcagacctcccctgctcggctgtctggcctgctgctgatccctccagtacagccctgctgtttggggcccagcaaatggggggaccggcctgttggaggaggccccagtgcaggtcctgtgcaaggactgcagcggcttctggaacaggcgaagagccctggggagctgctgcgctggctgggccagaaccccagcaaggtgcgcgcccaccactactcggtggcgcttcgtcgtctgggccagctcttggggtctcggccacggccccctcctgtggagcaggtcacactgcaggacttgagtcagctcatcatccgaaactgcccctcctttgacattcacaccatccacgtgtgtctgcaccttgcagtcttacttggctttccatctgatggtcccctggtgtgtgccctggaacaggagcgaaggctccgcctccctccgaagccacctccccctttgcagccccttctccgaggtgggcaagggttggaagctgctctaagctgcccccgttttctgcggtatccacggcagcatctgatcagcagcctggcagaggcaaggccagaggaactgactccccacgtgatggtgctcctggcccagcacctggcccggcaccggttgcgggagccccagcttctggaagccattgcccacttcctggtggttcaggaaacgcaactcagcagcaaggtggtacagaagttggtcctgccctttgggcgactgaactacctgcccctggaacagcagtttatgccctgccttgagaggatcctggctcgggaagcaggggtggcacccctggctacagtcaacatcttgatgtcactgtgccaactgcggtgcctgcccttcagagccctgcactttgttttttcccctggcttcatcaactacatcagtggcacccctcatgctctgattgtgcgtcgctacctctccctgctggacacggccgtggagctggagctcccaggataccggggtccccgccttccccgaaggcagcaagtgcccatctttccccagcctctcatcaccgaccgtgcccgctgcaagtacagtcacaaggacatagtagctgaggggttgcgccagctgctgggggaggagaaataccgccaggacctgactgtgcctccaggctactgcacaggtgagcaaggggcaggcggcaggcccggggagacggagccctggctaaggccgccggccctgctcccctccagacttcctgctgtgcgccagcagctctggtgctgtgcttcccgtgaggacccaggaccccttcctgccatacccaccaaggtcctgcccacagggccaggctgcctctagcgccactactcgagaccctgcccagagggtggtgctggtgttgcgggaacgctggcatttctgccgggacggccgggtgctgctgggctcgagggccctgagggagcggcacctaggcctgatgggctaccagctcctgccgctacccttcgaggaactggagtcccagagaggcctgccccagctcaagagctacctgaggcagaagctccaggccctgggcctgcgctgggggcctgaagggggctgaggggttgatgtggggttcaggatggcccccccatggggggtggatgatttgcactttggttccctgtgttttgatttct

SEQ ID NO: 12003 - DNA, 2257 bp, Homo sapiens
ttggaagctgctctaagctgcccccgttttctgcggtatccacggcagcatctgatcagcagcctggcaggtgctggagggggttaaaatcagatgggggtggggagggctgacaggaggaggaaggtgggctcagttggctgggctgaggtggaattgagccagccggaggtccggctgaggcccagcgtgacaggctgctcttcacagaggcaaggccagaggaactgactccccacgtgatggtgctcctggcccagcacctggcccggcaccggttgcgggagccccagcttctggaagccattgcccacttcctggtggttcaggaaacgcaactcagcagcaaggtgggcttgccacccaccctccagtgcatctctgtcattctcagggaccttgtcaggcccagcgcctcgtgcagctcggctatccttttcctgaagcagacacaccctctctgtcccctgggacctgcatcttttctacaccctttctgtggcttgcccacctcctgtcagcagcatgcattcctggaaatctgcagtttcccaaagcactcttagcagcatcctagctccacccatccctctcgaagtcttcagggccagaccccacagcgatgtcccctctgcctgtctggtgattagtcacgtgcagctcgtgactgctttgctgttgaactgtgaggccggagggactgtcctgtctttacagcagtgttgtaaacctgagggctaagcctctctaaggcttagcttgtaaaagatgactgcagaaatacttgacactgggtaatgaactgctcttcctccacaggtggtacagaagttggtcctgccctttgggcgactgaactacctgcccctggaacagcagtttatgccctgccttgagaggatcctggctcgggaagcaggggtggcacccctggctacagtcaacatcttgatgtcactgtgccaactgcggtgcctgcccttcagagccctgcactttgttttttcccctggcttcatcaactacatcagtggtacgcagccaggatggctggctgggcccctgagggctggagaggcaggggagcagggtggcctgcagcccagagccccagtccccgcctccccacaggcacccctcatgctctgattgtgcgtcgctacctctccctgctggacacggccgtggagctggagctcccaggataccggggtccccgccttccccgaaggcagcaagtgcccatctttccccagcctctcatcaccgaccgtgcccgctgcaagtacaggtggatggggcagcctggggcaaggggaggggccagcctgggaccagcagagtggaaaagccagagggaccatgaagcgccaaagctaaggagctctcggccaccataaaactgggccctgaagcagcagagggctttgcccagggtggtggcactagactgggacagattaggatgaggtgccgggcccttcctgctactggtgtcctttctcctcagtcacaaggacatagtagctgaggggttgcgccagctgctgggggaggagaaataccgccaggacctgactgtgcctccaggctactgcacaggtgagcaaggggcaggcggcaggcccggggagacggagccctggctaaggccgccggccctgctcccctccagacttcctgctgtgcgccagcagctctggtgctgtgcttcccgtgaggacccaggaccccttcctgccatacccaccaaggtcctgcccacagggccaggctgcctctagcgccactactcgagaccctgcccagaggtaaaggaggcagggtgggggagccctggccaccttgcccgccatgccctgagccacgtccctccccctgcagggtggtgctggtgttgcgggaacgctggcatttctgccgggacggccgggtgctgctgggctcgagggccctgagggagcggcacctaggcctgatgggctaccagctcctgccggtgagtggccctggcctggcccgtggcgcatcctcactcccagcctgcgggtaacctgccgccctctcctctccccacagctacccttcgaggaactggagtcccagagaggcctgccccagctcaagagctacctgaggcagaagctccaggccctgggcctgcgctgggggcctgaagggggctgaggggttgatgtggggttcaggatggcccccccatggggggtggatgatttgcactttggttccctgtgtt

SEQ ID NO: 12004 - DNA, 1178 bp, Homo sapiens
ttggaagctgctctaagctgcccccgttttctgcggtatccacggcagcatctgatcagcagcctggcagaggcaaggccagaggaactgactccccacgtgatggtgctcctggcccagcacctggcccggcaccggttgcgggagccccagcttctggaagccattgcccacttcctggtggttcaggaaacgcaactcagcagcaaggtggtacagaagttggtcctgccctttgggcgactgaactacctgcccctggaacagcagtttatgccctgccttgagaggatcctggctcgggaagcaggggtggcacccctggctacagtcaacatcttgatgtcactgtgccaactgcggtgcctgcccttcagagccctgcactttgttttttcccctggcttcatcaactacatcagtggcacccctcatgctctgattgtgcgtcgctacctctccctgctggacacggccgtggagctggagctcccaggataccggggtccccgccttccccgaaggcagcaagtgcccatctttccccagcctctcatcaccgaccgtgcccgctgcaagtacagtcacaaggacatagtagctgaggggttgcgccagctgctgggggaggagaaataccgccaggacctgactgtgcctccaggctactgcacagacttcctgctgtgcgccagcagctctggtgctgtgcttcccgtgaggacccaggaccccttcctgccatacccaccaaggtcctgcccacagggccaggctgcctctagcgccactactcgagaccctgcccagaggtaaaggaggcagggtgggggagccctggccaccttgcccgccatgccctgagccacgtccctccccctgcagggtggtgctggtgttgcgggaacgctggcatttctgccgggacggccgggtgctgctgggctcgagggccctgagggagcggcacctaggcctgatgggctaccagctcctgccgctacccttcgaggaactggagtcccagagaggcctgccccagctcaagagctacctgaggcagaagctccaggccctgggcctgcgctgggggcctgaagggggctgaggggttgatgtggggttcaggatggcccccccatggggggtggatgatttgcactttggttccctgtgtt

SEQ ID NO: 12005 - DNA, 4171 bp, Homo sapiens
ggaagatggcggactcggtggctagccgatgaggaggccgcggggggaacccggcccccgggccccgagaccgactgagggagcgacctgcgcagggcccggggagtcatgtaggggtggcgcctgcggggagggctgcgggagggcagcgggagctggtgttagcggcagcggccacggtctcctggcgtccctgggccggggtgggtgttggggcccccgacttcgccgactccgcgccatcgcaaagcggtgcactcgggctccacgcgcgccctgcgaggtgggcgctgcgttttcatttcacgggtgaggagacttagagagacgaagccacttgtccaaggtcacgccgctggtgagtgggagcgcccagcatggaacccagcaccgtccagccgcggagcccgcgttccaccctctgtgccgccgccgcctcctgtgggagagggaggtggtcgggagagtgcacgccggtgccgcctgggctccagactgggcgcgaccactaacccggttaatgacctcgggcttaacttaaccccttcgctgctctgggcctgcgtttctccaccggtgaaatgaggtaatgccagccctgcctactcttcatgggcgtgtaaggagcatcagagatggtgcatgtggaattgctttgcaagtagtgctgcgctgagcgcactgaggattatgattgctgtttcaaaggcgtggaaggaggcagaggggcggggtggggaagaggcccagagcagtcacaaaggcttgctctgaccacaggccccctaaatgaggagtgaggtaagcagtaggtagcaggtctttctcccctttggagaaaacctcacccccttttttgggctgcccctcagggtctccatcacccaactccatgcttcgagtcctgctctctgctcagacctcccctgctcggctgtctggcctgctgctgatccctccagtacagccctgctgtttggggcccagcaaatggggggaccggcctgttggaggaggccccagtgcaggtcctgtgcaaggactgcagcggcttctggaacaggcgaagagccctggggagctgctgcgctggctgggccagaaccccagcaaggtgcgcgcccaccactactcggtggcgcttcgtcgtctgggccagctcttggggtctcggccacggccccctcctgtggagcaggtcacactgcaggacttgagtcagctcatcatccgaaactgcccctcctttgacattcacaccatccacgtgtgtctgcaccttgcagtcttacttggtgaggaggggcttgaggtgggcgcctggggggctaggtgttaatgaagaatagggagaacagtagaggaccacggacagagacccagcctctcaggcgtttgcccaggaacgcttgctcctgctcccgtcctatgtctgcggcagacatcatgagtcgaacgcactccttccggcctcgctagggtgccaccccagattcctgctaatagagtgccctaggaagccaccataatttgtcacaattggtatgagatgaaagcctatttgccatctttgtatgtactccctacaaaccgtttcgatacctcatagccacatgatactttacatgtctctagtgtttgcacttaaactctagcacaccttcccgctcaggaaacgggagaggagaaaggtggagaattcaccaagtaaccccatgataagaacagcagcacagctctgttaccaggctgccttttacctctccccctcaggctttccatctgatggtcccctggtgtgtgccctggaacaggagcgaaggctccgcctccctccgaagccacctccccctttgcagccccttctccgaggtgggcaagggttggaagctgctctaagctgcccccgttttctgcggtatccacggcagcatctgatcagcagcctggcaggtgctggagggggttaaaatcagatgggggtggggagggctgacaggaggaggaaggtgggctcagttggctgggctgaggtggaattgagccagccggaggtccggctgaggcccagcgtgacaggctgctcttcacagaggcaaggccagaggaactgactccccacgtgatggtgctcctggcccagcacctggcccggcaccggttgcgggagccccagcttctggaagccattgcccacttcctggtggttcaggaaacgcaactcagcagcaaggtgggcttgccacccaccctccagtgcatctctgtcattctcagggaccttgtcaggcccagcgcctcgtgcagctcggctatccttttcctgaagcagacacaccctctctgtcccctgggacctgcatcttttctacaccctttctgtggcttgcccacctcctgtcagcagcatgcattcctggaaatctgcagtttcccaaagcactcttagcagcatcctagctccacccatccctctcgaagtcttcagggccagaccccacagcgatgtcccctctgcctgtctggtgattagtcacgtgcagctcgtgactgctttgctgttgaactgtgaggccggagggactgtcctgtctttacagcagtgttgtaaacctgagggctaagcctctctaaggcttagcttgtaaaagatgactgcagaaatacttgacactgggtaatgaactgctcttcctccacaggtggtacagaagttggtcctgccctttgggcgactgaactacctgcccctggaacagcagtttatgccctgccttgagaggatcctggctcgggaagcaggggtggcacccctggctacagtcaacatcttgatgtcactgtgccaactgcggtgcctgcccttcagagccctgcactttgttttttcccctggcttcatcaactacatcagtggtacgcagccaggatggctggctgggcccctgagggctggagaggcaggggagcagggtggcctgcagcccagagccccagtccccgcctccccacaggcacccctcatgctctgattgtgcgtcgctacctctccctgctggacacggccgtggagctggagctcccaggataccggggtccccgccttccccgaaggcagcaagtgcccatctttccccagcctctcatcaccgaccgtgcccgctgcaagtacaggtggatggggcagcctggggcaaggggaggggccagcctgggaccagcagagtggaaaagccagagggaccatgaagcgccaaagctaaggagctctcggccaccataaaactgggccctgaagcagcagagggctttgcccagggtggtggcactagactgggacagattaggatgaggtgccgggcccttcctgctactggtgtcctttctcctcagtcacaaggacatagtagctgaggggttgcgccagctgctgggggaggagaaataccgccaggacctgactgtgcctccaggctactgcacaggtgagcaaggggcaggcggcaggcccggggagacggagccctggctaaggccgccggccctgctcccctccagacttcctgctgtgcgccagcagctctggtgctgtgcttcccgtgaggacccaggaccccttcctgccatacccaccaaggtcctgcccacagggccaggctgcctctagcgccactactcgagaccctgcccagaggtaaaggaggcagggtgggggagccctggccaccttgcccgccatgccctgagccacgtccctccccctgcagggtggtgctggtgttgcgggaacgctggcatttctgccgggacggccgggtgctgctgggctcgagggccctgagggagcggcacctaggcctgatgggctaccagctcctgccggtgagtggccctggcctggcccgtggcgcatcctcactcccagcctgcgggtaacctgccgccctctcctctccccacagctacccttcgaggaactggagtcccagagaggcctgccccagctcaagagctacctgaggcagaagctccaggccctgggcctgcgctgggggcctgaagggggctgaggggttgatgtggggttcaggatggcccccccatggggggtggatgatttgcactttggttccctgtgttttgatttctcattaaagttcctttccttccc

SEQ ID NO: 12006 - DNA, 1751 bp, Homo sapiens
ggaagatggcggactcggtggctagccgatgaggaggccgcggggggaacccggcccccgggccccgagaccgactgagggagcgacctgcgcagggcccggggagtcatgtaggggtggcgcctgcggggagggctgcgggagggcagcgggagctggtgttagcggcagcggccacggtctcctggcgtccctgggccggggtgggtgttggggcccccgacttcgccgactccgcgccatcgcaaagcggtgcactcgggctccacgcgcgccctgcgaggtgggcgctgcgttttcatttcacgggtgaggagacttagagagacgaagccacttgtccaaggtcacgccgctggtgagtgggagcgcccagcatggaacccagcaccgtccagccgcggagcccgcgttccaccctctgtgccgccgccgcctcctgtgggagagggaggtggtcgggagagtgcacgccggtgccgcctgggctccagactgggcgcgaccactaacccggttaatgacctcgggcttaacttaaccccttcgctgctctgggcctgcgtttctccaccggtgaaatgaggctttccatctgatggtcccctggtgtgtgccctggaacaggagcgaaggctccgcctccctccgaagccacctccccctttgcagccccttctccgagaggcaaggccagaggaactgactccccacgtgatggtgctcctggcccagcacctggcccggcaccggttgcgggagccccagcttctggaagccattgcccacttcctggtggttcaggaaacgcaactcagcagcaaggtggtacagaagttggtcctgccctttgggcgactgaactacctgcccctggaacagcagtttatgccctgccttgagaggatcctggctcgggaagcaggggtggcacccctggctacagtcaacatcttgatgtcactgtgccaactgcggtgcctgcccttcagagccctgcactttgttttttcccctggcttcatcaactacatcagtggcacccctcatgctctgattgtgcgtcgctacctctccctgctggacacggccgtggagctggagctcccaggataccggggtccccgccttccccgaaggcagcaagtgcccatctttccccagcctctcatcaccgaccgtgcccgctgcaagtacagtcacaaggacatagtagctgaggggttgcgccagctgctgggggaggagaaataccgccaggacctgactgtgcctccaggctactgcacagacttcctgctgtgcgccagcagctctggtgctgtgcttcccgtgaggacccaggaccccttcctgccatacccaccaaggtcctgcccacagggccaggctgcctctagcgccactactcgagaccctgcccagagggtggtgctggtgttgcgggaacgctggcatttctgccgggacggccgggtgctgctgggctcgagggccctgagggagcggcacctaggcctgatgggctaccagctcctgccgctacccttcgaggaactggagtcccagagaggcctgccccagctcaagagctacctgaggcagaagctccaggccctgggcctgcgctgggggcctgaagggggctgaggggttgatgtggggttcaggatggcccccccatggggggtggatgatttgcactttggttccctgtgttttgatttctcattaaagttcctttccttccc

SEQ ID NO: 12007 - DNA, 1332 bp, Homo sapiens
ggattggcgtccgggcggctatctaggggctgctgggaagatggcggactcggtggctagccgatgaggaggccgcggggggaacccggcccccgggccccgagaccgactgagggagcgacctgcgcagggcccggggagtcatgtaggggtggcgcctgcggggagggctgcgggagggcagcgggagctggtgttagcggcagcggccacggtctcctggcgtccctgggccggggtgggtgttggggcccccgacttcgccgactccgcgccatcgcaaagcggtgcactcgggctccacgcgcgccctgcgaggtgggcgctgcgttttcatttcacgggtgaggagacttagagagacgaagccacttgtccaaggtcacgccgctggtgagtgggagcgcccagcatggaacccagcaccgtccagccgcggagcccgcgttccaccctctgtgccgccgccgcctcctgtgggagagggaggtggtcgggagagtgcacgccggtgccgcctgggctccagactgggcgcgaccactaacccggttaatgacctcgggcttaacttaaccccttcgctgctctgggcctgcgtttctccaccggtgaaatgaggtaatgccagccctgcctactcttcatgggcgtgtaaggagcatcagagatggtgcatgtggaattgctttgcaagtagtgctgcgctgagcgcactgaggattatgattgctgtttcaaaggcgtggaaggaggcagaggggcggggtggggaagaggcccagagcagtcacaaaggcttgctctgaccacaggccccctaaatgaggagtgaggtaagcagtaggtagcaggtctttctcccctttggagaaaacctcacccccttttttgggctgcccctcagggtctccatcacccaactccatgcttcgagtcctgctctctgctcagacctcccctgctcggctgtctggcctgctgctgatccctccagtacagccctgctgtttggggcccagcaaatggggggaccggcctgttggaggaggccccagtgcaggtcctgtgcaaggactgcagcggcttctggaacaggcgaagagccctggggagctgctgcgctggctgggccagaaccccagcaaggtgcgcgcccaccactactcggtggcgcttcgtcgtctgggccagctcttggggtctcggccacggccccctcctgtggagcaggtcacactgcaggacttgagtcagctcatcatccgaaactgcccctcctttgacattcacaccatccacgtgtgtctgcaccttgcagtcttacttggt

SEQ ID NO: 12008 - DNA, 818 bp, Homo sapiens
ggattggcgtccgggcggctatctaggggctgctgggaagatggcggactcggtggctagccgatgaggaggccgcggggggaacccggcccccgggccccgagaccgactgagggagcgacctgcgcagggcccggggagtcatgtaggggtggcgcctgcggggagggctgcgggagggcagcgggagctggtgttagcggcagcggccacggtctcctggcgtccctgggccggggtgggtgttggggcccccgacttcgccgactccgcgccatcgcaaagcggtgcactcgggctccacgcgcgccctgcgaggtgggcgctgcgttttcatttcacgggtgaggagacttagagagacgaagccacttgtccaaggtcacgccgctgggtctccatcacccaactccatgcttcgagtcctgctctctgctcagacctcccctgctcggctgtctggcctgctgctgatccctccagtacagccctgctgtttggggcccagcaaatggggggaccggcctgttggaggaggccccagtgcaggtcctgtgcaaggactgcagcggcttctggaacaggcgaagagccctggggagctgctgcgctggctgggccagaaccccagcaaggtgcgcgcccaccactactcggtggcgcttcgtcgtctgggccagctcttggggtctcggccacggccccctcctgtggagcaggtcacactgcaggacttgagtcagctcatcatccgaaactgcccctcctttgacattcacaccatccacgtgtgtctgcaccttgcagtcttacttggt

SEQ ID NO: 12009 - DNA, 4203 bp, Homo sapiens
gggaagatggcggactcggtggctagccgatgaggaggccgcggggggaacccggcccccgggccccgagaccgactgagggagcgacctgcgcagggcccggggagtcatgtaggggtggcgcctgcggggagggctgcgggagggcagcgggagctggtgttagcggcagcggccacggtctcctggcgtccctgggccggggtgggtgttggggcccccgacttcgccgactccgcgccatcgcaaagcggtgcactcgggctccacgcgcgccctgcgaggtgggcgctgcgttttcatttcacgggtgaggagacttagagagacgaagccacttgtccaaggtcacgccgctggtgagtgggagcgcccagcatggaacccagcaccgtccagccgcggagcccgcgttccaccctctgtgccgccgccgcctcctgtgggagagggaggtggtcgggagagtgcacgccggtgccgcctgggctccagactgggcgcgaccactaacccggttaatgacctcgggcttaacttaaccccttcgctgctctgggcctgcgtttctccaccggtgaaatgaggtaatgccagccctgcctactcttcatgggcgtgtaaggagcatcagagatggtgcatgtggaattgctttgcaagtagtgctgcgctgagcgcactgaggattatgattgctgtttcaaaggcgtggaaggaggcagaggggcggggtggggaagaggcccagagcagtcacaaaggcttgctctgaccacaggccccctaaatgaggagtgaggtaagcagtaggtagcaggtctttctcccctttggagaaaacctcacccccttttttgggctgcccctcagggtctccatcacccaactccatgcttcgagtcctgctctctgctcagacctcccctgctcggctgtctggcctgctgctgatccctccagtacagccctgctgtttggggcccagcaaatggggggaccggcctgttggaggaggccccagtgcaggtcctgtgcaaggactgcagcggcttctggaacaggcgaagagccctggggagctgctgcgctggctgggccagaaccccagcaaggtgcgcgcccaccactactcggtggcgcttcgtcgtctgggccagctcttggggtctcggccacggccccctcctgtggagcaggtcacactgcaggacttgagtcagctcatcatccgaaactgcccctcctttgacattcacaccatccacgtgtgtctgcaccttgcagtcttacttggtgaggaggggcttgaggtgggcgcctggggggctaggtgttaatgaagaatagggagaacagtagaggaccacggacagagacccagcctctcaggcgtttgcccaggaacgcttgctcctgctcccgtcctatgtctgcggcagacatcatgagtcgaacgcactccttccggcctcgctagggtgccaccccagattcctgctaatagagtgccctaggaagccaccataatttgtcacaattggtatgagatgaaagcctatttgccatctttgtatgtactccctacaaaccgtttcgatacctcatagccacatgatactttacatgtctctagtgtttgcacttaaactctagcacaccttcccgctcaggaaacgggagaggagaaaggtggagaattcaccaagtaaccccatgataagaacagcagcacagctctgttaccaggctgccttttacctctccccctcaggctttccatctgatggtcccctggtgtgtgccctggaacaggagcgaaggctccgcctccctccgaagccacctccccctttgcagccccttctccgaggtgggcaagggttggaagctgctctaagctgcccccgttttctgcggtatccacggcagcatctgatcagcagcctggcaggtgctggagggggttaaaatcagatgggggtggggagggctgacaggaggaggaaggtgggctcagttggctgggctgaggtggaattgagccagccggaggtccggctgaggcccagcgtgacaggctgctcttcacagaggcaaggccagaggaactgactccccacgtgatggtgctcctggcccagcacctggcccggcaccggttgcgggagccccagcttctggaagccattgcccacttcctggtggttcaggaaacgcaactcagcagcaaggtgggcttgccacccaccctccagtgcatctctgtcattctcagggaccttgtcaggcccagcgcctcgtgcagctcggctatccttttcctgaagcagacacaccctctctgtcccctgggacctgcatcttttctacaccctttctgtggcttgcccacctcctgtcagcagcatgcattcctggaaatctgcagtttcccaaagcactcttagcagcatcctagctccacccatccctctcgaagtcttcagggccagaccccacagcgatgtcccctctgcctgtctggtgattagtcacgtgcagctcgtgactgctttgctgttgaactgtgaggccggagggactgtcctgtctttacagcagtgttgtaaacctgagggctaagcctctctaaggcttagcttgtaaaagatgactgcagaaatacttgacactgggtaatgaactgctcttcctccacaggtggtacagaagttggtcctgccctttgggcgactgaactacctgcccctggaacagcagtttatgccctgccttgagaggatcctggctcgggaagcaggggtggcacccctggctacagtcaacatcttgatgtcactgtgccaactgcggtgcctgcccttcagagccctgcactttgttttttcccctggcttcatcaactacatcagtggtacgcagccaggatggctggctgggcccctgagggctggagaggcaggggagcagggtggcctgcagcccagagccccagtccccgcctccccacaggcacccctcatgctctgattgtgcgtcgctacctctccctgctggacacggccgtggagctggagctcccaggataccggggtccccgccttccccgaaggcagcaagtgcccatctttccccagcctctcatcaccgaccgtgcccgctgcaagtacaggtggatggggcagcctggggcaaggggaggggccagcctgggaccagcagagtggaaaagccagagggaccatgaagcgccaaagctaaggagctctcggccaccataaaactgggccctgaagcagcagagggctttgcccagggtggtggcactagactgggacagattaggatgaggtgccgggcccttcctgctactggtgtcctttctcctcagtcacaaggacatagtagctgaggggttgcgccagctgctgggggaggagaaataccgccaggacctgactgtgcctccaggctactgcacaggtgagcaaggggcaggcggcaggcccggggagacggagccctggctaaggccgccggccctgctcccctccagacttcctgctgtgcgccagcagctctggtgctgtgcttcccgtgaggacccaggaccccttcctgccatacccaccaaggtcctgcccacagggccaggctgcctctagcgccactactcgagaccctgcccagaggtaaaggaggcagggtgggggagccctggccaccttgcccgccatgccctgagccacgtccctccccctgcagggtggtgctggtgttgcgggaacgctggcatttctgccgggacggccgggtgctgctgggctcgagggccctgagggagcggcacctaggcctgatgggctaccagctcctgccggtgagtggccctggcctggcccgtggcgcatcctcactcccagcctgcgggtaacctgccgccctctcctctccccacagctacccttcgaggaactggagtcccagagaggcctgccccagctcaagagctacctgaggcagaagctccaggccctgggcctgcgctgggggcctgaagggggctgaggggttgatgtggggttcaggatggcccccccatggggggtggatgatttgcactttggttccctgtgttttgatttctcattaaagttcctttccttccccgttgtgaatctcagttttgggacggggagc

SEQ ID NO: 12010 - DNA, 1609 bp, Homo sapiens
gggaagatggcggactcggtggctagccgatgaggaggccgcggggggaacccggcccccgggccccgagaccgactgagggagcgacctgcgcagggcccggggagtcatggtctccatcacccaactccatgcttcgagtcctgctctctgctcagacctcccctgctcggctgtctggcctgctgctgatccctccagtacagccctgctgtttggggcccagcaaatggggggaccggcctgttggaggaggccccagtgcaggtcctgtgcaaggactgcagcggcttctggaacaggcgaagagccctggggagctgctgcgctggctgggccagaaccccagcaaggtgcgcgcccaccactactcggtggcgcttcgtcgtctgggccagctcttggggtctcggccacggccccctcctgtggagcaggtcacactgcaggacttgagtcagctcatcatccgaaactgcccctcctttgacattcacaccatccacgtgtgtctgcaccttgcagtcttacttggctttccatctgatggtcccctggtgtgtgccctggaacaggagcgaaggctccgcctccctccgaagccacctccccctttgcagccccttctccgaggtgggcaagggttggaagctgctctaagctgcccccgttttctgcggtatccacggcagcatctgatcagcagcctggcagaggcaaggccagaggaactgactccccacgtgatggtgctcctggcccagcacctggcccggcaccggttgcgggagccccagcttctggaagccattgcccacttcctggtggttcaggaaacgcaactcagcagcaaggtggtacagaagttggtcctgccctttgggcgactgaactacctgcccctggaacagcagtttatgccctgccttgagaggatcctggctcgggaagcaggggtggcacccctggctacagtcaacatcttgatgtcactgtgccaactgcggtgcctgcccttcagagccctgcactttgttttttcccctggcttcatcaactacatcagtggcacccctcatgctctgattgtgcgtcgctacctctccctgctggacacggccgtggagctggagctcccaggataccggggtccccgccttccccgaaggcagcaagtgcccatctttccccagcctctcatcaccgaccgtgcccgctgcaagtacagtcacaaggacatagtagctgaggggttgcgccagctgctgggggaggagaaataccgccaggacctgactgtgcctccaggctactgcacagacttcctgctgtgcgccagcagctctggtgctgtgcttcccgtgaggacccaggaccccttcctgccatacccaccaagggcctgccccagctcaagagctacctgaggcagaagctccaggccctgggcctgcgctgggggcctgaagggggctgaggggttgatgtggggttcaggatggcccccccatggggggtggatgatttgcactttggttccctgtgttttgatttctcattaaagttcctttccttccccgttgtgaatctcagttttgggacggggagc

SEQ ID NO: 12011 - DNA, 9873 bp, Homo sapiens
acgacgcccaggcgcttccgcgaccacccggagtgattgcccggcagagcgcggtaggtgtcaacgcggggtctccgcgcagttggtccggctgggtgtcaaagacctggccggctttctcctcaggctgcgccgcccggcccgtgtctcagcgcaggtccccggggcgccgagtttgggggtgctcgccccgcgggtccctttcattcctaggaaaacgcgccgcggggcctcccgtctgtctgtcttgcacacacgtgttgccaaatccccccgcaccgtctttagatctggactggccgccccaccttctcccttcattgatctatgttttgctttttcttttcctaccttgtttccattgacaaagtagaccctttccttcaacactaaccttctcccgacaccgaggggaaaccaacagcttagggcctttccagcgcgtttttacccttgccttgctctaacctcgcctaattttgcccactttacctgttctttgatttctatccaaatgcaatttcttccttcaaccaacatttaagggccacccttaagagctacattgcctgagtttgaaccctagctctgccacttaaccacctgcataaactgggcaaagtaactttgtgcttcaacttcttcctcgtgtaaaatgatagtaaaagtactgaatctgtgtaagttaatagaatacctacaacagtgtttagcaagtaatagcgattgttattgttcaatgtcagccactcttctaactctaggatgcagagactttgcccctctggtgtttatatgttaaccatcctttttttttttttttttttttttccagatactcgtttgtagtttcataaacattgatgttgggtcaatcatgttctcaatgtatttaaccatgtgtttttaaattttttaatttagttatcaaattgagaatctgatggtatggcattaatcaccttgaggaagaacctttatcgtttatctgattttcagatgcatagagctctggctgctttaaaaaataaacctctaaatcatgttcacaaggtagtcaaggagcgtctgtgcccttggttgtgttcacgacaacctgagcctttcggggtcaaattccatcatgcccattgtaaaaagtttcattcgaaaaatggaaatgaccttcatccactcggtggaccagtgttctctcaagtatctgactgcgacaggcttgaacaaaatgttaaaaatgaggagagtcagatgttttacaggagactgagcaacttgacttcatcagaagaagtgctaagttttataagcacgatggaaaccctgcctgacactatggcagcaggagctttacaacgaatttgtgaagtggaaaaaaaggatggtgatcaagggctgccaaaagaaatactggagaatagcatctttcaagctttatgctttcagtttgaaaaggagccctcacagctgtcaaacactagtttagtgactgctttgcaagctctgattctgttgcatgtggatcctcaaagtagcctgttgctgaacctggtggcagaatgccaaaatcgtctcagaaaaggtggcatggaagttcgcaatctttgtattcttggggaaagtctgattacactgcacagttcaggttgtgtgacactagaactcattataaatcaacttcaaggtgaaaaattggaaacatttaccccggaggatattgtggccctttatagaatcttgcaggcatgtactgaaaaagtggatgaacaccaaacatttttaaataagataaacaacttttccctatcaatagtttccaacctgagtcctaaattgattagccaaatgctcactgccctggtggttcttgatcaaagtcaagcatttcctctgattataaaattgggcaaatatgtcgtgaggcatgtcccacatttcactaacgaggagcttaggagagtcttggaggcgttcatatattttgggcaccatgacacattttttacaaaagccctagagcatcgtgtagctgcggtgtgcctcacgttggatcctgaagttgtctgcagggtcatggagtactgcagtagagaactgattctttcaaaacccatcctcaatgcagtggcagaaacttttgtttgccaaacagaaaaattttcacctcgtcagatttctgccttaatggaaccatttgggaaactcaattatttgccaccaaatgcctctgctttatttagaaagctggaaaacgtgctattcactcatttcaattattttccacccaaatcattattgaaacttcttcattcatgttcacttaatgaatgccatccagtcaactttctggcaaaaatattcaagcctcttttccttcaacggctgcaaggtgagttggttataaattctgacagttggaaaaaagtaacctttgaactggcagtggtttcaagtcacatataaaggcaatatgttgcctttagtttttcttccatagtgatccgaagatgagacctgaagttaacagatgctggcataaacacagttaaagcatgctaggaaatcatgtagagggaagaaagctgtctcagataaactgacttttgccttatctgagaaattgcagcattcttaggagatatggtaatggcagtggaaatagccacattaacatgttagaacttttgatgagtgagcaactgtatctttttttttttttttgagaggatggtattattcatcttaattcaaggccacccaaatatgtcaaatttccggaactccatagttaaaggaaatttccactaattctgtgaacatattttatctcttttaattgtattctgtagctaggagcttgggttcttggaagtcaatttcattggtggcaagaggagggcataattaattctaacaagttcatttcatagtgtcatttaaaaatagaatacttctgtctggagtgtgtaaattgatgttgaatgttcatgatgttctctcatacatacctcaattcagacgtaactatgactgggatgctttctgtttcaggtaaagaatctcatttggacacattgagtcgggcacaactgacccaacttttcttagcctcagtcctggaatgccctttctataaggtaaaagcatgaactatatgtggctttatttccccatgggtgcagtttccttttaagttcctttacttctgatctgtctcaataacctgaaaaagcagaatttcatttacttggagtcagttgccaccagataggcttttctttgataaatggaccccatttttgtgttcttgttcttgaaggaacaatttcctgctgtttaagatttcttaggaggttttatcaagtgctgcaggcatgtgagttacagtatttctccattctctctgaaggttttacagggttttagtactaggtttactactaggtttcccatagctgtttgttatcaaagtgtgaatgtctggactgaacaaatacctaaattatttgcaagtacagtatatttttaagccaagccagaaatttcacttttatctaatagagtttagtttatctagagttcgctcttcccataaagacctataaagatttatcctattacctatcacattccttatgtagaatcagaaatagcacaccagactatgacattctctctctgcttctctctacttgactctgaatcatagtttagagtatctgatttttgaaataaggtaataagaatggaaaaataccccttttttaaaacagcttagacagtactaagttatataaagataaataatagttaaccccgatctcttaccatttctaaaggaacagtattaaaagcagtttctacgcccaaatgtatacagatacataaacactgtctattttttttctcttttcaaggaatgagactcactaatcaaagtacaatttgcttttatgcgcagtatatcatggccatccctcgaggccagtgcatacagatcacatgcattctttttagaaaggcatgatatttcatggtgtttattctactattgatgcacttggaggtttttgcaacttttgtctctatcgggaatgctataataaacattcttgcaaatcctgtcatactagagcctttttggtttttttcatatataaactagattcccaaaaatgtgattagtggattaatttttgatggatactggcagattttttttccctaatagttacagatgtcacatttccccagcaatgaatgaaggtggccatgtctcctccacttctattgcagtgtgttagtagtctctttaatttgtgttactcaactacatgaaagaggatatcatatcatatatttaagttgcattttaatgagcattaatgaagtttagcatattttcaaatatgtgttggccatttacatttcttttgaattgcctttctacaccttaatttatttctgttggatggtttgtctttaaggactcattgtaaaacagatattaactattatgaatgttgtacatattttcccgatttgtactcttttattactttttaatattacttatgatgtatttttaaatgttctgtagtcgaatctgtcttttatgacttccgaggttcctatctcaagagcatgaatattttacatttttaaaaataatatcttttaaattttatttagatctttgatctaaaagtaaaattgaatttttatttatgtattctaattaacaaaaattgtatatacttattatgttcatgttgttttgaaatatgtatacattgtagaatggctaaatcaaaccaattaacatgtgtattacctccatatctatcattttattttgtggtaagaatatttaaaatgtactcttgccgtgcgcagtggctcatgcctgtaatcgcagcacttttggaggccaaggcgggtggatcacctgaggtcaggagttcgagaccagccttgctaacatggtgaaaccctgtctctactaaaaatacaaaaaattagccgggcatgatggcacacgcctgtagtcccagctactctggactctgagttaggagaatcgctcaacccaggaggcggaggttgcagtgagccgaggtcgcgtcattgtactccagcctgggcaacaagagtgaaactctgtctcagaaacaaaaacaaaaacaaacaaaaaaaaaggtaaaaaagtactctcagccattttcaagcacgcaatcattcttattaactatagtcagcatgttgtacacctggaatttattagcatctgtcatggatgacagaagtttaatttagttattttccaaataaataaccattttctccagcatcgtttattatattgctatccttttcttcctaaactggaatgtcatttatatcacattttccattacagattgagtatcccttatccaaaatgctcaggaccagaagtgtttcagctttcagattttttcatattttaaaatattctcattatatttaccagttcagcatccctaattcaaaaatttgaaatccagaatgcttcatgagcattttctttaagcagcctgtctgtgcttaaaaggtttcggattttggagcattttggattttggattttcagattagagaaattaaacctgtgttgaaaactttagttgtgtgtacttaagacccttgggacaattctcagttctaaaaatgtttcttgaactgttagcattattatgtttcttctcactctctcctcactcctttttaccttccttctttacttttctttctgtttatggtaaccagtgactactgtaaaaacacatataaaagacattttgaactattagacttgcactgtaagaagagaagtttgcattatcattttgagagagatgcctgtcccaattcctggaaaagtatcatgcctataaagtaatgttatatcaaacttttctacctaggtaaccttcaatttattctctgttgttatatcttatttttctttctcacatttgcacttatgattttttagggtccaaaactccttcctaaatatcaagtgaagtcatttcttaccccatgctgttccctggagacccctgtggattctcagctttatagatatgtgaagattgggctgactaaccttttaggagcaagattatattttgctccaaaagtgttgacaccctattgttatacaataggtaagtagtataaggagttttgttgttttaaacctaagcatcctgttcgattttggagatatatgggacttagaagcaatagaagttctctggaaatgcaaaatggaatggtcccttccctgaaggcaagttggggttagcagcagagccgttgagtcaagactgtctgggtttaagtctcaaatattagccacgtagtagcagaatatcctgggcagaatatttaacctttttctgcttgcttcttcctctgtaaaatgatagtaatattgacctcaaagacttacttaaggtctaaataaaatagtacctggaacgtaggaaatgctcactaattgttagctactactataacctaggcttgtactgtccaaatatagtagccactagaccatgtggctatttaaatttaaattattaaaagtttaagaaaattcaattcctcagtcacattgtaagtgctcagtagccacatgtggctcatggctgccaaattggacagcaccattataaagatttccacatcacagaaatttctcctggacagcactgacaagagactccaagtcctccgtccttacagttcttctaacttgatgagcagaagaaagccttctcgtaaaggacagcagttcataggcttcagatggtcacttctcttctctttacgaagggaactgcagtttaccagaggggaaggacagttcggaagccttccgtgctcgcagaccaggtgtctgggtgtggcatgctttctttacttaccatggaggcactgcaagttggaatgatggaagttatgagttgcacagatgtctaatgtcttaactcaagggttttcttcacagtctggattgaaggatctctgccacctatcataaggggaaagagaaagcatgcatggttcttgtcataccccagataacttcagaacccattctgtggtttagcgttattgagctttcttaatttaaggctgacttgattgatcataaagccaattgaattaaaattctcaccattgtttggttgtggtcattactttgcagccttcagtccaattgatcaatgcaaggtggaaggaatcaaagcaaagcaaaggaatgaatacaggaagatagtgtttgtgagggtatcacacgaggaatttttcctttcttctctcaccagatgttgaaattaaattagatgaagaaggatttgtattgccatccacagctaatgaagatatccataaaaggtacaggaaaatgttgtgtttttcacattacaagactcgttgaggctaataagcagcggtatctttttctcaagaaggtgaaaaaaatagatatgattctggaaattaaaatactacatttcagaataccatgttgggaaattccttgtaatattttataaacattaatattaataagatcaaattcatgattcatttgaaaataatattggcacatagtaatagccaaatcccaaataaactttggcaactaaaatatataataaatattttggattatttaaaaaattaagtatttttctccttttttatttttcaggatagcactgtgtattgatggtccaaaaaggttttgctccaatagcaaacacttactggggaaagaagctattaaacaaagacacctacagttactcggttatcaagttgttcaggtacggtttcacctattttttttgtttcccaaaagcaaatcctatttcaaaattatttttccaggttacttttaaaaagtaatctgaggcacagtaaaattttaaagaatttgatcaggcagcaattattgaactggacagcacaaaactcgaaatggcttgggaacccaagagggaggcttttataggaagaacacaagtacacaaagaatctacttgactggttacagttacatattcttgctgccttgtttgaactattctgtggaaagttcctagttatataattattagtttgtgagatgcttctgattggttgagcttaagttctgtttttctgtagtagaagcttctacaagaaatagcccaagttaaattttgcttaacatttgcactttaagcaaagttaaggttattttcaaggcccaactggcttggtctgctcagggatttttcaggcacaggctccattttaatttgcttttacagtactaactggtttgccagcccagtggaccaccgatcttacgtctagtttaaatcccaacgttgttaattcggcttaaatctcttgacttatattttgaaatacagaattttcagagctttgatttttcaaaagtggggcctacctatattcattataagctatgcttaaccctgcttttagaattactcaattgttggaatatatgttctgttttaatttctccttgatttaataaataaaaatgaacaagataatccattaaaataaggagcttcaccaacacttaatatttaagaccttttaaatatttcactgtagataatgtaagaaggtcttatgtgagggctcagcagtgcgtgagaatgagcgctgccctaattctctaagctgtcagtactaggcagcactgtggtttcatatctgctgacttttttctccatcttgcacatccccagctgaatattcctaaaactaatcatgccagtgtctactcagaagcttcaatgtttctttactgcttacagaataaagtaaaaacttctctacatcttaacattcaagaccctccaatggttggcctgcagccaggctgcaggcacatgattactacctggcccctctgctcccagctgagcagactctctcctttgctgcgcctcctgctctctccctcttcattccctctttgtccctgctgcgtcctccagctctctgaatacctaccttccagcagtttgtcggcatccccaccctcatctaatgaaatgctcactccctcttagcactagatcaccaacctacagcttgttttttatatttattgtgtaatttaacttgccacccaagttgtgaactcctggagaacaagagatcatgtttaattcttatttgcatattctacatattaattcatcaaatatttaccaagccccttctcagtgccaggcactgttctagacattggggatacaggatgaagaagctggttgggatatttgccttccaggagcttacattccgctgtggggaagcgtgtaagaaacaaacaaagtaaccaatagccagaggaacctcagattttgaaggatcttgaccagttttacttttctacctttacagatcccctatcatgagattgggatgctaaaatcaagacgtgaattggtggaatatttacaaagaaaactgttttctcaaaacactgttcattggttgcaagaatgaatactgacttcagaactcaaacaatggaagaacttgcatttttatggaactcagtattaaaagaaaaatataatgtgaattagccactttgcagaatatgttctagactggtgatctgaaagcatctgtagttttccttatactatgtatacatttattgtggtaaaatttaaaattaattttaatttaatactagtgtcatagatactttttgtacatcaaacaattgatcatgtgctgtaaaggaattcaatgaataaatgttatttttaagta

SEQ ID NO: 12012 - DNA, 2431 bp, Homo sapiens
acgacgcccaggcgcttccgcgaccacccggagtgattgcccggcagagcgcgatactcgtttgtagtttcataaacattgatgttgggtcaatcatgttctcaatgtatttaaccatgtgtttttaaattttttaatttagttatcaaattgagaatctgatggtatggcattaatcaccttgaggaagaacctttatcgtttatctgattttcagatgcatagagctctggctgctttaaaaaataaacctctaaatcatgttcacaaggtagtcaaggagcgtctgtgcccttggttgtgttcacgacaacctgagcctttcggggtcaaattccatcatgcccattgtaaaaagtttcattcgaaaaatggaaatgaccttcatccactcggtggaccagtgttctctcaagtatctgactgcgacaggcttgaacaaaatgttaaaaatgaggagagtcagatgttttacaggagactgagcaacttgacttcatcagaagaagtgctaagttttataagcacgatggaaaccctgcctgacactatggcagcaggagctttacaacgaatttgtgaagtggaaaaaaaggatggtgatcaagggctgccaaaagaaatactggagaatagcatctttcaagctttatgctttcagtttgaaaaggagccctcacagctgtcaaacactagtttagtgactgctttgcaagctctgattctgttgcatgtggatcctcaaagtagcctgttgctgaacctggtggcagaatgccaaaatcgtctcagaaaaggtggcatggaagttcgcaatctttgtattcttggggaaagtctgattacactgcacagttcaggttgtgtgacactagaactcattataaatcaacttcaaggtgaaaaattggaaacatttaccccggaggatattgtggccctttatagaatcttgcaggcatgtactgaaaaagtggatgaacaccaaacatttttaaataagataaacaacttttccctatcaatagtttccaacctgagtcctaaattgattagccaaatgctcactgccctggtggttcttgatcaaagtcaagcatttcctctgattataaaattgggcaaatatgtcgtgaggcatgtcccacatttcactaacgaggagcttaggagagtcttggaggcgttcatatattttgggcaccatgacacattttttacaaaagccctagagcatcgtgtagctgcggtgtgcctcacgttggatcctgaagttgtctgcagggtcatggagtactgcagtagagaactgattctttcaaaacccatcctcaatgcagtggcagaaacttttgtttgccaaacagaaaaattttcacctcgtcagatttctgccttaatggaaccatttgggaaactcaattatttgccaccaaatgcctctgctttatttagaaagctggaaaacgtgctattcactcatttcaattattttccacccaaatcattattgaaacttcttcattcatgttcacttaatgaatgccatccagtcaactttctggcaaaaatattcaagcctcttttccttcaacggctgcaaggtaaagaatctcatttggacacattgagtcgggcacaactgacccaacttttcttagcctcagtcctggaatgccctttctataagggtccaaaactccttcctaaatatcaagtgaagtcatttcttaccccatgctgttccctggagacccctgtggattctcagctttatagatatgtgaagattgggctgactaaccttttaggagcaagattatattttgctccaaaagtgttgacaccctattgttatacaatagatgttgaaattaaattagatgaagaaggatttgtattgccatccacagctaatgaagatatccataaaaggatagcactgtgtattgatggtccaaaaaggttttgctccaatagcaaacacttactggggaaagaagctattaaacaaagacacctacagttactcggttatcaagttgttcagatcccctatcatgagattgggatgctaaaatcaagacgtgaattggtggaatatttacaaagaaaactgttttctcaaaacactgttcattggttgcaagaatgaatactgacttcagaactcaaacaatggaagaacttgcatttttatggaactcagtattaaaagaaaaatataatgtgaattagccactttgcagaatatgttctagactggtgatctgaaagcatctgtagttttccttatactatgtatacatttattgtggtaaaatttaaaattaattttaatttaatactagtgtcatagatactttttgtacatcaaacaattgatcatgtgctgtaaaggaattcaatgaataaatgttatttttaagta

SEQ ID NO: 12013 - DNA, 9630 bp, Homo sapiens
gaccacccggagtgattgcccggcagagcgcggtaggtgtcaacgcggggtctccgcgcagttggtccggctgggtgtcaaagacctggccggctttctcctcaggctgcgccgcccggcccgtgtctcagcgcaggtccccggggcgccgagtttgggggtgctcgccccgcgggtccctttcattcctaggaaaacgcgccgcggggcctcccgtctgtctgtcttgcacacacgtgttgccaaatccccccgcaccgtctttagatctggactggccgccccaccttctcccttcattgatctatgttttgctttttcttttcctaccttgtttccattgacaaagtagaccctttccttcaacactaaccttctcccgacaccgaggggaaaccaacagcttagggcctttccagcgcgtttttacccttgccttgctctaacctcgcctaattttgcccactttacctgttctttgatttctatccaaatgcaatttcttccttcaaccaacatttaagggccacccttaagagctacattgcctgagtttgaaccctagctctgccacttaaccacctgcataaactgggcaaagtaactttgtgcttcaacttcttcctcgtgtaaaatgatagtaaaagtactgaatctgtgtaagttaatagaatacctacaacagtgtttagcaagtaatagcgattgttattgttcaatgtcagccactcttctaactctaggatgcagagactttgcccctctggtgtttatatgttaaccatcctttttttttttttttttttttttccagatactcgtttgtagtttcataaacattgatgttgggtcaatcatgttctcaatgtatttaaccatgtgtttttaaattttttaatttagttatcaaattgagaatctgatggtatggcattaatcaccttgaggaagaacctttatcgtttatctgattttcagatgcatagagctctggctgctttaaaaaataaacctctaaatcatgttcacaaggtagtcaaggagcgtctgtgcccttggttgtgttcacgacaacctgagcctttcggggtcaaattccatcatgcccattgtaaaaagtttcattcgaaaaatggaaatgaccttcatccactcggtggaccagtgttctctcaagtatctgactgcgacaggcttgaacaaaatgttaaaaatgaggagagtcagatgttttacaggagactgagcaacttgacttcatcagaagaagtgctaagttttataagcacgatggaaaccctgcctgacactatggcagcaggagctttacaacgaatttgtgaagtggaaaaaaaggatggtgatcaagggctgccaaaagaaatactggagaatagcatctttcaagctttatgctttcagtttgaaaaggagccctcacagctgtcaaacactagtttagtgactgctttgcaagctctgattctgttgcatgtggatcctcaaagtagcctgttgctgaacctggtggcagaatgccaaaatcgtctcagaaaaggtggcatggaagttcgcaatctttgtattcttggggaaagtctgattacactgcacagttcaggttgtgtgacactagaactcattataaatcaacttcaaggtgaaaaattggaaacatttaccccggaggatattgtggccctttatagaatcttgcaggcatgtactgaaaaagtggatgaacaccaaacatttttaaataagataaacaacttttccctatcaatagtttccaacctgagtcctaaattgattagccaaatgctcactgccctggtggttcttgatcaaagtcaagcatttcctctgattataaaattgggcaaatatgtcgtgaggcatgtcccacatttcactaacgaggagcttaggagagtcttggaggcgttcatatattttgggcaccatgacacattttttacaaaagccctagagcatcgtgtagctgcggtgtgcctcacgttggatcctgaagttgtctgcagggtcatggagtactgcagtagagaactgattctttcaaaacccatcctcaatgcagtggcagaaacttttgtttgccaaacagaaaaattttcacctcgtcagatttctgccttaatggaaccatttgggaaactcaattatttgccaccaaatgcctctgctttatttagaaagctggaaaacgtgctattcactcatttcaattattttccacccaaatcattattgaaacttcttcattcatgttcacttaatgaatgccatccagtcaactttctggcaaaaatattcaagcctcttttccttcaacggctgcaaggtgagttggttataaattctgacagttggaaaaaagtaacctttgaactggcagtggtttcaagtcacatataaaggcaatatgttgcctttagtttttcttccatagtgatccgaagatgagacctgaagttaacagatgctggcataaacacagttaaagcatgctaggaaatcatgtagagggaagaaagctgtctcagataaactgacttttgccttatctgagaaattgcagcattcttaggagatatggtaatggcagtggaaatagccacattaacatgttagaacttttgatgagtgagcaactgtatctttttttttttttttgagaggatggtattattcatcttaattcaaggccacccaaatatgtcaaatttccggaactccatagttaaaggaaatttccactaattctgtgaacatattttatctcttttaattgtattctgtagctaggagcttgggttcttggaagtcaatttcattggtggcaagaggagggcataattaattctaacaagttcatttcatagtgtcatttaaaaatagaatacttctgtctggagtgtgtaaattgatgttgaatgttcatgatgttctctcatacatacctcaattcagacgtaactatgactgggatgctttctgtttcaggtaaagaatctcatttggacacattgagtcgggcacaactgacccaacttttcttagcctcagtcctggaatgccctttctataaggtaaaagcatgaactatatgtggctttatttccccatgggtgcagtttccttttaagttcctttacttctgatctgtctcaataacctgaaaaagcagaatttcatttacttggagtcagttgccaccagataggcttttctttgataaatggaccccatttttgtgttcttgttcttgaaggaacaatttcctgctgtttaagatttcttaggaggttttatcaagtgctgcaggcatgtgagttacagtatttctccattctctctgaaggttttacagggttttagtactaggtttactactaggtttcccatagctgtttgttatcaaagtgtgaatgtctggactgaacaaatacctaaattatttgcaagtacagtatatttttaagccaagccagaaatttcacttttatctaatagagtttagtttatctagagttcgctcttcccataaagacctataaagatttatcctattacctatcacattccttatgtagaatcagaaatagcacaccagactatgacattctctctctgcttctctctacttgactctgaatcatagtttagagtatctgatttttgaaataaggtaataagaatggaaaaataccccttttttaaaacagcttagacagtactaagttatataaagataaataatagttaaccccgatctcttaccatttctaaaggaacagtattaaaagcagtttctacgcccaaatgtatacagatacataaacactgtctattttttttctcttttcaaggaatgagactcactaatcaaagtacaatttgcttttatgcgcagtatatcatggccatccctcgaggccagtgcatacagatcacatgcattctttttagaaaggcatgatatttcatggtgtttattctactattgatgcacttggaggtttttgcaacttttgtctctatcgggaatgctataataaacattcttgcaaatcctgtcatactagagcctttttggtttttttcatatataaactagattcccaaaaatgtgattagtggattaatttttgatggatactggcagattttttttccctaatagttacagatgtcacatttccccagcaatgaatgaaggtggccatgtctcctccacttctattgcagtgtgttagtagtctctttaatttgtgttactcaactacatgaaagaggatatcatatcatatatttaagttgcattttaatgagcattaatgaagtttagcatattttcaaatatgtgttggccatttacatttcttttgaattgcctttctacaccttaatttatttctgttggatggtttgtctttaaggactcattgtaaaacagatattaactattatgaatgttgtacatattttcccgatttgtactcttttattactttttaatattacttatgatgtatttttaaatgttctgtagtcgaatctgtcttttatgacttccgaggttcctatctcaagagcatgaatattttacatttttaaaaataatatcttttaaattttatttagatctttgatctaaaagtaaaattgaatttttatttatgtattctaattaacaaaaattgtatatacttattatgttcatgttgttttgaaatatgtatacattgtagaatggctaaatcaaaccaattaacatgtgtattacctccatatctatcattttattttgtggtaagaatatttaaaatgtactcttgccgtgcgcagtggctcatgcctgtaatcgcagcacttttggaggccaaggcgggtggatcacctgaggtcaggagttcgagaccagccttgctaacatggtgaaaccctgtctctactaaaaatacaaaaaattagccgggcatgatggcacacgcctgtagtcccagctactctggactctgagttaggagaatcgctcaacccaggaggcggaggttgcagtgagccgaggtcgcgtcattgtactccagcctgggcaacaagagtgaaactctgtctcagaaacaaaaacaaaaacaaacaaaaaaaaaggtaaaaaagtactctcagccattttcaagcacgcaatcattcttattaactatagtcagcatgttgtacacctggaatttattagcatctgtcatggatgacagaagtttaatttagttattttccaaataaataaccattttctccagcatcgtttattatattgctatccttttcttcctaaactggaatgtcatttatatcacattttccattacagattgagtatcccttatccaaaatgctcaggaccagaagtgtttcagctttcagattttttcatattttaaaatattctcattatatttaccagttcagcatccctaattcaaaaatttgaaatccagaatgcttcatgagcattttctttaagcagcctgtctgtgcttaaaaggtttcggattttggagcattttggattttggattttcagattagagaaattaaacctgtgttgaaaactttagttgtgtgtacttaagacccttgggacaattctcagttctaaaaatgtttcttgaactgttagcattattatgtttcttctcactctctcctcactcctttttaccttccttctttacttttctttctgtttatggtaaccagtgactactgtaaaaacacatataaaagacattttgaactattagacttgcactgtaagaagagaagtttgcattatcattttgagagagatgcctgtcccaattcctggaaaagtatcatgcctataaagtaatgttatatcaaacttttctacctaggtaaccttcaatttattctctgttgttatatcttatttttctttctcacatttgcacttatgattttttagggtccaaaactccttcctaaatatcaagtgaagtcatttcttaccccatgctgttccctggagacccctgtggattctcagctttatagatatgtgaagattgggctgactaaccttttaggagcaagattatattttgctccaaaagtgttgacaccctattgttatacaataggtaagtagtataaggagttttgttgttttaaacctaagcatcctgttcgattttggagatatatgggacttagaagcaatagaagttctctggaaatgcaaaatggaatggtcccttccctgaaggcaagttggggttagcagcagagccgttgagtcaagactgtctgggtttaagtctcaaatattagccacgtagtagcagaatatcctgggcagaatatttaacctttttctgcttgcttcttcctctgtaaaatgatagtaatattgacctcaaagacttacttaaggtctaaataaaatagtacctggaacgtaggaaatgctcactaattgttagctactactataacctaggcttgtactgtccaaatatagtagccactagaccatgtggctatttaaatttaaattattaaaagtttaagaaaattcaattcctcagtcacattgtaagtgctcagtagccacatgtggctcatggctgccaaattggacagcaccattataaagatttccacatcacagaaatttctcctggacagcactgacaagagactccaagtcctccgtccttacagttcttctaacttgatgagcagaagaaagccttctcgtaaaggacagcagttcataggcttcagatggtcacttctcttctctttacgaagggaactgcagtttaccagaggggaaggacagttcggaagccttccgtgctcgcagaccaggtgtctgggtgtggcatgctttctttacttaccatggaggcactgcaagttggaatgatggaagttatgagttgcacagatgtctaatgtcttaactcaagggttttcttcacagtctggattgaaggatctctgccacctatcataaggggaaagagaaagcatgcatggttcttgtcataccccagataacttcagaacccattctgtggtttagcgttattgagctttcttaatttaaggctgacttgattgatcataaagccaattgaattaaaattctcaccattgtttggttgtggtcattactttgcagccttcagtccaattgatcaatgcaaggtggaaggaatcaaagcaaagcaaaggaatgaatacaggaagatagtgtttgtgagggtatcacacgaggaatttttcctttcttctctcaccagatgttgaaattaaattagatgaagaaggatttgtattgccatccacagctaatgaagatatccataaaaggtacaggaaaatgttgtgtttttcacattacaagactcgttgaggctaataagcagcggtatctttttctcaagaaggtgaaaaaaatagatatgattctggaaattaaaatactacatttcagaataccatgttgggaaattccttgtaatattttataaacattaatattaataagatcaaattcatgattcatttgaaaataatattggcacatagtaatagccaaatcccaaataaactttggcaactaaaatatataataaatattttggattatttaaaaaattaagtatttttctccttttttatttttcaggatagcactgtgtattgatggtccaaaaaggttttgctccaatagcaaacacttactggggaaagaagctattaaacaaagacacctacagttactcggttatcaagttgttcaggtacggtttcacctattttttttgtttcccaaaagcaaatcctatttcaaaattatttttccaggttacttttaaaaagtaatctgaggcacagtaaaattttaaagaatttgatcaggcagcaattattgaactggacagcacaaaactcgaaatggcttgggaacccaagagggaggcttttataggaagaacacaagtacacaaagaatctacttgactggttacagttacatattcttgctgccttgtttgaactattctgtggaaagttcctagttatataattattagtttgtgagatgcttctgattggttgagcttaagttctgtttttctgtagtagaagcttctacaagaaatagcccaagttaaattttgcttaacatttgcactttaagcaaagttaaggttattttcaaggcccaactggcttggtctgctcagggatttttcaggcacaggctccattttaatttgcttttacagtactaactggtttgccagcccagtggaccaccgatcttacgtctagtttaaatcccaacgttgttaattcggcttaaatctcttgacttatattttgaaatacagaattttcagagctttgatttttcaaaagtggggcctacctatattcattataagctatgcttaaccctgcttttagaattactcaattgttggaatatatgttctgttttaatttctccttgatttaataaataaaaatgaacaagataatccattaaaataaggagcttcaccaacacttaatatttaagaccttttaaatatttcactgtagataatgtaagaaggtcttatgtgagggctcagcagtgcgtgagaatgagcgctgccctaattctctaagctgtcagtactaggcagcactgtggtttcatatctgctgacttttttctccatcttgcacatccccagctgaatattcctaaaactaatcatgccagtgtctactcagaagcttcaatgtttctttactgcttacagaataaagtaaaaacttctctacatcttaacattcaagaccctccaatggttggcctgcagccaggctgcaggcacatgattactacctggcccctctgctcccagctgagcagactctctcctttgctgcgcctcctgctctctccctcttcattccctctttgtccctgctgcgtcctccagctctctgaatacctaccttccagcagtttgtcggcatccccaccctcatctaatgaaatgctcactccctcttagcactagatcaccaacctacagcttgttttttatatttattgtgtaatttaacttgccacccaagttgtgaactcctggagaacaagagatcatgtttaattcttatttgcatattctacatattaattcatcaaatatttaccaagccccttctcagtgccaggcactgttctagacattggggatacaggatgaagaagctggttgggatatttgccttccaggagcttacattccgctgtggggaagcgtgtaagaaacaaacaaagtaaccaatagccagaggaacctcagattttgaaggatcttgaccagttttacttttctacctttacagatcccctatcatgagattgggatgctaaaatcaagacgtgaattggtggaatatttacaaagaaaactgttttctcaaaacactgttcattggttgcaagaatgaatactgacttcagaactcaaacaatggaagaacttgcatttttatggaactcag

SEQ ID NO: 12014 - DNA, 637 bp, Homo sapiens
gaccacccggagtgattgcccggcagagcgcggtaaagaatctcatttggacacattgagtcgggcacaactgacccaacttttcttagcctcagtcctggaatgccctttctataagggtccaaaactccttcctaaatatcaagtgaagtcatttcttaccccatgctgttccctggagacccctgtggattctcagctttatagatatgtgaagattgggctgactaaccttttaggagcaagattatattttgctccaaaagtgttgacaccctattgttatacaatagatgttgaaattaaattagatgaagaaggatttgtattgccatccacagctaatgaagatatccataaaaggatagcactgtgtattgatggtccaaaaaggttttgctccaatagcaaacacttactggggaaagaagctattaaacaaagacacctacagttactcggttatcaagttgttcagatcccctatcatgagattgggatgctaaaatcaagacgtgaattggtggaatatttacaaagaaaactgttttctcaaaacactgttcattggttgcaagaatgaatactgacttcagaactcaaacaatggaagaacttgcatttttatggaactcag

SEQ ID NO: 12015 - DNA, 1688 bp, Homo sapiens
aggcccacgacgcccaggcgcttccgcgaccacccggagtgattgcccggcagagcgcggtaggtgtcaacgcggggtctccgcgcagttggtccggctgggtgtcaaagacctggccggctttctcctcaggctgcgccgcccggcccgtgtctcagcgcaggtccccggggcgccgagtttgggggtgctcgccccgcgggtccctttcattcctaggaaaacgcgccgcggggcctcccgtctgtctgtcttgcacacacgtgttgccaaatccccccgcaccgtctttagatctggactggccgccccaccttctcccttcattgatctatgttttgctttttcttttcctaccttgtttccattgacaaagtagaccctttccttcaacactaaccttctcccgacaccgaggggaaaccaacagcttagggcctttccagcgcgtttttacccttgccttgctctaacctcgcctaattttgcccactttacctgttctttgatttctatccaaatgcaatttcttccttcaaccaacatttaagggccacccttaagagctacattgcctgagtttgaaccctagctctgccacttaaccacctgcataaactgggcaaagtaactttgtgcttcaacttcttcctcgtgtaaaatgatagtaaaagtactgaatctgtgtaagttaatagaatacctacaacagtgtttagcaagtaatagcgattgttattgttcaatgtcagccactcttctaactctaggatgcagagactttgcccctctggtgtttatatgttaaccatcctttttttttttttttttttttttccagatactcgtttgtagtttcataaacattgatgttgggtcaatcatgttctcaatgtatttaaccatgtgtttttaaattttttaatttagttatcaaattgagaatctgatggtatggcattaatcaccttgaggaagaacctttatcgtttatctgattttcagatgcatagagctctggctgctttaaaaaataaacctctaaatcatgttcacaaggtagtcaaggagcgtctgtgcccttggttgtgttcacgacaacctgagcctttcggggtcaaattccatcatgcccattgtaaaaagtttcattcgaaaaatggaaatgaccttcatccactcggtggaccagtgttctctcaagtatctgactgcgacaggcttgaacaaaatgttaaaaatgaggagagtcagatgttttacaggagactgagcaacttgacttcatcagaagaagtgctaagttttataagcacgatggaaaccctgcctgacactatggcagcaggagctttacaacgaatttgtgaagtggaaaaaaaggatggtgatcaagggctgccaaaagaaatactggagaatagcatctttcaagctttatgctttcagtttgaaaaggagccctcacagctgtcaaacactagtttagtgactgctttgcaagctctgattctgttgcatgtggatcctcaaagtagcctgttgctgaacctggtggcagaatgccaaaatcgtctcagaaaaggtggcatggaagttcgcaatctttgtattcttggggaaagtctgattacactgcacagttcaggttgtgtgacactagaactcattataaatcaacttcaagg

SEQ ID NO: 12016 - DNA, 817 bp, Homo sapiens
aggcccacgacgcccaggcgcttccgcgaccacccggagtgattgcccggcagagcgcgttatcaaattgagaatctgatggtatggcattaatcaccttgaggaagaacctttatcgtttatctgattttcagatgcatagagctctggctgctttaaaaaataaacctctaaatcatgttcacaaggtagtcaaggagcgtctgtgcccttggttgtgttcacgacaacctgagcctttcggggtcaaattccatcatgcccattgtaaaaagtttcattcgaaaaatggaaatgaccttcatccactcggtggaccagtgttctctcaagtatctgactgcgacaggcttgaacaaaatgttaaaaatgaggagagtcagatgttttacaggagactgagcaacttgacttcatcagaagaagtgctaagttttataagcacgatggaaaccctgcctgacactatggcagcaggagctttacaacgaatttgtgaagtggaaaaaaaggatggtgatcaagggctgccaaaagaaatactggagaatagcatctttcaagctttatgctttcagtttgaaaaggagccctcacagctgtcaaacactagtttagtgactgctttgcaagctctgattctgttgcatgtggatcctcaaagtagcctgttgctgaacctggtggcagaatgccaaaatcgtctcagaaaaggtggcatggaagttcgcaatctttgtattcttggggaaagtctgattacactgcacagttcaggttgtgtgacactagaactcattataaatcaacttcaagg

SEQ ID NO: 12017 - DNA, 8768 bp, Homo sapiens
tgatgttgggtcaatcatgttctcaatgtatttaaccatgtgtttttaaattttttaatttagttatcaaattgagaatctgatggtatggcattaatcaccttgaggaagaacctttatcgtttatctgattttcagatgcatagagctctggctgctttaaaaaataaacctctaaatcatgttcacaaggtagtcaaggagcgtctgtgcccttggttgtgttcacgacaacctgagcctttcggggtcaaattccatcatgcccattgtaaaaagtttcattcgaaaaatggaaatgaccttcatccactcggtggaccagtgttctctcaagtatctgactgcgacaggcttgaacaaaatgttaaaaatgaggagagtcagatgttttacaggagactgagcaacttgacttcatcagaagaagtgctaagttttataagcacgatggaaaccctgcctgacactatggcagcaggagctttacaacgaatttgtgaagtggaaaaaaaggatggtgatcaagggctgccaaaagaaatactggagaatagcatctttcaagctttatgctttcagtttgaaaaggagccctcacagctgtcaaacactagtttagtgactgctttgcaagctctgattctgttgcatgtggatcctcaaagtagcctgttgctgaacctggtggcagaatgccaaaatcgtctcagaaaaggtggcatggaagttcgcaatctttgtattcttggggaaagtctgattacactgcacagttcaggttgtgtgacactagaactcattataaatcaacttcaaggtgaaaaattggaaacatttaccccggaggatattgtggccctttatagaatcttgcaggcatgtactgaaaaagtggatgaacaccaaacatttttaaataagataaacaacttttccctatcaatagtttccaacctgagtcctaaattgattagccaaatgctcactgccctggtggttcttgatcaaagtcaagcatttcctctgattataaaattgggcaaatatgtcgtgaggcatgtcccacatttcactaacgaggagcttaggagagtcttggaggcgttcatatattttgggcaccatgacacattttttacaaaagccctagagcatcgtgtagctgcggtgtgcctcacgttggatcctgaagttgtctgcagggtcatggagtactgcagtagagaactgattctttcaaaacccatcctcaatgcagtggcagaaacttttgtttgccaaacagaaaaattttcacctcgtcagatttctgccttaatggaaccatttgggaaactcaattatttgccaccaaatgcctctgctttatttagaaagctggaaaacgtgctattcactcatttcaattattttccacccaaatcattattgaaacttcttcattcatgttcacttaatgaatgccatccagtcaactttctggcaaaaatattcaagcctcttttccttcaacggctgcaaggtgagttggttataaattctgacagttggaaaaaagtaacctttgaactggcagtggtttcaagtcacatataaaggcaatatgttgcctttagtttttcttccatagtgatccgaagatgagacctgaagttaacagatgctggcataaacacagttaaagcatgctaggaaatcatgtagagggaagaaagctgtctcagataaactgacttttgccttatctgagaaattgcagcattcttaggagatatggtaatggcagtggaaatagccacattaacatgttagaacttttgatgagtgagcaactgtatctttttttttttttttgagaggatggtattattcatcttaattcaaggccacccaaatatgtcaaatttccggaactccatagttaaaggaaatttccactaattctgtgaacatattttatctcttttaattgtattctgtagctaggagcttgggttcttggaagtcaatttcattggtggcaagaggagggcataattaattctaacaagttcatttcatagtgtcatttaaaaatagaatacttctgtctggagtgtgtaaattgatgttgaatgttcatgatgttctctcatacatacctcaattcagacgtaactatgactgggatgctttctgtttcaggtaaagaatctcatttggacacattgagtcgggcacaactgacccaacttttcttagcctcagtcctggaatgccctttctataaggtaaaagcatgaactatatgtggctttatttccccatgggtgcagtttccttttaagttcctttacttctgatctgtctcaataacctgaaaaagcagaatttcatttacttggagtcagttgccaccagataggcttttctttgataaatggaccccatttttgtgttcttgttcttgaaggaacaatttcctgctgtttaagatttcttaggaggttttatcaagtgctgcaggcatgtgagttacagtatttctccattctctctgaaggttttacagggttttagtactaggtttactactaggtttcccatagctgtttgttatcaaagtgtgaatgtctggactgaacaaatacctaaattatttgcaagtacagtatatttttaagccaagccagaaatttcacttttatctaatagagtttagtttatctagagttcgctcttcccataaagacctataaagatttatcctattacctatcacattccttatgtagaatcagaaatagcacaccagactatgacattctctctctgcttctctctacttgactctgaatcatagtttagagtatctgatttttgaaataaggtaataagaatggaaaaataccccttttttaaaacagcttagacagtactaagttatataaagataaataatagttaaccccgatctcttaccatttctaaaggaacagtattaaaagcagtttctacgcccaaatgtatacagatacataaacactgtctattttttttctcttttcaaggaatgagactcactaatcaaagtacaatttgcttttatgcgcagtatatcatggccatccctcgaggccagtgcatacagatcacatgcattctttttagaaaggcatgatatttcatggtgtttattctactattgatgcacttggaggtttttgcaacttttgtctctatcgggaatgctataataaacattcttgcaaatcctgtcatactagagcctttttggtttttttcatatataaactagattcccaaaaatgtgattagtggattaatttttgatggatactggcagattttttttccctaatagttacagatgtcacatttccccagcaatgaatgaaggtggccatgtctcctccacttctattgcagtgtgttagtagtctctttaatttgtgttactcaactacatgaaagaggatatcatatcatatatttaagttgcattttaatgagcattaatgaagtttagcatattttcaaatatgtgttggccatttacatttcttttgaattgcctttctacaccttaatttatttctgttggatggtttgtctttaaggactcattgtaaaacagatattaactattatgaatgttgtacatattttcccgatttgtactcttttattactttttaatattacttatgatgtatttttaaatgttctgtagtcgaatctgtcttttatgacttccgaggttcctatctcaagagcatgaatattttacatttttaaaaataatatcttttaaattttatttagatctttgatctaaaagtaaaattgaatttttatttatgtattctaattaacaaaaattgtatatacttattatgttcatgttgttttgaaatatgtatacattgtagaatggctaaatcaaaccaattaacatgtgtattacctccatatctatcattttattttgtggtaagaatatttaaaatgtactcttgccgtgcgcagtggctcatgcctgtaatcgcagcacttttggaggccaaggcgggtggatcacctgaggtcaggagttcgagaccagccttgctaacatggtgaaaccctgtctctactaaaaatacaaaaaattagccgggcatgatggcacacgcctgtagtcccagctactctggactctgagttaggagaatcgctcaacccaggaggcggaggttgcagtgagccgaggtcgcgtcattgtactccagcctgggcaacaagagtgaaactctgtctcagaaacaaaaacaaaaacaaacaaaaaaaaaggtaaaaaagtactctcagccattttcaagcacgcaatcattcttattaactatagtcagcatgttgtacacctggaatttattagcatctgtcatggatgacagaagtttaatttagttattttccaaataaataaccattttctccagcatcgtttattatattgctatccttttcttcctaaactggaatgtcatttatatcacattttccattacagattgagtatcccttatccaaaatgctcaggaccagaagtgtttcagctttcagattttttcatattttaaaatattctcattatatttaccagttcagcatccctaattcaaaaatttgaaatccagaatgcttcatgagcattttctttaagcagcctgtctgtgcttaaaaggtttcggattttggagcattttggattttggattttcagattagagaaattaaacctgtgttgaaaactttagttgtgtgtacttaagacccttgggacaattctcagttctaaaaatgtttcttgaactgttagcattattatgtttcttctcactctctcctcactcctttttaccttccttctttacttttctttctgtttatggtaaccagtgactactgtaaaaacacatataaaagacattttgaactattagacttgcactgtaagaagagaagtttgcattatcattttgagagagatgcctgtcccaattcctggaaaagtatcatgcctataaagtaatgttatatcaaacttttctacctaggtaaccttcaatttattctctgttgttatatcttatttttctttctcacatttgcacttatgattttttagggtccaaaactccttcctaaatatcaagtgaagtcatttcttaccccatgctgttccctggagacccctgtggattctcagctttatagatatgtgaagattgggctgactaaccttttaggagcaagattatattttgctccaaaagtgttgacaccctattgttatacaataggtaagtagtataaggagttttgttgttttaaacctaagcatcctgttcgattttggagatatatgggacttagaagcaatagaagttctctggaaatgcaaaatggaatggtcccttccctgaaggcaagttggggttagcagcagagccgttgagtcaagactgtctgggtttaagtctcaaatattagccacgtagtagcagaatatcctgggcagaatatttaacctttttctgcttgcttcttcctctgtaaaatgatagtaatattgacctcaaagacttacttaaggtctaaataaaatagtacctggaacgtaggaaatgctcactaattgttagctactactataacctaggcttgtactgtccaaatatagtagccactagaccatgtggctatttaaatttaaattattaaaagtttaagaaaattcaattcctcagtcacattgtaagtgctcagtagccacatgtggctcatggctgccaaattggacagcaccattataaagatttccacatcacagaaatttctcctggacagcactgacaagagactccaagtcctccgtccttacagttcttctaacttgatgagcagaagaaagccttctcgtaaaggacagcagttcataggcttcagatggtcacttctcttctctttacgaagggaactgcagtttaccagaggggaaggacagttcggaagccttccgtgctcgcagaccaggtgtctgggtgtggcatgctttctttacttaccatggaggcactgcaagttggaatgatggaagttatgagttgcacagatgtctaatgtcttaactcaagggttttcttcacagtctggattgaaggatctctgccacctatcataaggggaaagagaaagcatgcatggttcttgtcataccccagataacttcagaacccattctgtggtttagcgttattgagctttcttaatttaaggctgacttgattgatcataaagccaattgaattaaaattctcaccattgtttggttgtggtcattactttgcagccttcagtccaattgatcaatgcaaggtggaaggaatcaaagcaaagcaaaggaatgaatacaggaagatagtgtttgtgagggtatcacacgaggaatttttcctttcttctctcaccagatgttgaaattaaattagatgaagaaggatttgtattgccatccacagctaatgaagatatccataaaaggtacaggaaaatgttgtgtttttcacattacaagactcgttgaggctaataagcagcggtatctttttctcaagaaggtgaaaaaaatagatatgattctggaaattaaaatactacatttcagaataccatgttgggaaattccttgtaatattttataaacattaatattaataagatcaaattcatgattcatttgaaaataatattggcacatagtaatagccaaatcccaaataaactttggcaactaaaatatataataaatattttggattatttaaaaaattaagtatttttctccttttttatttttcaggatagcactgtgtattgatggtccaaaaaggttttgctccaatagcaaacacttactggggaaagaagctattaaacaaagacacctacagttactcggttatcaagttgttcaggtacggtttcacctattttttttgtttcccaaaagcaaatcctatttcaaaattatttttccaggttacttttaaaaagtaatctgaggcacagtaaaattttaaagaatttgatcaggcagcaattattgaactggacagcacaaaactcgaaatggcttgggaacccaagagggaggcttttataggaagaacacaagtacacaaagaatctacttgactggttacagttacatattcttgctgccttgtttgaactattctgtggaaagttcctagttatataattattagtttgtgagatgcttctgattggttgagcttaagttctgtttttctgtagtagaagcttctacaagaaatagcccaagttaaattttgcttaacatttgcactttaagcaaagttaaggttattttcaaggcccaactggcttggtctgctcagggatttttcaggcacaggctccattttaatttgcttttacagtactaactggtttgccagcccagtggaccaccgatcttacgtctagtttaaatcccaacgttgttaattcggcttaaatctcttgacttatattttgaaatacagaattttcagagctttgatttttcaaaagtggggcctacctatattcattataagctatgcttaaccctgcttttagaattactcaattgttggaatatatgttctgttttaatttctccttgatttaataaataaaaatgaacaagataatccattaaaataaggagcttcaccaacacttaatatttaagaccttttaaatatttcactgtagataatgtaagaaggtcttatgtgagggctcagcagtgcgtgagaatgagcgctgccctaattctctaagctgtcagtactaggcagcactgtggtttcatatctgctgacttttttctccatcttgcacatccccagctgaatattcctaaaactaatcatgccagtgtctactcagaagcttcaatgtttctttactgcttacagaataaagtaaaaacttctctacatcttaacattcaagaccctccaatggttggcctgcagccaggctgcaggcacatgattactacctggcccctctgctcccagctgagcagactctctcctttgctgcgcctcctgctctctccctcttcattccctctttgtccctgctgcgtcctccagctctctgaatacctaccttccagcagtttgtcggcatccccaccctcatctaatgaaatgctcactccctcttagcactagatcaccaacctacagcttgttttttatatttattgtgtaatttaacttgccacccaagttgtgaactcctggagaacaagagatcatgtttaattcttatttgcatattctacatattaattcatcaaatatttaccaagccccttctcagtgccaggcactgttctagacattggggatacaggatgaagaagctggttgggatatttgccttccaggagcttacattccgctgtggggaagcgtgtaagaaacaaacaaagtaaccaatagccagaggaacctcagattttgaaggatcttgaccagttttacttttctacctttacagatcccctatcatgagattgggatgctaaaatcaagacgtgaattggtggaatatttacaaagaaaactgttttctcaaaacactgttcattggttgcaagaatgaatactgacttcagaactcaaacaatggaagaa

SEQ ID NO: 12018 - DNA, 2229 bp, Homo sapiens
tgatgttgggtcaatcatgttctcaatgtatttaaccatgtgtttttaaattttttaatttagttatcaaattgagaatctgatggtatggcattaatcaccttgaggaagaacctttatcgtttatctgattttcagatgcatagagctctggctgctttaaaaaataaacctctaaatcatgttcacaaggtagtcaaggagcgtctgtgcccttggttgtgttcacgacaacctgagcctttcggggtcaaattccatcatgcccattgtaaaaagtttcattcgaaaaatggaaatgaccttcatccactcggtggaccagtgttctctcaagtatctgactgcgacaggcttgaacaaaatgttaaaaatgaggagagtcagatgttttacaggagactgagcaacttgacttcatcagaagaagtgctaagttttataagcacgatggaaaccctgcctgacactatggcagcaggagctttacaacgaatttgtgaagtggaaaaaaaggatggtgatcaagggctgccaaaagaaatactggagaatagcatctttcaagctttatgctttcagtttgaaaaggagccctcacagctgtcaaacactagtttagtgactgctttgcaagctctgattctgttgcatgtggatcctcaaagtagcctgttgctgaacctggtggcagaatgccaaaatcgtctcagaaaaggtggcatggaagttcgcaatctttgtattcttggggaaagtctgattacactgcacagttcaggttgtgtgacactagaactcattataaatcaacttcaaggtgaaaaattggaaacatttaccccggaggatattgtggccctttatagaatcttgcaggcatgtactgaaaaagtggatgaacaccaaacatttttaaataagataaacaacttttccctatcaatagtttccaacctgagtcctaaattgattagccaaatgctcactgccctggtggttcttgatcaaagtcaagcatttcctctgattataaaattgggcaaatatgtcgtgaggcatgtcccacatttcactaacgaggagcttaggagagtcttggaggcgttcatatattttgggcaccatgacacattttttacaaaagccctagagcatcgtgtagctgcggtgtgcctcacgttggatcctgaagttgtctgcagggtcatggagtactgcagtagagaactgattctttcaaaacccatcctcaatgcagtggcagaaacttttgtttgccaaacagaaaaattttcacctcgtcagatttctgccttaatggaaccatttgggaaactcaattatttgccaccaaatgcctctgctttatttagaaagctggaaaacgtgctattcactcatttcaattattttccacccaaatcattattgaaacttcttcattcatgttcacttaatgaatgccatccagtcaactttctggcaaaaatattcaagcctcttttccttcaacggctgcaaggtaaagaatctcatttggacacattgagtcgggcacaactgacccaacttttcttagcctcagtcctggaatgccctttctataagggtccaaaactccttcctaaatatcaagtgaagtcatttcttaccccatgctgttccctggagacccctgtggattctcagctttatagatatgtgaagattgggctgactaaccttttaggagcaagattatattttgctccaaaagtgttgacaccctattgttatacaatagccttcagtccaattgatcaatgcaaggtggaaggaatcaaagcaaagcaaaggaatgaatacaggaagatagtgtttgtgagggtatcacacgaggaatttttcctttcttctctcaccagatgttgaaattaaattagatgaagaaggatttgtattgccatccacagctaatgaagatatccataaaaggatagcactgtgtattgatggtccaaaaaggttttgctccaatagcaaacacttactggggaaagaagctattaaacaaagacacctacagttactcggttatcaagttgttcagatcccctatcatgagattgggatgctaaaatcaagacgtgaattggtggaatatttacaaagaaaactgttttctcaaaacactgttcattggttgcaagaatgaatactgacttcagaactcaaacaatggaagaa

SEQ ID NO: 12019 - DNA, 1543 bp, Homo sapiens
cacgacgcccaggcgcttccgcgaccacccggagtgattgcccggcagagcgcggtaggtgtcaacgcggggtctccgcgcagttggtccggctgggtgtcaaagacctggccggctttctcctcaggctgcgccgcccggcccgtgtctcagcgcaggtccccggggcgccgagtttgggggtgctcgccccgcgggtccctttcattcctaggaaaacgcgccgcggggcctcccgtctgtctgtcttgcacacacgtgttgccaaatccccccgcaccgtctttagatctggactggccgccccaccttctcccttcattgatctatgttttgctttttcttttcctaccttgtttccattgacaaagtagaccctttccttcaacactaaccttctcccgacaccgaggggaaaccaacagcttagggcctttccagcgcgtttttacccttgccttgctctaacctcgcctaattttgcccactttacctgttctttgatttctatccaaatgcaatttcttccttcaaccaacatttaagggccacccttaagagctacattgcctgagtttgaaccctagctctgccacttaaccacctgcataaactgggcaaagtaactttgtgcttcaacttcttcctcgtgtaaaatgatagtaaaagtactgaatctgtgtaagttaatagaatacctacaacagtgtttagcaagtaatagcgattgttattgttcaatgtcagccactcttctaactctaggatgcagagactttgcccctctggtgtttatatgttaaccatcctttttttttttttttttttttttccagatactcgtttgtagtttcataaacattgatgttgggtcaatcatgttctcaatgtatttaaccatgtgtttttaaattttttaatttagttatcaaattgagaatctgatggtatggcattaatcaccttgaggaagaacctttatcgtttatctgattttcagatgcatagagctctggctgctttaaaaaataaacctctaaatcatgttcacaaggtagtcaaggagcgtctgtgcccttggttgtgttcacgacaacctgagcctttcggggtcaaattccatcatgcccattgtaaaaagtttcattcgaaaaatggaaatgaccttcatccactcggtggaccagtgttctctcaagtatctgactgcgacaggcttgaacaaaatgttaaaaatgaggagagtcagatgttttacaggagactgagcaacttgacttcatcagaagaagtgctaagttttataagcacgatggaaaccctgcctgacactatggcagcaggagctttacaacgaatttgtgaagtggaaaaaaaggatggtgatcaagggctgccaaaagaaatactggagaatagcatctttcaagctttatgctttcagtttgaaaaggagccctcacagctgtcaaacactagtttagtgactgctttgcaagctctgattctgttgcatgtggatcctcaaagtagcctgttgctg

SEQ ID NO: 12020 - DNA, 597 bp, Homo sapiens
cacgacgcccaggcgcttccgcgaccacccggagtgattgcccggcagagcgcgatgcatagagctctggctgctttaaaaaataaacctctaaatcatgttcacaaggtagtcaaggagcgtctgtgcccttggttgtgttcacgacaacctgagcctttcggggtcaaattccatcatgcccattgtaaaaagtttcattcgaaaaatggaaatgaccttcatccactcggtggaccagtgttctctcaagtatctgactgcgacaggcttgaacaaaatgttaaaaatgaggagagtcagatgttttacaggagactgagcaacttgacttcatcagaagaagtgctaagttttataagcacgatggaaaccctgcctgacactatggcagcaggagctttacaacgaatttgtgaagtggaaaaaaaggatggtgatcaagggctgccaaaagaaatactggagaatagcatctttcaagctttatgctttcagtttgaaaaggagccctcacagctgtcaaacactagtttagtgactgctttgcaagctctgattctgttgcatgtggatcctcaaagtagcctgttgctg

SEQ ID NO: 12021 - DNA, 8774 bp, Homo sapiens
tgatgttgggtcaatcatgttctcaatgtatttaaccatgtgtttttaaattttttaatttagttatcaaattgagaatctgatggtatggcattaatcaccttgaggaagaacctttatcgtttatctgattttcagatgcatagagctctggctgctttaaaaaataaacctctaaatcatgttcacaaggtagtcaaggagcgtctgtgcccttggttgtgttcacgacaacctgagcctttcggggtcaaattccatcatgcccattgtaaaaagtttcattcgaaaaatggaaatgaccttcatccactcggtggaccagtgttctctcaagtatctgactgcgacaggcttgaacaaaatgttaaaaatgaggagagtcagatgttttacaggagactgagcaacttgacttcatcagaagaagtgctaagttttataagcacgatggaaaccctgcctgacactatggcagcaggagctttacaacgaatttgtgaagtggaaaaaaaggatggtgatcaagggctgccaaaagaaatactggagaatagcatctttcaagctttatgctttcagtttgaaaaggagccctcacagctgtcaaacactagtttagtgactgctttgcaagctctgattctgttgcatgtggatcctcaaagtagcctgttgctgaacctggtggcagaatgccaaaatcgtctcagaaaaggtggcatggaagttcgcaatctttgtattcttggggaaagtctgattacactgcacagttcaggttgtgtgacactagaactcattataaatcaacttcaaggtgaaaaattggaaacatttaccccggaggatattgtggccctttatagaatcttgcaggcatgtactgaaaaagtggatgaacaccaaacatttttaaataagataaacaacttttccctatcaatagtttccaacctgagtcctaaattgattagccaaatgctcactgccctggtggttcttgatcaaagtcaagcatttcctctgattataaaattgggcaaatatgtcgtgaggcatgtcccacatttcactaacgaggagcttaggagagtcttggaggcgttcatatattttgggcaccatgacacattttttacaaaagccctagagcatcgtgtagctgcggtgtgcctcacgttggatcctgaagttgtctgcagggtcatggagtactgcagtagagaactgattctttcaaaacccatcctcaatgcagtggcagaaacttttgtttgccaaacagaaaaattttcacctcgtcagatttctgccttaatggaaccatttgggaaactcaattatttgccaccaaatgcctctgctttatttagaaagctggaaaacgtgctattcactcatttcaattattttccacccaaatcattattgaaacttcttcattcatgttcacttaatgaatgccatccagtcaactttctggcaaaaatattcaagcctcttttccttcaacggctgcaaggtgagttggttataaattctgacagttggaaaaaagtaacctttgaactggcagtggtttcaagtcacatataaaggcaatatgttgcctttagtttttcttccatagtgatccgaagatgagacctgaagttaacagatgctggcataaacacagttaaagcatgctaggaaatcatgtagagggaagaaagctgtctcagataaactgacttttgccttatctgagaaattgcagcattcttaggagatatggtaatggcagtggaaatagccacattaacatgttagaacttttgatgagtgagcaactgtatctttttttttttttttgagaggatggtattattcatcttaattcaaggccacccaaatatgtcaaatttccggaactccatagttaaaggaaatttccactaattctgtgaacatattttatctcttttaattgtattctgtagctaggagcttgggttcttggaagtcaatttcattggtggcaagaggagggcataattaattctaacaagttcatttcatagtgtcatttaaaaatagaatacttctgtctggagtgtgtaaattgatgttgaatgttcatgatgttctctcatacatacctcaattcagacgtaactatgactgggatgctttctgtttcaggtaaagaatctcatttggacacattgagtcgggcacaactgacccaacttttcttagcctcagtcctggaatgccctttctataaggtaaaagcatgaactatatgtggctttatttccccatgggtgcagtttccttttaagttcctttacttctgatctgtctcaataacctgaaaaagcagaatttcatttacttggagtcagttgccaccagataggcttttctttgataaatggaccccatttttgtgttcttgttcttgaaggaacaatttcctgctgtttaagatttcttaggaggttttatcaagtgctgcaggcatgtgagttacagtatttctccattctctctgaaggttttacagggttttagtactaggtttactactaggtttcccatagctgtttgttatcaaagtgtgaatgtctggactgaacaaatacctaaattatttgcaagtacagtatatttttaagccaagccagaaatttcacttttatctaatagagtttagtttatctagagttcgctcttcccataaagacctataaagatttatcctattacctatcacattccttatgtagaatcagaaatagcacaccagactatgacattctctctctgcttctctctacttgactctgaatcatagtttagagtatctgatttttgaaataaggtaataagaatggaaaaataccccttttttaaaacagcttagacagtactaagttatataaagataaataatagttaaccccgatctcttaccatttctaaaggaacagtattaaaagcagtttctacgcccaaatgtatacagatacataaacactgtctattttttttctcttttcaaggaatgagactcactaatcaaagtacaatttgcttttatgcgcagtatatcatggccatccctcgaggccagtgcatacagatcacatgcattctttttagaaaggcatgatatttcatggtgtttattctactattgatgcacttggaggtttttgcaacttttgtctctatcgggaatgctataataaacattcttgcaaatcctgtcatactagagcctttttggtttttttcatatataaactagattcccaaaaatgtgattagtggattaatttttgatggatactggcagattttttttccctaatagttacagatgtcacatttccccagcaatgaatgaaggtggccatgtctcctccacttctattgcagtgtgttagtagtctctttaatttgtgttactcaactacatgaaagaggatatcatatcatatatttaagttgcattttaatgagcattaatgaagtttagcatattttcaaatatgtgttggccatttacatttcttttgaattgcctttctacaccttaatttatttctgttggatggtttgtctttaaggactcattgtaaaacagatattaactattatgaatgttgtacatattttcccgatttgtactcttttattactttttaatattacttatgatgtatttttaaatgttctgtagtcgaatctgtcttttatgacttccgaggttcctatctcaagagcatgaatattttacatttttaaaaataatatcttttaaattttatttagatctttgatctaaaagtaaaattgaatttttatttatgtattctaattaacaaaaattgtatatacttattatgttcatgttgttttgaaatatgtatacattgtagaatggctaaatcaaaccaattaacatgtgtattacctccatatctatcattttattttgtggtaagaatatttaaaatgtactcttgccgtgcgcagtggctcatgcctgtaatcgcagcacttttggaggccaaggcgggtggatcacctgaggtcaggagttcgagaccagccttgctaacatggtgaaaccctgtctctactaaaaatacaaaaaattagccgggcatgatggcacacgcctgtagtcccagctactctggactctgagttaggagaatcgctcaacccaggaggcggaggttgcagtgagccgaggtcgcgtcattgtactccagcctgggcaacaagagtgaaactctgtctcagaaacaaaaacaaaaacaaacaaaaaaaaaggtaaaaaagtactctcagccattttcaagcacgcaatcattcttattaactatagtcagcatgttgtacacctggaatttattagcatctgtcatggatgacagaagtttaatttagttattttccaaataaataaccattttctccagcatcgtttattatattgctatccttttcttcctaaactggaatgtcatttatatcacattttccattacagattgagtatcccttatccaaaatgctcaggaccagaagtgtttcagctttcagattttttcatattttaaaatattctcattatatttaccagttcagcatccctaattcaaaaatttgaaatccagaatgcttcatgagcattttctttaagcagcctgtctgtgcttaaaaggtttcggattttggagcattttggattttggattttcagattagagaaattaaacctgtgttgaaaactttagttgtgtgtacttaagacccttgggacaattctcagttctaaaaatgtttcttgaactgttagcattattatgtttcttctcactctctcctcactcctttttaccttccttctttacttttctttctgtttatggtaaccagtgactactgtaaaaacacatataaaagacattttgaactattagacttgcactgtaagaagagaagtttgcattatcattttgagagagatgcctgtcccaattcctggaaaagtatcatgcctataaagtaatgttatatcaaacttttctacctaggtaaccttcaatttattctctgttgttatatcttatttttctttctcacatttgcacttatgattttttagggtccaaaactccttcctaaatatcaagtgaagtcatttcttaccccatgctgttccctggagacccctgtggattctcagctttatagatatgtgaagattgggctgactaaccttttaggagcaagattatattttgctccaaaagtgttgacaccctattgttatacaataggtaagtagtataaggagttttgttgttttaaacctaagcatcctgttcgattttggagatatatgggacttagaagcaatagaagttctctggaaatgcaaaatggaatggtcccttccctgaaggcaagttggggttagcagcagagccgttgagtcaagactgtctgggtttaagtctcaaatattagccacgtagtagcagaatatcctgggcagaatatttaacctttttctgcttgcttcttcctctgtaaaatgatagtaatattgacctcaaagacttacttaaggtctaaataaaatagtacctggaacgtaggaaatgctcactaattgttagctactactataacctaggcttgtactgtccaaatatagtagccactagaccatgtggctatttaaatttaaattattaaaagtttaagaaaattcaattcctcagtcacattgtaagtgctcagtagccacatgtggctcatggctgccaaattggacagcaccattataaagatttccacatcacagaaatttctcctggacagcactgacaagagactccaagtcctccgtccttacagttcttctaacttgatgagcagaagaaagccttctcgtaaaggacagcagttcataggcttcagatggtcacttctcttctctttacgaagggaactgcagtttaccagaggggaaggacagttcggaagccttccgtgctcgcagaccaggtgtctgggtgtggcatgctttctttacttaccatggaggcactgcaagttggaatgatggaagttatgagttgcacagatgtctaatgtcttaactcaagggttttcttcacagtctggattgaaggatctctgccacctatcataaggggaaagagaaagcatgcatggttcttgtcataccccagataacttcagaacccattctgtggtttagcgttattgagctttcttaatttaaggctgacttgattgatcataaagccaattgaattaaaattctcaccattgtttggttgtggtcattactttgcagccttcagtccaattgatcaatgcaaggtggaaggaatcaaagcaaagcaaaggaatgaatacaggaagatagtgtttgtgagggtatcacacgaggaatttttcctttcttctctcaccagatgttgaaattaaattagatgaagaaggatttgtattgccatccacagctaatgaagatatccataaaaggtacaggaaaatgttgtgtttttcacattacaagactcgttgaggctaataagcagcggtatctttttctcaagaaggtgaaaaaaatagatatgattctggaaattaaaatactacatttcagaataccatgttgggaaattccttgtaatattttataaacattaatattaataagatcaaattcatgattcatttgaaaataatattggcacatagtaatagccaaatcccaaataaactttggcaactaaaatatataataaatattttggattatttaaaaaattaagtatttttctccttttttatttttcaggatagcactgtgtattgatggtccaaaaaggttttgctccaatagcaaacacttactggggaaagaagctattaaacaaagacacctacagttactcggttatcaagttgttcaggtacggtttcacctattttttttgtttcccaaaagcaaatcctatttcaaaattatttttccaggttacttttaaaaagtaatctgaggcacagtaaaattttaaagaatttgatcaggcagcaattattgaactggacagcacaaaactcgaaatggcttgggaacccaagagggaggcttttataggaagaacacaagtacacaaagaatctacttgactggttacagttacatattcttgctgccttgtttgaactattctgtggaaagttcctagttatataattattagtttgtgagatgcttctgattggttgagcttaagttctgtttttctgtagtagaagcttctacaagaaatagcccaagttaaattttgcttaacatttgcactttaagcaaagttaaggttattttcaaggcccaactggcttggtctgctcagggatttttcaggcacaggctccattttaatttgcttttacagtactaactggtttgccagcccagtggaccaccgatcttacgtctagtttaaatcccaacgttgttaattcggcttaaatctcttgacttatattttgaaatacagaattttcagagctttgatttttcaaaagtggggcctacctatattcattataagctatgcttaaccctgcttttagaattactcaattgttggaatatatgttctgttttaatttctccttgatttaataaataaaaatgaacaagataatccattaaaataaggagcttcaccaacacttaatatttaagaccttttaaatatttcactgtagataatgtaagaaggtcttatgtgagggctcagcagtgcgtgagaatgagcgctgccctaattctctaagctgtcagtactaggcagcactgtggtttcatatctgctgacttttttctccatcttgcacatccccagctgaatattcctaaaactaatcatgccagtgtctactcagaagcttcaatgtttctttactgcttacagaataaagtaaaaacttctctacatcttaacattcaagaccctccaatggttggcctgcagccaggctgcaggcacatgattactacctggcccctctgctcccagctgagcagactctctcctttgctgcgcctcctgctctctccctcttcattccctctttgtccctgctgcgtcctccagctctctgaatacctaccttccagcagtttgtcggcatccccaccctcatctaatgaaatgctcactccctcttagcactagatcaccaacctacagcttgttttttatatttattgtgtaatttaacttgccacccaagttgtgaactcctggagaacaagagatcatgtttaattcttatttgcatattctacatattaattcatcaaatatttaccaagccccttctcagtgccaggcactgttctagacattggggatacaggatgaagaagctggttgggatatttgccttccaggagcttacattccgctgtggggaagcgtgtaagaaacaaacaaagtaaccaatagccagaggaacctcagattttgaaggatcttgaccagttttacttttctacctttacagatcccctatcatgagattgggatgctaaaatcaagacgtgaattggtggaatatttacaaagaaaactgttttctcaaaacactgttcattggttgcaagaatgaatactgacttcagaactcaaacaatggaagaacttgca

SEQ ID NO: 12022 - DNA, 1551 bp, Homo sapiens
tgatgttgggtcaatcatgttctcaatgtatttaaccatgtgtttttaaattttttaatttagttatcaaattgagaatctgatggtatggcattaatcaccttgaggaagaacctttatcgtttatctgattttcagatgcatagagctctggctgctttaaaaaataaacctctaaatcatgttcacaaggtagtcaaggagcgtctgtgcccttggttgtgtgacactagaactcattataaatcaacttcaaggtgaaaaattggaaacatttaccccggaggatattgtggccctttatagaatcttgcaggcatgtactgaaaaagtggatgaacaccaaacatttttaaataagataaacaacttttccctatcaatagtttccaacctgagtcctaaattgattagccaaatgctcactgccctggtggttcttgatcaaagtcaagcatttcctctgattataaaattgggcaaatatgtcgtgaggcatgtcccacatttcactaacgaggagcttaggagagtcttggaggcgttcatatattttgggcaccatgacacattttttacaaaagccctagagcatcgtgtagctgcggtgtgcctcacgttggatcctgaagttgtctgcagggtcatggagtactgcagtagagaactgattctttcaaaacccatcctcaatgcagtggcagaaacttttgtttgccaaacagaaaaattttcacctcgtcagatttctgccttaatggaaccatttgggaaactcaattatttgccaccaaatgcctctgctttatttagaaagctggaaaacgtgctattcactcatttcaattattttccacccaaatcattattgaaacttcttcattcatgttcacttaatgaatgccatccagtcaactttctggcaaaaatattcaagcctcttttccttcaacggctgcaaggtaaagaatctcatttggacacattgagtcgggcacaactgacccaacttttcttagcctcagtcctggaatgccctttctataagggtccaaaactccttcctaaatatcaagtgaagtcatttcttaccccatgctgttccctggagacccctgtggattctcagctttatagatatgtgaagattgggctgactaaccttttaggagcaagattatattttgctccaaaagtgttgacaccctattgttatacaatagatgttgaaattaaattagatgaagaaggatttgtattgccatccacagctaatgaagatatccataaaaggatagcactgtgtattgatggtccaaaaaggttttgctccaatagcaaacacttactggggaaagaagctattaaacaaagacacctacagttactcggttatcaagttgttcagatcccctatcatgagattgggatgctaaaatcaagacgtgaattggtggaatatttacaaagaaaactgttttctcaaaacactgttcattggttgcaagaatgaatactgacttcagaactcaaacaatggaagaacttgca

SEQ ID NO: 12023 - DNA, 1688 bp, Homo sapiens
tttcttctcactctctcctcactcctttttaccttccttctttacttttctttctgtttatggtaaccagtgactactgtaaaaacacatataaaagacattttgaactattagacttgcactgtaagaagagaagtttgcattatcattttgagagagatgcctgtcccaattcctggaaaagtatcatgcctataaagtaatgttatatcaaacttttctacctaggtaaccttcaatttattctctgttgttatatcttatttttctttctcacatttgcacttatgattttttagggtccaaaactccttcctaaatatcaagtgaagtcatttcttaccccatgctgttccctggagacccctgtggattctcagctttatagatatgtgaagattgggctgactaaccttttaggagcaagattatattttgctccaaaagtgttgacaccctattgttatacaataggtaagtagtataaggagttttgttgttttaaacctaagcatcctgttcgattttggagatatatgggacttagaagcaatagaagttctctggaaatgcaaaatggaatggtcccttccctgaaggcaagttggggttagcagcagagccgttgagtcaagactgtctgggtttaagtctcaaatattagccacgtagtagcagaatatcctgggcagaatatttaacctttttctgcttgcttcttcctctgtaaaatgatagtaatattgacctcaaagacttacttaaggtctaaataaaatagtacctggaacgtaggaaatgctcactaattgttagctactactataacctaggcttgtactgtccaaatatagtagccactagaccatgtggctatttaaatttaaattattaaaagtttaagaaaattcaattcctcagtcacattgtaagtgctcagtagccacatgtggctcatggctgccaaattggacagcaccattataaagatttccacatcacagaaatttctcctggacagcactgacaagagactccaagtcctccgtccttacagttcttctaacttgatgagcagaagaaagccttctcgtaaaggacagcagttcataggcttcagatggtcacttctcttctctttacgaagggaactgcagtttaccagaggggaaggacagttcggaagccttccgtgctcgcagaccaggtgtctgggtgtggcatgctttctttacttaccatggaggcactgcaagttggaatgatggaagttatgagttgcacagatgtctaatgtcttaactcaagggttttcttcacagtctggattgaaggatctctgccacctatcataaggggaaagagaaagcatgcatggttcttgtcataccccagataacttcagaacccattctgtggtttagcgttattgagctttcttaatttaaggctgacttgattgatcataaagccaattgaattaaaattctcaccattgtttggttgtggtcattactttgcagccttcagtccaattgatcaatgcaaggtggaaggaatcaaagcaaagcaaaggaatgaatacaggaagatagtgtttgtgagggtatcacacgaggaatttttcctttcttctctcaccagatgttgaaattaaattagatgaagaaggatttgtattgccatcc

SEQ ID NO: 12024 - DNA, 518 bp, Homo sapiens
tttcttctcactctctcctcactcctttttaccttccttctttacttttctttctgtttatggtaaccagtgactactgtaaaaacacatataaaagacattttgaactattagacttgcactgtaagaagagaagtttgcattatcattttgagagagatgcctgtcccaattcctggaaaagtatcatgcctataaagtaatgttatatcaaacttttctacctaggtaaccttcaatttattctctgttgttatatcttatttttctttctcacatttgcacttatgattttttagggtccaaaactccttcctaaatatcaagtgaagtcatttcttaccccatgctgttccctggagacccctgtggattctcagctttatagatatgtgaagattgggctgactaaccttttaggagcaagattatattttgctccaaaagtgttgacaccctattgttatacaatagatgttgaaattaaattagatgaagaaggatttgtattgccatcc

SEQ ID NO: 12025 - DNA, 9691 bp, Homo sapiens
gcccaggcgcttccgcgaccacccggagtgattgcccggcagagcgcggtaggtgtcaacgcggggtctccgcgcagttggtccggctgggtgtcaaagacctggccggctttctcctcaggctgcgccgcccggcccgtgtctcagcgcaggtccccggggcgccgagtttgggggtgctcgccccgcgggtccctttcattcctaggaaaacgcgccgcggggcctcccgtctgtctgtcttgcacacacgtgttgccaaatccccccgcaccgtctttagatctggactggccgccccaccttctcccttcattgatctatgttttgctttttcttttcctaccttgtttccattgacaaagtagaccctttccttcaacactaaccttctcccgacaccgaggggaaaccaacagcttagggcctttccagcgcgtttttacccttgccttgctctaacctcgcctaattttgcccactttacctgttctttgatttctatccaaatgcaatttcttccttcaaccaacatttaagggccacccttaagagctacattgcctgagtttgaaccctagctctgccacttaaccacctgcataaactgggcaaagtaactttgtgcttcaacttcttcctcgtgtaaaatgatagtaaaagtactgaatctgtgtaagttaatagaatacctacaacagtgtttagcaagtaatagcgattgttattgttcaatgtcagccactcttctaactctaggatgcagagactttgcccctctggtgtttatatgttaaccatcctttttttttttttttttttttttccagatactcgtttgtagtttcataaacattgatgttgggtcaatcatgttctcaatgtatttaaccatgtgtttttaaattttttaatttagttatcaaattgagaatctgatggtatggcattaatcaccttgaggaagaacctttatcgtttatctgattttcagatgcatagagctctggctgctttaaaaaataaacctctaaatcatgttcacaaggtagtcaaggagcgtctgtgcccttggttgtgttcacgacaacctgagcctttcggggtcaaattccatcatgcccattgtaaaaagtttcattcgaaaaatggaaatgaccttcatccactcggtggaccagtgttctctcaagtatctgactgcgacaggcttgaacaaaatgttaaaaatgaggagagtcagatgttttacaggagactgagcaacttgacttcatcagaagaagtgctaagttttataagcacgatggaaaccctgcctgacactatggcagcaggagctttacaacgaatttgtgaagtggaaaaaaaggatggtgatcaagggctgccaaaagaaatactggagaatagcatctttcaagctttatgctttcagtttgaaaaggagccctcacagctgtcaaacactagtttagtgactgctttgcaagctctgattctgttgcatgtggatcctcaaagtagcctgttgctgaacctggtggcagaatgccaaaatcgtctcagaaaaggtggcatggaagttcgcaatctttgtattcttggggaaagtctgattacactgcacagttcaggttgtgtgacactagaactcattataaatcaacttcaaggtgaaaaattggaaacatttaccccggaggatattgtggccctttatagaatcttgcaggcatgtactgaaaaagtggatgaacaccaaacatttttaaataagataaacaacttttccctatcaatagtttccaacctgagtcctaaattgattagccaaatgctcactgccctggtggttcttgatcaaagtcaagcatttcctctgattataaaattgggcaaatatgtcgtgaggcatgtcccacatttcactaacgaggagcttaggagagtcttggaggcgttcatatattttgggcaccatgacacattttttacaaaagccctagagcatcgtgtagctgcggtgtgcctcacgttggatcctgaagttgtctgcagggtcatggagtactgcagtagagaactgattctttcaaaacccatcctcaatgcagtggcagaaacttttgtttgccaaacagaaaaattttcacctcgtcagatttctgccttaatggaaccatttgggaaactcaattatttgccaccaaatgcctctgctttatttagaaagctggaaaacgtgctattcactcatttcaattattttccacccaaatcattattgaaacttcttcattcatgttcacttaatgaatgccatccagtcaactttctggcaaaaatattcaagcctcttttccttcaacggctgcaaggtgagttggttataaattctgacagttggaaaaaagtaacctttgaactggcagtggtttcaagtcacatataaaggcaatatgttgcctttagtttttcttccatagtgatccgaagatgagacctgaagttaacagatgctggcataaacacagttaaagcatgctaggaaatcatgtagagggaagaaagctgtctcagataaactgacttttgccttatctgagaaattgcagcattcttaggagatatggtaatggcagtggaaatagccacattaacatgttagaacttttgatgagtgagcaactgtatctttttttttttttttgagaggatggtattattcatcttaattcaaggccacccaaatatgtcaaatttccggaactccatagttaaaggaaatttccactaattctgtgaacatattttatctcttttaattgtattctgtagctaggagcttgggttcttggaagtcaatttcattggtggcaagaggagggcataattaattctaacaagttcatttcatagtgtcatttaaaaatagaatacttctgtctggagtgtgtaaattgatgttgaatgttcatgatgttctctcatacatacctcaattcagacgtaactatgactgggatgctttctgtttcaggtaaagaatctcatttggacacattgagtcgggcacaactgacccaacttttcttagcctcagtcctggaatgccctttctataaggtaaaagcatgaactatatgtggctttatttccccatgggtgcagtttccttttaagttcctttacttctgatctgtctcaataacctgaaaaagcagaatttcatttacttggagtcagttgccaccagataggcttttctttgataaatggaccccatttttgtgttcttgttcttgaaggaacaatttcctgctgtttaagatttcttaggaggttttatcaagtgctgcaggcatgtgagttacagtatttctccattctctctgaaggttttacagggttttagtactaggtttactactaggtttcccatagctgtttgttatcaaagtgtgaatgtctggactgaacaaatacctaaattatttgcaagtacagtatatttttaagccaagccagaaatttcacttttatctaatagagtttagtttatctagagttcgctcttcccataaagacctataaagatttatcctattacctatcacattccttatgtagaatcagaaatagcacaccagactatgacattctctctctgcttctctctacttgactctgaatcatagtttagagtatctgatttttgaaataaggtaataagaatggaaaaataccccttttttaaaacagcttagacagtactaagttatataaagataaataatagttaaccccgatctcttaccatttctaaaggaacagtattaaaagcagtttctacgcccaaatgtatacagatacataaacactgtctattttttttctcttttcaaggaatgagactcactaatcaaagtacaatttgcttttatgcgcagtatatcatggccatccctcgaggccagtgcatacagatcacatgcattctttttagaaaggcatgatatttcatggtgtttattctactattgatgcacttggaggtttttgcaacttttgtctctatcgggaatgctataataaacattcttgcaaatcctgtcatactagagcctttttggtttttttcatatataaactagattcccaaaaatgtgattagtggattaatttttgatggatactggcagattttttttccctaatagttacagatgtcacatttccccagcaatgaatgaaggtggccatgtctcctccacttctattgcagtgtgttagtagtctctttaatttgtgttactcaactacatgaaagaggatatcatatcatatatttaagttgcattttaatgagcattaatgaagtttagcatattttcaaatatgtgttggccatttacatttcttttgaattgcctttctacaccttaatttatttctgttggatggtttgtctttaaggactcattgtaaaacagatattaactattatgaatgttgtacatattttcccgatttgtactcttttattactttttaatattacttatgatgtatttttaaatgttctgtagtcgaatctgtcttttatgacttccgaggttcctatctcaagagcatgaatattttacatttttaaaaataatatcttttaaattttatttagatctttgatctaaaagtaaaattgaatttttatttatgtattctaattaacaaaaattgtatatacttattatgttcatgttgttttgaaatatgtatacattgtagaatggctaaatcaaaccaattaacatgtgtattacctccatatctatcattttattttgtggtaagaatatttaaaatgtactcttgccgtgcgcagtggctcatgcctgtaatcgcagcacttttggaggccaaggcgggtggatcacctgaggtcaggagttcgagaccagccttgctaacatggtgaaaccctgtctctactaaaaatacaaaaaattagccgggcatgatggcacacgcctgtagtcccagctactctggactctgagttaggagaatcgctcaacccaggaggcggaggttgcagtgagccgaggtcgcgtcattgtactccagcctgggcaacaagagtgaaactctgtctcagaaacaaaaacaaaaacaaacaaaaaaaaaggtaaaaaagtactctcagccattttcaagcacgcaatcattcttattaactatagtcagcatgttgtacacctggaatttattagcatctgtcatggatgacagaagtttaatttagttattttccaaataaataaccattttctccagcatcgtttattatattgctatccttttcttcctaaactggaatgtcatttatatcacattttccattacagattgagtatcccttatccaaaatgctcaggaccagaagtgtttcagctttcagattttttcatattttaaaatattctcattatatttaccagttcagcatccctaattcaaaaatttgaaatccagaatgcttcatgagcattttctttaagcagcctgtctgtgcttaaaaggtttcggattttggagcattttggattttggattttcagattagagaaattaaacctgtgttgaaaactttagttgtgtgtacttaagacccttgggacaattctcagttctaaaaatgtttcttgaactgttagcattattatgtttcttctcactctctcctcactcctttttaccttccttctttacttttctttctgtttatggtaaccagtgactactgtaaaaacacatataaaagacattttgaactattagacttgcactgtaagaagagaagtttgcattatcattttgagagagatgcctgtcccaattcctggaaaagtatcatgcctataaagtaatgttatatcaaacttttctacctaggtaaccttcaatttattctctgttgttatatcttatttttctttctcacatttgcacttatgattttttagggtccaaaactccttcctaaatatcaagtgaagtcatttcttaccccatgctgttccctggagacccctgtggattctcagctttatagatatgtgaagattgggctgactaaccttttaggagcaagattatattttgctccaaaagtgttgacaccctattgttatacaataggtaagtagtataaggagttttgttgttttaaacctaagcatcctgttcgattttggagatatatgggacttagaagcaatagaagttctctggaaatgcaaaatggaatggtcccttccctgaaggcaagttggggttagcagcagagccgttgagtcaagactgtctgggtttaagtctcaaatattagccacgtagtagcagaatatcctgggcagaatatttaacctttttctgcttgcttcttcctctgtaaaatgatagtaatattgacctcaaagacttacttaaggtctaaataaaatagtacctggaacgtaggaaatgctcactaattgttagctactactataacctaggcttgtactgtccaaatatagtagccactagaccatgtggctatttaaatttaaattattaaaagtttaagaaaattcaattcctcagtcacattgtaagtgctcagtagccacatgtggctcatggctgccaaattggacagcaccattataaagatttccacatcacagaaatttctcctggacagcactgacaagagactccaagtcctccgtccttacagttcttctaacttgatgagcagaagaaagccttctcgtaaaggacagcagttcataggcttcagatggtcacttctcttctctttacgaagggaactgcagtttaccagaggggaaggacagttcggaagccttccgtgctcgcagaccaggtgtctgggtgtggcatgctttctttacttaccatggaggcactgcaagttggaatgatggaagttatgagttgcacagatgtctaatgtcttaactcaagggttttcttcacagtctggattgaaggatctctgccacctatcataaggggaaagagaaagcatgcatggttcttgtcataccccagataacttcagaacccattctgtggtttagcgttattgagctttcttaatttaaggctgacttgattgatcataaagccaattgaattaaaattctcaccattgtttggttgtggtcattactttgcagccttcagtccaattgatcaatgcaaggtggaaggaatcaaagcaaagcaaaggaatgaatacaggaagatagtgtttgtgagggtatcacacgaggaatttttcctttcttctctcaccagatgttgaaattaaattagatgaagaaggatttgtattgccatccacagctaatgaagatatccataaaaggtacaggaaaatgttgtgtttttcacattacaagactcgttgaggctaataagcagcggtatctttttctcaagaaggtgaaaaaaatagatatgattctggaaattaaaatactacatttcagaataccatgttgggaaattccttgtaatattttataaacattaatattaataagatcaaattcatgattcatttgaaaataatattggcacatagtaatagccaaatcccaaataaactttggcaactaaaatatataataaatattttggattatttaaaaaattaagtatttttctccttttttatttttcaggatagcactgtgtattgatggtccaaaaaggttttgctccaatagcaaacacttactggggaaagaagctattaaacaaagacacctacagttactcggttatcaagttgttcaggtacggtttcacctattttttttgtttcccaaaagcaaatcctatttcaaaattatttttccaggttacttttaaaaagtaatctgaggcacagtaaaattttaaagaatttgatcaggcagcaattattgaactggacagcacaaaactcgaaatggcttgggaacccaagagggaggcttttataggaagaacacaagtacacaaagaatctacttgactggttacagttacatattcttgctgccttgtttgaactattctgtggaaagttcctagttatataattattagtttgtgagatgcttctgattggttgagcttaagttctgtttttctgtagtagaagcttctacaagaaatagcccaagttaaattttgcttaacatttgcactttaagcaaagttaaggttattttcaaggcccaactggcttggtctgctcagggatttttcaggcacaggctccattttaatttgcttttacagtactaactggtttgccagcccagtggaccaccgatcttacgtctagtttaaatcccaacgttgttaattcggcttaaatctcttgacttatattttgaaatacagaattttcagagctttgatttttcaaaagtggggcctacctatattcattataagctatgcttaaccctgcttttagaattactcaattgttggaatatatgttctgttttaatttctccttgatttaataaataaaaatgaacaagataatccattaaaataaggagcttcaccaacacttaatatttaagaccttttaaatatttcactgtagataatgtaagaaggtcttatgtgagggctcagcagtgcgtgagaatgagcgctgccctaattctctaagctgtcagtactaggcagcactgtggtttcatatctgctgacttttttctccatcttgcacatccccagctgaatattcctaaaactaatcatgccagtgtctactcagaagcttcaatgtttctttactgcttacagaataaagtaaaaacttctctacatcttaacattcaagaccctccaatggttggcctgcagccaggctgcaggcacatgattactacctggcccctctgctcccagctgagcagactctctcctttgctgcgcctcctgctctctccctcttcattccctctttgtccctgctgcgtcctccagctctctgaatacctaccttccagcagtttgtcggcatccccaccctcatctaatgaaatgctcactccctcttagcactagatcaccaacctacagcttgttttttatatttattgtgtaatttaacttgccacccaagttgtgaactcctggagaacaagagatcatgtttaattcttatttgcatattctacatattaattcatcaaatatttaccaagccccttctcagtgccaggcactgttctagacattggggatacaggatgaagaagctggttgggatatttgccttccaggagcttacattccgctgtggggaagcgtgtaagaaacaaacaaagtaaccaatagccagaggaacctcagattttgaaggatcttgaccagttttacttttctacctttacagatcccctatcatgagattgggatgctaaaatcaagacgtgaattggtggaatatttacaaagaaaactgttttctcaaaacactgttcattggttgcaagaatgaatactgacttcagaactcaaacaatggaagaacttgcatttttatggaactcagtattaaaagaaaaatataatgtgaattagccactttgcagaatat

SEQ ID NO: 12026 - DNA, 819 bp, Homo sapiens
gcccaggcgcttccgcgaccacccggagtgattgcccggcagagcgcggtaaagaatctcatttggacacattgagtcgggcacaactgacccaacttttcttagcctcagtcctggaatgccctttctataagggtccaaaactccttcctaaatatcaagtgaagtcatttcttaccccatgctgttccctggagacccctgtggattctcagctttatagatatgtgaagattgggctgactaaccttttaggagcaagattatattttgctccaaaagtgttgacaccctattgttatacaatagccttcagtccaattgatcaatgcaaggtggaaggaatcaaagcaaagcaaaggaatgaatacaggaagatagtgtttgtgagggtatcacacgaggaatttttcctttcttctctcaccagatgttgaaattaaattagatgaagaaggatttgtattgccatccacagctaatgaagatatccataaaaggatagcactgtgtattgatggtccaaaaaggttttgctccaatagcaaacacttactggggaaagaagctattaaacaaagacacctacagttactcggttatcaagttgttcagatcccctatcatgagattgggatgctaaaatcaagacgtgaattggtggaatatttacaaagaaaactgttttctcaaaacactgttcattggttgcaagaatgaatactgacttcagaactcaaacaatggaagaacttgcatttttatggaactcagtattaaaagaaaaatataatgtgaattagccactttgcagaatat

SEQ ID NO: 12027 - DNA, 10852 bp, Homo sapiens
tgggggtggggacagggaccaggaagttgggcccgggccgccggggctgggaattcggagactatagcgtccccgccccgggttgggaagtgggaagtggcacaggagctaggatccagaagcccagaggctcagcggtgcttctggagttccagtgatcccggagtctgaaccggcagtgagagtggggaaagagggtagggaagagactcaggaattcaggcttgaaagatccaggagtattgatctgggggtgggctgtccaggattcagaagattggggatccaagtgcctggatttgggggagaggcaggaatcaggggtagtggagggccccagaacctggaaaatagaaaatgtccgcgggcgctgtgtcaagagccggttgccctagaccagaccctgatgccagtgaggcgggtggcactggtttgatgagggtggagcctccaaccagccttgaggtcctgagggtgggaggcacggaatatgaggcctaaggggaatgaaatagcacccccactcccacttccattgtgaaccctcctgaagccgtacctacctgccttcctggctgagtgacccctggcacacccctcctccctctgagttgctcctctgtgggttggaatgtggaaccccagagtcatgagggttggggtggagcttcggggaactccagaattcgaataccccagccttctgtagttctggccccgctctggcagggagcaatatagcaatggaccccattggagagaatgagggcaaaggcccaggagtgaagtcgggggagcctgggcaggaagcaaggctagcccgttagtcatgccaccttctttgtgtagcactccctgggtggggctgaactgccccagactcccatttttgccagagctggaaagatgccatactctctgttgcttaacctacaggctaggctaacagtgctggcatggcaggcgggcctggtactggccttgttgccctggcttggccactggtctgctggctgtctctgtgcctgtggaccctgagtgagccttaacctactatctgggcactgtggttgccaggatgccgtgcgcatgctcaataccctgcagaccaatgccggctacctggagcaggtgaagcgccagcggggtgaccctcagacacagttggaagccatggaactgtacctggcacggagtgggctgcaggtaaggtagagagggcctgtgaccacctcccacccccatttgtgattcccgtagctgaggcagggaccttgtctgtctgtcccaggtggaggacttggaccggctgaacatcatccacgtcactgggacgaaggggaaggtgaggggcaggaccctggggtagggggtctattaagtggctggtggagtagagcctgcccagacaatcccttttctttcaagggctccacctgtgccttcacggaatgtatcctccgaagctatggcctgaagacgggattctttaggtactggcttgtggggggatgtggtgtctgtgtcccaatggaccctggggggctatggaaccagccagtgcttcaggaccagggtcacccccaggaggtcagctgcatgtctctctgcccagtgtttattcattcaataaacattcagttagcacttaccatattggcccatgtttatggcaacctttaattttttttttttttttgagactgagtctcactctatcgcccaggctggagtacaatggcacgatcttggctcactgcaacccccgcctgccaggttcaagcaattctcctgcttcagcctcccaagtagcttggattacaggcacctgccaccacaccaggctaatttttatatttttagtagagatggggtttcaccatgttggccaggctgttctcgaactcctgacctcaagtgatccgcccacctcggcctcctaaagtgctgggattacaggtgtgagccacggtgcctggccttaattttcataattaaaaaaaaattggggaaggggcagcaactttaatgtataaactaaatatgtagcaggaggtccagtgtggtggctcatgcctataatcccagcactttgggcagctgacatgggaggatcacctgagtctggggaggtcaaggctgcagttagcagtgatcatgccattgcacatcagcctgggcgacagagcaaactgctatcttaaaaaaaaaaaagaaaattacatagctggaatagtcagatggtcagatgtctctttaataacttaaagtccaggttgagtgtggtggctcacaactgtaatcctagcactttgggaggccaaggtgggaggatcactggagctcaggagtttgagaccagcttgggcaacgtagtgagacttcatctctattaaaaaaaaaatgaaaagaaaaaattttaaagtccatatataactttaaaatcacatagagatatttatcaattagtatgtctttagagtaaggagaaaattgccttgcaagggcttaaacgataagggtggcttgtgccatccacgttaaggtctcctaggcgggctgcagataggagcccttctgcttggccactctccactgtggctttgccctggggcagcgccccctcttggtctcacttgtctagacttacacaagaggatggccaggtggaaccgggatcactcttcctgtgccacgcatgtcttctaagcccatcaccacgaacttctgaaatcagctgcctaaggtcatttcaagccgatatgttttccctaaacagttcttgttcaaataaagagatggagaggaggacttactacctgagtagctttgaggattgaaacataaggcaccaacctgtcttctaaaatcactttttgggccaggcgtggtggctcatgcctgtaatcccagcactttgggaggccgaagcaggcagatcacttgaggccaggagttcaagagcagcctggccaacatggcgaaaccctatctctactaaaaataccaaaaaattggctgggcacggtggctcatgcctgtaatcccagcactttgggaggctgaggtgggtggatcaccagaggtcaggagttcaagaccagcctggctaacatggcgtaaccctgtctctactaaaaatacaagaatcagcgaggcgtggtggtgtgtgcctgtagtcccagctacttgggaggccgaggcatgagaaacgcttgaacctgggaggcagaggttgcagtgagccaagattgcaccactgcactccagcctaggcgacagaacaagaccctgtctcaaaaataaataaataaaaactacaatcatttttgggataaaaacctagccttcaacttgggcccacatggccttgagggccagcccagggctgcagcttgaacattggttgtgggctttgtctctgagagctgtaagacagatgacattgtgggacagatgtcagcagagtgactgattggtatgggactgttggagcccatagaatgtgcaagaccagcctgggtgaggaggctgtcttagttgagaccaacgtggtgaatagggtgagccaggtgcagaggcctggagatagaagatggggaggactggggggctacagatagtccggggggatggggcaccaggaacaaaccgagggacacaggagagatgaggcacggaggccagtagcatcagtccctgcagggtgggggaaggccaggacgctcgggaagggagtcctgatgaccccagctgtcccggcagctctccccacctggtgcaggttcgggagcggatccgcatcaatgggcagcccatcagtcctgagctcttcaccaagtacttctggcgcctctaccaccggctggaggagaccaaggtgccgcatgcaggagggctggcgggtgggtatggttgggggtgctacgtgttccagcaccccatctccccagagaaggggctgcatgggctctgggccctgacatgtccctgtgccacaggatggcagctgtgtctccatgcccccctacttccgcttcctgacactcatggccttccacgtcttcctccaagagaaggtgtgtgccctctccctagaaccctgcatctgaggccttgggaacgggaacctcagcaggcctgggggctccctgcttccatgcggcctctgggcaccctcatatcccctgccatgccctctggtctttgacaggtggacctggcagtggtggaggtgggcattggcggggcttatgactgcaccaacatcatcaggtgagcgcagttgcttgggacgaggggtggcagccaggagcacagcctcacctgccgcctggtggctcagggcagggcctcatggccttttcctcccctgcaggaagcctgtggtgtgcggagtctcctctcttggcatcgaccacaccagcctcctgggggatacggtggagaagatcgcatggcagaaagggggcatctttaaggtgaccaggcagactgggggaagggagagacatggaaggcctgggagtctacgttttcatcctggcttcactgtgtgactggaacaagttgagtctcctctccagactatttccccattgaaacgtgagggatggctgggcatggtggcttatatgcttgcaatcccagcatttcaggaggtcgaggtgagaggatcacctgagatccggagtttgagaccagcctgaccaatatggggaaactctgtctctactaaaaatacaaaaattagccaggtgtggtggtgtacgcctgtagttccagctacttgggagactgaggcaggagaatcactcgaacccgggaggcagacgttgcagtgagccgagattgcgccacagcactccagcctgggtgacagagtgagacttcatctcgaaaaagaaaagaaaagaaacatgagggatgagagacagtggtagcccagacccagggatgtgggggccagagataggagtgtggaggatgctaggtagccctttctctctccttcttccctccacagcaaggtgtccctgccttcactgtgctccaacctgaaggtcccctggcagtgctgagggaccgagcccagcagatctcagtaagtctgattggaatggggcagcggcagggtgggtttgtgtccctcctgtttgaggaggcactgcatcctctggggcctcagtttgcccatctgtgcagtgaggacgctgggccagctgccaggcctgctggaacacatctcagttctgggagcagggcttggtggctgggggaggggagagatgcaagggctgacgtggtcagggagggcctctgctgacccgctcctgcctgtctcccctagtgtcctctatacctgtgtccgatgctggaggccctcgaggaaggggggccgccgctgaccctgggcctggagggggagcaccagcggtccaacgccgccttggccttgcagctggcccactgctggctgcagcggcaggaccgccatggtgagtgggcagctgagtgggcaggcaggtgggtggcacctgtggagcctgcctaggagggtcccggacacacttggtctcacacaccccgcaggtgctggggagccaaaggcatccaggccagggctcctgtggcagctgcccctggcacctgtgttccagcccacatcccacatgcggctcggtgagttagaccttcctgcccagctgggaccactgcgtgtgtctgtgccccttcagattttttttttttttttttttggttttctgtttgggagataagagacaatttgaagtggtgcttaagagaaaggactctgatgtcagcaaacctccctgaccttgagctcatgaactctttctgagcctgtcttctcatctgccaaagtagatgatgataggagccactgccacgggctgtggtggggattcgctgaggtgacatcactaaggtgctgagtgcagagcctggccaatgtgggataaagtgccagccagtggtagctgctgtcactgtcactatcatcatcatcagaccctgaggttctggaggatggtgatccagtcatctgcttcttgcctcccccaaagctttcagcacccagcaggtgctcatgctgttaagccccttcagcaaatggtgggcccgctgtgtgccacgcctgttatcaagggcaagtgacaaggtcctggagacaaaccgacctcgcatcacatcccggccccagctaagggctctcaggctgtcaaacgggaatagcaggccctttcagggttgcctgaaagattccaccagatgagacagccgaaaagcccaagccattgactggtgctagtaaaaagttcctgggctgccggggtcctgagtgttgagggcgggcgcagcctgcaggggagaacgggctcaggagtgtgtgtgcggaattgaggacgggggtgggagagggcctggaggactgccttgctgccctcccccagggcttcggaacacggagtggccgggccggacgcaggtgctgcggcgcgggcccctcacctggtacctggacggtgcgcacaccgccagcagcgcgcaggcctgcgtgcgctggttccgccaggcgctgcagggccgcgagaggccgagcgggtgaggggcagggctgggggtggggccggggctggcccacgaggaggggcgggatcttggggaagggcggggcggggtcgtggggaagggcgggggcgggcccatggggaggggcggggtcgtgggcggggacgggattggtaccgcagggagaacgggcggcgccctttgacccagctcctcacctctgtcgcagtggccccgaggttcgagtcttgctcttcaatgctaccggggaccgggacccggcggccctgctgaagctgctgcaggtgaggggccaacttgggggtgggcggcaggcagtcctgaagccctgggtctggcggtgtgaccctggggggtgccaatcccctcccccttgagttgtattgaggattagatgtgacaaggtgcctgtgctggttctgccaggtgctgcagggccgtggggaggccagtcataggtcattactcatattcccgcgtgtctagactcaagtccaggcttaagaggagggccagatcgtggctaaaggtgtagactctggactcgcttgtcatgcccctttaggcactagcatatcaccctggacgagaagcggcatttccccgagcctcagtttgcctctccgtaaaatggggttgctgctaggggcacccgcttctcaggtttggttgaaggagtcattgggcctttctctgcttggggaaactgaggctgcccaagctgtcagggctgaagtggcccctaggtatcatctcccatttcacagaccaggaggctgaggctgtatccagaacctctcccatttacccacagcctttttccagcctggatttggggccccctcactatctgagtgaccttcagcaagtccccttgccctgtggccactgttcccctgtctgtacagtaggttggggcttcgctgctcaggccacaggccaggcagggtatactgaggcagatgggggcagggtgctgaagtaccttggctaggtttatacagcatcattctagttgtcagggaggctgcatctccagagatgtgggcgcagggggccatatggaagttggtggacatcctttcgggggtctgacaccaagtctttcccttggccttctagccctgccagtttgactatgccgtcttctgccctaacctgacagaggtgtcatccacaggcaacgcaggtgagaggtgacaggcatggcccctggggatgagcaggggtccctgaggtagacagtgggggcttccaaactggaggtttggggtaggaaataaatttgttttactgtgtaagaacactttagtgtacttatactcttttatacaccaaagtatactttatttaattttattttaaaaaatttttggctggccacggtggctcacgcctgtaatcccagcactttgggaggccaaggcaggcagatcacgaggtcaggagattgagaccatcctggctaacatggtgaaaccccgtctctacaaaaaaaaaatacaaaaaattagccaggcgtagtggtgggtgcctgtagtctcagctactcaggaggctgaggcaggagaatggcgtgaactcgggaggcggagctggcagtgagccgagatcgcgccactgcactctaggtctgggcgacagagcgagactgtctcaaaaaaaaaaaaaattaatttttgagacagagtctcactctgtcccccaggctggaatatagtggcacaatctcagctcactgcaacctctgcctcctaggttcaaatgattctcatgtctcagcctctggaatagctgggattacaggcgtgtgccaacatgcccagctaagttttatatttttagtagagacagggtttctccatgttggccaggctggtgtcaaactcctggcctcaaatgatccacccacctcagcctcccaaagtgctgggattacagttgtgagccaccacgcccagccagcattttttattttatatgaaatagagtagaatagaaaataccagtgtacgttgcacagagtaagggtaggtcctgtttggtgaagattagtctgttccaggcatatgtataagtatgtgagtactgagttgcagtgtaaaatgtgttttttaccatgtatcatgttaaaaaaagtttgaaatagtgtaaaaattacagatcccaggctggacttggtggctcacacctataatcccagcactttggcaggaggatcgtttgagctcaggagttaaaagccagacctcatctctataaaaaaaaatagaagaattagccaggtgtggtggtgtacacccgtggtcctagctactcaggaggctgaagtggaaggatcgcttgagcctggaaggtggaggctgcagtgagtcatgaagtcgtgattgcatcactgcactccagcctgggtgacagagcaagaccctggaccctctctaaaaataaaaaatctccagtcctcacatcagtctggttggggagagttctggaatctgcattttttttttttttttcttgagacagtctcgttctgtcactcaggctgcccaggctggagtgcagtggtgccatctcggctcattgcaacttctgcctcccaggttcaaatgattctcctgcctcagcctcgtgagtagccgggactacaggtgcacgccactacacccggctaatttttgttttttgtttgtttataagatggagtcttgctctgtcgcccaggctggagtgcaatggcttgatctcagctcactgcaatctccacctcccgggttcaagtgatactcttgcctcagccttccaagtatagctgggattataggcgtgtgccaccacacctggctaatttttgtccagctaatttttgtgtgtgtgtgtttttttcagagacggggtttcaccatgttggccaggctgatcttgaactcttgacctcaggtgatccgcccgcctcggcctcccaaagtgctgggattacaagtgtgagccactgcacccagcctggaatctgcgtttttaaccagcatccccagaaataactatgctcacctggtgatggtccccagctggatgtacattttatagatggagacaatgaggccagagtggggaaggggtgcctagtgggcaaaagctttggagtcagactgtctggctctgcctctcgtgaccttggtgaagtcactgaacctgcctgagcctcagtttcttcactgtgtgcatggagaaggccactagccgagactgctggcctgatgacgtaaaaggcttggtgcgaagcaggtgctcacggtgcacccgcccctttctccacccctgtcccttactccctctccccttcgctgataggcctttctctgtgccccacagaccaacagaacttcacagtgacactggaccaggtcctgctccgctgcctggaacaccagcagcactggaaccacctggacgaagagcaggccagcccggacctctggagtgcccccagcccagagcccggtgggtccgcatccctgcttctggcgccccacccaccccacacctgcagtgccagctccctcgtcttcagctgcatttcacatgccttgcaatggatcagccaaggccgagaccccatcttccagccacctagtcccccaaagggcctcctcacccaccctgtggctcacagtggggccagcatactccgtgaggctgctgccatccatgtgctagtcactggcagcctgcacctggtgggtggtgtcctgaagctgctggagcccgcactgtcccagtagccaaggcccggggttggaggtgggagcttcccacacctgcctgcgttctccccatgaacttacatactaggtgccttttgtttttggctttcctggttctgtctagactggcctaggggccagggctttgggatgggaggccgggagaggatgtcttttttaaggctctgtgccttggtctctccttcctcttggctgagatagcagaggggctccccgggtctctcactgttgcagtggcctggccgttcagcctgtctcccccaacaccccgcctgcctcctggctcaggcccagcttattgtgtgcgctgcctggccaggccctgggtcttgccatgtgctgggtggtagatttcctcctcccagtgccttctgggaagggagagggcctctgcctgggacactgcgggacagagggtggctggagtgaattaaagcctttgttttttaaag

SEQ ID NO: 12028 - DNA, 2278 bp, Homo sapiens
tgggggtggggacagggaccaggaagttgggcccgggccgccggggctgggaattcggagactatagcgtccccgccccgggttgggaagtgggaagtggcacaggagctaggatccagaagcccagaggctcagcggtgcttctggagttccagtgatcccggagtctgaaccggcagtgagagtggggaaagagggatgccgtgcgcatgctcaataccctgcagaccaatgccggctacctggagcaggtgaagcgccagcggggtgaccctcagacacagttggaagccatggaactgtacctggcacggagtgggctgcaggtggaggacttggaccggctgaacatcatccacgtcactgggacgaaggggaagggctccacctgtgccttcacggaatgtatcctccgaagctatggcctgaagacgggattctttagctctccccacctggtgcaggttcgggagcggatccgcatcaatgggcagcccatcagtcctgagctcttcaccaagtacttctggcgcctctaccaccggctggaggagaccaaggatggcagctgtgtctccatgcccccctacttccgcttcctgacactcatggccttccacgtcttcctccaagagaaggtggacctggcagtggtggaggtgggcattggcggggcttatgactgcaccaacatcatcaggaagcctgtggtgtgcggagtctcctctcttggcatcgaccacaccagcctcctgggggatacggtggagaagatcgcatggcagaaagggggcatctttaagcaaggtgtccctgccttcactgtgctccaacctgaaggtcccctggcagtgctgagggaccgagcccagcagatctcatgtcctctatacctgtgtccgatgctggaggccctcgaggaaggggggccgccgctgaccctgggcctggagggggagcaccagcggtccaacgccgccttggccttgcagctggcccactgctggctgcagcggcaggaccgccatggtgctggggagccaaaggcatccaggccagggctcctgtggcagctgcccctggcacctgtgttccagcccacatcccacatgcggctcgggcttcggaacacggagtggccgggccggacgcaggtgctgcggcgcgggcccctcacctggtacctggacggtgcgcacaccgccagcagcgcgcaggcctgcgtgcgctggttccgccaggcgctgcagggccgcgagaggccgagcggtggccccgaggttcgagtcttgctcttcaatgctaccggggaccgggacccggcggccctgctgaagctgctgcagccctgccagtttgactatgccgtcttctgccctaacctgacagaggtgtcatccacaggcaacgcagaccaacagaacttcacagtgacactggaccaggtcctgctccgctgcctggaacaccagcagcactggaaccacctggacgaagagcaggccagcccggacctctggagtgcccccagcccagagcccggtgggtccgcatccctgcttctggcgccccacccaccccacacctgcagtgccagctccctcgtcttcagctgcatttcacatgccttgcaatggatcagccaaggccgagaccccatcttccagccacctagtcccccaaagggcctcctcacccaccctgtggctcacagtggggccagcatactccgtgaggctgctgccatccatgtgctagtcactggcagcctgcacctggtgggtggtgtcctgaagctgctggagcccgcactgtcccagtagccaaggcccggggttggaggtgggagcttcccacacctgcctgcgttctccccatgaacttacatactaggtgccttttgtttttggctttcctggttctgtctagactggcctaggggccagggctttgggatgggaggccgggagaggatgtcttttttaaggctctgtgccttggtctctccttcctcttggctgagatagcagaggggctccccgggtctctcactgttgcagtggcctggccgttcagcctgtctcccccaacaccccgcctgcctcctggctcaggcccagcttattgtgtgcgctgcctggccaggccctgggtcttgccatgtgctgggtggtagatttcctcctcccagtgccttctgggaagggagagggcctctgcctgggacactgcgggacagagggtggctggagtgaattaaagcctttgttttttaaag

SEQ ID NO: 12029 - DNA, 10514 bp, Homo sapiens
ggggcgccgggactatgtcgcgggcgcggagccacctgcgcgccgctctattcctggcagcggcgtctgcgcgcggcataacgacccaggtcgcggcgcggcggggcttgagcgcgtggccggtgccgcaggagccgagcatggagtaccaggtatcaggcgggccagcgggccagcgggcctgggcgcgacgacacgtgggcctgcgctgagccgcagaacatccgggctccgctagccgagagggtatcgggagccctggactgggggactcggggggcggaacatcctggaggctgggggtggggacagggaccaggaagttgggcccgggccgccggggctgggaattcggagactatagcgtccccgccccgggttgggaagtgggaagtggcacaggagctaggatccagaagcccagaggctcagcggtgcttctggagttccagtgatcccggagtctgaaccggcagtgagagtggggaaagagggtagggaagagactcaggaattcaggcttgaaagatccaggagtattgatctgggggtgggctgtccaggattcagaagattggggatccaagtgcctggatttgggggagaggcaggaatcaggggtagtggagggccccagaacctggaaaatagaaaatgtccgcgggcgctgtgtcaagagccggttgccctagaccagaccctgatgccagtgaggcgggtggcactggtttgatgagggtggagcctccaaccagccttgaggtcctgagggtgggaggcacggaatatgaggcctaaggggaatgaaatagcacccccactcccacttccattgtgaaccctcctgaagccgtacctacctgccttcctggctgagtgacccctggcacacccctcctccctctgagttgctcctctgtgggttggaatgtggaaccccagagtcatgagggttggggtggagcttcggggaactccagaattcgaataccccagccttctgtagttctggccccgctctggcagggagcaatatagcaatggaccccattggagagaatgagggcaaaggcccaggagtgaagtcgggggagcctgggcaggaagcaaggctagcccgttagtcatgccaccttctttgtgtagcactccctgggtggggctgaactgccccagactcccatttttgccagagctggaaagatgccatactctctgttgcttaacctacaggctaggctaacagtgctggcatggcaggcgggcctggtactggccttgttgccctggcttggccactggtctgctggctgtctctgtgcctgtggaccctgagtgagccttaacctactatctgggcactgtggttgccaggatgccgtgcgcatgctcaataccctgcagaccaatgccggctacctggagcaggtgaagcgccagcggggtgaccctcagacacagttggaagccatggaactgtacctggcacggagtgggctgcaggtaaggtagagagggcctgtgaccacctcccacccccatttgtgattcccgtagctgaggcagggaccttgtctgtctgtcccaggtggaggacttggaccggctgaacatcatccacgtcactgggacgaaggggaaggtgaggggcaggaccctggggtagggggtctattaagtggctggtggagtagagcctgcccagacaatcccttttctttcaagggctccacctgtgccttcacggaatgtatcctccgaagctatggcctgaagacgggattctttaggtactggcttgtggggggatgtggtgtctgtgtcccaatggaccctggggggctatggaaccagccagtgcttcaggaccagggtcacccccaggaggtcagctgcatgtctctctgcccagtgtttattcattcaataaacattcagttagcacttaccatattggcccatgtttatggcaacctttaattttttttttttttttgagactgagtctcactctatcgcccaggctggagtacaatggcacgatcttggctcactgcaacccccgcctgccaggttcaagcaattctcctgcttcagcctcccaagtagcttggattacaggcacctgccaccacaccaggctaatttttatatttttagtagagatggggtttcaccatgttggccaggctgttctcgaactcctgacctcaagtgatccgcccacctcggcctcctaaagtgctgggattacaggtgtgagccacggtgcctggccttaattttcataattaaaaaaaaattggggaaggggcagcaactttaatgtataaactaaatatgtagcaggaggtccagtgtggtggctcatgcctataatcccagcactttgggcagctgacatgggaggatcacctgagtctggggaggtcaaggctgcagttagcagtgatcatgccattgcacatcagcctgggcgacagagcaaactgctatcttaaaaaaaaaaaagaaaattacatagctggaatagtcagatggtcagatgtctctttaataacttaaagtccaggttgagtgtggtggctcacaactgtaatcctagcactttgggaggccaaggtgggaggatcactggagctcaggagtttgagaccagcttgggcaacgtagtgagacttcatctctattaaaaaaaaaatgaaaagaaaaaattttaaagtccatatataactttaaaatcacatagagatatttatcaattagtatgtctttagagtaaggagaaaattgccttgcaagggcttaaacgataagggtggcttgtgccatccacgttaaggtctcctaggcgggctgcagataggagcccttctgcttggccactctccactgtggctttgccctggggcagcgccccctcttggtctcacttgtctagacttacacaagaggatggccaggtggaaccgggatcactcttcctgtgccacgcatgtcttctaagcccatcaccacgaacttctgaaatcagctgcctaaggtcatttcaagccgatatgttttccctaaacagttcttgttcaaataaagagatggagaggaggacttactacctgagtagctttgaggattgaaacataaggcaccaacctgtcttctaaaatcactttttgggccaggcgtggtggctcatgcctgtaatcccagcactttgggaggccgaagcaggcagatcacttgaggccaggagttcaagagcagcctggccaacatggcgaaaccctatctctactaaaaataccaaaaaattggctgggcacggtggctcatgcctgtaatcccagcactttgggaggctgaggtgggtggatcaccagaggtcaggagttcaagaccagcctggctaacatggcgtaaccctgtctctactaaaaatacaagaatcagcgaggcgtggtggtgtgtgcctgtagtcccagctacttgggaggccgaggcatgagaaacgcttgaacctgggaggcagaggttgcagtgagccaagattgcaccactgcactccagcctaggcgacagaacaagaccctgtctcaaaaataaataaataaaaactacaatcatttttgggataaaaacctagccttcaacttgggcccacatggccttgagggccagcccagggctgcagcttgaacattggttgtgggctttgtctctgagagctgtaagacagatgacattgtgggacagatgtcagcagagtgactgattggtatgggactgttggagcccatagaatgtgcaagaccagcctgggtgaggaggctgtcttagttgagaccaacgtggtgaatagggtgagccaggtgcagaggcctggagatagaagatggggaggactggggggctacagatagtccggggggatggggcaccaggaacaaaccgagggacacaggagagatgaggcacggaggccagtagcatcagtccctgcagggtgggggaaggccaggacgctcgggaagggagtcctgatgaccccagctgtcccggcagctctccccacctggtgcaggttcgggagcggatccgcatcaatgggcagcccatcagtcctgagctcttcaccaagtacttctggcgcctctaccaccggctggaggagaccaaggtgccgcatgcaggagggctggcgggtgggtatggttgggggtgctacgtgttccagcaccccatctccccagagaaggggctgcatgggctctgggccctgacatgtccctgtgccacaggatggcagctgtgtctccatgcccccctacttccgcttcctgacactcatggccttccacgtcttcctccaagagaaggtgtgtgccctctccctagaaccctgcatctgaggccttgggaacgggaacctcagcaggcctgggggctccctgcttccatgcggcctctgggcaccctcatatcccctgccatgccctctggtctttgacaggtggacctggcagtggtggaggtgggcattggcggggcttatgactgcaccaacatcatcaggtgagcgcagttgcttgggacgaggggtggcagccaggagcacagcctcacctgccgcctggtggctcagggcagggcctcatggccttttcctcccctgcaggaagcctgtggtgtgcggagtctcctctcttggcatcgaccacaccagcctcctgggggatacggtggagaagatcgcatggcagaaagggggcatctttaaggtgaccaggcagactgggggaagggagagacatggaaggcctgggagtctacgttttcatcctggcttcactgtgtgactggaacaagttgagtctcctctccagactatttccccattgaaacgtgagggatggctgggcatggtggcttatatgcttgcaatcccagcatttcaggaggtcgaggtgagaggatcacctgagatccggagtttgagaccagcctgaccaatatggggaaactctgtctctactaaaaatacaaaaattagccaggtgtggtggtgtacgcctgtagttccagctacttgggagactgaggcaggagaatcactcgaacccgggaggcagacgttgcagtgagccgagattgcgccacagcactccagcctgggtgacagagtgagacttcatctcgaaaaagaaaagaaaagaaacatgagggatgagagacagtggtagcccagacccagggatgtgggggccagagataggagtgtggaggatgctaggtagccctttctctctccttcttccctccacagcaaggtgtccctgccttcactgtgctccaacctgaaggtcccctggcagtgctgagggaccgagcccagcagatctcagtaagtctgattggaatggggcagcggcagggtgggtttgtgtccctcctgtttgaggaggcactgcatcctctggggcctcagtttgcccatctgtgcagtgaggacgctgggccagctgccaggcctgctggaacacatctcagttctgggagcagggcttggtggctgggggaggggagagatgcaagggctgacgtggtcagggagggcctctgctgacccgctcctgcctgtctcccctagtgtcctctatacctgtgtccgatgctggaggccctcgaggaaggggggccgccgctgaccctgggcctggagggggagcaccagcggtccaacgccgccttggccttgcagctggcccactgctggctgcagcggcaggaccgccatggtgagtgggcagctgagtgggcaggcaggtgggtggcacctgtggagcctgcctaggagggtcccggacacacttggtctcacacaccccgcaggtgctggggagccaaaggcatccaggccagggctcctgtggcagctgcccctggcacctgtgttccagcccacatcccacatgcggctcggtgagttagaccttcctgcccagctgggaccactgcgtgtgtctgtgccccttcagattttttttttttttttttttggttttctgtttgggagataagagacaatttgaagtggtgcttaagagaaaggactctgatgtcagcaaacctccctgaccttgagctcatgaactctttctgagcctgtcttctcatctgccaaagtagatgatgataggagccactgccacgggctgtggtggggattcgctgaggtgacatcactaaggtgctgagtgcagagcctggccaatgtgggataaagtgccagccagtggtagctgctgtcactgtcactatcatcatcatcagaccctgaggttctggaggatggtgatccagtcatctgcttcttgcctcccccaaagctttcagcacccagcaggtgctcatgctgttaagccccttcagcaaatggtgggcccgctgtgtgccacgcctgttatcaagggcaagtgacaaggtcctggagacaaaccgacctcgcatcacatcccggccccagctaagggctctcaggctgtcaaacgggaatagcaggccctttcagggttgcctgaaagattccaccagatgagacagccgaaaagcccaagccattgactggtgctagtaaaaagttcctgggctgccggggtcctgagtgttgagggcgggcgcagcctgcaggggagaacgggctcaggagtgtgtgtgcggaattgaggacgggggtgggagagggcctggaggactgccttgctgccctcccccagggcttcggaacacggagtggccgggccggacgcaggtgctgcggcgcgggcccctcacctggtacctggacggtgcgcacaccgccagcagcgcgcaggcctgcgtgcgctggttccgccaggcgctgcagggccgcgagaggccgagcgggtgaggggcagggctgggggtggggccggggctggcccacgaggaggggcgggatcttggggaagggcggggcggggtcgtggggaagggcgggggcgggcccatggggaggggcggggtcgtgggcggggacgggattggtaccgcagggagaacgggcggcgccctttgacccagctcctcacctctgtcgcagtggccccgaggttcgagtcttgctcttcaatgctaccggggaccgggacccggcggccctgctgaagctgctgcaggtgaggggccaacttgggggtgggcggcaggcagtcctgaagccctgggtctggcggtgtgaccctggggggtgccaatcccctcccccttgagttgtattgaggattagatgtgacaaggtgcctgtgctggttctgccaggtgctgcagggccgtggggaggccagtcataggtcattactcatattcccgcgtgtctagactcaagtccaggcttaagaggagggccagatcgtggctaaaggtgtagactctggactcgcttgtcatgcccctttaggcactagcatatcaccctggacgagaagcggcatttccccgagcctcagtttgcctctccgtaaaatggggttgctgctaggggcacccgcttctcaggtttggttgaaggagtcattgggcctttctctgcttggggaaactgaggctgcccaagctgtcagggctgaagtggcccctaggtatcatctcccatttcacagaccaggaggctgaggctgtatccagaacctctcccatttacccacagcctttttccagcctggatttggggccccctcactatctgagtgaccttcagcaagtccccttgccctgtggccactgttcccctgtctgtacagtaggttggggcttcgctgctcaggccacaggccaggcagggtatactgaggcagatgggggcagggtgctgaagtaccttggctaggtttatacagcatcattctagttgtcagggaggctgcatctccagagatgtgggcgcagggggccatatggaagttggtggacatcctttcgggggtctgacaccaagtctttcccttggccttctagccctgccagtttgactatgccgtcttctgccctaacctgacagaggtgtcatccacaggcaacgcaggtgagaggtgacaggcatggcccctggggatgagcaggggtccctgaggtagacagtgggggcttccaaactggaggtttggggtaggaaataaatttgttttactgtgtaagaacactttagtgtacttatactcttttatacaccaaagtatactttatttaattttattttaaaaaatttttggctggccacggtggctcacgcctgtaatcccagcactttgggaggccaaggcaggcagatcacgaggtcaggagattgagaccatcctggctaacatggtgaaaccccgtctctacaaaaaaaaaatacaaaaaattagccaggcgtagtggtgggtgcctgtagtctcagctactcaggaggctgaggcaggagaatggcgtgaactcgggaggcggagctggcagtgagccgagatcgcgccactgcactctaggtctgggcgacagagcgagactgtctcaaaaaaaaaaaaaattaatttttgagacagagtctcactctgtcccccaggctggaatatagtggcacaatctcagctcactgcaacctctgcctcctaggttcaaatgattctcatgtctcagcctctggaatagctgggattacaggcgtgtgccaacatgcccagctaagttttatatttttagtagagacagggtttctccatgttggccaggctggtgtcaaactcctggcctcaaatgatccacccacctcagcctcccaaagtgctgggattacagttgtgagccaccacgcccagccagcattttttattttatatgaaatagagtagaatagaaaataccagtgtacgttgcacagagtaagggtaggtcctgtttggtgaagattagtctgttccaggcatatgtataagtatgtgagtactgagttgcagtgtaaaatgtgttttttaccatgtatcatgttaaaaaaagtttgaaatagtgtaaaaattacagatcccaggctggacttggtggctcacacctataatcccagcactttggcaggaggatcgtttgagctcaggagttaaaagccagacctcatctctataaaaaaaaatagaagaattagccaggtgtggtggtgtacacccgtggtcctagctactcaggaggctgaagtggaaggatcgcttgagcctggaaggtggaggctgcagtgagtcatgaagtcgtgattgcatcactgcactccagcctgggtgacagagcaagaccctggaccctctctaaaaataaaaaatctccagtcctcacatcagtctggttggggagagttctggaatctgcattttttttttttttttcttgagacagtctcgttctgtcactcaggctgcccaggctggagtgcagtggtgccatctcggctcattgcaacttctgcctcccaggttcaaatgattctcctgcctcagcctcgtgagtagccgggactacaggtgcacgccactacacccggctaatttttgttttttgtttgtttataagatggagtcttgctctgtcgcccaggctggagtgcaatggcttgatctcagctcactgcaatctccacctcccgggttcaagtgatactcttgcctcagccttccaagtatagctgggattataggcgtgtgccaccacacctggctaatttttgtccagctaatttttgtgtgtgtgtgtttttttcagagacggggtttcaccatgttggccaggctgatcttgaactcttgacctcaggtgatccgcccgcctcggcctcccaaagtgctgggattacaagtgtgagccactgcacccagcctggaatctgcgtttttaaccagcatccccagaaataactatgctcacctggtgatggtccccagctggatgtacattttatagatggagacaatgaggccagagtggggaaggggtgcctagtgggcaaaagctttggagtcagactgtctggctctgcctctcgtgaccttggtgaagtcactgaacctgcctgagcctcagtttcttcactgtgtgcatggagaaggccactagccgagactgctggcctgatgacgtaaaaggcttggtgcgaagcaggtgctcacggtgcacccgcccctttctccacccctgtcccttactccctctccccttcgctgataggcctttctctgtgccccacagaccaacagaacttcacagtgacactggaccaggtcctgctccgctgcctggaacaccagcagcactggaaccacctggacgaagagcaggccagcccggacctctggagtgcccccagcccagagcccggtgggtccgcatccctgcttctggcgccccacccaccccacacctgcagtgccagctccctcgtcttcagctgcatttcacatgccttgcaatggatcagc

SEQ ID NO: 12030 - DNA, 1383 bp, Homo sapiens
ggggcgccgggactatgtcgcgggcgcggagccacctgcgcgccgctctattcctggcagcggcgtctgcgcgcggcataacgacccaggtcgcggcgcggcggggcttgagcgcgtggccggtgccgcaggagccgagcatggagtaccaggatgccgtgcgcatgctcaataccctgcagaccaatgccggctacctggagcaggtgaagcgccagcggggtgaccctcagacacagttggaagccatggaactgtacctggcacggagtgggctgcaggtggaggacttggaccggctgaacatcatccacgtcactgggacgaaggggaagggctccacctgtgccttcacggaatgtatcctccgaagctatggcctgaagacgggattctttagctctccccacctggtgcaggttcgggagcggatccgcatcaatgggcagcccatcagtcctgagctcttcaccaagtacttctggcgcctctaccaccggctggaggagaccaaggatggcagctgtgtctccatgcccccctacttccgcttcctgacactcatggccttccacgtcttcctccaagagaaggtggacctggcagtggtggaggtgggcattggcggggcttatgactgcaccaacatcatcaggaagcctgtggtgtgcggagtctcctctcttggcatcgaccacaccagcctcctgggggatacggtggagaagatcgcatggcagaaagggggcatctttaagcaaggtgtccctgccttcactgtgctccaacctgaaggtcccctggcagtgctgagggaccgagcccagcagatctcagtgctggggagccaaaggcatccaggccagggctcctgtggcagctgcccctggcacctgtgttccagcccacatcccacatgcggctcgggcttcggaacacggagtggccgggccggacgcaggtgctgcggcgcgggcccctcacctggtacctggacggtgcgcacaccgccagcagcgcgcaggcctgcgtgcgctggttccgccaggcgctgcagggccgcgagaggccgagcggtggccccgaggttcgagtcttgctcttcaatgctaccggggaccgggacccggcggccctgctgaagctgctgcagaccaacagaacttcacagtgacactggaccaggtcctgctccgctgcctggaacaccagcagcactggaaccacctggacgaagagcaggccagcccggacctctggagtgcccccagcccagagcccggtgggtccgcatccctgcttctggcgccccacccaccccacacctgcagtgccagctccctcgtcttcagctgcatttcacatgccttgcaatggatcagc

SEQ ID NO: 12031 - DNA, 11200 bp, Homo sapiens
gtctcccgcccgggcctagagcgctgccgggggcgccgggactatgtcgcgggcgcggagccacctgcgcgccgctctattcctggcagcggcgtctgcgcgcggcataacgacccaggtcgcggcgcggcggggcttgagcgcgtggccggtgccgcaggagccgagcatggagtaccaggtatcaggcgggccagcgggccagcgggcctgggcgcgacgacacgtgggcctgcgctgagccgcagaacatccgggctccgctagccgagagggtatcgggagccctggactgggggactcggggggcggaacatcctggaggctgggggtggggacagggaccaggaagttgggcccgggccgccggggctgggaattcggagactatagcgtccccgccccgggttgggaagtgggaagtggcacaggagctaggatccagaagcccagaggctcagcggtgcttctggagttccagtgatcccggagtctgaaccggcagtgagagtggggaaagagggtagggaagagactcaggaattcaggcttgaaagatccaggagtattgatctgggggtgggctgtccaggattcagaagattggggatccaagtgcctggatttgggggagaggcaggaatcaggggtagtggagggccccagaacctggaaaatagaaaatgtccgcgggcgctgtgtcaagagccggttgccctagaccagaccctgatgccagtgaggcgggtggcactggtttgatgagggtggagcctccaaccagccttgaggtcctgagggtgggaggcacggaatatgaggcctaaggggaatgaaatagcacccccactcccacttccattgtgaaccctcctgaagccgtacctacctgccttcctggctgagtgacccctggcacacccctcctccctctgagttgctcctctgtgggttggaatgtggaaccccagagtcatgagggttggggtggagcttcggggaactccagaattcgaataccccagccttctgtagttctggccccgctctggcagggagcaatatagcaatggaccccattggagagaatgagggcaaaggcccaggagtgaagtcgggggagcctgggcaggaagcaaggctagcccgttagtcatgccaccttctttgtgtagcactccctgggtggggctgaactgccccagactcccatttttgccagagctggaaagatgccatactctctgttgcttaacctacaggctaggctaacagtgctggcatggcaggcgggcctggtactggccttgttgccctggcttggccactggtctgctggctgtctctgtgcctgtggaccctgagtgagccttaacctactatctgggcactgtggttgccaggatgccgtgcgcatgctcaataccctgcagaccaatgccggctacctggagcaggtgaagcgccagcggggtgaccctcagacacagttggaagccatggaactgtacctggcacggagtgggctgcaggtaaggtagagagggcctgtgaccacctcccacccccatttgtgattcccgtagctgaggcagggaccttgtctgtctgtcccaggtggaggacttggaccggctgaacatcatccacgtcactgggacgaaggggaaggtgaggggcaggaccctggggtagggggtctattaagtggctggtggagtagagcctgcccagacaatcccttttctttcaagggctccacctgtgccttcacggaatgtatcctccgaagctatggcctgaagacgggattctttaggtactggcttgtggggggatgtggtgtctgtgtcccaatggaccctggggggctatggaaccagccagtgcttcaggaccagggtcacccccaggaggtcagctgcatgtctctctgcccagtgtttattcattcaataaacattcagttagcacttaccatattggcccatgtttatggcaacctttaattttttttttttttttgagactgagtctcactctatcgcccaggctggagtacaatggcacgatcttggctcactgcaacccccgcctgccaggttcaagcaattctcctgcttcagcctcccaagtagcttggattacaggcacctgccaccacaccaggctaatttttatatttttagtagagatggggtttcaccatgttggccaggctgttctcgaactcctgacctcaagtgatccgcccacctcggcctcctaaagtgctgggattacaggtgtgagccacggtgcctggccttaattttcataattaaaaaaaaattggggaaggggcagcaactttaatgtataaactaaatatgtagcaggaggtccagtgtggtggctcatgcctataatcccagcactttgggcagctgacatgggaggatcacctgagtctggggaggtcaaggctgcagttagcagtgatcatgccattgcacatcagcctgggcgacagagcaaactgctatcttaaaaaaaaaaaagaaaattacatagctggaatagtcagatggtcagatgtctctttaataacttaaagtccaggttgagtgtggtggctcacaactgtaatcctagcactttgggaggccaaggtgggaggatcactggagctcaggagtttgagaccagcttgggcaacgtagtgagacttcatctctattaaaaaaaaaatgaaaagaaaaaattttaaagtccatatataactttaaaatcacatagagatatttatcaattagtatgtctttagagtaaggagaaaattgccttgcaagggcttaaacgataagggtggcttgtgccatccacgttaaggtctcctaggcgggctgcagataggagcccttctgcttggccactctccactgtggctttgccctggggcagcgccccctcttggtctcacttgtctagacttacacaagaggatggccaggtggaaccgggatcactcttcctgtgccacgcatgtcttctaagcccatcaccacgaacttctgaaatcagctgcctaaggtcatttcaagccgatatgttttccctaaacagttcttgttcaaataaagagatggagaggaggacttactacctgagtagctttgaggattgaaacataaggcaccaacctgtcttctaaaatcactttttgggccaggcgtggtggctcatgcctgtaatcccagcactttgggaggccgaagcaggcagatcacttgaggccaggagttcaagagcagcctggccaacatggcgaaaccctatctctactaaaaataccaaaaaattggctgggcacggtggctcatgcctgtaatcccagcactttgggaggctgaggtgggtggatcaccagaggtcaggagttcaagaccagcctggctaacatggcgtaaccctgtctctactaaaaatacaagaatcagcgaggcgtggtggtgtgtgcctgtagtcccagctacttgggaggccgaggcatgagaaacgcttgaacctgggaggcagaggttgcagtgagccaagattgcaccactgcactccagcctaggcgacagaacaagaccctgtctcaaaaataaataaataaaaactacaatcatttttgggataaaaacctagccttcaacttgggcccacatggccttgagggccagcccagggctgcagcttgaacattggttgtgggctttgtctctgagagctgtaagacagatgacattgtgggacagatgtcagcagagtgactgattggtatgggactgttggagcccatagaatgtgcaagaccagcctgggtgaggaggctgtcttagttgagaccaacgtggtgaatagggtgagccaggtgcagaggcctggagatagaagatggggaggactggggggctacagatagtccggggggatggggcaccaggaacaaaccgagggacacaggagagatgaggcacggaggccagtagcatcagtccctgcagggtgggggaaggccaggacgctcgggaagggagtcctgatgaccccagctgtcccggcagctctccccacctggtgcaggttcgggagcggatccgcatcaatgggcagcccatcagtcctgagctcttcaccaagtacttctggcgcctctaccaccggctggaggagaccaaggtgccgcatgcaggagggctggcgggtgggtatggttgggggtgctacgtgttccagcaccccatctccccagagaaggggctgcatgggctctgggccctgacatgtccctgtgccacaggatggcagctgtgtctccatgcccccctacttccgcttcctgacactcatggccttccacgtcttcctccaagagaaggtgtgtgccctctccctagaaccctgcatctgaggccttgggaacgggaacctcagcaggcctgggggctccctgcttccatgcggcctctgggcaccctcatatcccctgccatgccctctggtctttgacaggtggacctggcagtggtggaggtgggcattggcggggcttatgactgcaccaacatcatcaggtgagcgcagttgcttgggacgaggggtggcagccaggagcacagcctcacctgccgcctggtggctcagggcagggcctcatggccttttcctcccctgcaggaagcctgtggtgtgcggagtctcctctcttggcatcgaccacaccagcctcctgggggatacggtggagaagatcgcatggcagaaagggggcatctttaaggtgaccaggcagactgggggaagggagagacatggaaggcctgggagtctacgttttcatcctggcttcactgtgtgactggaacaagttgagtctcctctccagactatttccccattgaaacgtgagggatggctgggcatggtggcttatatgcttgcaatcccagcatttcaggaggtcgaggtgagaggatcacctgagatccggagtttgagaccagcctgaccaatatggggaaactctgtctctactaaaaatacaaaaattagccaggtgtggtggtgtacgcctgtagttccagctacttgggagactgaggcaggagaatcactcgaacccgggaggcagacgttgcagtgagccgagattgcgccacagcactccagcctgggtgacagagtgagacttcatctcgaaaaagaaaagaaaagaaacatgagggatgagagacagtggtagcccagacccagggatgtgggggccagagataggagtgtggaggatgctaggtagccctttctctctccttcttccctccacagcaaggtgtccctgccttcactgtgctccaacctgaaggtcccctggcagtgctgagggaccgagcccagcagatctcagtaagtctgattggaatggggcagcggcagggtgggtttgtgtccctcctgtttgaggaggcactgcatcctctggggcctcagtttgcccatctgtgcagtgaggacgctgggccagctgccaggcctgctggaacacatctcagttctgggagcagggcttggtggctgggggaggggagagatgcaagggctgacgtggtcagggagggcctctgctgacccgctcctgcctgtctcccctagtgtcctctatacctgtgtccgatgctggaggccctcgaggaaggggggccgccgctgaccctgggcctggagggggagcaccagcggtccaacgccgccttggccttgcagctggcccactgctggctgcagcggcaggaccgccatggtgagtgggcagctgagtgggcaggcaggtgggtggcacctgtggagcctgcctaggagggtcccggacacacttggtctcacacaccccgcaggtgctggggagccaaaggcatccaggccagggctcctgtggcagctgcccctggcacctgtgttccagcccacatcccacatgcggctcggtgagttagaccttcctgcccagctgggaccactgcgtgtgtctgtgccccttcagattttttttttttttttttttggttttctgtttgggagataagagacaatttgaagtggtgcttaagagaaaggactctgatgtcagcaaacctccctgaccttgagctcatgaactctttctgagcctgtcttctcatctgccaaagtagatgatgataggagccactgccacgggctgtggtggggattcgctgaggtgacatcactaaggtgctgagtgcagagcctggccaatgtgggataaagtgccagccagtggtagctgctgtcactgtcactatcatcatcatcagaccctgaggttctggaggatggtgatccagtcatctgcttcttgcctcccccaaagctttcagcacccagcaggtgctcatgctgttaagccccttcagcaaatggtgggcccgctgtgtgccacgcctgttatcaagggcaagtgacaaggtcctggagacaaaccgacctcgcatcacatcccggccccagctaagggctctcaggctgtcaaacgggaatagcaggccctttcagggttgcctgaaagattccaccagatgagacagccgaaaagcccaagccattgactggtgctagtaaaaagttcctgggctgccggggtcctgagtgttgagggcgggcgcagcctgcaggggagaacgggctcaggagtgtgtgtgcggaattgaggacgggggtgggagagggcctggaggactgccttgctgccctcccccagggcttcggaacacggagtggccgggccggacgcaggtgctgcggcgcgggcccctcacctggtacctggacggtgcgcacaccgccagcagcgcgcaggcctgcgtgcgctggttccgccaggcgctgcagggccgcgagaggccgagcgggtgaggggcagggctgggggtggggccggggctggcccacgaggaggggcgggatcttggggaagggcggggcggggtcgtggggaagggcgggggcgggcccatggggaggggcggggtcgtgggcggggacgggattggtaccgcagggagaacgggcggcgccctttgacccagctcctcacctctgtcgcagtggccccgaggttcgagtcttgctcttcaatgctaccggggaccgggacccggcggccctgctgaagctgctgcaggtgaggggccaacttgggggtgggcggcaggcagtcctgaagccctgggtctggcggtgtgaccctggggggtgccaatcccctcccccttgagttgtattgaggattagatgtgacaaggtgcctgtgctggttctgccaggtgctgcagggccgtggggaggccagtcataggtcattactcatattcccgcgtgtctagactcaagtccaggcttaagaggagggccagatcgtggctaaaggtgtagactctggactcgcttgtcatgcccctttaggcactagcatatcaccctggacgagaagcggcatttccccgagcctcagtttgcctctccgtaaaatggggttgctgctaggggcacccgcttctcaggtttggttgaaggagtcattgggcctttctctgcttggggaaactgaggctgcccaagctgtcagggctgaagtggcccctaggtatcatctcccatttcacagaccaggaggctgaggctgtatccagaacctctcccatttacccacagcctttttccagcctggatttggggccccctcactatctgagtgaccttcagcaagtccccttgccctgtggccactgttcccctgtctgtacagtaggttggggcttcgctgctcaggccacaggccaggcagggtatactgaggcagatgggggcagggtgctgaagtaccttggctaggtttatacagcatcattctagttgtcagggaggctgcatctccagagatgtgggcgcagggggccatatggaagttggtggacatcctttcgggggtctgacaccaagtctttcccttggccttctagccctgccagtttgactatgccgtcttctgccctaacctgacagaggtgtcatccacaggcaacgcaggtgagaggtgacaggcatggcccctggggatgagcaggggtccctgaggtagacagtgggggcttccaaactggaggtttggggtaggaaataaatttgttttactgtgtaagaacactttagtgtacttatactcttttatacaccaaagtatactttatttaattttattttaaaaaatttttggctggccacggtggctcacgcctgtaatcccagcactttgggaggccaaggcaggcagatcacgaggtcaggagattgagaccatcctggctaacatggtgaaaccccgtctctacaaaaaaaaaatacaaaaaattagccaggcgtagtggtgggtgcctgtagtctcagctactcaggaggctgaggcaggagaatggcgtgaactcgggaggcggagctggcagtgagccgagatcgcgccactgcactctaggtctgggcgacagagcgagactgtctcaaaaaaaaaaaaaattaatttttgagacagagtctcactctgtcccccaggctggaatatagtggcacaatctcagctcactgcaacctctgcctcctaggttcaaatgattctcatgtctcagcctctggaatagctgggattacaggcgtgtgccaacatgcccagctaagttttatatttttagtagagacagggtttctccatgttggccaggctggtgtcaaactcctggcctcaaatgatccacccacctcagcctcccaaagtgctgggattacagttgtgagccaccacgcccagccagcattttttattttatatgaaatagagtagaatagaaaataccagtgtacgttgcacagagtaagggtaggtcctgtttggtgaagattagtctgttccaggcatatgtataagtatgtgagtactgagttgcagtgtaaaatgtgttttttaccatgtatcatgttaaaaaaagtttgaaatagtgtaaaaattacagatcccaggctggacttggtggctcacacctataatcccagcactttggcaggaggatcgtttgagctcaggagttaaaagccagacctcatctctataaaaaaaaatagaagaattagccaggtgtggtggtgtacacccgtggtcctagctactcaggaggctgaagtggaaggatcgcttgagcctggaaggtggaggctgcagtgagtcatgaagtcgtgattgcatcactgcactccagcctgggtgacagagcaagaccctggaccctctctaaaaataaaaaatctccagtcctcacatcagtctggttggggagagttctggaatctgcattttttttttttttttcttgagacagtctcgttctgtcactcaggctgcccaggctggagtgcagtggtgccatctcggctcattgcaacttctgcctcccaggttcaaatgattctcctgcctcagcctcgtgagtagccgggactacaggtgcacgccactacacccggctaatttttgttttttgtttgtttataagatggagtcttgctctgtcgcccaggctggagtgcaatggcttgatctcagctcactgcaatctccacctcccgggttcaagtgatactcttgcctcagccttccaagtatagctgggattataggcgtgtgccaccacacctggctaatttttgtccagctaatttttgtgtgtgtgtgtttttttcagagacggggtttcaccatgttggccaggctgatcttgaactcttgacctcaggtgatccgcccgcctcggcctcccaaagtgctgggattacaagtgtgagccactgcacccagcctggaatctgcgtttttaaccagcatccccagaaataactatgctcacctggtgatggtccccagctggatgtacattttatagatggagacaatgaggccagagtggggaaggggtgcctagtgggcaaaagctttggagtcagactgtctggctctgcctctcgtgaccttggtgaagtcactgaacctgcctgagcctcagtttcttcactgtgtgcatggagaaggccactagccgagactgctggcctgatgacgtaaaaggcttggtgcgaagcaggtgctcacggtgcacccgcccctttctccacccctgtcccttactccctctccccttcgctgataggcctttctctgtgccccacagaccaacagaacttcacagtgacactggaccaggtcctgctccgctgcctggaacaccagcagcactggaaccacctggacgaagagcaggccagcccggacctctggagtgcccccagcccagagcccggtgggtccgcatccctgcttctggcgccccacccaccccacacctgcagtgccagctccctcgtcttcagctgcatttcacatgccttgcaatggatcagccaaggccgagaccccatcttccagccacctagtcccccaaagggcctcctcacccaccctgtggctcacagtggggccagcatactccgtgaggctgctgccatccatgtgctagtcactggcagcctgcacctggtgggtggtgtcctgaagctgctggagcccgcactgtcccagtagccaaggcccggggttggaggtgggagcttcccacacctgcctgcgttctccccatgaacttacatactaggtgccttttgtttttggctttcctggttctgtctagactggcctaggggccagggctttgggatgggaggccgggagaggatgtcttttttaaggctctgtgccttggtctctccttcctcttggctgagatagcagaggggctccccgggtctctcactgttgcagtggcctggccgttcagcctgtctcccccaacaccccgcctgcctcctggctcaggcccagcttattgtgtgcgctgcctggccaggccctgggtcttgccatgtgctgggtggtagatttcctcctcccagtgccttctgggaagggagagggcctctgcctgggacactgcgggacagagggtggctggagtgaattaaagcctttgttttttaaagaaatggcaaagccttcgactga

SEQ ID NO: 12032 - DNA, 2284 bp, Homo sapiens
gtctcccgcccgggcctagagcgctgccgggggcgccgggactatgtcgcgggcgcggagccacctgcgcgccgctctattcctggcagcggcgtctgcgcgcggcataacgacccaggtcgcggcgcggcggggcttgagcgcgtggccggtgccgcaggagccgagcatggagtaccaggatgccgtgcgcatgctcaataccctgcagaccaatgccggctacctggagcaggtgaagcgccagcggggtgaccctcagacacagttggaagccatggaactgtacctggcacggagtgggctgcaggtggaggacttggaccggctgaacatcatccacgtcactgggacgaaggggaagggctccacctgtgccttcacggaatgtatcctccgaagctatggcctgaagacgggattctttagctctccccacctggtgcaggttcgggagcggatccgcatcaatgggcagcccatcagtcctgagctcttcaccaagtacttctggcgcctctaccaccggctggaggagaccaaggatggcagctgtgtctccatgcccccctacttccgcttcctgacactcatggccttccacgtcttcctccaagagaaggtggacctggcagtggtggaggtgggcattggcggggcttatgactgcaccaacatcatcaggaagcctgtggtgtgcggagtctcctctcttggcatcgaccacaccagcctcctgggggatacggtggagaagatcgcatggcagaaagggggcatctttaagcaaggtgtccctgccttcactgtgctccaacctgaaggtcccctggcagtgctgagggaccgagcccagcagatctcatgtcctctatacctgtgtccgatgctggaggccctcgaggaaggggggccgccgctgaccctgggcctggagggggagcaccagcggtccaacgccgccttggccttgcagctggcccactgctggctgcagcggcaggaccgccatggtgctggggagccaaaggcatccaggccagggctcctgtggcagctgcccctggcacctgtgttccagcccacatcccacatgcggctcgggcttcggaacacggagtggccgggccggacgcaggtgctgcggcgcgggcccctcacctggtacctggacggtgcgcacaccgccagcagcgcgcaggcctgcgtgcgctggttccgccaggcgctgcagggccgcgagaggccgagcggtggccccgaggttcgagtcttgctcttcaatgctaccggggaccgggacccggcggccctgctgaagctgctgcagccctgccagtttgactatgccgtcttctgccctaacctgacagaggtgtcatccacaggcaacgcagaccaacagaacttcacagtgacactggaccaggtcctgctccgctgcctggaacaccagcagcactggaaccacctggacgaagagcaggccagcccggacctctggagtgcccccagcccagagcccggtgggtccgcatccctgcttctggcgccccacccaccccacacctgcagtgccagctccctcgtcttcagctgcatttcacatgccttgcaatggatcagccaaggccgagaccccatcttccagccacctagtcccccaaagggcctcctcacccaccctgtggctcacagtggggccagcatactccgtgaggctgctgccatccatgtgctagtcactggcagcctgcacctggtgggtggtgtcctgaagctgctggagcccgcactgtcccagtagccaaggcccggggttggaggtgggagcttcccacacctgcctgcgttctccccatgaacttacatactaggtgccttttgtttttggctttcctggttctgtctagactggcctaggggccagggctttgggatgggaggccgggagaggatgtcttttttaaggctctgtgccttggtctctccttcctcttggctgagatagcagaggggctccccgggtctctcactgttgcagtggcctggccgttcagcctgtctcccccaacaccccgcctgcctcctggctcaggcccagcttattgtgtgcgctgcctggccaggccctgggtcttgccatgtgctgggtggtagatttcctcctcccagtgccttctgggaagggagagggcctctgcctgggacactgcgggacagagggtggctggagtgaattaaagcctttgttttttaaagaaatggcaaagccttcgactga

SEQ ID NO: 12033 - DNA, 11224 bp, Homo sapiens
gattggctgggggcggggcggggcgtctcccgcccgggcctagagcgctgccgggggcgccgggactatgtcgcgggcgcggagccacctgcgcgccgctctattcctggcagcggcgtctgcgcgcggcataacgacccaggtcgcggcgcggcggggcttgagcgcgtggccggtgccgcaggagccgagcatggagtaccaggtatcaggcgggccagcgggccagcgggcctgggcgcgacgacacgtgggcctgcgctgagccgcagaacatccgggctccgctagccgagagggtatcgggagccctggactgggggactcggggggcggaacatcctggaggctgggggtggggacagggaccaggaagttgggcccgggccgccggggctgggaattcggagactatagcgtccccgccccgggttgggaagtgggaagtggcacaggagctaggatccagaagcccagaggctcagcggtgcttctggagttccagtgatcccggagtctgaaccggcagtgagagtggggaaagagggtagggaagagactcaggaattcaggcttgaaagatccaggagtattgatctgggggtgggctgtccaggattcagaagattggggatccaagtgcctggatttgggggagaggcaggaatcaggggtagtggagggccccagaacctggaaaatagaaaatgtccgcgggcgctgtgtcaagagccggttgccctagaccagaccctgatgccagtgaggcgggtggcactggtttgatgagggtggagcctccaaccagccttgaggtcctgagggtgggaggcacggaatatgaggcctaaggggaatgaaatagcacccccactcccacttccattgtgaaccctcctgaagccgtacctacctgccttcctggctgagtgacccctggcacacccctcctccctctgagttgctcctctgtgggttggaatgtggaaccccagagtcatgagggttggggtggagcttcggggaactccagaattcgaataccccagccttctgtagttctggccccgctctggcagggagcaatatagcaatggaccccattggagagaatgagggcaaaggcccaggagtgaagtcgggggagcctgggcaggaagcaaggctagcccgttagtcatgccaccttctttgtgtagcactccctgggtggggctgaactgccccagactcccatttttgccagagctggaaagatgccatactctctgttgcttaacctacaggctaggctaacagtgctggcatggcaggcgggcctggtactggccttgttgccctggcttggccactggtctgctggctgtctctgtgcctgtggaccctgagtgagccttaacctactatctgggcactgtggttgccaggatgccgtgcgcatgctcaataccctgcagaccaatgccggctacctggagcaggtgaagcgccagcggggtgaccctcagacacagttggaagccatggaactgtacctggcacggagtgggctgcaggtaaggtagagagggcctgtgaccacctcccacccccatttgtgattcccgtagctgaggcagggaccttgtctgtctgtcccaggtggaggacttggaccggctgaacatcatccacgtcactgggacgaaggggaaggtgaggggcaggaccctggggtagggggtctattaagtggctggtggagtagagcctgcccagacaatcccttttctttcaagggctccacctgtgccttcacggaatgtatcctccgaagctatggcctgaagacgggattctttaggtactggcttgtggggggatgtggtgtctgtgtcccaatggaccctggggggctatggaaccagccagtgcttcaggaccagggtcacccccaggaggtcagctgcatgtctctctgcccagtgtttattcattcaataaacattcagttagcacttaccatattggcccatgtttatggcaacctttaattttttttttttttttgagactgagtctcactctatcgcccaggctggagtacaatggcacgatcttggctcactgcaacccccgcctgccaggttcaagcaattctcctgcttcagcctcccaagtagcttggattacaggcacctgccaccacaccaggctaatttttatatttttagtagagatggggtttcaccatgttggccaggctgttctcgaactcctgacctcaagtgatccgcccacctcggcctcctaaagtgctgggattacaggtgtgagccacggtgcctggccttaattttcataattaaaaaaaaattggggaaggggcagcaactttaatgtataaactaaatatgtagcaggaggtccagtgtggtggctcatgcctataatcccagcactttgggcagctgacatgggaggatcacctgagtctggggaggtcaaggctgcagttagcagtgatcatgccattgcacatcagcctgggcgacagagcaaactgctatcttaaaaaaaaaaaagaaaattacatagctggaatagtcagatggtcagatgtctctttaataacttaaagtccaggttgagtgtggtggctcacaactgtaatcctagcactttgggaggccaaggtgggaggatcactggagctcaggagtttgagaccagcttgggcaacgtagtgagacttcatctctattaaaaaaaaaatgaaaagaaaaaattttaaagtccatatataactttaaaatcacatagagatatttatcaattagtatgtctttagagtaaggagaaaattgccttgcaagggcttaaacgataagggtggcttgtgccatccacgttaaggtctcctaggcgggctgcagataggagcccttctgcttggccactctccactgtggctttgccctggggcagcgccccctcttggtctcacttgtctagacttacacaagaggatggccaggtggaaccgggatcactcttcctgtgccacgcatgtcttctaagcccatcaccacgaacttctgaaatcagctgcctaaggtcatttcaagccgatatgttttccctaaacagttcttgttcaaataaagagatggagaggaggacttactacctgagtagctttgaggattgaaacataaggcaccaacctgtcttctaaaatcactttttgggccaggcgtggtggctcatgcctgtaatcccagcactttgggaggccgaagcaggcagatcacttgaggccaggagttcaagagcagcctggccaacatggcgaaaccctatctctactaaaaataccaaaaaattggctgggcacggtggctcatgcctgtaatcccagcactttgggaggctgaggtgggtggatcaccagaggtcaggagttcaagaccagcctggctaacatggcgtaaccctgtctctactaaaaatacaagaatcagcgaggcgtggtggtgtgtgcctgtagtcccagctacttgggaggccgaggcatgagaaacgcttgaacctgggaggcagaggttgcagtgagccaagattgcaccactgcactccagcctaggcgacagaacaagaccctgtctcaaaaataaataaataaaaactacaatcatttttgggataaaaacctagccttcaacttgggcccacatggccttgagggccagcccagggctgcagcttgaacattggttgtgggctttgtctctgagagctgtaagacagatgacattgtgggacagatgtcagcagagtgactgattggtatgggactgttggagcccatagaatgtgcaagaccagcctgggtgaggaggctgtcttagttgagaccaacgtggtgaatagggtgagccaggtgcagaggcctggagatagaagatggggaggactggggggctacagatagtccggggggatggggcaccaggaacaaaccgagggacacaggagagatgaggcacggaggccagtagcatcagtccctgcagggtgggggaaggccaggacgctcgggaagggagtcctgatgaccccagctgtcccggcagctctccccacctggtgcaggttcgggagcggatccgcatcaatgggcagcccatcagtcctgagctcttcaccaagtacttctggcgcctctaccaccggctggaggagaccaaggtgccgcatgcaggagggctggcgggtgggtatggttgggggtgctacgtgttccagcaccccatctccccagagaaggggctgcatgggctctgggccctgacatgtccctgtgccacaggatggcagctgtgtctccatgcccccctacttccgcttcctgacactcatggccttccacgtcttcctccaagagaaggtgtgtgccctctccctagaaccctgcatctgaggccttgggaacgggaacctcagcaggcctgggggctccctgcttccatgcggcctctgggcaccctcatatcccctgccatgccctctggtctttgacaggtggacctggcagtggtggaggtgggcattggcggggcttatgactgcaccaacatcatcaggtgagcgcagttgcttgggacgaggggtggcagccaggagcacagcctcacctgccgcctggtggctcagggcagggcctcatggccttttcctcccctgcaggaagcctgtggtgtgcggagtctcctctcttggcatcgaccacaccagcctcctgggggatacggtggagaagatcgcatggcagaaagggggcatctttaaggtgaccaggcagactgggggaagggagagacatggaaggcctgggagtctacgttttcatcctggcttcactgtgtgactggaacaagttgagtctcctctccagactatttccccattgaaacgtgagggatggctgggcatggtggcttatatgcttgcaatcccagcatttcaggaggtcgaggtgagaggatcacctgagatccggagtttgagaccagcctgaccaatatggggaaactctgtctctactaaaaatacaaaaattagccaggtgtggtggtgtacgcctgtagttccagctacttgggagactgaggcaggagaatcactcgaacccgggaggcagacgttgcagtgagccgagattgcgccacagcactccagcctgggtgacagagtgagacttcatctcgaaaaagaaaagaaaagaaacatgagggatgagagacagtggtagcccagacccagggatgtgggggccagagataggagtgtggaggatgctaggtagccctttctctctccttcttccctccacagcaaggtgtccctgccttcactgtgctccaacctgaaggtcccctggcagtgctgagggaccgagcccagcagatctcagtaagtctgattggaatggggcagcggcagggtgggtttgtgtccctcctgtttgaggaggcactgcatcctctggggcctcagtttgcccatctgtgcagtgaggacgctgggccagctgccaggcctgctggaacacatctcagttctgggagcagggcttggtggctgggggaggggagagatgcaagggctgacgtggtcagggagggcctctgctgacccgctcctgcctgtctcccctagtgtcctctatacctgtgtccgatgctggaggccctcgaggaaggggggccgccgctgaccctgggcctggagggggagcaccagcggtccaacgccgccttggccttgcagctggcccactgctggctgcagcggcaggaccgccatggtgagtgggcagctgagtgggcaggcaggtgggtggcacctgtggagcctgcctaggagggtcccggacacacttggtctcacacaccccgcaggtgctggggagccaaaggcatccaggccagggctcctgtggcagctgcccctggcacctgtgttccagcccacatcccacatgcggctcggtgagttagaccttcctgcccagctgggaccactgcgtgtgtctgtgccccttcagattttttttttttttttttttggttttctgtttgggagataagagacaatttgaagtggtgcttaagagaaaggactctgatgtcagcaaacctccctgaccttgagctcatgaactctttctgagcctgtcttctcatctgccaaagtagatgatgataggagccactgccacgggctgtggtggggattcgctgaggtgacatcactaaggtgctgagtgcagagcctggccaatgtgggataaagtgccagccagtggtagctgctgtcactgtcactatcatcatcatcagaccctgaggttctggaggatggtgatccagtcatctgcttcttgcctcccccaaagctttcagcacccagcaggtgctcatgctgttaagccccttcagcaaatggtgggcccgctgtgtgccacgcctgttatcaagggcaagtgacaaggtcctggagacaaaccgacctcgcatcacatcccggccccagctaagggctctcaggctgtcaaacgggaatagcaggccctttcagggttgcctgaaagattccaccagatgagacagccgaaaagcccaagccattgactggtgctagtaaaaagttcctgggctgccggggtcctgagtgttgagggcgggcgcagcctgcaggggagaacgggctcaggagtgtgtgtgcggaattgaggacgggggtgggagagggcctggaggactgccttgctgccctcccccagggcttcggaacacggagtggccgggccggacgcaggtgctgcggcgcgggcccctcacctggtacctggacggtgcgcacaccgccagcagcgcgcaggcctgcgtgcgctggttccgccaggcgctgcagggccgcgagaggccgagcgggtgaggggcagggctgggggtggggccggggctggcccacgaggaggggcgggatcttggggaagggcggggcggggtcgtggggaagggcgggggcgggcccatggggaggggcggggtcgtgggcggggacgggattggtaccgcagggagaacgggcggcgccctttgacccagctcctcacctctgtcgcagtggccccgaggttcgagtcttgctcttcaatgctaccggggaccgggacccggcggccctgctgaagctgctgcaggtgaggggccaacttgggggtgggcggcaggcagtcctgaagccctgggtctggcggtgtgaccctggggggtgccaatcccctcccccttgagttgtattgaggattagatgtgacaaggtgcctgtgctggttctgccaggtgctgcagggccgtggggaggccagtcataggtcattactcatattcccgcgtgtctagactcaagtccaggcttaagaggagggccagatcgtggctaaaggtgtagactctggactcgcttgtcatgcccctttaggcactagcatatcaccctggacgagaagcggcatttccccgagcctcagtttgcctctccgtaaaatggggttgctgctaggggcacccgcttctcaggtttggttgaaggagtcattgggcctttctctgcttggggaaactgaggctgcccaagctgtcagggctgaagtggcccctaggtatcatctcccatttcacagaccaggaggctgaggctgtatccagaacctctcccatttacccacagcctttttccagcctggatttggggccccctcactatctgagtgaccttcagcaagtccccttgccctgtggccactgttcccctgtctgtacagtaggttggggcttcgctgctcaggccacaggccaggcagggtatactgaggcagatgggggcagggtgctgaagtaccttggctaggtttatacagcatcattctagttgtcagggaggctgcatctccagagatgtgggcgcagggggccatatggaagttggtggacatcctttcgggggtctgacaccaagtctttcccttggccttctagccctgccagtttgactatgccgtcttctgccctaacctgacagaggtgtcatccacaggcaacgcaggtgagaggtgacaggcatggcccctggggatgagcaggggtccctgaggtagacagtgggggcttccaaactggaggtttggggtaggaaataaatttgttttactgtgtaagaacactttagtgtacttatactcttttatacaccaaagtatactttatttaattttattttaaaaaatttttggctggccacggtggctcacgcctgtaatcccagcactttgggaggccaaggcaggcagatcacgaggtcaggagattgagaccatcctggctaacatggtgaaaccccgtctctacaaaaaaaaaatacaaaaaattagccaggcgtagtggtgggtgcctgtagtctcagctactcaggaggctgaggcaggagaatggcgtgaactcgggaggcggagctggcagtgagccgagatcgcgccactgcactctaggtctgggcgacagagcgagactgtctcaaaaaaaaaaaaaattaatttttgagacagagtctcactctgtcccccaggctggaatatagtggcacaatctcagctcactgcaacctctgcctcctaggttcaaatgattctcatgtctcagcctctggaatagctgggattacaggcgtgtgccaacatgcccagctaagttttatatttttagtagagacagggtttctccatgttggccaggctggtgtcaaactcctggcctcaaatgatccacccacctcagcctcccaaagtgctgggattacagttgtgagccaccacgcccagccagcattttttattttatatgaaatagagtagaatagaaaataccagtgtacgttgcacagagtaagggtaggtcctgtttggtgaagattagtctgttccaggcatatgtataagtatgtgagtactgagttgcagtgtaaaatgtgttttttaccatgtatcatgttaaaaaaagtttgaaatagtgtaaaaattacagatcccaggctggacttggtggctcacacctataatcccagcactttggcaggaggatcgtttgagctcaggagttaaaagccagacctcatctctataaaaaaaaatagaagaattagccaggtgtggtggtgtacacccgtggtcctagctactcaggaggctgaagtggaaggatcgcttgagcctggaaggtggaggctgcagtgagtcatgaagtcgtgattgcatcactgcactccagcctgggtgacagagcaagaccctggaccctctctaaaaataaaaaatctccagtcctcacatcagtctggttggggagagttctggaatctgcattttttttttttttttcttgagacagtctcgttctgtcactcaggctgcccaggctggagtgcagtggtgccatctcggctcattgcaacttctgcctcccaggttcaaatgattctcctgcctcagcctcgtgagtagccgggactacaggtgcacgccactacacccggctaatttttgttttttgtttgtttataagatggagtcttgctctgtcgcccaggctggagtgcaatggcttgatctcagctcactgcaatctccacctcccgggttcaagtgatactcttgcctcagccttccaagtatagctgggattataggcgtgtgccaccacacctggctaatttttgtccagctaatttttgtgtgtgtgtgtttttttcagagacggggtttcaccatgttggccaggctgatcttgaactcttgacctcaggtgatccgcccgcctcggcctcccaaagtgctgggattacaagtgtgagccactgcacccagcctggaatctgcgtttttaaccagcatccccagaaataactatgctcacctggtgatggtccccagctggatgtacattttatagatggagacaatgaggccagagtggggaaggggtgcctagtgggcaaaagctttggagtcagactgtctggctctgcctctcgtgaccttggtgaagtcactgaacctgcctgagcctcagtttcttcactgtgtgcatggagaaggccactagccgagactgctggcctgatgacgtaaaaggcttggtgcgaagcaggtgctcacggtgcacccgcccctttctccacccctgtcccttactccctctccccttcgctgataggcctttctctgtgccccacagaccaacagaacttcacagtgacactggaccaggtcctgctccgctgcctggaacaccagcagcactggaaccacctggacgaagagcaggccagcccggacctctggagtgcccccagcccagagcccggtgggtccgcatccctgcttctggcgccccacccaccccacacctgcagtgccagctccctcgtcttcagctgcatttcacatgccttgcaatggatcagccaaggccgagaccccatcttccagccacctagtcccccaaagggcctcctcacccaccctgtggctcacagtggggccagcatactccgtgaggctgctgccatccatgtgctagtcactggcagcctgcacctggtgggtggtgtcctgaagctgctggagcccgcactgtcccagtagccaaggcccggggttggaggtgggagcttcccacacctgcctgcgttctccccatgaacttacatactaggtgccttttgtttttggctttcctggttctgtctagactggcctaggggccagggctttgggatgggaggccgggagaggatgtcttttttaaggctctgtgccttggtctctccttcctcttggctgagatagcagaggggctccccgggtctctcactgttgcagtggcctggccgttcagcctgtctcccccaacaccccgcctgcctcctggctcaggcccagcttattgtgtgcgctgcctggccaggccctgggtcttgccatgtgctgggtggtagatttcctcctcccagtgccttctgggaagggagagggcctctgcctgggacactgcgggacagagggtggctggagtgaattaaagcctttgttttttaaagaaatggcaaagccttcgactga

SEQ ID NO: 12034 - DNA, 2230 bp, Homo sapiens
gattggctgggggcggggcggggcgtctcccgcccgggcctagagcgctgccgggggcgccgggactatgtcgcgggcgcggagccacctgcgcgccgctctattcctggcagcggcgtctgcgcgcggcataacgacccaggtcgcggcgcggcggggcttgagcgcgtggccggtgccgcaggagccgagcatggagtaccaggatgccgtgcgcatgctcaataccctgcagaccaatgccggctacctggagcaggtgaagcgccagcggggtgaccctcagacacagttggaagccatggaactgtacctggcacggagtgggctgcaggtggaggacttggaccggctgaacatcatccacgtcactgggacgaaggggaagggctccacctgtgccttcacggaatgtatcctccgaagctatggcctgaagacgggattctttagctctccccacctggtgcaggttcgggagcggatccgcatcaatgggcagcccatcagtcctgagctcttcaccaagtacttctggcgcctctaccaccggctggaggagaccaaggtggacctggcagtggtggaggtgggcattggcggggcttatgactgcaccaacatcatcaggaagcctgtggtgtgcggagtctcctctcttggcatcgaccacaccagcctcctgggggatacggtggagaagatcgcatggcagaaagggggcatctttaagcaaggtgtccctgccttcactgtgctccaacctgaaggtcccctggcagtgctgagggaccgagcccagcagatctcatgtcctctatacctgtgtccgatgctggaggccctcgaggaaggggggccgccgctgaccctgggcctggagggggagcaccagcggtccaacgccgccttggccttgcagctggcccactgctggctgcagcggcaggaccgccatggtgctggggagccaaaggcatccaggccagggctcctgtggcagctgcccctggcacctgtgttccagcccacatcccacatgcggctcgggcttcggaacacggagtggccgggccggacgcaggtgctgcggcgcgggcccctcacctggtacctggacggtgcgcacaccgccagcagcgcgcaggcctgcgtgcgctggttccgccaggcgctgcagggccgcgagaggccgagcggtggccccgaggttcgagtcttgctcttcaatgctaccggggaccgggacccggcggccctgctgaagctgctgcagccctgccagtttgactatgccgtcttctgccctaacctgacagaggtgtcatccacaggcaacgcagaccaacagaacttcacagtgacactggaccaggtcctgctccgctgcctggaacaccagcagcactggaaccacctggacgaagagcaggccagcccggacctctggagtgcccccagcccagagcccggtgggtccgcatccctgcttctggcgccccacccaccccacacctgcagtgccagctccctcgtcttcagctgcatttcacatgccttgcaatggatcagccaaggccgagaccccatcttccagccacctagtcccccaaagggcctcctcacccaccctgtggctcacagtggggccagcatactccgtgaggctgctgccatccatgtgctagtcactggcagcctgcacctggtgggtggtgtcctgaagctgctggagcccgcactgtcccagtagccaaggcccggggttggaggtgggagcttcccacacctgcctgcgttctccccatgaacttacatactaggtgccttttgtttttggctttcctggttctgtctagactggcctaggggccagggctttgggatgggaggccgggagaggatgtcttttttaaggctctgtgccttggtctctccttcctcttggctgagatagcagaggggctccccgggtctctcactgttgcagtggcctggccgttcagcctgtctcccccaacaccccgcctgcctcctggctcaggcccagcttattgtgtgcgctgcctggccaggccctgggtcttgccatgtgctgggtggtagatttcctcctcccagtgccttctgggaagggagagggcctctgcctgggacactgcgggacagagggtggctggagtgaattaaagcctttgttttttaaagaaatggcaaagccttcgactga

SEQ ID NO: 12035 - DNA, 4978 bp, Homo sapiens
cagaagcccagaggctcagcggtgcttctggagttccagtgatcccggagtctgaaccggcagtgagagtggggaaagagggtagggaagagactcaggaattcaggcttgaaagatccaggagtattgatctgggggtgggctgtccaggattcagaagattggggatccaagtgcctggatttgggggagaggcaggaatcaggggtagtggagggccccagaacctggaaaatagaaaatgtccgcgggcgctgtgtcaagagccggttgccctagaccagaccctgatgccagtgaggcgggtggcactggtttgatgagggtggagcctccaaccagccttgaggtcctgagggtgggaggcacggaatatgaggcctaaggggaatgaaatagcacccccactcccacttccattgtgaaccctcctgaagccgtacctacctgccttcctggctgagtgacccctggcacacccctcctccctctgagttgctcctctgtgggttggaatgtggaaccccagagtcatgagggttggggtggagcttcggggaactccagaattcgaataccccagccttctgtagttctggccccgctctggcagggagcaatatagcaatggaccccattggagagaatgagggcaaaggcccaggagtgaagtcgggggagcctgggcaggaagcaaggctagcccgttagtcatgccaccttctttgtgtagcactccctgggtggggctgaactgccccagactcccatttttgccagagctggaaagatgccatactctctgttgcttaacctacaggctaggctaacagtgctggcatggcaggcgggcctggtactggccttgttgccctggcttggccactggtctgctggctgtctctgtgcctgtggaccctgagtgagccttaacctactatctgggcactgtggttgccaggatgccgtgcgcatgctcaataccctgcagaccaatgccggctacctggagcaggtgaagcgccagcggggtgaccctcagacacagttggaagccatggaactgtacctggcacggagtgggctgcaggtaaggtagagagggcctgtgaccacctcccacccccatttgtgattcccgtagctgaggcagggaccttgtctgtctgtcccaggtggaggacttggaccggctgaacatcatccacgtcactgggacgaaggggaaggtgaggggcaggaccctggggtagggggtctattaagtggctggtggagtagagcctgcccagacaatcccttttctttcaagggctccacctgtgccttcacggaatgtatcctccgaagctatggcctgaagacgggattctttaggtactggcttgtggggggatgtggtgtctgtgtcccaatggaccctggggggctatggaaccagccagtgcttcaggaccagggtcacccccaggaggtcagctgcatgtctctctgcccagtgtttattcattcaataaacattcagttagcacttaccatattggcccatgtttatggcaacctttaattttttttttttttttgagactgagtctcactctatcgcccaggctggagtacaatggcacgatcttggctcactgcaacccccgcctgccaggttcaagcaattctcctgcttcagcctcccaagtagcttggattacaggcacctgccaccacaccaggctaatttttatatttttagtagagatggggtttcaccatgttggccaggctgttctcgaactcctgacctcaagtgatccgcccacctcggcctcctaaagtgctgggattacaggtgtgagccacggtgcctggccttaattttcataattaaaaaaaaattggggaaggggcagcaactttaatgtataaactaaatatgtagcaggaggtccagtgtggtggctcatgcctataatcccagcactttgggcagctgacatgggaggatcacctgagtctggggaggtcaaggctgcagttagcagtgatcatgccattgcacatcagcctgggcgacagagcaaactgctatcttaaaaaaaaaaaagaaaattacatagctggaatagtcagatggtcagatgtctctttaataacttaaagtccaggttgagtgtggtggctcacaactgtaatcctagcactttgggaggccaaggtgggaggatcactggagctcaggagtttgagaccagcttgggcaacgtagtgagacttcatctctattaaaaaaaaaatgaaaagaaaaaattttaaagtccatatataactttaaaatcacatagagatatttatcaattagtatgtctttagagtaaggagaaaattgccttgcaagggcttaaacgataagggtggcttgtgccatccacgttaaggtctcctaggcgggctgcagataggagcccttctgcttggccactctccactgtggctttgccctggggcagcgccccctcttggtctcacttgtctagacttacacaagaggatggccaggtggaaccgggatcactcttcctgtgccacgcatgtcttctaagcccatcaccacgaacttctgaaatcagctgcctaaggtcatttcaagccgatatgttttccctaaacagttcttgttcaaataaagagatggagaggaggacttactacctgagtagctttgaggattgaaacataaggcaccaacctgtcttctaaaatcactttttgggccaggcgtggtggctcatgcctgtaatcccagcactttgggaggccgaagcaggcagatcacttgaggccaggagttcaagagcagcctggccaacatggcgaaaccctatctctactaaaaataccaaaaaattggctgggcacggtggctcatgcctgtaatcccagcactttgggaggctgaggtgggtggatcaccagaggtcaggagttcaagaccagcctggctaacatggcgtaaccctgtctctactaaaaatacaagaatcagcgaggcgtggtggtgtgtgcctgtagtcccagctacttgggaggccgaggcatgagaaacgcttgaacctgggaggcagaggttgcagtgagccaagattgcaccactgcactccagcctaggcgacagaacaagaccctgtctcaaaaataaataaataaaaactacaatcatttttgggataaaaacctagccttcaacttgggcccacatggccttgagggccagcccagggctgcagcttgaacattggttgtgggctttgtctctgagagctgtaagacagatgacattgtgggacagatgtcagcagagtgactgattggtatgggactgttggagcccatagaatgtgcaagaccagcctgggtgaggaggctgtcttagttgagaccaacgtggtgaatagggtgagccaggtgcagaggcctggagatagaagatggggaggactggggggctacagatagtccggggggatggggcaccaggaacaaaccgagggacacaggagagatgaggcacggaggccagtagcatcagtccctgcagggtgggggaaggccaggacgctcgggaagggagtcctgatgaccccagctgtcccggcagctctccccacctggtgcaggttcgggagcggatccgcatcaatgggcagcccatcagtcctgagctcttcaccaagtacttctggcgcctctaccaccggctggaggagaccaaggtgccgcatgcaggagggctggcgggtgggtatggttgggggtgctacgtgttccagcaccccatctccccagagaaggggctgcatgggctctgggccctgacatgtccctgtgccacaggatggcagctgtgtctccatgcccccctacttccgcttcctgacactcatggccttccacgtcttcctccaagagaaggtgtgtgccctctccctagaaccctgcatctgaggccttgggaacgggaacctcagcaggcctgggggctccctgcttccatgcggcctctgggcaccctcatatcccctgccatgccctctggtctttgacaggtggacctggcagtggtggaggtgggcattggcggggcttatgactgcaccaacatcatcaggtgagcgcagttgcttgggacgaggggtggcagccaggagcacagcctcacctgccgcctggtggctcagggcagggcctcatggccttttcctcccctgcaggaagcctgtggtgtgcggagtctcctctcttggcatcgaccacaccagcctcctgggggatacggtggagaagatcgcatggcagaaagggggcatctttaaggtgaccaggcagactgggggaagggagagacatggaaggcctgggagtctacgttttcatcctggcttcactgtgtgactggaacaagttgagtctcctctccagactatttccccattgaaacgtgagggatggctgggcatggtggcttatatgcttgcaatcccagcatttcaggaggtcgaggtgagaggatcacctgagatccggagtttgagaccagcctgaccaatatggggaaactctgtctctactaaaaatacaaaaattagccaggtgtggtggtgtacgcctgtagttccagctacttgggagactgaggcaggagaatcactcgaacccgggaggcagacgttgcagtgagccgagattgcgccacagcactccagcctgggtgacagagtgagacttcatctcgaaaaagaaaagaaaagaaacatgagggatgagagacagtggtagcccagacccagggatgtgggggccagagataggagtgtggaggatgctaggtagccctttctctctccttcttccctccacagcaaggtgtccctgccttcactgtgctccaacctgaaggtcccctggcagtgctgagggaccgagccca

SEQ ID NO: 12036 - DNA, 677 bp, Homo sapiens
cagaagcccagaggctcagcggtgcttctggagttccagtgatcccggagtctgaaccggcagtgagagtggggaaagagggatgccgtgcgcatgctcaataccctgcagaccaatgccggctacctggagcaggtgaagcgccagcggggtgaccctcagacacagttggaagccatggaactgtacctggcacggagtgggctgcaggtggaggacttggaccggctgaacatcatccacgtcactgggacgaaggggaagggctccacctgtgccttcacggaatgtatcctccgaagctatggcctgaagacgggattctttagctctccccacctggtgcaggttcgggagcggatccgcatcaatgggcagcccatcagtcctgagctcttcaccaagtacttctggcgcctctaccaccggctggaggagaccaaggtggacctggcagtggtggaggtgggcattggcggggcttatgactgcaccaacatcatcaggaagcctgtggtgtgcggagtctcctctcttggcatcgaccacaccagcctcctgggggatacggtggagaagatcgcatggcagaaagggggcatctttaagcaaggtgtccctgccttcactgtgctccaacctgaaggtcccctggcagtgctgagggaccgagccca

SEQ ID NO: 12037 - DNA, 6464 bp, Homo sapiens
ggctgggaattcggagactatagcgtccccgccccgggttgggaagtgggaagtggcacaggagctaggatccagaagcccagaggctcagcggtgcttctggagttccagtgatcccggagtctgaaccggcagtgagagtggggaaagagggtagggaagagactcaggaattcaggcttgaaagatccaggagtattgatctgggggtgggctgtccaggattcagaagattggggatccaagtgcctggatttgggggagaggcaggaatcaggggtagtggagggccccagaacctggaaaatagaaaatgtccgcgggcgctgtgtcaagagccggttgccctagaccagaccctgatgccagtgaggcgggtggcactggtttgatgagggtggagcctccaaccagccttgaggtcctgagggtgggaggcacggaatatgaggcctaaggggaatgaaatagcacccccactcccacttccattgtgaaccctcctgaagccgtacctacctgccttcctggctgagtgacccctggcacacccctcctccctctgagttgctcctctgtgggttggaatgtggaaccccagagtcatgagggttggggtggagcttcggggaactccagaattcgaataccccagccttctgtagttctggccccgctctggcagggagcaatatagcaatggaccccattggagagaatgagggcaaaggcccaggagtgaagtcgggggagcctgggcaggaagcaaggctagcccgttagtcatgccaccttctttgtgtagcactccctgggtggggctgaactgccccagactcccatttttgccagagctggaaagatgccatactctctgttgcttaacctacaggctaggctaacagtgctggcatggcaggcgggcctggtactggccttgttgccctggcttggccactggtctgctggctgtctctgtgcctgtggaccctgagtgagccttaacctactatctgggcactgtggttgccaggatgccgtgcgcatgctcaataccctgcagaccaatgccggctacctggagcaggtgaagcgccagcggggtgaccctcagacacagttggaagccatggaactgtacctggcacggagtgggctgcaggtaaggtagagagggcctgtgaccacctcccacccccatttgtgattcccgtagctgaggcagggaccttgtctgtctgtcccaggtggaggacttggaccggctgaacatcatccacgtcactgggacgaaggggaaggtgaggggcaggaccctggggtagggggtctattaagtggctggtggagtagagcctgcccagacaatcccttttctttcaagggctccacctgtgccttcacggaatgtatcctccgaagctatggcctgaagacgggattctttaggtactggcttgtggggggatgtggtgtctgtgtcccaatggaccctggggggctatggaaccagccagtgcttcaggaccagggtcacccccaggaggtcagctgcatgtctctctgcccagtgtttattcattcaataaacattcagttagcacttaccatattggcccatgtttatggcaacctttaattttttttttttttttgagactgagtctcactctatcgcccaggctggagtacaatggcacgatcttggctcactgcaacccccgcctgccaggttcaagcaattctcctgcttcagcctcccaagtagcttggattacaggcacctgccaccacaccaggctaatttttatatttttagtagagatggggtttcaccatgttggccaggctgttctcgaactcctgacctcaagtgatccgcccacctcggcctcctaaagtgctgggattacaggtgtgagccacggtgcctggccttaattttcataattaaaaaaaaattggggaaggggcagcaactttaatgtataaactaaatatgtagcaggaggtccagtgtggtggctcatgcctataatcccagcactttgggcagctgacatgggaggatcacctgagtctggggaggtcaaggctgcagttagcagtgatcatgccattgcacatcagcctgggcgacagagcaaactgctatcttaaaaaaaaaaaagaaaattacatagctggaatagtcagatggtcagatgtctctttaataacttaaagtccaggttgagtgtggtggctcacaactgtaatcctagcactttgggaggccaaggtgggaggatcactggagctcaggagtttgagaccagcttgggcaacgtagtgagacttcatctctattaaaaaaaaaatgaaaagaaaaaattttaaagtccatatataactttaaaatcacatagagatatttatcaattagtatgtctttagagtaaggagaaaattgccttgcaagggcttaaacgataagggtggcttgtgccatccacgttaaggtctcctaggcgggctgcagataggagcccttctgcttggccactctccactgtggctttgccctggggcagcgccccctcttggtctcacttgtctagacttacacaagaggatggccaggtggaaccgggatcactcttcctgtgccacgcatgtcttctaagcccatcaccacgaacttctgaaatcagctgcctaaggtcatttcaagccgatatgttttccctaaacagttcttgttcaaataaagagatggagaggaggacttactacctgagtagctttgaggattgaaacataaggcaccaacctgtcttctaaaatcactttttgggccaggcgtggtggctcatgcctgtaatcccagcactttgggaggccgaagcaggcagatcacttgaggccaggagttcaagagcagcctggccaacatggcgaaaccctatctctactaaaaataccaaaaaattggctgggcacggtggctcatgcctgtaatcccagcactttgggaggctgaggtgggtggatcaccagaggtcaggagttcaagaccagcctggctaacatggcgtaaccctgtctctactaaaaatacaagaatcagcgaggcgtggtggtgtgtgcctgtagtcccagctacttgggaggccgaggcatgagaaacgcttgaacctgggaggcagaggttgcagtgagccaagattgcaccactgcactccagcctaggcgacagaacaagaccctgtctcaaaaataaataaataaaaactacaatcatttttgggataaaaacctagccttcaacttgggcccacatggccttgagggccagcccagggctgcagcttgaacattggttgtgggctttgtctctgagagctgtaagacagatgacattgtgggacagatgtcagcagagtgactgattggtatgggactgttggagcccatagaatgtgcaagaccagcctgggtgaggaggctgtcttagttgagaccaacgtggtgaatagggtgagccaggtgcagaggcctggagatagaagatggggaggactggggggctacagatagtccggggggatggggcaccaggaacaaaccgagggacacaggagagatgaggcacggaggccagtagcatcagtccctgcagggtgggggaaggccaggacgctcgggaagggagtcctgatgaccccagctgtcccggcagctctccccacctggtgcaggttcgggagcggatccgcatcaatgggcagcccatcagtcctgagctcttcaccaagtacttctggcgcctctaccaccggctggaggagaccaaggtgccgcatgcaggagggctggcgggtgggtatggttgggggtgctacgtgttccagcaccccatctccccagagaaggggctgcatgggctctgggccctgacatgtccctgtgccacaggatggcagctgtgtctccatgcccccctacttccgcttcctgacactcatggccttccacgtcttcctccaagagaaggtgtgtgccctctccctagaaccctgcatctgaggccttgggaacgggaacctcagcaggcctgggggctccctgcttccatgcggcctctgggcaccctcatatcccctgccatgccctctggtctttgacaggtggacctggcagtggtggaggtgggcattggcggggcttatgactgcaccaacatcatcaggtgagcgcagttgcttgggacgaggggtggcagccaggagcacagcctcacctgccgcctggtggctcagggcagggcctcatggccttttcctcccctgcaggaagcctgtggtgtgcggagtctcctctcttggcatcgaccacaccagcctcctgggggatacggtggagaagatcgcatggcagaaagggggcatctttaaggtgaccaggcagactgggggaagggagagacatggaaggcctgggagtctacgttttcatcctggcttcactgtgtgactggaacaagttgagtctcctctccagactatttccccattgaaacgtgagggatggctgggcatggtggcttatatgcttgcaatcccagcatttcaggaggtcgaggtgagaggatcacctgagatccggagtttgagaccagcctgaccaatatggggaaactctgtctctactaaaaatacaaaaattagccaggtgtggtggtgtacgcctgtagttccagctacttgggagactgaggcaggagaatcactcgaacccgggaggcagacgttgcagtgagccgagattgcgccacagcactccagcctgggtgacagagtgagacttcatctcgaaaaagaaaagaaaagaaacatgagggatgagagacagtggtagcccagacccagggatgtgggggccagagataggagtgtggaggatgctaggtagccctttctctctccttcttccctccacagcaaggtgtccctgccttcactgtgctccaacctgaaggtcccctggcagtgctgagggaccgagcccagcagatctcagtaagtctgattggaatggggcagcggcagggtgggtttgtgtccctcctgtttgaggaggcactgcatcctctggggcctcagtttgcccatctgtgcagtgaggacgctgggccagctgccaggcctgctggaacacatctcagttctgggagcagggcttggtggctgggggaggggagagatgcaagggctgacgtggtcagggagggcctctgctgacccgctcctgcctgtctcccctagtgtcctctatacctgtgtccgatgctggaggccctcgaggaaggggggccgccgctgaccctgggcctggagggggagcaccagcggtccaacgccgccttggccttgcagctggcccactgctggctgcagcggcaggaccgccatggtgagtgggcagctgagtgggcaggcaggtgggtggcacctgtggagcctgcctaggagggtcccggacacacttggtctcacacaccccgcaggtgctggggagccaaaggcatccaggccagggctcctgtggcagctgcccctggcacctgtgttccagcccacatcccacatgcggctcggtgagttagaccttcctgcccagctgggaccactgcgtgtgtctgtgccccttcagattttttttttttttttttttggttttctgtttgggagataagagacaatttgaagtggtgcttaagagaaaggactctgatgtcagcaaacctccctgaccttgagctcatgaactctttctgagcctgtcttctcatctgccaaagtagatgatgataggagccactgccacgggctgtggtggggattcgctgaggtgacatcactaaggtgctgagtgcagagcctggccaatgtgggataaagtgccagccagtggtagctgctgtcactgtcactatcatcatcatcagaccctgaggttctggaggatggtgatccagtcatctgcttcttgcctcccccaaagctttcagcacccagcaggtgctcatgctgttaagccccttcagcaaatggtgggcccgctgtgtgccacgcctgttatcaagggcaagtgacaaggtcctggagacaaaccgacctcgcatcacatcccggccccagctaagggctctcaggctgtcaaacgggaatagcaggccctttcagggttgcctgaaagattccaccagatgagacagccgaaaagcccaagccattgactggtgctagtaaaaagttcctgggctgccggggtcctgagtgttgagggcgggcgcagcctgcaggggagaacgggctcaggagtgtgtgtgcggaattgaggacgggggtgggagagggcctggaggactgccttgctgccctcccccagggcttcggaacacggagtggccgggccggacg

SEQ ID NO: 12038 - DNA, 959 bp, Homo sapiens
ggctgggaattcggagactatagcgtccccgccccgggttgggaagtgggaagtggcacaggagctaggatccagaagcccagaggctcagcggtgcttctggagttccagtgatcccggagtctgaaccggcagtgagagtggggaaagagggatgccgtgcgcatgctcaataccctgcagaccaatgccggctacctggagcaggtgaagcgccagcggggtgaccctcagacacagttggaagccatggaactgtacctggcacggagtgggctgcaggtggaggacttggaccggctgaacatcatccacgtcactgggacgaaggggaagggctccacctgtgccttcacggaatgtatcctccgaagctatggcctgaagacgggattctttagctctccccacctggtgcaggttcgggagcggatccgcatcaatgggcagcccatcagtcctgagctcttcaccaagtacttctggcgcctctaccaccggctggaggagaccaaggatggcagctgtgtctccatgcccccctacttccgcttcctgacactcatggccttccacgtcttcctccaagagaaggtggacctggcagtggtggaggtgggcattggcggggcttatgactgcaccaacatcatcaggaagcctgtggtgtgcggagtctcctctcttggcatcgaccacaccagcctcctgggggatacggtggagaagatcgcatggcagaaagggggcatctttaagcaaggtgtccctgccttcactgtgctccaacctgaaggtcccctggcagtgctgagggaccgagcccagcagatctcagtgctggggagccaaaggcatccaggccagggctcctgtggcagctgcccctggcacctgtgttccagcccacatcccacatgcggctcgggcttcggaacacggagtggccgggccggacg

SEQ ID NO: 12039 - DNA, 11141 bp, Homo sapiens
cgggactatgtcgcgggcgcggagccacctgcgcgccgctctattcctggcagcggcgtctgcgcgcggcataacgacccaggtcgcggcgcggcggggcttgagcgcgtggccggtgccgcaggagccgagcatggagtaccaggtatcaggcgggccagcgggccagcgggcctgggcgcgacgacacgtgggcctgcgctgagccgcagaacatccgggctccgctagccgagagggtatcgggagccctggactgggggactcggggggcggaacatcctggaggctgggggtggggacagggaccaggaagttgggcccgggccgccggggctgggaattcggagactatagcgtccccgccccgggttgggaagtgggaagtggcacaggagctaggatccagaagcccagaggctcagcggtgcttctggagttccagtgatcccggagtctgaaccggcagtgagagtggggaaagagggtagggaagagactcaggaattcaggcttgaaagatccaggagtattgatctgggggtgggctgtccaggattcagaagattggggatccaagtgcctggatttgggggagaggcaggaatcaggggtagtggagggccccagaacctggaaaatagaaaatgtccgcgggcgctgtgtcaagagccggttgccctagaccagaccctgatgccagtgaggcgggtggcactggtttgatgagggtggagcctccaaccagccttgaggtcctgagggtgggaggcacggaatatgaggcctaaggggaatgaaatagcacccccactcccacttccattgtgaaccctcctgaagccgtacctacctgccttcctggctgagtgacccctggcacacccctcctccctctgagttgctcctctgtgggttggaatgtggaaccccagagtcatgagggttggggtggagcttcggggaactccagaattcgaataccccagccttctgtagttctggccccgctctggcagggagcaatatagcaatggaccccattggagagaatgagggcaaaggcccaggagtgaagtcgggggagcctgggcaggaagcaaggctagcccgttagtcatgccaccttctttgtgtagcactccctgggtggggctgaactgccccagactcccatttttgccagagctggaaagatgccatactctctgttgcttaacctacaggctaggctaacagtgctggcatggcaggcgggcctggtactggccttgttgccctggcttggccactggtctgctggctgtctctgtgcctgtggaccctgagtgagccttaacctactatctgggcactgtggttgccaggatgccgtgcgcatgctcaataccctgcagaccaatgccggctacctggagcaggtgaagcgccagcggggtgaccctcagacacagttggaagccatggaactgtacctggcacggagtgggctgcaggtaaggtagagagggcctgtgaccacctcccacccccatttgtgattcccgtagctgaggcagggaccttgtctgtctgtcccaggtggaggacttggaccggctgaacatcatccacgtcactgggacgaaggggaaggtgaggggcaggaccctggggtagggggtctattaagtggctggtggagtagagcctgcccagacaatcccttttctttcaagggctccacctgtgccttcacggaatgtatcctccgaagctatggcctgaagacgggattctttaggtactggcttgtggggggatgtggtgtctgtgtcccaatggaccctggggggctatggaaccagccagtgcttcaggaccagggtcacccccaggaggtcagctgcatgtctctctgcccagtgtttattcattcaataaacattcagttagcacttaccatattggcccatgtttatggcaacctttaattttttttttttttttgagactgagtctcactctatcgcccaggctggagtacaatggcacgatcttggctcactgcaacccccgcctgccaggttcaagcaattctcctgcttcagcctcccaagtagcttggattacaggcacctgccaccacaccaggctaatttttatatttttagtagagatggggtttcaccatgttggccaggctgttctcgaactcctgacctcaagtgatccgcccacctcggcctcctaaagtgctgggattacaggtgtgagccacggtgcctggccttaattttcataattaaaaaaaaattggggaaggggcagcaactttaatgtataaactaaatatgtagcaggaggtccagtgtggtggctcatgcctataatcccagcactttgggcagctgacatgggaggatcacctgagtctggggaggtcaaggctgcagttagcagtgatcatgccattgcacatcagcctgggcgacagagcaaactgctatcttaaaaaaaaaaaagaaaattacatagctggaatagtcagatggtcagatgtctctttaataacttaaagtccaggttgagtgtggtggctcacaactgtaatcctagcactttgggaggccaaggtgggaggatcactggagctcaggagtttgagaccagcttgggcaacgtagtgagacttcatctctattaaaaaaaaaatgaaaagaaaaaattttaaagtccatatataactttaaaatcacatagagatatttatcaattagtatgtctttagagtaaggagaaaattgccttgcaagggcttaaacgataagggtggcttgtgccatccacgttaaggtctcctaggcgggctgcagataggagcccttctgcttggccactctccactgtggctttgccctggggcagcgccccctcttggtctcacttgtctagacttacacaagaggatggccaggtggaaccgggatcactcttcctgtgccacgcatgtcttctaagcccatcaccacgaacttctgaaatcagctgcctaaggtcatttcaagccgatatgttttccctaaacagttcttgttcaaataaagagatggagaggaggacttactacctgagtagctttgaggattgaaacataaggcaccaacctgtcttctaaaatcactttttgggccaggcgtggtggctcatgcctgtaatcccagcactttgggaggccgaagcaggcagatcacttgaggccaggagttcaagagcagcctggccaacatggcgaaaccctatctctactaaaaataccaaaaaattggctgggcacggtggctcatgcctgtaatcccagcactttgggaggctgaggtgggtggatcaccagaggtcaggagttcaagaccagcctggctaacatggcgtaaccctgtctctactaaaaatacaagaatcagcgaggcgtggtggtgtgtgcctgtagtcccagctacttgggaggccgaggcatgagaaacgcttgaacctgggaggcagaggttgcagtgagccaagattgcaccactgcactccagcctaggcgacagaacaagaccctgtctcaaaaataaataaataaaaactacaatcatttttgggataaaaacctagccttcaacttgggcccacatggccttgagggccagcccagggctgcagcttgaacattggttgtgggctttgtctctgagagctgtaagacagatgacattgtgggacagatgtcagcagagtgactgattggtatgggactgttggagcccatagaatgtgcaagaccagcctgggtgaggaggctgtcttagttgagaccaacgtggtgaatagggtgagccaggtgcagaggcctggagatagaagatggggaggactggggggctacagatagtccggggggatggggcaccaggaacaaaccgagggacacaggagagatgaggcacggaggccagtagcatcagtccctgcagggtgggggaaggccaggacgctcgggaagggagtcctgatgaccccagctgtcccggcagctctccccacctggtgcaggttcgggagcggatccgcatcaatgggcagcccatcagtcctgagctcttcaccaagtacttctggcgcctctaccaccggctggaggagaccaaggtgccgcatgcaggagggctggcgggtgggtatggttgggggtgctacgtgttccagcaccccatctccccagagaaggggctgcatgggctctgggccctgacatgtccctgtgccacaggatggcagctgtgtctccatgcccccctacttccgcttcctgacactcatggccttccacgtcttcctccaagagaaggtgtgtgccctctccctagaaccctgcatctgaggccttgggaacgggaacctcagcaggcctgggggctccctgcttccatgcggcctctgggcaccctcatatcccctgccatgccctctggtctttgacaggtggacctggcagtggtggaggtgggcattggcggggcttatgactgcaccaacatcatcaggtgagcgcagttgcttgggacgaggggtggcagccaggagcacagcctcacctgccgcctggtggctcagggcagggcctcatggccttttcctcccctgcaggaagcctgtggtgtgcggagtctcctctcttggcatcgaccacaccagcctcctgggggatacggtggagaagatcgcatggcagaaagggggcatctttaaggtgaccaggcagactgggggaagggagagacatggaaggcctgggagtctacgttttcatcctggcttcactgtgtgactggaacaagttgagtctcctctccagactatttccccattgaaacgtgagggatggctgggcatggtggcttatatgcttgcaatcccagcatttcaggaggtcgaggtgagaggatcacctgagatccggagtttgagaccagcctgaccaatatggggaaactctgtctctactaaaaatacaaaaattagccaggtgtggtggtgtacgcctgtagttccagctacttgggagactgaggcaggagaatcactcgaacccgggaggcagacgttgcagtgagccgagattgcgccacagcactccagcctgggtgacagagtgagacttcatctcgaaaaagaaaagaaaagaaacatgagggatgagagacagtggtagcccagacccagggatgtgggggccagagataggagtgtggaggatgctaggtagccctttctctctccttcttccctccacagcaaggtgtccctgccttcactgtgctccaacctgaaggtcccctggcagtgctgagggaccgagcccagcagatctcagtaagtctgattggaatggggcagcggcagggtgggtttgtgtccctcctgtttgaggaggcactgcatcctctggggcctcagtttgcccatctgtgcagtgaggacgctgggccagctgccaggcctgctggaacacatctcagttctgggagcagggcttggtggctgggggaggggagagatgcaagggctgacgtggtcagggagggcctctgctgacccgctcctgcctgtctcccctagtgtcctctatacctgtgtccgatgctggaggccctcgaggaaggggggccgccgctgaccctgggcctggagggggagcaccagcggtccaacgccgccttggccttgcagctggcccactgctggctgcagcggcaggaccgccatggtgagtgggcagctgagtgggcaggcaggtgggtggcacctgtggagcctgcctaggagggtcccggacacacttggtctcacacaccccgcaggtgctggggagccaaaggcatccaggccagggctcctgtggcagctgcccctggcacctgtgttccagcccacatcccacatgcggctcggtgagttagaccttcctgcccagctgggaccactgcgtgtgtctgtgccccttcagattttttttttttttttttttggttttctgtttgggagataagagacaatttgaagtggtgcttaagagaaaggactctgatgtcagcaaacctccctgaccttgagctcatgaactctttctgagcctgtcttctcatctgccaaagtagatgatgataggagccactgccacgggctgtggtggggattcgctgaggtgacatcactaaggtgctgagtgcagagcctggccaatgtgggataaagtgccagccagtggtagctgctgtcactgtcactatcatcatcatcagaccctgaggttctggaggatggtgatccagtcatctgcttcttgcctcccccaaagctttcagcacccagcaggtgctcatgctgttaagccccttcagcaaatggtgggcccgctgtgtgccacgcctgttatcaagggcaagtgacaaggtcctggagacaaaccgacctcgcatcacatcccggccccagctaagggctctcaggctgtcaaacgggaatagcaggccctttcagggttgcctgaaagattccaccagatgagacagccgaaaagcccaagccattgactggtgctagtaaaaagttcctgggctgccggggtcctgagtgttgagggcgggcgcagcctgcaggggagaacgggctcaggagtgtgtgtgcggaattgaggacgggggtgggagagggcctggaggactgccttgctgccctcccccagggcttcggaacacggagtggccgggccggacgcaggtgctgcggcgcgggcccctcacctggtacctggacggtgcgcacaccgccagcagcgcgcaggcctgcgtgcgctggttccgccaggcgctgcagggccgcgagaggccgagcgggtgaggggcagggctgggggtggggccggggctggcccacgaggaggggcgggatcttggggaagggcggggcggggtcgtggggaagggcgggggcgggcccatggggaggggcggggtcgtgggcggggacgggattggtaccgcagggagaacgggcggcgccctttgacccagctcctcacctctgtcgcagtggccccgaggttcgagtcttgctcttcaatgctaccggggaccgggacccggcggccctgctgaagctgctgcaggtgaggggccaacttgggggtgggcggcaggcagtcctgaagccctgggtctggcggtgtgaccctggggggtgccaatcccctcccccttgagttgtattgaggattagatgtgacaaggtgcctgtgctggttctgccaggtgctgcagggccgtggggaggccagtcataggtcattactcatattcccgcgtgtctagactcaagtccaggcttaagaggagggccagatcgtggctaaaggtgtagactctggactcgcttgtcatgcccctttaggcactagcatatcaccctggacgagaagcggcatttccccgagcctcagtttgcctctccgtaaaatggggttgctgctaggggcacccgcttctcaggtttggttgaaggagtcattgggcctttctctgcttggggaaactgaggctgcccaagctgtcagggctgaagtggcccctaggtatcatctcccatttcacagaccaggaggctgaggctgtatccagaacctctcccatttacccacagcctttttccagcctggatttggggccccctcactatctgagtgaccttcagcaagtccccttgccctgtggccactgttcccctgtctgtacagtaggttggggcttcgctgctcaggccacaggccaggcagggtatactgaggcagatgggggcagggtgctgaagtaccttggctaggtttatacagcatcattctagttgtcagggaggctgcatctccagagatgtgggcgcagggggccatatggaagttggtggacatcctttcgggggtctgacaccaagtctttcccttggccttctagccctgccagtttgactatgccgtcttctgccctaacctgacagaggtgtcatccacaggcaacgcaggtgagaggtgacaggcatggcccctggggatgagcaggggtccctgaggtagacagtgggggcttccaaactggaggtttggggtaggaaataaatttgttttactgtgtaagaacactttagtgtacttatactcttttatacaccaaagtatactttatttaattttattttaaaaaatttttggctggccacggtggctcacgcctgtaatcccagcactttgggaggccaaggcaggcagatcacgaggtcaggagattgagaccatcctggctaacatggtgaaaccccgtctctacaaaaaaaaaatacaaaaaattagccaggcgtagtggtgggtgcctgtagtctcagctactcaggaggctgaggcaggagaatggcgtgaactcgggaggcggagctggcagtgagccgagatcgcgccactgcactctaggtctgggcgacagagcgagactgtctcaaaaaaaaaaaaaattaatttttgagacagagtctcactctgtcccccaggctggaatatagtggcacaatctcagctcactgcaacctctgcctcctaggttcaaatgattctcatgtctcagcctctggaatagctgggattacaggcgtgtgccaacatgcccagctaagttttatatttttagtagagacagggtttctccatgttggccaggctggtgtcaaactcctggcctcaaatgatccacccacctcagcctcccaaagtgctgggattacagttgtgagccaccacgcccagccagcattttttattttatatgaaatagagtagaatagaaaataccagtgtacgttgcacagagtaagggtaggtcctgtttggtgaagattagtctgttccaggcatatgtataagtatgtgagtactgagttgcagtgtaaaatgtgttttttaccatgtatcatgttaaaaaaagtttgaaatagtgtaaaaattacagatcccaggctggacttggtggctcacacctataatcccagcactttggcaggaggatcgtttgagctcaggagttaaaagccagacctcatctctataaaaaaaaatagaagaattagccaggtgtggtggtgtacacccgtggtcctagctactcaggaggctgaagtggaaggatcgcttgagcctggaaggtggaggctgcagtgagtcatgaagtcgtgattgcatcactgcactccagcctgggtgacagagcaagaccctggaccctctctaaaaataaaaaatctccagtcctcacatcagtctggttggggagagttctggaatctgcattttttttttttttttcttgagacagtctcgttctgtcactcaggctgcccaggctggagtgcagtggtgccatctcggctcattgcaacttctgcctcccaggttcaaatgattctcctgcctcagcctcgtgagtagccgggactacaggtgcacgccactacacccggctaatttttgttttttgtttgtttataagatggagtcttgctctgtcgcccaggctggagtgcaatggcttgatctcagctcactgcaatctccacctcccgggttcaagtgatactcttgcctcagccttccaagtatagctgggattataggcgtgtgccaccacacctggctaatttttgtccagctaatttttgtgtgtgtgtgtttttttcagagacggggtttcaccatgttggccaggctgatcttgaactcttgacctcaggtgatccgcccgcctcggcctcccaaagtgctgggattacaagtgtgagccactgcacccagcctggaatctgcgtttttaaccagcatccccagaaataactatgctcacctggtgatggtccccagctggatgtacattttatagatggagacaatgaggccagagtggggaaggggtgcctagtgggcaaaagctttggagtcagactgtctggctctgcctctcgtgaccttggtgaagtcactgaacctgcctgagcctcagtttcttcactgtgtgcatggagaaggccactagccgagactgctggcctgatgacgtaaaaggcttggtgcgaagcaggtgctcacggtgcacccgcccctttctccacccctgtcccttactccctctccccttcgctgataggcctttctctgtgccccacagaccaacagaacttcacagtgacactggaccaggtcctgctccgctgcctggaacaccagcagcactggaaccacctggacgaagagcaggccagcccggacctctggagtgcccccagcccagagcccggtgggtccgcatccctgcttctggcgccccacccaccccacacctgcagtgccagctccctcgtcttcagctgcatttcacatgccttgcaatggatcagccaaggccgagaccccatcttccagccacctagtcccccaaagggcctcctcacccaccctgtggctcacagtggggccagcatactccgtgaggctgctgccatccatgtgctagtcactggcagcctgcacctggtgggtggtgtcctgaagctgctggagcccgcactgtcccagtagccaaggcccggggttggaggtgggagcttcccacacctgcctgcgttctccccatgaacttacatactaggtgccttttgtttttggctttcctggttctgtctagactggcctaggggccagggctttgggatgggaggccgggagaggatgtcttttttaaggctctgtgccttggtctctccttcctcttggctgagatagcagaggggctccccgggtctctcactgttgcagtggcctggccgttcagcctgtctcccccaacaccccgcctgcctcctggctcaggcccagcttattgtgtgcgctgcctggccaggccctgggtcttgccatgtgctgggtggtagatttcctcctcccagtgccttctgggaagggagagggcctctgcctgggacactgcgggacagagggtggctggagtgaattaaagcctttgttttttaaa

SEQ ID NO: 12040 - DNA, 2206 bp, Homo sapiens
cgggactatgtcgcgggcgcggagccacctgcgcgccgctctattcctggcagcggcgtctgcgcgcggcataacgacccaggtcgcggcgcggcggggcttgagcgcgtggccggtgccgcaggagccgagcatggagtaccaggatgccgtgcgcatgctcaataccctgcagaccaatgccggctacctggagcaggtgaagcgccagcggggtgaccctcagacacagttggaagccatggaactgtacctggcacggagtgggctgcaggtggaggacttggaccggctgaacatcatccacgtcactgggacgaaggggaagggctccacctgtgccttcacggaatgtatcctccgaagctatggcctgaagacgggattctttaggttcgggagcggatccgcatcaatgggcagcccatcagtcctgagctcttcaccaagtacttctggcgcctctaccaccggctggaggagaccaaggatggcagctgtgtctccatgcccccctacttccgcttcctgacactcatggccttccacgtcttcctccaagagaaggtggacctggcagtggtggaggtgggcattggcggggcttatgactgcaccaacatcatcaggaagcctgtggtgtgcggagtctcctctcttggcatcgaccacaccagcctcctgggggatacggtggagaagatcgcatggcagaaagggggcatctttaagcaaggtgtccctgccttcactgtgctccaacctgaaggtcccctggcagtgctgagggaccgagcccagcagatctcatgtcctctatacctgtgtccgatgctggaggccctcgaggaaggggggccgccgctgaccctgggcctggagggggagcaccagcggtccaacgccgccttggccttgcagctggcccactgctggctgcagcggcaggaccgccatggtgctggggagccaaaggcatccaggccagggctcctgtggcagctgcccctggcacctgtgttccagcccacatcccacatgcggctcgggcttcggaacacggagtggccgggccggacgcaggtgctgcggcgcgggcccctcacctggtacctggacggtgcgcacaccgccagcagcgcgcaggcctgcgtgcgctggttccgccaggcgctgcagggccgcgagaggccgagcggtggccccgaggttcgagtcttgctcttcaatgctaccggggaccgggacccggcggccctgctgaagctgctgcagccctgccagtttgactatgccgtcttctgccctaacctgacagaggtgtcatccacaggcaacgcagaccaacagaacttcacagtgacactggaccaggtcctgctccgctgcctggaacaccagcagcactggaaccacctggacgaagagcaggccagcccggacctctggagtgcccccagcccagagcccggtgggtccgcatccctgcttctggcgccccacccaccccacacctgcagtgccagctccctcgtcttcagctgcatttcacatgccttgcaatggatcagccaaggccgagaccccatcttccagccacctagtcccccaaagggcctcctcacccaccctgtggctcacagtggggccagcatactccgtgaggctgctgccatccatgtgctagtcactggcagcctgcacctggtgggtggtgtcctgaagctgctggagcccgcactgtcccagtagccaaggcccggggttggaggtgggagcttcccacacctgcctgcgttctccccatgaacttacatactaggtgccttttgtttttggctttcctggttctgtctagactggcctaggggccagggctttgggatgggaggccgggagaggatgtcttttttaaggctctgtgccttggtctctccttcctcttggctgagatagcagaggggctccccgggtctctcactgttgcagtggcctggccgttcagcctgtctcccccaacaccccgcctgcctcctggctcaggcccagcttattgtgtgcgctgcctggccaggccctgggtcttgccatgtgctgggtggtagatttcctcctcccagtgccttctgggaagggagagggcctctgcctgggacactgcgggacagagggtggctggagtgaattaaagcctttgttttttaaa

SEQ ID NO: 12041 - DNA, 6064 bp, Homo sapiens
cctgaaggtcccctggcagtgctgagggaccgagcccagcagatctcagtaagtctgattggaatggggcagcggcagggtgggtttgtgtccctcctgtttgaggaggcactgcatcctctggggcctcagtttgcccatctgtgcagtgaggacgctgggccagctgccaggcctgctggaacacatctcagttctgggagcagggcttggtggctgggggaggggagagatgcaagggctgacgtggtcagggagggcctctgctgacccgctcctgcctgtctcccctagtgtcctctatacctgtgtccgatgctggaggccctcgaggaaggggggccgccgctgaccctgggcctggagggggagcaccagcggtccaacgccgccttggccttgcagctggcccactgctggctgcagcggcaggaccgccatggtgagtgggcagctgagtgggcaggcaggtgggtggcacctgtggagcctgcctaggagggtcccggacacacttggtctcacacaccccgcaggtgctggggagccaaaggcatccaggccagggctcctgtggcagctgcccctggcacctgtgttccagcccacatcccacatgcggctcggtgagttagaccttcctgcccagctgggaccactgcgtgtgtctgtgccccttcagattttttttttttttttttttggttttctgtttgggagataagagacaatttgaagtggtgcttaagagaaaggactctgatgtcagcaaacctccctgaccttgagctcatgaactctttctgagcctgtcttctcatctgccaaagtagatgatgataggagccactgccacgggctgtggtggggattcgctgaggtgacatcactaaggtgctgagtgcagagcctggccaatgtgggataaagtgccagccagtggtagctgctgtcactgtcactatcatcatcatcagaccctgaggttctggaggatggtgatccagtcatctgcttcttgcctcccccaaagctttcagcacccagcaggtgctcatgctgttaagccccttcagcaaatggtgggcccgctgtgtgccacgcctgttatcaagggcaagtgacaaggtcctggagacaaaccgacctcgcatcacatcccggccccagctaagggctctcaggctgtcaaacgggaatagcaggccctttcagggttgcctgaaagattccaccagatgagacagccgaaaagcccaagccattgactggtgctagtaaaaagttcctgggctgccggggtcctgagtgttgagggcgggcgcagcctgcaggggagaacgggctcaggagtgtgtgtgcggaattgaggacgggggtgggagagggcctggaggactgccttgctgccctcccccagggcttcggaacacggagtggccgggccggacgcaggtgctgcggcgcgggcccctcacctggtacctggacggtgcgcacaccgccagcagcgcgcaggcctgcgtgcgctggttccgccaggcgctgcagggccgcgagaggccgagcgggtgaggggcagggctgggggtggggccggggctggcccacgaggaggggcgggatcttggggaagggcggggcggggtcgtggggaagggcgggggcgggcccatggggaggggcggggtcgtgggcggggacgggattggtaccgcagggagaacgggcggcgccctttgacccagctcctcacctctgtcgcagtggccccgaggttcgagtcttgctcttcaatgctaccggggaccgggacccggcggccctgctgaagctgctgcaggtgaggggccaacttgggggtgggcggcaggcagtcctgaagccctgggtctggcggtgtgaccctggggggtgccaatcccctcccccttgagttgtattgaggattagatgtgacaaggtgcctgtgctggttctgccaggtgctgcagggccgtggggaggccagtcataggtcattactcatattcccgcgtgtctagactcaagtccaggcttaagaggagggccagatcgtggctaaaggtgtagactctggactcgcttgtcatgcccctttaggcactagcatatcaccctggacgagaagcggcatttccccgagcctcagtttgcctctccgtaaaatggggttgctgctaggggcacccgcttctcaggtttggttgaaggagtcattgggcctttctctgcttggggaaactgaggctgcccaagctgtcagggctgaagtggcccctaggtatcatctcccatttcacagaccaggaggctgaggctgtatccagaacctctcccatttacccacagcctttttccagcctggatttggggccccctcactatctgagtgaccttcagcaagtccccttgccctgtggccactgttcccctgtctgtacagtaggttggggcttcgctgctcaggccacaggccaggcagggtatactgaggcagatgggggcagggtgctgaagtaccttggctaggtttatacagcatcattctagttgtcagggaggctgcatctccagagatgtgggcgcagggggccatatggaagttggtggacatcctttcgggggtctgacaccaagtctttcccttggccttctagccctgccagtttgactatgccgtcttctgccctaacctgacagaggtgtcatccacaggcaacgcaggtgagaggtgacaggcatggcccctggggatgagcaggggtccctgaggtagacagtgggggcttccaaactggaggtttggggtaggaaataaatttgttttactgtgtaagaacactttagtgtacttatactcttttatacaccaaagtatactttatttaattttattttaaaaaatttttggctggccacggtggctcacgcctgtaatcccagcactttgggaggccaaggcaggcagatcacgaggtcaggagattgagaccatcctggctaacatggtgaaaccccgtctctacaaaaaaaaaatacaaaaaattagccaggcgtagtggtgggtgcctgtagtctcagctactcaggaggctgaggcaggagaatggcgtgaactcgggaggcggagctggcagtgagccgagatcgcgccactgcactctaggtctgggcgacagagcgagactgtctcaaaaaaaaaaaaaattaatttttgagacagagtctcactctgtcccccaggctggaatatagtggcacaatctcagctcactgcaacctctgcctcctaggttcaaatgattctcatgtctcagcctctggaatagctgggattacaggcgtgtgccaacatgcccagctaagttttatatttttagtagagacagggtttctccatgttggccaggctggtgtcaaactcctggcctcaaatgatccacccacctcagcctcccaaagtgctgggattacagttgtgagccaccacgcccagccagcattttttattttatatgaaatagagtagaatagaaaataccagtgtacgttgcacagagtaagggtaggtcctgtttggtgaagattagtctgttccaggcatatgtataagtatgtgagtactgagttgcagtgtaaaatgtgttttttaccatgtatcatgttaaaaaaagtttgaaatagtgtaaaaattacagatcccaggctggacttggtggctcacacctataatcccagcactttggcaggaggatcgtttgagctcaggagttaaaagccagacctcatctctataaaaaaaaatagaagaattagccaggtgtggtggtgtacacccgtggtcctagctactcaggaggctgaagtggaaggatcgcttgagcctggaaggtggaggctgcagtgagtcatgaagtcgtgattgcatcactgcactccagcctgggtgacagagcaagaccctggaccctctctaaaaataaaaaatctccagtcctcacatcagtctggttggggagagttctggaatctgcattttttttttttttttcttgagacagtctcgttctgtcactcaggctgcccaggctggagtgcagtggtgccatctcggctcattgcaacttctgcctcccaggttcaaatgattctcctgcctcagcctcgtgagtagccgggactacaggtgcacgccactacacccggctaatttttgttttttgtttgtttataagatggagtcttgctctgtcgcccaggctggagtgcaatggcttgatctcagctcactgcaatctccacctcccgggttcaagtgatactcttgcctcagccttccaagtatagctgggattataggcgtgtgccaccacacctggctaatttttgtccagctaatttttgtgtgtgtgtgtttttttcagagacggggtttcaccatgttggccaggctgatcttgaactcttgacctcaggtgatccgcccgcctcggcctcccaaagtgctgggattacaagtgtgagccactgcacccagcctggaatctgcgtttttaaccagcatccccagaaataactatgctcacctggtgatggtccccagctggatgtacattttatagatggagacaatgaggccagagtggggaaggggtgcctagtgggcaaaagctttggagtcagactgtctggctctgcctctcgtgaccttggtgaagtcactgaacctgcctgagcctcagtttcttcactgtgtgcatggagaaggccactagccgagactgctggcctgatgacgtaaaaggcttggtgcgaagcaggtgctcacggtgcacccgcccctttctccacccctgtcccttactccctctccccttcgctgataggcctttctctgtgccccacagaccaacagaacttcacagtgacactggaccaggtcctgctccgctgcctggaacaccagcagcactggaaccacctggacgaagagcaggccagcccggacctctggagtgcccccagcccagagcccggtgggtccgcatccctgcttctggcgccccacccaccccacacctgcagtgccagctccctcgtcttcagctgcatttcacatgccttgcaatggatcagccaaggccgagaccccatcttccagccacctagtcccccaaagggcctcctcacccaccctgtggctcacagtggggccagcatactccgtgaggctgctgccatccatgtgctagtcactggcagcctgcacctggtgggtggtgtcctgaagctgctggagcccgcactgtcccagtagccaaggcccggggttggaggtgggagcttcccacacctgcctgcgttctccccatgaacttacatactaggtgccttttgtttttggctttcctggttctgtctagactggcctaggggccagggctttgggatgggaggccgggagaggatgtcttttttaaggctctgtgccttggtctctccttcctcttggctgagatagcagaggggctccccgggtctctcactgttgcagtggcctggccgttcagcctgtctcccccaacaccccgcctgcctcctggctcaggcccagcttattgtgtgcgctgcctggccaggccctgggtcttgccatgtgctgggtggtagatttcctcctcccagtgccttctgggaagggagagggcctctgcctgggacactgcgggacagagggtggctggagtgaattaaagcctttgttttttaaagaaatggcaaagccttcgactgacccttgaccccctgctccctcagcagagacggagggaggggctgctggtggtcagggacctgcactgtgtagagggagcctggctgtgtggcctggaacaagtccctccctccctgtgcgcctcaggtggcctgtctgtgagatgagaagaagaccagactgaagcctgttcaccatatgccaggcagtgctttctgcagacccccttgcagagaccttgtgatggagaattatacacatttgaca

SEQ ID NO: 12042 - DNA, 829 bp, Homo sapiens
cctgaaggtcccctggcagtgctgagggaccgagcccagcagatctcatgtcctctatacctgtgtccgatgctggaggccctcgaggaaggggggccgccgctgaccctgggcctggagggggagcaccagcggtccaacgccgccttggccttgcagctggcccactgctggctgcagcggcaggaccgccatggtgctggggagccaaaggcatccaggccagggctcctgtggcagctgcccctggcacctgtgttccagcccacatcccacatgcggctcgggcttcggaacacggagtggccgggccggacgcaggtgctgcggcgcgggcccctcacctggtacctggacggtgcgcacaccgccagcagcgcgcaggcctgcgtgcgctggttccgccaggcgctgcagggccgcgagaggccgagcggtggccccgaggttcgagtcttgctcttcaatgctaccggggaccgggacccggcggccctgctgaagctgctgcagccctgccagtttgactatgccgtcttctgccctaacctgacagaggtgtcatccacaggcaacgcagaccaacagaacttcacagtgacactggaccaggtcctgctccgctgcctggaacaccagcagcactggaaccacctggacgaagagcaggccagcccggacctctggagtgcccccagcccagagcccggtggcctgtctgtgagatgagaagaagaccagactgaagcctgttcaccatatgccaggcagtgctttctgcagacccccttgcagagaccttgtgatggagaattatacacatttgaca

SEQ ID NO: 12043 - DNA, 572 bp, Homo sapiens
atgccgtgcgcatgctcaataccctgcagaccaatgccggctacctggagcaggtgaagcgccagcggggtgaccctcagacacagttggaagccatggaactgtacctggcacggagtgggctgcaggtaaggtagagagggcctgtgaccacctcccacccccatttgtgattcccgtagctgaggcagggaccttgtctgtctgtcccaggtggaggacttggaccggctgaacatcatccacgtcactgggacgaaggggaaggtgaggggcaggaccctggggtagggggtctattaagtggctggtggagtagagcctgcccagacaatcccttttctttcaagggctccacctgtgccttcacggaatgtatcctccgaagctatggcctgaagacgggattctttaggtactggcttgtggggggatgtggtgtctgtgtcccaatggaccctggggggctatggaaccagccagtgcttcaggaccagggtcacccccaggaggtcagctgcatgtctctctgcccagtgtttattcattcaataaacattcagttagcactt

SEQ ID NO: 12044 - DNA, 404 bp, Homo sapiens
atgccgtgcgcatgctcaataccctgcagaccaatgccggctacctggagcaggtgaagcgccagcggggtgaccctcagacacagttggaagccatggaactgtacctggcacggagtgggctgcaggtggaggacttggaccggctgaacatcatccacgtcactgggacgaaggggaagggctccacctgtgccttcacggaatgtatcctccgaagctatggcctgaagacgggattctttaggtactggcttgtggggggatgtggtgtctgtgtcccaatggaccctggggggctatggaaccagccagtgcttcaggaccagggtcacccccaggaggtcagctgcatgtctctctgcccagtgtttattcattcaataaacattcagttagcactt

SEQ ID NO: 12045 - DNA, 1337 bp, Homo sapiens
gtgggcaggcaggtgggtggcacctgtggagcctgcctaggagggtcccggacacacttggtctcacacaccccgcaggtgctggggagccaaaggcatccaggccagggctcctgtggcagctgcccctggcacctgtgttccagcccacatcccacatgcggctcggtgagttagaccttcctgcccagctgggaccactgcgtgtgtctgtgccccttcagattttttttttttttttttttggttttctgtttgggagataagagacaatttgaagtggtgcttaagagaaaggactctgatgtcagcaaacctccctgaccttgagctcatgaactctttctgagcctgtcttctcatctgccaaagtagatgatgataggagccactgccacgggctgtggtggggattcgctgaggtgacatcactaaggtgctgagtgcagagcctggccaatgtgggataaagtgccagccagtggtagctgctgtcactgtcactatcatcatcatcagaccctgaggttctggaggatggtgatccagtcatctgcttcttgcctcccccaaagctttcagcacccagcaggtgctcatgctgttaagccccttcagcaaatggtgggcccgctgtgtgccacgcctgttatcaagggcaagtgacaaggtcctggagacaaaccgacctcgcatcacatcccggccccagctaagggctctcaggctgtcaaacgggaatagcaggccctttcagggttgcctgaaagattccaccagatgagacagccgaaaagcccaagccattgactggtgctagtaaaaagttcctgggctgccggggtcctgagtgttgagggcgggcgcagcctgcaggggagaacgggctcaggagtgtgtgtgcggaattgaggacgggggtgggagagggcctggaggactgccttgctgccctcccccagggcttcggaacacggagtggccgggccggacgcaggtgctgcggcgcgggcccctcacctggtacctggacggtgcgcacaccgccagcagcgcgcaggcctgcgtgcgctggttccgccaggcgctgcagggccgcgagaggccgagcgggtgaggggcagggctgggggtggggccggggctggcccacgaggaggggcgggatcttggggaagggcggggcggggtcgtggggaagggcgggggcgggcccatggggaggggcggggtcgtgggcggggacgggattggtaccgcagggagaacgggcggcgccctttgacccagctcctcacctctgtcgcagtggccccgaggttcgagtcttgctcttc

SEQ ID NO: 12046 - DNA, 347 bp, Homo sapiens
gtgggcaggcaggtgggtggcacctgtggagcctgcctaggagggtcccggacacacttggtctcacacaccccgcaggtgctggggagccaaaggcatccaggccagggctcctgtggcagctgcccctggcacctgtgttccagcccacatcccacatgcggctcgggcttcggaacacggagtggccgggccggacgcaggtgctgcggcgcgggcccctcacctggtacctggacggtgcgcacaccgccagcagcgcgcaggcctgcgtgcgctggttccgccaggcgctgcagggccgcgagaggccgagcggtggccccgaggttcgagtcttgctcttc

SEQ ID NO: 12047 - DNA, 3581 bp, Homo sapiens
cggcgccctttgacccagctcctcacctctgtcgcagtggccccgaggttcgagtcttgctcttcaatgctaccggggaccgggacccggcggccctgctgaagctgctgcaggtgaggggccaacttgggggtgggcggcaggcagtcctgaagccctgggtctggcggtgtgaccctggggggtgccaatcccctcccccttgagttgtattgaggattagatgtgacaaggtgcctgtgctggttctgccaggtgctgcagggccgtggggaggccagtcataggtcattactcatattcccgcgtgtctagactcaagtccaggcttaagaggagggccagatcgtggctaaaggtgtagactctggactcgcttgtcatgcccctttaggcactagcatatcaccctggacgagaagcggcatttccccgagcctcagtttgcctctccgtaaaatggggttgctgctaggggcacccgcttctcaggtttggttgaaggagtcattgggcctttctctgcttggggaaactgaggctgcccaagctgtcagggctgaagtggcccctaggtatcatctcccatttcacagaccaggaggctgaggctgtatccagaacctctcccatttacccacagcctttttccagcctggatttggggccccctcactatctgagtgaccttcagcaagtccccttgccctgtggccactgttcccctgtctgtacagtaggttggggcttcgctgctcaggccacaggccaggcagggtatactgaggcagatgggggcagggtgctgaagtaccttggctaggtttatacagcatcattctagttgtcagggaggctgcatctccagagatgtgggcgcagggggccatatggaagttggtggacatcctttcgggggtctgacaccaagtctttcccttggccttctagccctgccagtttgactatgccgtcttctgccctaacctgacagaggtgtcatccacaggcaacgcaggtgagaggtgacaggcatggcccctggggatgagcaggggtccctgaggtagacagtgggggcttccaaactggaggtttggggtaggaaataaatttgttttactgtgtaagaacactttagtgtacttatactcttttatacaccaaagtatactttatttaattttattttaaaaaatttttggctggccacggtggctcacgcctgtaatcccagcactttgggaggccaaggcaggcagatcacgaggtcaggagattgagaccatcctggctaacatggtgaaaccccgtctctacaaaaaaaaaatacaaaaaattagccaggcgtagtggtgggtgcctgtagtctcagctactcaggaggctgaggcaggagaatggcgtgaactcgggaggcggagctggcagtgagccgagatcgcgccactgcactctaggtctgggcgacagagcgagactgtctcaaaaaaaaaaaaaattaatttttgagacagagtctcactctgtcccccaggctggaatatagtggcacaatctcagctcactgcaacctctgcctcctaggttcaaatgattctcatgtctcagcctctggaatagctgggattacaggcgtgtgccaacatgcccagctaagttttatatttttagtagagacagggtttctccatgttggccaggctggtgtcaaactcctggcctcaaatgatccacccacctcagcctcccaaagtgctgggattacagttgtgagccaccacgcccagccagcattttttattttatatgaaatagagtagaatagaaaataccagtgtacgttgcacagagtaagggtaggtcctgtttggtgaagattagtctgttccaggcatatgtataagtatgtgagtactgagttgcagtgtaaaatgtgttttttaccatgtatcatgttaaaaaaagtttgaaatagtgtaaaaattacagatcccaggctggacttggtggctcacacctataatcccagcactttggcaggaggatcgtttgagctcaggagttaaaagccagacctcatctctataaaaaaaaatagaagaattagccaggtgtggtggtgtacacccgtggtcctagctactcaggaggctgaagtggaaggatcgcttgagcctggaaggtggaggctgcagtgagtcatgaagtcgtgattgcatcactgcactccagcctgggtgacagagcaagaccctggaccctctctaaaaataaaaaatctccagtcctcacatcagtctggttggggagagttctggaatctgcattttttttttttttttcttgagacagtctcgttctgtcactcaggctgcccaggctggagtgcagtggtgccatctcggctcattgcaacttctgcctcccaggttcaaatgattctcctgcctcagcctcgtgagtagccgggactacaggtgcacgccactacacccggctaatttttgttttttgtttgtttataagatggagtcttgctctgtcgcccaggctggagtgcaatggcttgatctcagctcactgcaatctccacctcccgggttcaagtgatactcttgcctcagccttccaagtatagctgggattataggcgtgtgccaccacacctggctaatttttgtccagctaatttttgtgtgtgtgtgtttttttcagagacggggtttcaccatgttggccaggctgatcttgaactcttgacctcaggtgatccgcccgcctcggcctcccaaagtgctgggattacaagtgtgagccactgcacccagcctggaatctgcgtttttaaccagcatccccagaaataactatgctcacctggtgatggtccccagctggatgtacattttatagatggagacaatgaggccagagtggggaaggggtgcctagtgggcaaaagctttggagtcagactgtctggctctgcctctcgtgaccttggtgaagtcactgaacctgcctgagcctcagtttcttcactgtgtgcatggagaaggccactagccgagactgctggcctgatgacgtaaaaggcttggtgcgaagcaggtgctcacggtgcacccgcccctttctccacccctgtcccttactccctctccccttcgctgataggcctttctctgtgccccacagaccaacagaacttcacagtgacactggaccaggtcctgctccgctgcctggaacaccagcagcactggaaccacctggacgaagagcaggccagcccggacctctggagtgcccccagcccagagcccggtgggtccgcatccctgcttctggcgccccacccaccccacacctgcagtgccagctccctcgtcttcagctgcatttcacatgccttgcaatggatcagccaaggccgagaccccatcttccagccacctagtcccccaaagggcctcctcacccaccctgtggctcacagtggggccagcatactccgtgaggctgctgccatccatgtgctagtcactggcagcctgcacctggtgggtggtgtcctg

SEQ ID NO: 12048 - DNA, 560 bp, Homo sapiens
cggcgccctttgacccagctcctcacctctgtcgcagtggccccgaggttcgagtcttgctcttcaatgctaccggggaccgggacccggcggccctgctgaagctgctgcagccctgccagtttgactatgccgtcttctgccctaacctgacagaggtgtcatccacaggcaacgcagaccaacagaacttcacagtgacactggaccaggtcctgctccgctgcctggaacaccagcagcactggaaccacctggacgaagagcaggccagcccggacctctggagtgcccccagcccagagcccggtgggtccgcatccctgcttctggcgccccacccaccccacacctgcagtgccagctccctcgtcttcagctgcatttcacatgccttgcaatggatcagccaaggccgagaccccatcttccagccacctagtcccccaaagggcctcctcacccaccctgtggctcacagtggggccagcatactccgtgaggctgctgccatccatgtgctagtcactggcagcctgcacctggtgggtggtgtcctg

SEQ ID NO: 12049 - DNA, 4918 bp, Homo sapiens
gggcgcggagccacctgcgcgccgctctattcctggcagcggcgtctgcgcgcggcataacgacccaggtcgcggcgcggcggggcttgagcgcgtggccggtgccgcaggagccgagcatggagtaccaggtatcaggcgggccagcgggccagcgggcctgggcgcgacgacacgtgggcctgcgctgagccgcagaacatccgggctccgctagccgagagggtatcgggagccctggactgggggactcggggggcggaacatcctggaggctgggggtggggacagggaccaggaagttgggcccgggccgccggggctgggaattcggagactatagcgtccccgccccgggttgggaagtgggaagtggcacaggagctaggatccagaagcccagaggctcagcggtgcttctggagttccagtgatcccggagtctgaaccggcagtgagagtggggaaagagggtagggaagagactcaggaattcaggcttgaaagatccaggagtattgatctgggggtgggctgtccaggattcagaagattggggatccaagtgcctggatttgggggagaggcaggaatcaggggtagtggagggccccagaacctggaaaatagaaaatgtccgcgggcgctgtgtcaagagccggttgccctagaccagaccctgatgccagtgaggcgggtggcactggtttgatgagggtggagcctccaaccagccttgaggtcctgagggtgggaggcacggaatatgaggcctaaggggaatgaaatagcacccccactcccacttccattgtgaaccctcctgaagccgtacctacctgccttcctggctgagtgacccctggcacacccctcctccctctgagttgctcctctgtgggttggaatgtggaaccccagagtcatgagggttggggtggagcttcggggaactccagaattcgaataccccagccttctgtagttctggccccgctctggcagggagcaatatagcaatggaccccattggagagaatgagggcaaaggcccaggagtgaagtcgggggagcctgggcaggaagcaaggctagcccgttagtcatgccaccttctttgtgtagcactccctgggtggggctgaactgccccagactcccatttttgccagagctggaaagatgccatactctctgttgcttaacctacaggctaggctaacagtgctggcatggcaggcgggcctggtactggccttgttgccctggcttggccactggtctgctggctgtctctgtgcctgtggaccctgagtgagccttaacctactatctgggcactgtggttgccaggatgccgtgcgcatgctcaataccctgcagaccaatgccggctacctggagcaggtgaagcgccagcggggtgaccctcagacacagttggaagccatggaactgtacctggcacggagtgggctgcaggtaaggtagagagggcctgtgaccacctcccacccccatttgtgattcccgtagctgaggcagggaccttgtctgtctgtcccaggtggaggacttggaccggctgaacatcatccacgtcactgggacgaaggggaaggtgaggggcaggaccctggggtagggggtctattaagtggctggtggagtagagcctgcccagacaatcccttttctttcaagggctccacctgtgccttcacggaatgtatcctccgaagctatggcctgaagacgggattctttaggtactggcttgtggggggatgtggtgtctgtgtcccaatggaccctggggggctatggaaccagccagtgcttcaggaccagggtcacccccaggaggtcagctgcatgtctctctgcccagtgtttattcattcaataaacattcagttagcacttaccatattggcccatgtttatggcaacctttaattttttttttttttttgagactgagtctcactctatcgcccaggctggagtacaatggcacgatcttggctcactgcaacccccgcctgccaggttcaagcaattctcctgcttcagcctcccaagtagcttggattacaggcacctgccaccacaccaggctaatttttatatttttagtagagatggggtttcaccatgttggccaggctgttctcgaactcctgacctcaagtgatccgcccacctcggcctcctaaagtgctgggattacaggtgtgagccacggtgcctggccttaattttcataattaaaaaaaaattggggaaggggcagcaactttaatgtataaactaaatatgtagcaggaggtccagtgtggtggctcatgcctataatcccagcactttgggcagctgacatgggaggatcacctgagtctggggaggtcaaggctgcagttagcagtgatcatgccattgcacatcagcctgggcgacagagcaaactgctatcttaaaaaaaaaaaagaaaattacatagctggaatagtcagatggtcagatgtctctttaataacttaaagtccaggttgagtgtggtggctcacaactgtaatcctagcactttgggaggccaaggtgggaggatcactggagctcaggagtttgagaccagcttgggcaacgtagtgagacttcatctctattaaaaaaaaaatgaaaagaaaaaattttaaagtccatatataactttaaaatcacatagagatatttatcaattagtatgtctttagagtaaggagaaaattgccttgcaagggcttaaacgataagggtggcttgtgccatccacgttaaggtctcctaggcgggctgcagataggagcccttctgcttggccactctccactgtggctttgccctggggcagcgccccctcttggtctcacttgtctagacttacacaagaggatggccaggtggaaccgggatcactcttcctgtgccacgcatgtcttctaagcccatcaccacgaacttctgaaatcagctgcctaaggtcatttcaagccgatatgttttccctaaacagttcttgttcaaataaagagatggagaggaggacttactacctgagtagctttgaggattgaaacataaggcaccaacctgtcttctaaaatcactttttgggccaggcgtggtggctcatgcctgtaatcccagcactttgggaggccgaagcaggcagatcacttgaggccaggagttcaagagcagcctggccaacatggcgaaaccctatctctactaaaaataccaaaaaattggctgggcacggtggctcatgcctgtaatcccagcactttgggaggctgaggtgggtggatcaccagaggtcaggagttcaagaccagcctggctaacatggcgtaaccctgtctctactaaaaatacaagaatcagcgaggcgtggtggtgtgtgcctgtagtcccagctacttgggaggccgaggcatgagaaacgcttgaacctgggaggcagaggttgcagtgagccaagattgcaccactgcactccagcctaggcgacagaacaagaccctgtctcaaaaataaataaataaaaactacaatcatttttgggataaaaacctagccttcaacttgggcccacatggccttgagggccagcccagggctgcagcttgaacattggttgtgggctttgtctctgagagctgtaagacagatgacattgtgggacagatgtcagcagagtgactgattggtatgggactgttggagcccatagaatgtgcaagaccagcctgggtgaggaggctgtcttagttgagaccaacgtggtgaatagggtgagccaggtgcagaggcctggagatagaagatggggaggactggggggctacagatagtccggggggatggggcaccaggaacaaaccgagggacacaggagagatgaggcacggaggccagtagcatcagtccctgcagggtgggggaaggccaggacgctcgggaagggagtcctgatgaccccagctgtcccggcagctctccccacctggtgcaggttcgggagcggatccgcatcaatgggcagcccatcagtcctgagctcttcaccaagtacttctggcgcctctaccaccggctggaggagaccaaggtgccgcatgcaggagggctggcgggtgggtatggttgggggtgctacgtgttccagcaccccatctccccagagaaggggctgcatgggctctgggccctgacatgtccctgtgccacaggatggcagctgtgtctccatgcccccctacttccgcttcctgacactcatggccttccacgtcttcctccaagagaaggtgtgtgccctctccctagaaccctgcatctgaggccttgggaacgggaacctcagcaggcctgggggctccctgcttccatgcggcctctgggcaccctcatatcccctgccatgccctctggtctttgacaggtggacctggcagtggtggaggtgggcattggcggggcttatgactgcaccaacatcatcaggtgagcgcagttgcttgggacgaggggtggcagccaggagcacagcctcacctgccgcctggtggctcagggcagggcctcatggccttttcctcccctgcaggaagcctgtggtgtgcggagtctcctctcttggcatcgaccacaccagcctcctgggggatacggtggagaagatcgcatggcagaaagggggcatctttaaggtgaccaggcagactgggggaagggagagacatggaaggcctgggagtctacgttttcatcctggcttcactgtgtgactggaacaagttgagtctcctctccagactatttccccattgaaacgtgagggatggctgggcatggtggcttatatgcttgc

SEQ ID NO: 12050 - DNA, 898 bp, Homo sapiens
gggcgcggagccacctgcgcgccgctctattcctggcagcggcgtctgcgcgcggcataacgacccaggtcgcggcgcggcggggcttgagcgcgtggccggtgccgcaggagccgagcatggagtaccaggatgccgtgcgcatgctcaataccctgcagaccaatgccggctacctggagcaggtgaagcgccagcggggtgaccctcagacacagttggaagccatggaactgtacctggcacggagtgggctgcaggtggaggacttggaccggctgaacatcatccacgtcactgggacgaaggggaagggctccacctgtgccttcacggaatgtatcctccgaagctatggcctgaagacgggattctttagctctccccacctggtgcaggttcgggagcggatccgcatcaatgggcagcccatcagtcctgagctcttcaccaagtacttctggcgcctctaccaccggctggaggagaccaaggatggcagctgtgtctccatgcccccctacttccgcttcctgacactcatggccttccacgtcttcctccaagagaaggtggacctggcagtggtggaggtgggcattggcggggcttatgactgcaccaacatcatcaggaagcctgtggtgtgcggagtctcctctcttggcatcgaccacaccagcctcctgggggatacggtggagaagatcgcatggcagaaagggggcatctttaaggtgaccaggcagactgggggaagggagagacatggaaggcctgggagtctacgttttcatcctggcttcactgtgtgactggaacaagttgagtctcctctccagactatttccccattgaaacgtgagggatggctgggcatggtggcttatatgcttgc

SEQ ID NO: 12051 - DNA, 13086 bp, Homo sapiens
cagctctagttaaatcctgggcagagctggcttggcagagatgcccacacctgtgcgtcacttcgtgccctacccagaaggggagcaggaaaccaagggatgaaaggtgctgggtccctggctgcctccttgcccatggctgagaagttctggtgggaaggaaccatggagggcccatctggatatccttcctcagctaaaactgcctccttccaggtaggagaacccggtgaccaggcaggtggcctttcctgtctaagcctcagtttcttgggggcgatgctgccagcccctcacagggctcagcgcagcacccagcatgcttggagggtgagaacaaattgaaaaaagatcccacatttttttcctctgaaaattttggtaagacggccaggtgcggtggctcatgcctgtaatcccagctcttggggatgccaaggctggtggattatgaggtcaggagttcgagaccagcctggctaagatgacgaagccccgtctctactaaaaatacaaaaattagccgggcgtgatggtgggcacctgtagtcccagttaattgggaggctgaggcaggagaatcacttgaacccgggaggcagaggttgcggtgagccggtatcacaccactgcactccagcctgggcaacagagcgagactccgtctcaaaaaaaaaaaaaaaagaaaaacaaccgggcatgatagcgcatgtctgtaatcccaaccactctggaggctgaggcaggagaatctcttgaacccgggatgtggaggttgcagtgagccgagatcaggtccctgaactccagcctgggcaacagagtgagactctgtctcaaaaacaaacaaaaaaaaaaagtcgggcacggtggctcacacttgtaatcccagcactttgggaggccaaggtggatgtatcacgaggtcaggagatcgagaccatcctggctaacacggtaaaacccggtctctactaaaaatacaaaaaaatagccgggcgtggtggcaggcacctgtagtcccagctactcggaggctgaggcaggagaatggcatgaacccgggaggcggagcttgcagtgagctgagatcacgccactgcaccccagcctgggctacagagcaagactccgtctcaaaaaaaaaaaaaaaaaaaaaaaaaaaaaaaatcctcatcctcctaaagaggagactaggggtcagacaggatcacagagggaagtgtcttgcccatggtcacacagcagttcgacagcagagagggccagggtgaccagacaggtggtggtaaggtgcaaggaccaacattaaagtcagtaatctgggtttgaatcggctttgccacgtccatgtgcctgctgtattcctgggtgagttgattaacctctctgagcttccatttttccacctgtaaaatagggatcatctgtaattcacacaattttcatgagattccaggtgccaaacacagggataagtgcttaataaatgtttatttgttttgagacagcgtcttactctgtcactctgttgcccaggctgtagcgcagtggcgccatcttggctcactgcaacctccgcctccctggttcaagggattctcctgcttcagcctcccaagtagtgggactaccggagtgtgtcaccaggcccaactaatttttgtaattttagtagagatgcggtttcactgttgtggccaggctggtctgaaactcctggcctcaagcgactgacccaccgtggcttcccaaagtgctgggattacaggtgtgagccactgctcccagccgagtgcctacttaataaatgttaacaagaaaaacccaccccaaaaaaggaaagaggacaaacacaaggcaagggtgtttcagcagaggcaaacatcgcgagcaaaagcttgcaggtgggagaggccaaggccagttgctgaagtccttgccagctggcagggactgtgccctgtaagtgggggatgagtccagaggcaggcagggaccaggccacagtgaacttgtgggttttattaatcccaagtgtatgacggggcaggagagagtgtagtatcccaggcagatctgagttcagaaagacctgacccactctgtctgtctctctctcagccttagcctgccactctacagtggttaccatctgacctgatcagggtttgtaaatctgtatattcctttgtgaatttctttatttgctgccctctcacccccaggactgggtgctctgtgagcagtaccttgtcttctgttctccacagtgaccccagcatctagtccagggtctggcagagataatttcttccaatgaataagtgaatgaatgacatcgtttccctgtgggaaggtggggattgaggcagagttcctcagtctgctcctaccccagcccctcctcctgtccacacgcacctgcagatctgcccgcatgagtgggcactggcccacttactggttcccctgccccctttgttttctattgttcttcctggagagagagaacgcagtgccttcgtggtcaccaaaaggccaacggcgattccctctccagctgcatgatgaagatccctttgatttttccgtttacagtttcttctagttccttctataaatatttgtggcttttcaagtaaaaagccacaaaggaggtgagtgggctgtaaaggaaacaaaacagctttttttttttttttttgagatggagtctcactctgtcggccaggctgaagtgcagtggcgcgatctgggctcactgcaacctctgcctcccgggtttaagtgattctcctgcctcagcctccctagtagctgggattacaagcacggaccaccatgcctggctaatttttgtatttttagtagagatggggtttcaccatgttggtcaggctggtcttgaactcctcacctcatgatccacctgcctcaacctcccaaagagctgggattgcaggtgtgagccactgcgcccagccagcttttttttctttttttgagatagagtcttgctgtccctcacgttggagtgcagtggtgcgatcttggctcactgcagcctccacctcccaggttcaaacgattcttctgcctcagcctcccaagtaactgggattacaggcaggtgccatcacacctggctaacttgtatttttagtagagacagggtttcaccatgttgacagattttgaacctgaggtgatccacccgcctcagcctcccaaagtactgtgattacaggcaagagccactgtgcccggccacaaacggctgttaaacacaaaaaaagtgttcagcctccttcacgataaatgtaaatgataactactcagagaatccatttttccaccttacgattggcaaggatcaaagctggctgtgttgctgaagatgtgaggaaatgctggctcatgcactgctgaagtcggggaaacttgtacccctctgggggacaatgtggccatgtgtataaaaatgtcagctgggcgcagtggctcatgcctgtaatcccagcactttgggaggccgaggaaggtggatcacctgaggtcaggggttcaagaccagactggccaacatggcgaaaccccgtctctactaaaaatacaaaaattagccgggtgtgatggcacacacctgtagtcccagctacttgggaggctgaggcaggagaattgcttgaacctgggaggtggaggttgcagtgagccgagatggcaccactgcactttggcctgggtgacagagtgagactctgtctcagaaaaaaaaaaaaatgtcaagtgcaggtcacctttgacccagcaattgcacttggaatttatccatgaaataacccacacaaggaagaaatgatgaaggtaaaatgttacccactgtagcttgggtaaaatattatccattgcttgtgatagcaaaatattggaaacaacccaaatgtccatcaataggcaactggctgaatacacagtagtacttccacaccatggagtactacacagcttcaaaacaaattagccaacggagtggcccttatgtaccgacacagcccagaatagggccctggttaaaaagggacatggagaaagtacaaggcaggcttgccttacagtctgctgctatatgtgggtataaaagggaaatcaatatatatttgtatttgcttgtaaatgcataacatacctctggaaaggtgataagaaactgataacattgactgctttgagagagaaggattaggatgctggaatctgggctcccagagagggaggctttttgctgtacacagttttgaccctttaactatttgttgttttttgtttgttttgagaagagtcttgctctttcacccaggctggagtgcagtggcacaatcttggctcactgcaatcttcgcctcccaggttcaagtgattcctgtgcctcagcctccgaagtagctgggattacaggtgcgcatcaccaagcttggctaatttttgtatttttagtaaagacggggtttcatcatgttgcccaggctggtctcaaactcctgacctcaagtgatccacccgccttggcctcccaaagtgctaggattataggcgtgagccaccacgcccagccagtctttgaactatttgaatgatatattatccaaaaaataccagaatttaaaaagaaaacataagaaaaagtgttttttccagcaatgtggacaggctttccaccttacaccacaggagggactccggctctgggatctcattcttggaggaatggcttagagcacctatgccacctcctacagatgagtccactgaggccaccaatagtagatctggaaaaaatacttgccctacagaggacagaaactgagggataatatcagtactacacaaagtgcctttttttcttttttttaactttttaaacatttgatttatttatttaaaaagatgggggtctcgctatgtcacccaggctggagtacagtggtgctatcatagctcactgcagcatcgaactcctgggctcagattatcctccttggccgggcgcagtagctcacgcctgtaatcccagcactttgggaggctgaggcgggtgggtcacctgaggtcaggagtttgagaccagcctgcctaacatggtgaaatcccatctctactaaaaatacaaaaattagctgggcatggtggcacatgcctgtagtcccagctacttgggaggctgaggcaggagaattgcttgaacccaggaggcggatgttgcagtgagccgagattgcaccactgcacttcagcctgggcaacagagtgagactctgtctcaaaaaaaaaaaaaaaaatcctcctgcctcagcctccaaatcactgggaccacagatgtgcaccagcatgcccagcaatttttgctttttgtagagaagggggtttcaccatgttgcccaggctgatctagaactctaggcttcaagcaatcttcccgcctcagtcttccaaagtgctaggattacaggtgtgagccactgcacccagcccacaaagggctattataactgacatgaaaaagcgaatcagacattagaaaaatgggccaaggatgggttaggcagttcactgacataaatgcatgggaagatactcaagttcactgcagcaggggaatgacagaaacactgagatggttctctgcaccctgtggtctgggggcatcctgggagaggggtgcctccttcacacacagctgctgggatgccaagactacagcagcattggggaaaaggattgcaaacatccctggacccaaccccacccctccatgcaatccaactcccagaaatcaagcccttcgacgtaaacgcatatccatagcagcaaaacactgaaggcagaatgaatgcccttccacaggcgaatccaggatgctcctgggaaggccatacggccattaaagacgctgaattagcagtgtccctggggagacagggaaggaggcgcagaggctaagaataaggactctggggccagacgtcaaatcttggttttgtgacttgagcatatgcttttactcctttgggcctatatgataatattagtacctatttcatgggtttgtgatgaagattaaatgagcaactgtgtcagaagtgtttatagcagtgtctgaatctagaaaggtactacttaaagtgtttgcgaagggctgggcgtggtggctcaagcatgtaatcccagcactttgggaggccgaggaaggtggatcacctgaggtcaggggttcaagaccagactggccaacatggcgaaaccccgtctctactaaaaatacaaaaattagccgggtgtgatggcacacacctgtagtcccagctacttgggaggctgaggcaggagaattgcttaaacctgggaggtgcaggttgcagtgagccaagatggcgccactgcactccagcctgggtgacagagcaaaactccatctcaaaaaaaaaaaaaaaaaagtgtttgctaagtaaatgtcttaaaaaaataataagcttgtcattgagtaagaaagttaagttgcagccaggcatggtgactcatgcctgtgattccagcactttggtaggcccaggtgagaggattgcttgagggcaggagtttaaggctgcagtgagctatgattgtgccactgcactccagcttgagttatagattgggaccctgtctctaaaaataaacatttttgaaaagctaagatgcaaaaatattgtcacctgcattggcaagaccctatagatgtctaggtgtgtctggtttcatgagcatagaaaactatgggacacatacttagtcgtcaacaggattgccagaggaggaactgtgtgtgtgtgtgtgtgtatgggggaagggggaagggagtaagcaaaataaaaatatttaaagcctcatgattattattattattattattattttcgagacaaagtcttgctctgtcacccaggctggagtgcagtggtgtgatctcagctcactgaaacctctgcctcctgggttcaagcaattcccctgcctcagcctcccgagtagctgggattacaggcgcctgctaccacacccggctaatttttgtatttttagtagagatggagtttcaccatcttggccaggctggtctcgaagtccttacctcatgatccacccactgcggcctcccaaagtgctgggattacaggctcctgctaccacaccggctaatttttgtatttttagtagagatggagtttcaccatcttggccaggctggtctcgaactccttacctcatgatccacccgctgcggcctcccaaagtgttgggattacaaggcgtgagccactgcgtccagtctcttgattatttttatgcagtcattaaactatatacatgcatatgtatagagaaagtttcaatgactaaaaataaggaaaccaagaaagaacttctctatctgccatggggccagggtcggggcaccccagcagtgtgtgaagagcagaagtccagccaatgacagactcttcccaaaacatcacttgcttatttcgaaatcaaacaatttctcataaatattttctcccaatgctgggaagagggagaggggaaggaggtacggaaactccatcaatcatttgaagggctgccttttatcagactgattttccgtagtgggttgtttgcagcttcctcctccccagttctgggcctcagctgtcaaaaggatttcaccatgcaactttttcatgctagcagttggggccaagaagctaatagatgggaaaaagctctgaaaactccaggacgacaaataggtgtcctcctcacagaaaaggattactgccccaccatccccaggtggccctcaaatccgttctctaaacggcagcagctgtttagaggtgtccaccaggtgtccgcagctttgtcatcctatccctgttcggggcagagactgagggctgctgacccggaccggctattttgggacgtgctgcggggggccttgggaggttggtgacgaaaggagtgcgtgcccgctaagggaggggacgccccggagcgtacactcataaacctggtcccgaggcctgcccctcaccaggatggtgcacgcggaaggggcggctttttagtggcgcaagggggctggtcggtggtagtttggggcggtgctgattgatggcgggcggggcggggcggtgctgattggcggggggggcggggtgaggcgacgctgcgctgattggctgggggcggggcggggcgtctcccgcccgggcctagagcgctgccgggggcgccgggactatgtcgcgggcgcggagccacctgcgcgccgctctattcctggcagcggcgtctgcgcgcggcataacgacccaggtcgcggcgcggcggggcttgagcgcgtggccggtgccgcaggagccgagcatggagtaccaggtatcaggcgggccagcgggccagcgggcctgggcgcgacgacacgtgggcctgcgctgagccgcagaacatccgggctccgctagccgagagggtatcgggagccctggactgggggactcggggggcggaacatcctggaggctgggggtggggacagggaccaggaagttgggcccgggccgccggggctgggaattcggagactatagcgtccccgccccgggttgggaagtgggaagtggcacaggagctaggatccagaagcccagaggctcagcggtgcttctggagttccagtgatcccggagtctgaaccggcagtgagagtggggaaagagggtagggaagagactcaggaattcaggcttgaaagatccaggagtattgatctgggggtgggctgtccaggattcagaagattggggatccaagtgcctggatttgggggagaggcaggaatcaggggtagtggagggccccagaacctggaaaatagaaaatgtccgcgggcgctgtgtcaagagccggttgccctagaccagaccctgatgccagtgaggcgggtggcactggtttgatgagggtggagcctccaaccagccttgaggtcctgagggtgggaggcacggaatatgaggcctaaggggaatgaaatagcacccccactcccacttccattgtgaaccctcctgaagccgtacctacctgccttcctggctgagtgacccctggcacacccctcctccctctgagttgctcctctgtgggttggaatgtggaaccccagagtcatgagggttggggtggagcttcggggaactccagaattcgaataccccagccttctgtagttctggccccgctctggcagggagcaatatagcaatggaccccattggagagaatgagggcaaaggcccaggagtgaagtcgggggagcctgggcaggaagcaaggctagcccgttagtcatgccaccttctttgtgtagcactccctgggtggggctgaactgccccagactcccatttttgccagagctggaaagatgccatactctctgttgcttaacctacaggctaggctaacagtgctggcatggcaggcgggcctggtactggccttgttgccctggcttggccactggtctgctggctgtctctgtgcctgtggaccctgagtgagccttaacctactatctgggcactgtggttgccaggatgccgtgcgcatgctcaataccctgcagaccaatgccggctacctggagcaggtgaagcgccagcggggtgaccctcagacacagttggaagccatggaactgtacctggcacggagtgggctgcaggtaaggtagagagggcctgtgaccacctcccacccccatttgtgattcccgtagctgaggcagggaccttgtctgtctgtcccaggtggaggacttggaccggctgaacatcatccacgtcactgggacgaaggggaaggtgaggggcaggaccctggggtagggggtctattaagtggctggtggagtagagcctgcccagacaatcccttttctttcaagggctccacctgtgccttcacggaatgtatcctccgaagctatggcctgaagacgggattctttaggtactggcttgtggggggatgtggtgtctgtgtcccaatggaccctggggggctatggaaccagccagtgcttcaggaccagggtcacccccaggaggtcagctgcatgtctctctgcccagtgtttattcattcaataaacattcagttagcacttaccatattggcccatgtttatggcaacctttaattttttttttttttttgagactgagtctcactctatcgcccaggctggagtacaatggcacgatcttggctcactgcaacccccgcctgccaggttcaagcaattctcctgcttcagcctcccaagtagcttggattacaggcacctgccaccacaccaggctaatttttatatttttagtagagatggggtttcaccatgttggccaggctgttctcgaactcctgacctcaagtgatccgcccacctcggcctcctaaagtgctgggattacaggtgtgagccacggtgcctggccttaattttcataattaaaaaaaaattggggaaggggcagcaactttaatgtataaactaaatatgtagcaggaggtccagtgtggtggctcatgcctataatcccagcactttgggcagctgacatgggaggatcacctgagtctggggaggtcaaggctgcagttagcagtgatcatgccattgcacatcagcctgggcgacagagcaaactgctatcttaaaaaaaaaaaagaaaattacatagctggaatagtcagatggtcagatgtctctttaataacttaaagtccaggttgagtgtggtggctcacaactgtaatcctagcactttgggaggccaaggtgggaggatcactggagctcaggagtttgagaccagcttgggcaacgtagtgagacttcatctctattaaaaaaaaaatgaaaagaaaaaattttaaagtccatatataactttaaaatcacatagagatatttatcaattagtatgtctttagagtaaggagaaaattgccttgcaagggcttaaacgataagggtggcttgtgccatccacgttaaggtctcctaggcgggctgcagataggagcccttctgcttggccactctccactgtggctttgccctggggcagcgccccctcttggtctcacttgtctagacttacacaagaggatggccaggtggaaccgggatcactcttcctgtgccacgcatgtcttctaagcccatcaccacgaacttctgaaatcagctgcctaaggtcatttcaagccgatatgttttccctaaacagttcttgttcaaataaagagatggagaggaggacttactacctgagtagctttgaggattgaaacataaggcaccaacctgtcttctaaaatcactttttgggccaggcgtggtggctcatgcctgtaatcccagcactttgggaggccgaagcaggcagatcacttgaggccaggagttcaagagcagcctggccaacatggcgaaaccctatctctactaaaaataccaaaaaattggctgggcacggtggctcatgcctgtaatcccagcactttgggaggctgaggtgggtggatcaccagaggtcaggagttcaagaccagcctggctaacatggcgtaaccctgtctctactaaaaatacaagaatcagcgaggcgtggtggtgtgtgcctgtagtcccagctacttgggaggccgaggcatgagaaacgcttgaacctgggaggcagaggttgcagtgagccaagattgcaccactgcactccagcctaggcgacagaacaagaccctgtctcaaaaataaataaataaaaactacaatcatttttgggataaaaacctagccttcaacttgggcccacatggccttgagggccagcccagggctgcagcttgaacattggttgtgggctttgtctctgagagctgtaagacagatgacattgtgggacagatgtcagcagagtgactgattggtatgggactgttggagcccatagaatgtgcaagaccagcctgggtgaggaggctgtcttagttgagaccaacgtggtgaatagggtgagccaggtgcagaggcctggagatagaagatggggaggactggggggctacagatagtccggggggatggggcaccaggaacaaaccgagggacacaggagagatgaggcacggaggccagtagcatcagtccctgcagggtgggggaaggccaggacgctcgggaagggagtcctgatgaccccagctgtcccggcagctctccccacctggtgcaggttcgggagcggatccgcatcaatgggcagcccatcagtcctgagctcttcaccaagtacttctggcgcctctaccaccggctggaggagaccaaggtgccgcatgcaggagggctggcgggtgggtatggttgggggtgctacgtgttccagcaccccatctccccagagaaggggctgcatgggctctgggccctgacatgtccctgtgccacaggatggcagctgtgtctccatgcccccctacttccgcttcctgacactcatggccttccacgtcttcctccaagagaaggtgtgtgccctctccctagaaccctgcatctgaggccttgggaacgggaacctcagcaggcctgggggctccctgcttccatgcggcctctgggcaccctcatatcccctgccatgccctctggtctttgacaggtggacctggcagtggtggaggtgggcattggcggggcttatgactgcaccaacatcatcaggtgagcgcagttgcttgggacgaggggtggcagccaggagcacagcctcacctgccgcctggtggctcagggcagggcctcatggccttttcctcccctgcaggaagcctgtggtgtgcggagtctcctctcttggcatcgaccacaccagcctcctgggggatacggtggagaagatcgcatggcagaaagggggcatc

SEQ ID NO: 12052 - DNA, 816 bp, Homo sapiens
cagctctagttaaatcctgggcagagctggcttggcagagatgcccacacctgtgcgtcacttcgtgccctacccagaaggggagcaggaaaccaagggatgaaaggtgctgggtccctggctgcctccttgcccatggctgagaagttctggtgggaaggaaccatggagggcccatctggatatccttcctcagctaaaactgcctccttccaggatgccgtgcgcatgctcaataccctgcagaccaatgccggctacctggagcaggtgaagcgccagcggggtgaccctcagacacagttggaagccatggaactgtacctggcacggagtgggctgcaggtggaggacttggaccggctgaacatcatccacgtcactgggacgaaggggaagggctccacctgtgccttcacggaatgtatcctccgaagctatggcctgaagacgggattctttagctctccccacctggtgcaggttcgggagcggatccgcatcaatgggcagcccatcagtcctgagctcttcaccaagtacttctggcgcctctaccaccggctggaggagaccaaggatggcagctgtgtctccatgcccccctacttccgcttcctgacactcatggccttccacgtcttcctccaagagaaggtggacctggcagtggtggaggtgggcattggcggggcttatgactgcaccaacatcatcaggaagcctgtggtgtgcggagtctcctctcttggcatcgaccacaccagcctcctgggggatacggtggagaagatcgcatggcagaaagggggcatc

SEQ ID NO: 12053 - DNA, 13620 bp, Homo sapiens
caggaaaccaagggatgaaaggtgctgggtccctggctgcctccttgcccatggctgagaagttctggtgggaaggaaccatggagggcccatctggatatccttcctcagctaaaactgcctccttccaggtaggagaacccggtgaccaggcaggtggcctttcctgtctaagcctcagtttcttgggggcgatgctgccagcccctcacagggctcagcgcagcacccagcatgcttggagggtgagaacaaattgaaaaaagatcccacatttttttcctctgaaaattttggtaagacggccaggtgcggtggctcatgcctgtaatcccagctcttggggatgccaaggctggtggattatgaggtcaggagttcgagaccagcctggctaagatgacgaagccccgtctctactaaaaatacaaaaattagccgggcgtgatggtgggcacctgtagtcccagttaattgggaggctgaggcaggagaatcacttgaacccgggaggcagaggttgcggtgagccggtatcacaccactgcactccagcctgggcaacagagcgagactccgtctcaaaaaaaaaaaaaaaagaaaaacaaccgggcatgatagcgcatgtctgtaatcccaaccactctggaggctgaggcaggagaatctcttgaacccgggatgtggaggttgcagtgagccgagatcaggtccctgaactccagcctgggcaacagagtgagactctgtctcaaaaacaaacaaaaaaaaaaagtcgggcacggtggctcacacttgtaatcccagcactttgggaggccaaggtggatgtatcacgaggtcaggagatcgagaccatcctggctaacacggtaaaacccggtctctactaaaaatacaaaaaaatagccgggcgtggtggcaggcacctgtagtcccagctactcggaggctgaggcaggagaatggcatgaacccgggaggcggagcttgcagtgagctgagatcacgccactgcaccccagcctgggctacagagcaagactccgtctcaaaaaaaaaaaaaaaaaaaaaaaaaaaaaaaatcctcatcctcctaaagaggagactaggggtcagacaggatcacagagggaagtgtcttgcccatggtcacacagcagttcgacagcagagagggccagggtgaccagacaggtggtggtaaggtgcaaggaccaacattaaagtcagtaatctgggtttgaatcggctttgccacgtccatgtgcctgctgtattcctgggtgagttgattaacctctctgagcttccatttttccacctgtaaaatagggatcatctgtaattcacacaattttcatgagattccaggtgccaaacacagggataagtgcttaataaatgtttatttgttttgagacagcgtcttactctgtcactctgttgcccaggctgtagcgcagtggcgccatcttggctcactgcaacctccgcctccctggttcaagggattctcctgcttcagcctcccaagtagtgggactaccggagtgtgtcaccaggcccaactaatttttgtaattttagtagagatgcggtttcactgttgtggccaggctggtctgaaactcctggcctcaagcgactgacccaccgtggcttcccaaagtgctgggattacaggtgtgagccactgctcccagccgagtgcctacttaataaatgttaacaagaaaaacccaccccaaaaaaggaaagaggacaaacacaaggcaagggtgtttcagcagaggcaaacatcgcgagcaaaagcttgcaggtgggagaggccaaggccagttgctgaagtccttgccagctggcagggactgtgccctgtaagtgggggatgagtccagaggcaggcagggaccaggccacagtgaacttgtgggttttattaatcccaagtgtatgacggggcaggagagagtgtagtatcccaggcagatctgagttcagaaagacctgacccactctgtctgtctctctctcagccttagcctgccactctacagtggttaccatctgacctgatcagggtttgtaaatctgtatattcctttgtgaatttctttatttgctgccctctcacccccaggactgggtgctctgtgagcagtaccttgtcttctgttctccacagtgaccccagcatctagtccagggtctggcagagataatttcttccaatgaataagtgaatgaatgacatcgtttccctgtgggaaggtggggattgaggcagagttcctcagtctgctcctaccccagcccctcctcctgtccacacgcacctgcagatctgcccgcatgagtgggcactggcccacttactggttcccctgccccctttgttttctattgttcttcctggagagagagaacgcagtgccttcgtggtcaccaaaaggccaacggcgattccctctccagctgcatgatgaagatccctttgatttttccgtttacagtttcttctagttccttctataaatatttgtggcttttcaagtaaaaagccacaaaggaggtgagtgggctgtaaaggaaacaaaacagctttttttttttttttttgagatggagtctcactctgtcggccaggctgaagtgcagtggcgcgatctgggctcactgcaacctctgcctcccgggtttaagtgattctcctgcctcagcctccctagtagctgggattacaagcacggaccaccatgcctggctaatttttgtatttttagtagagatggggtttcaccatgttggtcaggctggtcttgaactcctcacctcatgatccacctgcctcaacctcccaaagagctgggattgcaggtgtgagccactgcgcccagccagcttttttttctttttttgagatagagtcttgctgtccctcacgttggagtgcagtggtgcgatcttggctcactgcagcctccacctcccaggttcaaacgattcttctgcctcagcctcccaagtaactgggattacaggcaggtgccatcacacctggctaacttgtatttttagtagagacagggtttcaccatgttgacagattttgaacctgaggtgatccacccgcctcagcctcccaaagtactgtgattacaggcaagagccactgtgcccggccacaaacggctgttaaacacaaaaaaagtgttcagcctccttcacgataaatgtaaatgataactactcagagaatccatttttccaccttacgattggcaaggatcaaagctggctgtgttgctgaagatgtgaggaaatgctggctcatgcactgctgaagtcggggaaacttgtacccctctgggggacaatgtggccatgtgtataaaaatgtcagctgggcgcagtggctcatgcctgtaatcccagcactttgggaggccgaggaaggtggatcacctgaggtcaggggttcaagaccagactggccaacatggcgaaaccccgtctctactaaaaatacaaaaattagccgggtgtgatggcacacacctgtagtcccagctacttgggaggctgaggcaggagaattgcttgaacctgggaggtggaggttgcagtgagccgagatggcaccactgcactttggcctgggtgacagagtgagactctgtctcagaaaaaaaaaaaaatgtcaagtgcaggtcacctttgacccagcaattgcacttggaatttatccatgaaataacccacacaaggaagaaatgatgaaggtaaaatgttacccactgtagcttgggtaaaatattatccattgcttgtgatagcaaaatattggaaacaacccaaatgtccatcaataggcaactggctgaatacacagtagtacttccacaccatggagtactacacagcttcaaaacaaattagccaacggagtggcccttatgtaccgacacagcccagaatagggccctggttaaaaagggacatggagaaagtacaaggcaggcttgccttacagtctgctgctatatgtgggtataaaagggaaatcaatatatatttgtatttgcttgtaaatgcataacatacctctggaaaggtgataagaaactgataacattgactgctttgagagagaaggattaggatgctggaatctgggctcccagagagggaggctttttgctgtacacagttttgaccctttaactatttgttgttttttgtttgttttgagaagagtcttgctctttcacccaggctggagtgcagtggcacaatcttggctcactgcaatcttcgcctcccaggttcaagtgattcctgtgcctcagcctccgaagtagctgggattacaggtgcgcatcaccaagcttggctaatttttgtatttttagtaaagacggggtttcatcatgttgcccaggctggtctcaaactcctgacctcaagtgatccacccgccttggcctcccaaagtgctaggattataggcgtgagccaccacgcccagccagtctttgaactatttgaatgatatattatccaaaaaataccagaatttaaaaagaaaacataagaaaaagtgttttttccagcaatgtggacaggctttccaccttacaccacaggagggactccggctctgggatctcattcttggaggaatggcttagagcacctatgccacctcctacagatgagtccactgaggccaccaatagtagatctggaaaaaatacttgccctacagaggacagaaactgagggataatatcagtactacacaaagtgcctttttttcttttttttaactttttaaacatttgatttatttatttaaaaagatgggggtctcgctatgtcacccaggctggagtacagtggtgctatcatagctcactgcagcatcgaactcctgggctcagattatcctccttggccgggcgcagtagctcacgcctgtaatcccagcactttgggaggctgaggcgggtgggtcacctgaggtcaggagtttgagaccagcctgcctaacatggtgaaatcccatctctactaaaaatacaaaaattagctgggcatggtggcacatgcctgtagtcccagctacttgggaggctgaggcaggagaattgcttgaacccaggaggcggatgttgcagtgagccgagattgcaccactgcacttcagcctgggcaacagagtgagactctgtctcaaaaaaaaaaaaaaaaatcctcctgcctcagcctccaaatcactgggaccacagatgtgcaccagcatgcccagcaatttttgctttttgtagagaagggggtttcaccatgttgcccaggctgatctagaactctaggcttcaagcaatcttcccgcctcagtcttccaaagtgctaggattacaggtgtgagccactgcacccagcccacaaagggctattataactgacatgaaaaagcgaatcagacattagaaaaatgggccaaggatgggttaggcagttcactgacataaatgcatgggaagatactcaagttcactgcagcaggggaatgacagaaacactgagatggttctctgcaccctgtggtctgggggcatcctgggagaggggtgcctccttcacacacagctgctgggatgccaagactacagcagcattggggaaaaggattgcaaacatccctggacccaaccccacccctccatgcaatccaactcccagaaatcaagcccttcgacgtaaacgcatatccatagcagcaaaacactgaaggcagaatgaatgcccttccacaggcgaatccaggatgctcctgggaaggccatacggccattaaagacgctgaattagcagtgtccctggggagacagggaaggaggcgcagaggctaagaataaggactctggggccagacgtcaaatcttggttttgtgacttgagcatatgcttttactcctttgggcctatatgataatattagtacctatttcatgggtttgtgatgaagattaaatgagcaactgtgtcagaagtgtttatagcagtgtctgaatctagaaaggtactacttaaagtgtttgcgaagggctgggcgtggtggctcaagcatgtaatcccagcactttgggaggccgaggaaggtggatcacctgaggtcaggggttcaagaccagactggccaacatggcgaaaccccgtctctactaaaaatacaaaaattagccgggtgtgatggcacacacctgtagtcccagctacttgggaggctgaggcaggagaattgcttaaacctgggaggtgcaggttgcagtgagccaagatggcgccactgcactccagcctgggtgacagagcaaaactccatctcaaaaaaaaaaaaaaaaaagtgtttgctaagtaaatgtcttaaaaaaataataagcttgtcattgagtaagaaagttaagttgcagccaggcatggtgactcatgcctgtgattccagcactttggtaggcccaggtgagaggattgcttgagggcaggagtttaaggctgcagtgagctatgattgtgccactgcactccagcttgagttatagattgggaccctgtctctaaaaataaacatttttgaaaagctaagatgcaaaaatattgtcacctgcattggcaagaccctatagatgtctaggtgtgtctggtttcatgagcatagaaaactatgggacacatacttagtcgtcaacaggattgccagaggaggaactgtgtgtgtgtgtgtgtgtatgggggaagggggaagggagtaagcaaaataaaaatatttaaagcctcatgattattattattattattattattttcgagacaaagtcttgctctgtcacccaggctggagtgcagtggtgtgatctcagctcactgaaacctctgcctcctgggttcaagcaattcccctgcctcagcctcccgagtagctgggattacaggcgcctgctaccacacccggctaatttttgtatttttagtagagatggagtttcaccatcttggccaggctggtctcgaagtccttacctcatgatccacccactgcggcctcccaaagtgctgggattacaggctcctgctaccacaccggctaatttttgtatttttagtagagatggagtttcaccatcttggccaggctggtctcgaactccttacctcatgatccacccgctgcggcctcccaaagtgttgggattacaaggcgtgagccactgcgtccagtctcttgattatttttatgcagtcattaaactatatacatgcatatgtatagagaaagtttcaatgactaaaaataaggaaaccaagaaagaacttctctatctgccatggggccagggtcggggcaccccagcagtgtgtgaagagcagaagtccagccaatgacagactcttcccaaaacatcacttgcttatttcgaaatcaaacaatttctcataaatattttctcccaatgctgggaagagggagaggggaaggaggtacggaaactccatcaatcatttgaagggctgccttttatcagactgattttccgtagtgggttgtttgcagcttcctcctccccagttctgggcctcagctgtcaaaaggatttcaccatgcaactttttcatgctagcagttggggccaagaagctaatagatgggaaaaagctctgaaaactccaggacgacaaataggtgtcctcctcacagaaaaggattactgccccaccatccccaggtggccctcaaatccgttctctaaacggcagcagctgtttagaggtgtccaccaggtgtccgcagctttgtcatcctatccctgttcggggcagagactgagggctgctgacccggaccggctattttgggacgtgctgcggggggccttgggaggttggtgacgaaaggagtgcgtgcccgctaagggaggggacgccccggagcgtacactcataaacctggtcccgaggcctgcccctcaccaggatggtgcacgcggaaggggcggctttttagtggcgcaagggggctggtcggtggtagtttggggcggtgctgattgatggcgggcggggcggggcggtgctgattggcggggggggcggggtgaggcgacgctgcgctgattggctgggggcggggcggggcgtctcccgcccgggcctagagcgctgccgggggcgccgggactatgtcgcgggcgcggagccacctgcgcgccgctctattcctggcagcggcgtctgcgcgcggcataacgacccaggtcgcggcgcggcggggcttgagcgcgtggccggtgccgcaggagccgagcatggagtaccaggtatcaggcgggccagcgggccagcgggcctgggcgcgacgacacgtgggcctgcgctgagccgcagaacatccgggctccgctagccgagagggtatcgggagccctggactgggggactcggggggcggaacatcctggaggctgggggtggggacagggaccaggaagttgggcccgggccgccggggctgggaattcggagactatagcgtccccgccccgggttgggaagtgggaagtggcacaggagctaggatccagaagcccagaggctcagcggtgcttctggagttccagtgatcccggagtctgaaccggcagtgagagtggggaaagagggtagggaagagactcaggaattcaggcttgaaagatccaggagtattgatctgggggtgggctgtccaggattcagaagattggggatccaagtgcctggatttgggggagaggcaggaatcaggggtagtggagggccccagaacctggaaaatagaaaatgtccgcgggcgctgtgtcaagagccggttgccctagaccagaccctgatgccagtgaggcgggtggcactggtttgatgagggtggagcctccaaccagccttgaggtcctgagggtgggaggcacggaatatgaggcctaaggggaatgaaatagcacccccactcccacttccattgtgaaccctcctgaagccgtacctacctgccttcctggctgagtgacccctggcacacccctcctccctctgagttgctcctctgtgggttggaatgtggaaccccagagtcatgagggttggggtggagcttcggggaactccagaattcgaataccccagccttctgtagttctggccccgctctggcagggagcaatatagcaatggaccccattggagagaatgagggcaaaggcccaggagtgaagtcgggggagcctgggcaggaagcaaggctagcccgttagtcatgccaccttctttgtgtagcactccctgggtggggctgaactgccccagactcccatttttgccagagctggaaagatgccatactctctgttgcttaacctacaggctaggctaacagtgctggcatggcaggcgggcctggtactggccttgttgccctggcttggccactggtctgctggctgtctctgtgcctgtggaccctgagtgagccttaacctactatctgggcactgtggttgccaggatgccgtgcgcatgctcaataccctgcagaccaatgccggctacctggagcaggtgaagcgccagcggggtgaccctcagacacagttggaagccatggaactgtacctggcacggagtgggctgcaggtaaggtagagagggcctgtgaccacctcccacccccatttgtgattcccgtagctgaggcagggaccttgtctgtctgtcccaggtggaggacttggaccggctgaacatcatccacgtcactgggacgaaggggaaggtgaggggcaggaccctggggtagggggtctattaagtggctggtggagtagagcctgcccagacaatcccttttctttcaagggctccacctgtgccttcacggaatgtatcctccgaagctatggcctgaagacgggattctttaggtactggcttgtggggggatgtggtgtctgtgtcccaatggaccctggggggctatggaaccagccagtgcttcaggaccagggtcacccccaggaggtcagctgcatgtctctctgcccagtgtttattcattcaataaacattcagttagcacttaccatattggcccatgtttatggcaacctttaattttttttttttttttgagactgagtctcactctatcgcccaggctggagtacaatggcacgatcttggctcactgcaacccccgcctgccaggttcaagcaattctcctgcttcagcctcccaagtagcttggattacaggcacctgccaccacaccaggctaatttttatatttttagtagagatggggtttcaccatgttggccaggctgttctcgaactcctgacctcaagtgatccgcccacctcggcctcctaaagtgctgggattacaggtgtgagccacggtgcctggccttaattttcataattaaaaaaaaattggggaaggggcagcaactttaatgtataaactaaatatgtagcaggaggtccagtgtggtggctcatgcctataatcccagcactttgggcagctgacatgggaggatcacctgagtctggggaggtcaaggctgcagttagcagtgatcatgccattgcacatcagcctgggcgacagagcaaactgctatcttaaaaaaaaaaaagaaaattacatagctggaatagtcagatggtcagatgtctctttaataacttaaagtccaggttgagtgtggtggctcacaactgtaatcctagcactttgggaggccaaggtgggaggatcactggagctcaggagtttgagaccagcttgggcaacgtagtgagacttcatctctattaaaaaaaaaatgaaaagaaaaaattttaaagtccatatataactttaaaatcacatagagatatttatcaattagtatgtctttagagtaaggagaaaattgccttgcaagggcttaaacgataagggtggcttgtgccatccacgttaaggtctcctaggcgggctgcagataggagcccttctgcttggccactctccactgtggctttgccctggggcagcgccccctcttggtctcacttgtctagacttacacaagaggatggccaggtggaaccgggatcactcttcctgtgccacgcatgtcttctaagcccatcaccacgaacttctgaaatcagctgcctaaggtcatttcaagccgatatgttttccctaaacagttcttgttcaaataaagagatggagaggaggacttactacctgagtagctttgaggattgaaacataaggcaccaacctgtcttctaaaatcactttttgggccaggcgtggtggctcatgcctgtaatcccagcactttgggaggccgaagcaggcagatcacttgaggccaggagttcaagagcagcctggccaacatggcgaaaccctatctctactaaaaataccaaaaaattggctgggcacggtggctcatgcctgtaatcccagcactttgggaggctgaggtgggtggatcaccagaggtcaggagttcaagaccagcctggctaacatggcgtaaccctgtctctactaaaaatacaagaatcagcgaggcgtggtggtgtgtgcctgtagtcccagctacttgggaggccgaggcatgagaaacgcttgaacctgggaggcagaggttgcagtgagccaagattgcaccactgcactccagcctaggcgacagaacaagaccctgtctcaaaaataaataaataaaaactacaatcatttttgggataaaaacctagccttcaacttgggcccacatggccttgagggccagcccagggctgcagcttgaacattggttgtgggctttgtctctgagagctgtaagacagatgacattgtgggacagatgtcagcagagtgactgattggtatgggactgttggagcccatagaatgtgcaagaccagcctgggtgaggaggctgtcttagttgagaccaacgtggtgaatagggtgagccaggtgcagaggcctggagatagaagatggggaggactggggggctacagatagtccggggggatggggcaccaggaacaaaccgagggacacaggagagatgaggcacggaggccagtagcatcagtccctgcagggtgggggaaggccaggacgctcgggaagggagtcctgatgaccccagctgtcccggcagctctccccacctggtgcaggttcgggagcggatccgcatcaatgggcagcccatcagtcctgagctcttcaccaagtacttctggcgcctctaccaccggctggaggagaccaaggtgccgcatgcaggagggctggcgggtgggtatggttgggggtgctacgtgttccagcaccccatctccccagagaaggggctgcatgggctctgggccctgacatgtccctgtgccacaggatggcagctgtgtctccatgcccccctacttccgcttcctgacactcatggccttccacgtcttcctccaagagaaggtgtgtgccctctccctagaaccctgcatctgaggccttgggaacgggaacctcagcaggcctgggggctccctgcttccatgcggcctctgggcaccctcatatcccctgccatgccctctggtctttgacaggtggacctggcagtggtggaggtgggcattggcggggcttatgactgcaccaacatcatcaggtgagcgcagttgcttgggacgaggggtggcagccaggagcacagcctcacctgccgcctggtggctcagggcagggcctcatggccttttcctcccctgcaggaagcctgtggtgtgcggagtctcctctcttggcatcgaccacaccagcctcctgggggatacggtggagaagatcgcatggcagaaagggggcatctttaaggtgaccaggcagactgggggaagggagagacatggaaggcctgggagtctacgttttcatcctggcttcactgtgtgactggaacaagttgagtctcctctccagactatttccccattgaaacgtgagggatggctgggcatggtggcttatatgcttgcaatcccagcatttcaggaggtcgaggtgagaggatcacctgagatccggagtttgagaccagcctgaccaatatggggaaactctgtctctactaaaaatacaaaaattagccaggtgtggtggtgtacgcctgtagttccagctacttgggagactgaggcaggagaatcactcgaacccgggaggcagacgttgcagtgagccgagattgcgccacagcactccagcctgggtgacagagtgagacttcatctcgaaaaagaaaagaaaagaaacatgagggatgagagacagtggtagcccagacccagggatgtgggggccagagataggagtgtggaggatgctaggtagccctttctctctccttcttccctccacagcaaggtgtccctgccttcactgtgctccaacctgaaggtcccctggcagtgctgagggaccgagccca

SEQ ID NO: 12054 - DNA, 690 bp, Homo sapiens
caggaaaccaagggatgaaaggtgctgggtccctggctgcctccttgcccatggctgagaagttctggtgggaaggaaccatggagggcccatctggatatccttcctcagctaaaactgcctccttccaggatgccgtgcgcatgctcaataccctgcagaccaatgccggctacctggagcaggtgaagcgccagcggggtgaccctcagacacagttggaagccatggaactgtacctggcacggagtgggctgcaggtggaggacttggaccggctgaacatcatccacgtcactgggacgaaggggaagggctccacctgtgccttcacggaatgtatcctccgaagctatggcctgaagacgggattctttaggatggcagctgtgtctccatgcccccctacttccgcttcctgacactcatggccttccacgtcttcctccaagagaaggtggacctggcagtggtggaggtgggcattggcggggcttatgactgcaccaacatcatcaggaagcctgtggtgtgcggagtctcctctcttggcatcgaccacaccagcctcctgggggatacggtggagaagatcgcatggcagaaagggggcatctttaagcaaggtgtccctgccttcactgtgctccaacctgaaggtcccctggcagtgctgagggaccgagccca

SEQ ID NO: 12055 - DNA, 4772 bp, Homo sapiens
ccgggactatgtcgcgggcgcggagccacctgcgcgccgctctattcctggcagcggcgtctgcgcgcggcataacgacccaggtcgcggcgcggcggggcttgagcgcgtggccggtgccgcaggagccgagcatggagtaccaggtatcaggcgggccagcgggccagcgggcctgggcgcgacgacacgtgggcctgcgctgagccgcagaacatccgggctccgctagccgagagggtatcgggagccctggactgggggactcggggggcggaacatcctggaggctgggggtggggacagggaccaggaagttgggcccgggccgccggggctgggaattcggagactatagcgtccccgccccgggttgggaagtgggaagtggcacaggagctaggatccagaagcccagaggctcagcggtgcttctggagttccagtgatcccggagtctgaaccggcagtgagagtggggaaagagggtagggaagagactcaggaattcaggcttgaaagatccaggagtattgatctgggggtgggctgtccaggattcagaagattggggatccaagtgcctggatttgggggagaggcaggaatcaggggtagtggagggccccagaacctggaaaatagaaaatgtccgcgggcgctgtgtcaagagccggttgccctagaccagaccctgatgccagtgaggcgggtggcactggtttgatgagggtggagcctccaaccagccttgaggtcctgagggtgggaggcacggaatatgaggcctaaggggaatgaaatagcacccccactcccacttccattgtgaaccctcctgaagccgtacctacctgccttcctggctgagtgacccctggcacacccctcctccctctgagttgctcctctgtgggttggaatgtggaaccccagagtcatgagggttggggtggagcttcggggaactccagaattcgaataccccagccttctgtagttctggccccgctctggcagggagcaatatagcaatggaccccattggagagaatgagggcaaaggcccaggagtgaagtcgggggagcctgggcaggaagcaaggctagcccgttagtcatgccaccttctttgtgtagcactccctgggtggggctgaactgccccagactcccatttttgccagagctggaaagatgccatactctctgttgcttaacctacaggctaggctaacagtgctggcatggcaggcgggcctggtactggccttgttgccctggcttggccactggtctgctggctgtctctgtgcctgtggaccctgagtgagccttaacctactatctgggcactgtggttgccaggatgccgtgcgcatgctcaataccctgcagaccaatgccggctacctggagcaggtgaagcgccagcggggtgaccctcagacacagttggaagccatggaactgtacctggcacggagtgggctgcaggtaaggtagagagggcctgtgaccacctcccacccccatttgtgattcccgtagctgaggcagggaccttgtctgtctgtcccaggtggaggacttggaccggctgaacatcatccacgtcactgggacgaaggggaaggtgaggggcaggaccctggggtagggggtctattaagtggctggtggagtagagcctgcccagacaatcccttttctttcaagggctccacctgtgccttcacggaatgtatcctccgaagctatggcctgaagacgggattctttaggtactggcttgtggggggatgtggtgtctgtgtcccaatggaccctggggggctatggaaccagccagtgcttcaggaccagggtcacccccaggaggtcagctgcatgtctctctgcccagtgtttattcattcaataaacattcagttagcacttaccatattggcccatgtttatggcaacctttaattttttttttttttttgagactgagtctcactctatcgcccaggctggagtacaatggcacgatcttggctcactgcaacccccgcctgccaggttcaagcaattctcctgcttcagcctcccaagtagcttggattacaggcacctgccaccacaccaggctaatttttatatttttagtagagatggggtttcaccatgttggccaggctgttctcgaactcctgacctcaagtgatccgcccacctcggcctcctaaagtgctgggattacaggtgtgagccacggtgcctggccttaattttcataattaaaaaaaaattggggaaggggcagcaactttaatgtataaactaaatatgtagcaggaggtccagtgtggtggctcatgcctataatcccagcactttgggcagctgacatgggaggatcacctgagtctggggaggtcaaggctgcagttagcagtgatcatgccattgcacatcagcctgggcgacagagcaaactgctatcttaaaaaaaaaaaagaaaattacatagctggaatagtcagatggtcagatgtctctttaataacttaaagtccaggttgagtgtggtggctcacaactgtaatcctagcactttgggaggccaaggtgggaggatcactggagctcaggagtttgagaccagcttgggcaacgtagtgagacttcatctctattaaaaaaaaaatgaaaagaaaaaattttaaagtccatatataactttaaaatcacatagagatatttatcaattagtatgtctttagagtaaggagaaaattgccttgcaagggcttaaacgataagggtggcttgtgccatccacgttaaggtctcctaggcgggctgcagataggagcccttctgcttggccactctccactgtggctttgccctggggcagcgccccctcttggtctcacttgtctagacttacacaagaggatggccaggtggaaccgggatcactcttcctgtgccacgcatgtcttctaagcccatcaccacgaacttctgaaatcagctgcctaaggtcatttcaagccgatatgttttccctaaacagttcttgttcaaataaagagatggagaggaggacttactacctgagtagctttgaggattgaaacataaggcaccaacctgtcttctaaaatcactttttgggccaggcgtggtggctcatgcctgtaatcccagcactttgggaggccgaagcaggcagatcacttgaggccaggagttcaagagcagcctggccaacatggcgaaaccctatctctactaaaaataccaaaaaattggctgggcacggtggctcatgcctgtaatcccagcactttgggaggctgaggtgggtggatcaccagaggtcaggagttcaagaccagcctggctaacatggcgtaaccctgtctctactaaaaatacaagaatcagcgaggcgtggtggtgtgtgcctgtagtcccagctacttgggaggccgaggcatgagaaacgcttgaacctgggaggcagaggttgcagtgagccaagattgcaccactgcactccagcctaggcgacagaacaagaccctgtctcaaaaataaataaataaaaactacaatcatttttgggataaaaacctagccttcaacttgggcccacatggccttgagggccagcccagggctgcagcttgaacattggttgtgggctttgtctctgagagctgtaagacagatgacattgtgggacagatgtcagcagagtgactgattggtatgggactgttggagcccatagaatgtgcaagaccagcctgggtgaggaggctgtcttagttgagaccaacgtggtgaatagggtgagccaggtgcagaggcctggagatagaagatggggaggactggggggctacagatagtccggggggatggggcaccaggaacaaaccgagggacacaggagagatgaggcacggaggccagtagcatcagtccctgcagggtgggggaaggccaggacgctcgggaagggagtcctgatgaccccagctgtcccggcagctctccccacctggtgcaggttcgggagcggatccgcatcaatgggcagcccatcagtcctgagctcttcaccaagtacttctggcgcctctaccaccggctggaggagaccaaggtgccgcatgcaggagggctggcgggtgggtatggttgggggtgctacgtgttccagcaccccatctccccagagaaggggctgcatgggctctgggccctgacatgtccctgtgccacaggatggcagctgtgtctccatgcccccctacttccgcttcctgacactcatggccttccacgtcttcctccaagagaaggtgtgtgccctctccctagaaccctgcatctgaggccttgggaacgggaacctcagcaggcctgggggctccctgcttccatgcggcctctgggcaccctcatatcccctgccatgccctctggtctttgacaggtggacctggcagtggtggaggtgggcattggcggggcttatgactgcaccaacatcatcaggtgagcgcagttgcttgggacgaggggtggcagccaggagcacagcctcacctgccgcctggtggctcagggcagggcctcatggccttttcctcccctgcaggaagcctgtggtgtgcggagtctcctctcttggcatcgaccacaccagcctcctgggggatacggtggagaagatcgcatggcagaaagggggcatctttaag

SEQ ID NO: 12056 - DNA, 504 bp, Homo sapiens
ccgggactatgtcgcgggcgcggagccacctgcgcgccgctctattcctggcagcggcgtctgcgcgcggcataacgacccaggtcgcggcgcggcggggcttgagcgcgtggccggtgccgcaggagccgagcatggagtaccagctctccccacctggtgcaggttcgggagcggatccgcatcaatgggcagcccatcagtcctgagctcttcaccaagtacttctggcgcctctaccaccggctggaggagaccaaggatggcagctgtgtctccatgcccccctacttccgcttcctgacactcatggccttccacgtcttcctccaagagaaggtggacctggcagtggtggaggtgggcattggcggggcttatgactgcaccaacatcatcaggaagcctgtggtgtgcggagtctcctctcttggcatcgaccacaccagcctcctgggggatacggtggagaagatcgcatggcagaaagggggcatctttaag

SEQ ID NO: 12057 - DNA, 5990 bp, Homo sapiens
gggcctagagcgctgccgggggcgccgggactatgtcgcgggcgcggagccacctgcgcgccgctctattcctggcagcggcgtctgcgcgcggcataacgacccaggtcgcggcgcggcggggcttgagcgcgtggccggtgccgcaggagccgagcatggagtaccaggtatcaggcgggccagcgggccagcgggcctgggcgcgacgacacgtgggcctgcgctgagccgcagaacatccgggctccgctagccgagagggtatcgggagccctggactgggggactcggggggcggaacatcctggaggctgggggtggggacagggaccaggaagttgggcccgggccgccggggctgggaattcggagactatagcgtccccgccccgggttgggaagtgggaagtggcacaggagctaggatccagaagcccagaggctcagcggtgcttctggagttccagtgatcccggagtctgaaccggcagtgagagtggggaaagagggtagggaagagactcaggaattcaggcttgaaagatccaggagtattgatctgggggtgggctgtccaggattcagaagattggggatccaagtgcctggatttgggggagaggcaggaatcaggggtagtggagggccccagaacctggaaaatagaaaatgtccgcgggcgctgtgtcaagagccggttgccctagaccagaccctgatgccagtgaggcgggtggcactggtttgatgagggtggagcctccaaccagccttgaggtcctgagggtgggaggcacggaatatgaggcctaaggggaatgaaatagcacccccactcccacttccattgtgaaccctcctgaagccgtacctacctgccttcctggctgagtgacccctggcacacccctcctccctctgagttgctcctctgtgggttggaatgtggaaccccagagtcatgagggttggggtggagcttcggggaactccagaattcgaataccccagccttctgtagttctggccccgctctggcagggagcaatatagcaatggaccccattggagagaatgagggcaaaggcccaggagtgaagtcgggggagcctgggcaggaagcaaggctagcccgttagtcatgccaccttctttgtgtagcactccctgggtggggctgaactgccccagactcccatttttgccagagctggaaagatgccatactctctgttgcttaacctacaggctaggctaacagtgctggcatggcaggcgggcctggtactggccttgttgccctggcttggccactggtctgctggctgtctctgtgcctgtggaccctgagtgagccttaacctactatctgggcactgtggttgccaggatgccgtgcgcatgctcaataccctgcagaccaatgccggctacctggagcaggtgaagcgccagcggggtgaccctcagacacagttggaagccatggaactgtacctggcacggagtgggctgcaggtaaggtagagagggcctgtgaccacctcccacccccatttgtgattcccgtagctgaggcagggaccttgtctgtctgtcccaggtggaggacttggaccggctgaacatcatccacgtcactgggacgaaggggaaggtgaggggcaggaccctggggtagggggtctattaagtggctggtggagtagagcctgcccagacaatcccttttctttcaagggctccacctgtgccttcacggaatgtatcctccgaagctatggcctgaagacgggattctttaggtactggcttgtggggggatgtggtgtctgtgtcccaatggaccctggggggctatggaaccagccagtgcttcaggaccagggtcacccccaggaggtcagctgcatgtctctctgcccagtgtttattcattcaataaacattcagttagcacttaccatattggcccatgtttatggcaacctttaattttttttttttttttgagactgagtctcactctatcgcccaggctggagtacaatggcacgatcttggctcactgcaacccccgcctgccaggttcaagcaattctcctgcttcagcctcccaagtagcttggattacaggcacctgccaccacaccaggctaatttttatatttttagtagagatggggtttcaccatgttggccaggctgttctcgaactcctgacctcaagtgatccgcccacctcggcctcctaaagtgctgggattacaggtgtgagccacggtgcctggccttaattttcataattaaaaaaaaattggggaaggggcagcaactttaatgtataaactaaatatgtagcaggaggtccagtgtggtggctcatgcctataatcccagcactttgggcagctgacatgggaggatcacctgagtctggggaggtcaaggctgcagttagcagtgatcatgccattgcacatcagcctgggcgacagagcaaactgctatcttaaaaaaaaaaaagaaaattacatagctggaatagtcagatggtcagatgtctctttaataacttaaagtccaggttgagtgtggtggctcacaactgtaatcctagcactttgggaggccaaggtgggaggatcactggagctcaggagtttgagaccagcttgggcaacgtagtgagacttcatctctattaaaaaaaaaatgaaaagaaaaaattttaaagtccatatataactttaaaatcacatagagatatttatcaattagtatgtctttagagtaaggagaaaattgccttgcaagggcttaaacgataagggtggcttgtgccatccacgttaaggtctcctaggcgggctgcagataggagcccttctgcttggccactctccactgtggctttgccctggggcagcgccccctcttggtctcacttgtctagacttacacaagaggatggccaggtggaaccgggatcactcttcctgtgccacgcatgtcttctaagcccatcaccacgaacttctgaaatcagctgcctaaggtcatttcaagccgatatgttttccctaaacagttcttgttcaaataaagagatggagaggaggacttactacctgagtagctttgaggattgaaacataaggcaccaacctgtcttctaaaatcactttttgggccaggcgtggtggctcatgcctgtaatcccagcactttgggaggccgaagcaggcagatcacttgaggccaggagttcaagagcagcctggccaacatggcgaaaccctatctctactaaaaataccaaaaaattggctgggcacggtggctcatgcctgtaatcccagcactttgggaggctgaggtgggtggatcaccagaggtcaggagttcaagaccagcctggctaacatggcgtaaccctgtctctactaaaaatacaagaatcagcgaggcgtggtggtgtgtgcctgtagtcccagctacttgggaggccgaggcatgagaaacgcttgaacctgggaggcagaggttgcagtgagccaagattgcaccactgcactccagcctaggcgacagaacaagaccctgtctcaaaaataaataaataaaaactacaatcatttttgggataaaaacctagccttcaacttgggcccacatggccttgagggccagcccagggctgcagcttgaacattggttgtgggctttgtctctgagagctgtaagacagatgacattgtgggacagatgtcagcagagtgactgattggtatgggactgttggagcccatagaatgtgcaagaccagcctgggtgaggaggctgtcttagttgagaccaacgtggtgaatagggtgagccaggtgcagaggcctggagatagaagatggggaggactggggggctacagatagtccggggggatggggcaccaggaacaaaccgagggacacaggagagatgaggcacggaggccagtagcatcagtccctgcagggtgggggaaggccaggacgctcgggaagggagtcctgatgaccccagctgtcccggcagctctccccacctggtgcaggttcgggagcggatccgcatcaatgggcagcccatcagtcctgagctcttcaccaagtacttctggcgcctctaccaccggctggaggagaccaaggtgccgcatgcaggagggctggcgggtgggtatggttgggggtgctacgtgttccagcaccccatctccccagagaaggggctgcatgggctctgggccctgacatgtccctgtgccacaggatggcagctgtgtctccatgcccccctacttccgcttcctgacactcatggccttccacgtcttcctccaagagaaggtgtgtgccctctccctagaaccctgcatctgaggccttgggaacgggaacctcagcaggcctgggggctccctgcttccatgcggcctctgggcaccctcatatcccctgccatgccctctggtctttgacaggtggacctggcagtggtggaggtgggcattggcggggcttatgactgcaccaacatcatcaggtgagcgcagttgcttgggacgaggggtggcagccaggagcacagcctcacctgccgcctggtggctcagggcagggcctcatggccttttcctcccctgcaggaagcctgtggtgtgcggagtctcctctcttggcatcgaccacaccagcctcctgggggatacggtggagaagatcgcatggcagaaagggggcatctttaaggtgaccaggcagactgggggaagggagagacatggaaggcctgggagtctacgttttcatcctggcttcactgtgtgactggaacaagttgagtctcctctccagactatttccccattgaaacgtgagggatggctgggcatggtggcttatatgcttgcaatcccagcatttcaggaggtcgaggtgagaggatcacctgagatccggagtttgagaccagcctgaccaatatggggaaactctgtctctactaaaaatacaaaaattagccaggtgtggtggtgtacgcctgtagttccagctacttgggagactgaggcaggagaatcactcgaacccgggaggcagacgttgcagtgagccgagattgcgccacagcactccagcctgggtgacagagtgagacttcatctcgaaaaagaaaagaaaagaaacatgagggatgagagacagtggtagcccagacccagggatgtgggggccagagataggagtgtggaggatgctaggtagccctttctctctccttcttccctccacagcaaggtgtccctgccttcactgtgctccaacctgaaggtcccctggcagtgctgagggaccgagcccagcagatctcagtaagtctgattggaatggggcagcggcagggtgggtttgtgtccctcctgtttgaggaggcactgcatcctctggggcctcagtttgcccatctgtgcagtgaggacgctgggccagctgccaggcctgctggaacacatctcagttctgggagcagggcttggtggctgggggaggggagagatgcaagggctgacgtggtcagggagggcctctgctgacccgctcctgcctgtctcccctagtgtcctctatacctgtgtccgatgctggaggccctcgaggaaggggggccgccgctgaccctgggcctggagggggagcaccagcggtccaacgccgccttggccttgcagctggcccactgctggctgcagcggcaggaccgccatggtgagtgggcagctgagtgggcaggcaggtgggtggcacctgtggagcctgcctaggagggtcccggacacacttggtctcacacaccccgcaggtgctggggagccaaaggcatccaggccagggctcctgtggcagctgcccctggcacctgtgttccagcccacatcccacatg

SEQ ID NO: 12058 - DNA, 1172 bp, Homo sapiens
gggcctagagcgctgccgggggcgccgggactatgtcgcgggcgcggagccacctgcgcgccgctctattcctggcagcggcgtctgcgcgcggcataacgacccaggtcgcggcgcggcggggcttgagcgcgtggccggtgccgcaggagccgagcatggagtaccaggatgccgtgcgcatgctcaataccctgcagaccaatgccggctacctggagcaggtgaagcgccagcggggtgaccctcagacacagttggaagccatggaactgtacctggcacggagtgggctgcaggtggaggacttggaccggctgaacatcatccacgtcactgggacgaaggggaagggctccacctgtgccttcacggaatgtatcctccgaagctatggcctgaagacgggattctttagctctccccacctggtgcaggttcgggagcggatccgcatcaatgggcagcccatcagtcctgagctcttcaccaagtacttctggcgcctctaccaccggctggaggagaccaaggatggcagctgtgtctccatgcccccctacttccgcttcctgacactcatggccttccacgtcttcctccaagagaaggtggacctggcagtggtggaggtgggcattggcggggcttatgactgcaccaacatcatcaggaagcctgtggtgtgcggagtctcctctcttggcatcgaccacaccagcctcctgggggatacggtggagaagatcgcatggcagaaagggggcatctttaaggtgaccaggcagactgggggaagggagagacatggaaggcctgggagtctacgttttcatcctggcttcactgtgtgactggaacaacaaggtgtccctgccttcactgtgctccaacctgaaggtcccctggcagtgctgagggaccgagcccagcagatctcatgtcctctatacctgtgtccgatgctggaggccctcgaggaaggggggccgccgctgaccctgggcctggagggggagcaccagcggtccaacgccgccttggccttgcagctggcccactgctggctgcagcggcaggaccgccatggtgctggggagccaaaggcatccaggccagggctcctgtggcagctgcccctggcacctgtgttccagcccacatcccacatg

SEQ ID NO: 12059 - DNA, 5612 bp, Homo sapiens
agggggcatctttaaggtgaccaggcagactgggggaagggagagacatggaaggcctgggagtctacgttttcatcctggcttcactgtgtgactggaacaagttgagtctcctctccagactatttccccattgaaacgtgagggatggctgggcatggtggcttatatgcttgcaatcccagcatttcaggaggtcgaggtgagaggatcacctgagatccggagtttgagaccagcctgaccaatatggggaaactctgtctctactaaaaatacaaaaattagccaggtgtggtggtgtacgcctgtagttccagctacttgggagactgaggcaggagaatcactcgaacccgggaggcagacgttgcagtgagccgagattgcgccacagcactccagcctgggtgacagagtgagacttcatctcgaaaaagaaaagaaaagaaacatgagggatgagagacagtggtagcccagacccagggatgtgggggccagagataggagtgtggaggatgctaggtagccctttctctctccttcttccctccacagcaaggtgtccctgccttcactgtgctccaacctgaaggtcccctggcagtgctgagggaccgagcccagcagatctcagtaagtctgattggaatggggcagcggcagggtgggtttgtgtccctcctgtttgaggaggcactgcatcctctggggcctcagtttgcccatctgtgcagtgaggacgctgggccagctgccaggcctgctggaacacatctcagttctgggagcagggcttggtggctgggggaggggagagatgcaagggctgacgtggtcagggagggcctctgctgacccgctcctgcctgtctcccctagtgtcctctatacctgtgtccgatgctggaggccctcgaggaaggggggccgccgctgaccctgggcctggagggggagcaccagcggtccaacgccgccttggccttgcagctggcccactgctggctgcagcggcaggaccgccatggtgagtgggcagctgagtgggcaggcaggtgggtggcacctgtggagcctgcctaggagggtcccggacacacttggtctcacacaccccgcaggtgctggggagccaaaggcatccaggccagggctcctgtggcagctgcccctggcacctgtgttccagcccacatcccacatgcggctcggtgagttagaccttcctgcccagctgggaccactgcgtgtgtctgtgccccttcagattttttttttttttttttttggttttctgtttgggagataagagacaatttgaagtggtgcttaagagaaaggactctgatgtcagcaaacctccctgaccttgagctcatgaactctttctgagcctgtcttctcatctgccaaagtagatgatgataggagccactgccacgggctgtggtggggattcgctgaggtgacatcactaaggtgctgagtgcagagcctggccaatgtgggataaagtgccagccagtggtagctgctgtcactgtcactatcatcatcatcagaccctgaggttctggaggatggtgatccagtcatctgcttcttgcctcccccaaagctttcagcacccagcaggtgctcatgctgttaagccccttcagcaaatggtgggcccgctgtgtgccacgcctgttatcaagggcaagtgacaaggtcctggagacaaaccgacctcgcatcacatcccggccccagctaagggctctcaggctgtcaaacgggaatagcaggccctttcagggttgcctgaaagattccaccagatgagacagccgaaaagcccaagccattgactggtgctagtaaaaagttcctgggctgccggggtcctgagtgttgagggcgggcgcagcctgcaggggagaacgggctcaggagtgtgtgtgcggaattgaggacgggggtgggagagggcctggaggactgccttgctgccctcccccagggcttcggaacacggagtggccgggccggacgcaggtgctgcggcgcgggcccctcacctggtacctggacggtgcgcacaccgccagcagcgcgcaggcctgcgtgcgctggttccgccaggcgctgcagggccgcgagaggccgagcgggtgaggggcagggctgggggtggggccggggctggcccacgaggaggggcgggatcttggggaagggcggggcggggtcgtggggaagggcgggggcgggcccatggggaggggcggggtcgtgggcggggacgggattggtaccgcagggagaacgggcggcgccctttgacccagctcctcacctctgtcgcagtggccccgaggttcgagtcttgctcttcaatgctaccggggaccgggacccggcggccctgctgaagctgctgcaggtgaggggccaacttgggggtgggcggcaggcagtcctgaagccctgggtctggcggtgtgaccctggggggtgccaatcccctcccccttgagttgtattgaggattagatgtgacaaggtgcctgtgctggttctgccaggtgctgcagggccgtggggaggccagtcataggtcattactcatattcccgcgtgtctagactcaagtccaggcttaagaggagggccagatcgtggctaaaggtgtagactctggactcgcttgtcatgcccctttaggcactagcatatcaccctggacgagaagcggcatttccccgagcctcagtttgcctctccgtaaaatggggttgctgctaggggcacccgcttctcaggtttggttgaaggagtcattgggcctttctctgcttggggaaactgaggctgcccaagctgtcagggctgaagtggcccctaggtatcatctcccatttcacagaccaggaggctgaggctgtatccagaacctctcccatttacccacagcctttttccagcctggatttggggccccctcactatctgagtgaccttcagcaagtccccttgccctgtggccactgttcccctgtctgtacagtaggttggggcttcgctgctcaggccacaggccaggcagggtatactgaggcagatgggggcagggtgctgaagtaccttggctaggtttatacagcatcattctagttgtcagggaggctgcatctccagagatgtgggcgcagggggccatatggaagttggtggacatcctttcgggggtctgacaccaagtctttcccttggccttctagccctgccagtttgactatgccgtcttctgccctaacctgacagaggtgtcatccacaggcaacgcaggtgagaggtgacaggcatggcccctggggatgagcaggggtccctgaggtagacagtgggggcttccaaactggaggtttggggtaggaaataaatttgttttactgtgtaagaacactttagtgtacttatactcttttatacaccaaagtatactttatttaattttattttaaaaaatttttggctggccacggtggctcacgcctgtaatcccagcactttgggaggccaaggcaggcagatcacgaggtcaggagattgagaccatcctggctaacatggtgaaaccccgtctctacaaaaaaaaaatacaaaaaattagccaggcgtagtggtgggtgcctgtagtctcagctactcaggaggctgaggcaggagaatggcgtgaactcgggaggcggagctggcagtgagccgagatcgcgccactgcactctaggtctgggcgacagagcgagactgtctcaaaaaaaaaaaaaattaatttttgagacagagtctcactctgtcccccaggctggaatatagtggcacaatctcagctcactgcaacctctgcctcctaggttcaaatgattctcatgtctcagcctctggaatagctgggattacaggcgtgtgccaacatgcccagctaagttttatatttttagtagagacagggtttctccatgttggccaggctggtgtcaaactcctggcctcaaatgatccacccacctcagcctcccaaagtgctgggattacagttgtgagccaccacgcccagccagcattttttattttatatgaaatagagtagaatagaaaataccagtgtacgttgcacagagtaagggtaggtcctgtttggtgaagattagtctgttccaggcatatgtataagtatgtgagtactgagttgcagtgtaaaatgtgttttttaccatgtatcatgttaaaaaaagtttgaaatagtgtaaaaattacagatcccaggctggacttggtggctcacacctataatcccagcactttggcaggaggatcgtttgagctcaggagttaaaagccagacctcatctctataaaaaaaaatagaagaattagccaggtgtggtggtgtacacccgtggtcctagctactcaggaggctgaagtggaaggatcgcttgagcctggaaggtggaggctgcagtgagtcatgaagtcgtgattgcatcactgcactccagcctgggtgacagagcaagaccctggaccctctctaaaaataaaaaatctccagtcctcacatcagtctggttggggagagttctggaatctgcattttttttttttttttcttgagacagtctcgttctgtcactcaggctgcccaggctggagtgcagtggtgccatctcggctcattgcaacttctgcctcccaggttcaaatgattctcctgcctcagcctcgtgagtagccgggactacaggtgcacgccactacacccggctaatttttgttttttgtttgtttataagatggagtcttgctctgtcgcccaggctggagtgcaatggcttgatctcagctcactgcaatctccacctcccgggttcaagtgatactcttgcctcagccttccaagtatagctgggattataggcgtgtgccaccacacctggctaatttttgtccagctaatttttgtgtgtgtgtgtttttttcagagacggggtttcaccatgttggccaggctgatcttgaactcttgacctcaggtgatccgcccgcctcggcctcccaaagtgctgggattacaagtgtgagccactgcacccagcctggaatctgcgtttttaaccagcatccccagaaataactatgctcacctggtgatggtccccagctggatgtacattttatagatggagacaatgaggccagagtggggaaggggtgcctagtgggcaaaagctttggagtcagactgtctggctctgcctctcgtgaccttggtgaagtcactgaacctgcctgagcctcagtttcttcactgtgtgcatggagaaggccactagccgagactgctggcctgatgacgtaaaaggcttggtgcgaagcaggtgctcacggtgcacccgcccctttctccacccctgtcccttactccctctccccttcgctgataggcctttctctgtgccccacagaccaacagaacttcacagtgacactggaccaggtcctgctccgctgcctggaacaccagcagcactggaaccacctggacgaagagcagg

SEQ ID NO: 12060 - DNA, 649 bp, Homo sapiens
agggggcatctttaagcaaggtgtccctgccttcactgtgctccaacctgaaggtcccctggcagtgctgagggaccgagcccagcagatctcatgtcctctatacctgtgtccgatgctggaggccctcgaggaaggggggccgccgctgaccctgggcctggagggggagcaccagcggtccaacgccgccttggccttgcagctggcccactgctggctgcagcggcaggaccgccatggtgctggggagccaaaggcatccaggccagggctcctgtggcagctgcccctggcacctgtgttccagcccacatcccacatgcggctcgggcttcggaacacggagtggccgggccggacgcaggtgctgcggcgcgggcccctcacctggtacctggacggtgcgcacaccgccagcagcgcgcaggcctgcgtgcgctggttccgccaggcgctgcagggccgcgagaggccgagcggtggccccgaggttcgagtcttgctcttcaatgctaccggggaccgggacccggcggccctgctgaagctgctgcagaccaacagaacttcacagtgacactggaccaggtcctgctccgctgcctggaacaccagcagcactggaaccacctggacgaagagcagg

SEQ ID NO: 12061 - DNA, 1891 bp, Homo sapiens
gtagcccagacccagggatgtgggggccagagataggagtgtggaggatgctaggtagccctttctctctccttcttccctccacagcaaggtgtccctgccttcactgtgctccaacctgaaggtcccctggcagtgctgagggaccgagcccagcagatctcagtaagtctgattggaatggggcagcggcagggtgggtttgtgtccctcctgtttgaggaggcactgcatcctctggggcctcagtttgcccatctgtgcagtgaggacgctgggccagctgccaggcctgctggaacacatctcagttctgggagcagggcttggtggctgggggaggggagagatgcaagggctgacgtggtcagggagggcctctgctgacccgctcctgcctgtctcccctagtgtcctctatacctgtgtccgatgctggaggccctcgaggaaggggggccgccgctgaccctgggcctggagggggagcaccagcggtccaacgccgccttggccttgcagctggcccactgctggctgcagcggcaggaccgccatggtgagtgggcagctgagtgggcaggcaggtgggtggcacctgtggagcctgcctaggagggtcccggacacacttggtctcacacaccccgcaggtgctggggagccaaaggcatccaggccagggctcctgtggcagctgcccctggcacctgtgttccagcccacatcccacatgcggctcggtgagttagaccttcctgcccagctgggaccactgcgtgtgtctgtgccccttcagattttttttttttttttttttggttttctgtttgggagataagagacaatttgaagtggtgcttaagagaaaggactctgatgtcagcaaacctccctgaccttgagctcatgaactctttctgagcctgtcttctcatctgccaaagtagatgatgataggagccactgccacgggctgtggtggggattcgctgaggtgacatcactaaggtgctgagtgcagagcctggccaatgtgggataaagtgccagccagtggtagctgctgtcactgtcactatcatcatcatcagaccctgaggttctggaggatggtgatccagtcatctgcttcttgcctcccccaaagctttcagcacccagcaggtgctcatgctgttaagccccttcagcaaatggtgggcccgctgtgtgccacgcctgttatcaagggcaagtgacaaggtcctggagacaaaccgacctcgcatcacatcccggccccagctaagggctctcaggctgtcaaacgggaatagcaggccctttcagggttgcctgaaagattccaccagatgagacagccgaaaagcccaagccattgactggtgctagtaaaaagttcctgggctgccggggtcctgagtgttgagggcgggcgcagcctgcaggggagaacgggctcaggagtgtgtgtgcggaattgaggacgggggtgggagagggcctggaggactgccttgctgccctcccccagggcttcggaacacggagtggccgggccggacgcaggtgctgcggcgcgggcccctcacctggtacctggacggtgcgcacaccgccagcagcgcgcaggcctgcgtgcgctggttccgccaggcgctgcagggccgcgagaggccgagcgggtgaggggcagggctgggggtggggccggggctggcccacgaggaggggcgggatcttggggaagggcggggcggggtcgtggggaagggcgggggcgggcccatggggaggggcggggtcgtgggcggggacgggattggtaccgcagggagaacgggcggcgccctttgacccagctcctcacctctgtcgcagtggcccc

SEQ ID NO: 12062 - DNA, 561 bp, Homo sapiens
gtagcccagacccagggatgtgggggccagagataggagtgtggaggatgctaggtagccctttctctctccttcttccctccacagcaaggtgtccctgccttcactgtgctccaacctgaaggtcccctggcagtgctgagggaccgagcccagcagatctcatgtcctctatacctgtgtccgatgctggaggccctcgaggaaggggggccgccgctgaccctgggcctggagggggagcaccagcggtccaacgccgccttggccttgcagctggcccactgctggctgcagcggcaggaccgccatggtgctggggagccaaaggcatccaggccagggctcctgtggcagctgcccctggcacctgtgttccagcccacatcccacatgcggctcgggcttcggaacacggagtggccgggccggacgcaggtgctgcggcgcgggcccctcacctggtacctggacggtgcgcacaccgccagcagcgcgcaggcctgcgtgcgctggttccgccaggcgctgcagggccgcgagaggccgagcggtggcccc

SEQ ID NO: 12063 - DNA, 4256 bp, Homo sapiens
gcgtggccggtgccgcaggagccgagcatggagtaccaggtatcaggcgggccagcgggccagcgggcctgggcgcgacgacacgtgggcctgcgctgagccgcagaacatccgggctccgctagccgagagggtatcgggagccctggactgggggactcggggggcggaacatcctggaggctgggggtggggacagggaccaggaagttgggcccgggccgccggggctgggaattcggagactatagcgtccccgccccgggttgggaagtgggaagtggcacaggagctaggatccagaagcccagaggctcagcggtgcttctggagttccagtgatcccggagtctgaaccggcagtgagagtggggaaagagggtagggaagagactcaggaattcaggcttgaaagatccaggagtattgatctgggggtgggctgtccaggattcagaagattggggatccaagtgcctggatttgggggagaggcaggaatcaggggtagtggagggccccagaacctggaaaatagaaaatgtccgcgggcgctgtgtcaagagccggttgccctagaccagaccctgatgccagtgaggcgggtggcactggtttgatgagggtggagcctccaaccagccttgaggtcctgagggtgggaggcacggaatatgaggcctaaggggaatgaaatagcacccccactcccacttccattgtgaaccctcctgaagccgtacctacctgccttcctggctgagtgacccctggcacacccctcctccctctgagttgctcctctgtgggttggaatgtggaaccccagagtcatgagggttggggtggagcttcggggaactccagaattcgaataccccagccttctgtagttctggccccgctctggcagggagcaatatagcaatggaccccattggagagaatgagggcaaaggcccaggagtgaagtcgggggagcctgggcaggaagcaaggctagcccgttagtcatgccaccttctttgtgtagcactccctgggtggggctgaactgccccagactcccatttttgccagagctggaaagatgccatactctctgttgcttaacctacaggctaggctaacagtgctggcatggcaggcgggcctggtactggccttgttgccctggcttggccactggtctgctggctgtctctgtgcctgtggaccctgagtgagccttaacctactatctgggcactgtggttgccaggatgccgtgcgcatgctcaataccctgcagaccaatgccggctacctggagcaggtgaagcgccagcggggtgaccctcagacacagttggaagccatggaactgtacctggcacggagtgggctgcaggtaaggtagagagggcctgtgaccacctcccacccccatttgtgattcccgtagctgaggcagggaccttgtctgtctgtcccaggtggaggacttggaccggctgaacatcatccacgtcactgggacgaaggggaaggtgaggggcaggaccctggggtagggggtctattaagtggctggtggagtagagcctgcccagacaatcccttttctttcaagggctccacctgtgccttcacggaatgtatcctccgaagctatggcctgaagacgggattctttaggtactggcttgtggggggatgtggtgtctgtgtcccaatggaccctggggggctatggaaccagccagtgcttcaggaccagggtcacccccaggaggtcagctgcatgtctctctgcccagtgtttattcattcaataaacattcagttagcacttaccatattggcccatgtttatggcaacctttaattttttttttttttttgagactgagtctcactctatcgcccaggctggagtacaatggcacgatcttggctcactgcaacccccgcctgccaggttcaagcaattctcctgcttcagcctcccaagtagcttggattacaggcacctgccaccacaccaggctaatttttatatttttagtagagatggggtttcaccatgttggccaggctgttctcgaactcctgacctcaagtgatccgcccacctcggcctcctaaagtgctgggattacaggtgtgagccacggtgcctggccttaattttcataattaaaaaaaaattggggaaggggcagcaactttaatgtataaactaaatatgtagcaggaggtccagtgtggtggctcatgcctataatcccagcactttgggcagctgacatgggaggatcacctgagtctggggaggtcaaggctgcagttagcagtgatcatgccattgcacatcagcctgggcgacagagcaaactgctatcttaaaaaaaaaaaagaaaattacatagctggaatagtcagatggtcagatgtctctttaataacttaaagtccaggttgagtgtggtggctcacaactgtaatcctagcactttgggaggccaaggtgggaggatcactggagctcaggagtttgagaccagcttgggcaacgtagtgagacttcatctctattaaaaaaaaaatgaaaagaaaaaattttaaagtccatatataactttaaaatcacatagagatatttatcaattagtatgtctttagagtaaggagaaaattgccttgcaagggcttaaacgataagggtggcttgtgccatccacgttaaggtctcctaggcgggctgcagataggagcccttctgcttggccactctccactgtggctttgccctggggcagcgccccctcttggtctcacttgtctagacttacacaagaggatggccaggtggaaccgggatcactcttcctgtgccacgcatgtcttctaagcccatcaccacgaacttctgaaatcagctgcctaaggtcatttcaagccgatatgttttccctaaacagttcttgttcaaataaagagatggagaggaggacttactacctgagtagctttgaggattgaaacataaggcaccaacctgtcttctaaaatcactttttgggccaggcgtggtggctcatgcctgtaatcccagcactttgggaggccgaagcaggcagatcacttgaggccaggagttcaagagcagcctggccaacatggcgaaaccctatctctactaaaaataccaaaaaattggctgggcacggtggctcatgcctgtaatcccagcactttgggaggctgaggtgggtggatcaccagaggtcaggagttcaagaccagcctggctaacatggcgtaaccctgtctctactaaaaatacaagaatcagcgaggcgtggtggtgtgtgcctgtagtcccagctacttgggaggccgaggcatgagaaacgcttgaacctgggaggcagaggttgcagtgagccaagattgcaccactgcactccagcctaggcgacagaacaagaccctgtctcaaaaataaataaataaaaactacaatcatttttgggataaaaacctagccttcaacttgggcccacatggccttgagggccagcccagggctgcagcttgaacattggttgtgggctttgtctctgagagctgtaagacagatgacattgtgggacagatgtcagcagagtgactgattggtatgggactgttggagcccatagaatgtgcaagaccagcctgggtgaggaggctgtcttagttgagaccaacgtggtgaatagggtgagccaggtgcagaggcctggagatagaagatggggaggactggggggctacagatagtccggggggatggggcaccaggaacaaaccgagggacacaggagagatgaggcacggaggccagtagcatcagtccctgcagggtgggggaaggccaggacgctcgggaagggagtcctgatgaccccagctgtcccggcagctctccccacctggtgcaggttcgggagcggatccgcatcaatgggcagcccatcagtcctgagctcttcaccaagtacttctggcgcctctaccaccggctggaggagaccaaggtgccgcatgcaggagggctggcgggtgggtatggttgggggtgctacgtgttccagcaccccatctccccagagaaggggctgcatgggctctgggccctgacatgtccctgtgccacaggatggcagctgtgtctccatgcccccctacttccgcttcctgacactcatggccttccacgtcttcctcca

SEQ ID NO: 12064 - DNA, 567 bp, Homo sapiens
gcgtggccggtgccgcaggagccgagcatggagtaccaggtatcaggcgggccagcgggccagcgggcctgggcgcgacgacacgtgggcctgcgctgagccgcagaacatccgggctccgctagccgagagggatgccgtgcgcatgctcaataccctgcagaccaatgccggctacctggagcaggtgaagcgccagcggggtgaccctcagacacagttggaagccatggaactgtacctggcacggagtgggctgcaggtggaggacttggaccggctgaacatcatccacgtcactgggacgaaggggaagggctccacctgtgccttcacggaatgtatcctccgaagctatggcctgaagacgggattctttagctctccccacctggtgcaggttcgggagcggatccgcatcaatgggcagcccatcagtcctgagctcttcaccaagtacttctggcgcctctaccaccggctggaggagaccaaggatggcagctgtgtctccatgcccccctacttccgcttcctgacactcatggccttccacgtcttcctcca

SEQ ID NO: 12065 - DNA, 2209 bp, Homo sapiens
ccctgtctcaaaaataaataaataaaaactacaatcatttttgggataaaaacctagccttcaacttgggcccacatggccttgagggccagcccagggctgcagcttgaacattggttgtgggctttgtctctgagagctgtaagacagatgacattgtgggacagatgtcagcagagtgactgattggtatgggactgttggagcccatagaatgtgcaagaccagcctgggtgaggaggctgtcttagttgagaccaacgtggtgaatagggtgagccaggtgcagaggcctggagatagaagatggggaggactggggggctacagatagtccggggggatggggcaccaggaacaaaccgagggacacaggagagatgaggcacggaggccagtagcatcagtccctgcagggtgggggaaggccaggacgctcgggaagggagtcctgatgaccccagctgtcccggcagctctccccacctggtgcaggttcgggagcggatccgcatcaatgggcagcccatcagtcctgagctcttcaccaagtacttctggcgcctctaccaccggctggaggagaccaaggtgccgcatgcaggagggctggcgggtgggtatggttgggggtgctacgtgttccagcaccccatctccccagagaaggggctgcatgggctctgggccctgacatgtccctgtgccacaggatggcagctgtgtctccatgcccccctacttccgcttcctgacactcatggccttccacgtcttcctccaagagaaggtgtgtgccctctccctagaaccctgcatctgaggccttgggaacgggaacctcagcaggcctgggggctccctgcttccatgcggcctctgggcaccctcatatcccctgccatgccctctggtctttgacaggtggacctggcagtggtggaggtgggcattggcggggcttatgactgcaccaacatcatcaggtgagcgcagttgcttgggacgaggggtggcagccaggagcacagcctcacctgccgcctggtggctcagggcagggcctcatggccttttcctcccctgcaggaagcctgtggtgtgcggagtctcctctcttggcatcgaccacaccagcctcctgggggatacggtggagaagatcgcatggcagaaagggggcatctttaaggtgaccaggcagactgggggaagggagagacatggaaggcctgggagtctacgttttcatcctggcttcactgtgtgactggaacaagttgagtctcctctccagactatttccccattgaaacgtgagggatggctgggcatggtggcttatatgcttgcaatcccagcatttcaggaggtcgaggtgagaggatcacctgagatccggagtttgagaccagcctgaccaatatggggaaactctgtctctactaaaaatacaaaaattagccaggtgtggtggtgtacgcctgtagttccagctacttgggagactgaggcaggagaatcactcgaacccgggaggcagacgttgcagtgagccgagattgcgccacagcactccagcctgggtgacagagtgagacttcatctcgaaaaagaaaagaaaagaaacatgagggatgagagacagtggtagcccagacccagggatgtgggggccagagataggagtgtggaggatgctaggtagccctttctctctccttcttccctccacagcaaggtgtccctgccttcactgtgctccaacctgaaggtcccctggcagtgctgagggaccgagcccagcagatctcagtaagtctgattggaatggggcagcggcagggtgggtttgtgtccctcctgtttgaggaggcactgcatcctctggggcctcagtttgcccatctgtgcagtgaggacgctgggccagctgccaggcctgctggaacacatctcagttctgggagcagggcttggtggctgggggaggggagagatgcaagggctgacgtggtcagggagggcctctgctgacccgctcctgcctgtctcccctagtgtcctctatacctgtgtccgatgctggaggccctcgaggaaggggggccgccgctgaccctgggcctggagggggagcaccagcggtccaacgccgccttggccttgcagctggcccactgctggctgcagcggcaggaccgccatg

SEQ ID NO: 12066 - DNA, 1060 bp, Homo sapiens
ccctgtctcaaaaataaataaataaaaactacaatcatttttgggataaaaacctagccttcaacttgggcccacatggccttgagggccagcccagggctgcagcttgaacattggttgtgggctttgtctctgagagctgtaagacagatgacattgtgggacagatgtcagcagagtgactgattggtatgggactgttggagcccatagaatgtgcaagaccagcctgggtgaggaggctgtcttagttgagaccaacgtggtgaatagggtgagccaggtgcagaggcctggagatagaagatggggaggactggggggctacagatagtccggggggatggggcaccaggaacaaaccgagggacacaggagagatgaggcacggaggccagtagcatcagtccctgcagggtgggggaaggccaggacgctcgggaagggagtcctgatgaccccagctgtcccggcagctctccccacctggtgcaggttcgggagcggatccgcatcaatgggcagcccatcagtcctgagctcttcaccaagtacttctggcgcctctaccaccggctggaggagaccaaggatggcagctgtgtctccatgcccccctacttccgcttcctgacactcatggccttccacgtcttcctccaagagaaggtggacctggcagtggtggaggtgggcattggcggggcttatgactgcaccaacatcatcaggaagcctgtggtgtgcggagtctcctctcttggcatcgaccacaccagcctcctgggggatacggtggagaagatcgcatggcagaaagggggcatctttaagcaaggtgtccctgccttcactgtgctccaacctgaaggtcccctggcagtgctgagggaccgagcccagcagatctcatgtcctctatacctgtgtccgatgctggaggccctcgaggaaggggggccgccgctgaccctgggcctggagggggagcaccagcggtccaacgccgccttggccttgcagctggcccactgctggctgcagcggcaggaccgccatg

SEQ ID NO: 12067 - DNA, 11224 bp, Homo sapiens; identical to SEQ ID NO: 12033

SEQ ID NO: 12068 - DNA, 2160 bp, Homo sapiens
gattggctgggggcggggcggggcgtctcccgcccgggcctagagcgctgccgggggcgccgggactatgtcgcgggcgcggagccacctgcgcgccgctctattcctggcagcggcgtctgcgcgcggcataacgacccaggtcgcggcgcggcggggcttgagcgcgtggccggtgccgcaggagccgagcatggagtaccaggatgccgtgcgcatgctcaataccctgcagaccaatgccggctacctggagcaggtgaagcgccagcggggtgaccctcagacacagttggaagccatggaactgtacctggcacggagtgggctgcaggtggaggacttggaccggctgaacatcatccacgtcactgggacgaaggggaagggctccacctgtgccttcacggaatgtatcctccgaagctatggcctgaagacgggattctttagctctccccacctggtgcaggttcgggagcggatccgcatcaatgggcagcccatcagtcctgagctcttcaccaagtacttctggcgcctctaccaccggctggaggagaccaaggatggcagctgtgtctccatgcccccctacttccgcttcctgacactcatggccttccacgtcttcctccaagagaaggtggacctggcagtggtggaggtgggcattggcggggcttatgactgcaccaacatcatcaggaagcctgtggtgtgcggagtctcctctcttggcatcgaccacaccagcctcctgggggatacggtggagaagatcgcatggcagaaagggggcatctttaagcaaggtgtccctgccttcactgtgctccaacctgaaggtcccctggcagtgctgagggaccgagcccagcagatctcagtgctggggagccaaaggcatccaggccagggctcctgtggcagctgcccctggcacctgtgttccagcccacatcccacatgcggctcgggcttcggaacacggagtggccgggccggacgcaggtgctgcggcgcgggcccctcacctggtacctggacggtgcgcacaccgccagcagcgcgcaggcctgcgtgcgctggttccgccaggcgctgcagggccgcgagaggccgagcggtggccccgaggttcgagtcttgctcttcaatgctaccggggaccgggacccggcggccctgctgaagctgctgcagccctgccagtttgactatgccgtcttctgccctaacctgacagaggtgtcatccacaggcaacgcagaccaacagaacttcacagtgacactggaccaggtcctgctccgctgcctggaacaccagcagcactggaaccacctggacgaagagcaggccagcccggacctctggagtgcccccagcccagagcccggtgggtccgcatccctgcttctggcgccccacccaccccacacctgcagtgccagctccctcgtcttcagctgcatttcacatgccttgcaatggatcagccaaggccgagaccccatcttccagccacctagtcccccaaagggcctcctcacccaccctgtggctcacagtggggccagcatactccgtgaggctgctgccatccatgtgctagtcactggcagcctgcacctggtgggtggtgtcctgaagctgctggagcccgcactgtcccagtagccaaggcccggggttggaggtgggagcttcccacacctgcctgcgttctccccatgaacttacatactaggtgccttttgtttttggctttcctggttctgtctagactggcctaggggccagggctttgggatgggaggccgggagaggatgtcttttttaaggctctgtgccttggtctctccttcctcttggctgagatagcagaggggctccccgggtctctcactgttgcagtggcctggccgttcagcctgtctcccccaacaccccgcctgcctcctggctcaggcccagcttattgtgtgcgctgcctggccaggccctgggtcttgccatgtgctgggtggtagatttcctcctcccagtgccttctgggaagggagagggcctctgcctgggacactgcgggacagagggtggctggagtgaattaaagcctttgttttttaaagaaatggcaaagccttcgactga

SEQ ID NO: 12069 - DNA, 6126 bp, Homo sapiens
acacaaaaagccttacaaatggaagaactaaggtggtacttaaaaacagcaccttaggatctagttccatcctatcttttcccttaaatgccatgacaaaagttaaaacgggccctgtcccttctgaatgctgggcttctcatctaaatttaaataaaaacctttgaagatgggaatgtgttggaagaaaagaagggcagaaaaaaagtgtgttggaagagtctgtggagtcctgaggcttggcgctcaggaagtttgcaaagctgcagcagctgccttggagaagaccagcaaagaaagtggagtgtgtatgtgaacttcaattctgtattttctgtgaggtgggttaatggatttttagtaaaaagaaatctcaaacacagctgacctgaaagactggaatttcagctctcttccttcccggggttctttttcctcccccttcctctcaaagccctttaaaccagattgctgtgtcagtgactcttatcctgcccgccagttccaagggtttctaactttttgtcttggaaaggaaaaccactacctgattagaaaagcacttgggaagcccattaatcttgccggcgttgtcaggagtgatcagcgagttttattaaaagccctgggattgcctgaaaggcccccttgtctgactttgaaatgaaaggggcatgttaagatctcggggcacattgtcaggacccctcaccctgccccttggactatgagctgaccctccaggaggaagcacagaagccctcctttgttaaagggatttcgccggtggacagagaagagttgggccctgtcagcatgaactctctgagttggggggctgcgaatgccgtgctgctgctgctcctcctggcctgggccagccccaccttcatcagcatcaaccgcggggtgagggtgatgaagggccactctgccttcctgtcaggagatgacctgaagtttgccatccctaaagagaaagatgcctgcaaagtggaagttgtgatgaatgagccaataacccagagggttgggaaactcactccacaggtctttgactgccatttccttcccaacgaagtcaagtatgttcacaatggttgtccaattcttgatgaagacacagtgaagctcagactttacagatttactgaaagagataccttcatagaaacttttatcctgtgggtctatctcctggaaccagactgtaacatcatccatatgagtaacaatgtgctggaggtgcctgaattcaatggcttgtcccaagcgattgataaaaatctgctcagattcgattatgataggatggctagcctggaatgtaccgtcagcctggacactgcgagaactcggctgccagcccatggccagatggttctcggggagcctcgaccagaagaacctcgtggagatcagccacacagttttttcccagagtcccaactgagagcaaaactgaagtgtccaggtgggagctgtaccccaggattaaagaaaataggaagcctcaaagtgagctgtgaggagttcctgctgatgggccttcgttatcagcatctggatcccccttcacccaacattgattatatctccatccaactggacctcacagataccaggagcaaaattgtgtacaagtcagagagtgcgtggctgcctgtctatatcagagctggaattccgaatcagattccaaaggctgcattcatggccgtgtttattctggaagtggatcagttcatcctgacctccttgactacatcagttctggactgtgaagaagatgagacccctaaacccttgctggtgttcaacattactaaagccccgctccagggctatgtgactcacctgttggatcacaccagaccaatctcctcattcacctggaaagatctcagtgacatgcagatcgcctatcagccaccaaacagcagccattctgagaggagacatgatgaggtagaattggaggtatacgacttcttctttgaaaggagtgcacctatgacagtccacatctccatcagaacagcagatacaaatgccccccgtgtatcctggaatacaggtctgagtctccttgaggggcagtctcgagccatcacttgggaacagtttcaggttgtcgacaatgacgacattggtgctgtccggctagtcaccgttggtggcctgcagcatggatggctgactttaagaggggggaaagggtttctcttcaccgtggctgacctccaggctggagttgttcgctatcatcatgatgacagcgactccaccaaagacttcgtggtcttccggatatttgatggccatcacagcatccgtcacaaattccccatcaacgtcttgcccaaagatgatagtcccccgttcctcataaccaatgttgtgattgaactggaggaggggcagaccatcctgatccagggatccatgctgcgagcttcagatgtggacgccagtgatgactacatcttcttcaatatcacaaagcctccacaggctggggagatcatgaagaagccagggccaggactgataggctatcctgtccatggcttccttcagagggatttgtttaatggaatcatttattatcgtcattttggtggagaaatctttgaagattcttttcaatttgtcctgtgggacagccatgaacctccaaatctttcagtgccacaggtggcaacaatccatataactccagtggatgaccagcttccaaaagaggctcctggagtttctcggcatttggttgtcaaggaaactgaggtggcctatataactaagaaacagctacattttatagattcagaatcatatgacagggagctggtctacacaataactactcctccatttttctccttcagccacagacacttggatgctgggaaattatttatggtggacagcataccaaaagtagttaagaatcctacggccctggagctgaggtcattcactcagcatgctgtgaactatatgaaagtggcctacatgccccccatgcaagacattggtccccattgcagagatgtccagttcacattttctgtcagtaaccaacatggcggtactttgcatgggatctgctttaacattacaatcctcccagtggacaatcaagttcctgaggcgttcaccaaccctctgaaagtgactgagggaggtcaaagcatcatcagcacagagcacattctaatttctgatgcagataccaagctggacaatattgacctctccctgcgggaattgcctctgcacggaagggtggagctgaatggatttcctctaaattcagggggcacattttcttggggcgatctccataccttaaaagttaggtatcaacatgatggaactgaagttcttcaggatgacctactcttggaggtcaccgatggcacaaattcagcagaatttgtactacatgttgaggtattccctgtcaacgatgagccaccagtcttaaaggctgacctcatgcctgtcatgaattgctcagagggaggagaggtggtcatcacctctgaatacatttttgctactgatgtggacagcgataacttgaagttgatgtttgtgattgctcgcgaacctcagcatggggtggtgaggagagctggagtcacagtggatcagttctctcagagagatgttatctcagaggccgtgacatacaaacacacaggtggcgagattggcctgatgccttgttttgacaccattacattggtggtttcggatggagaggctggcccttttgtgaatggctgttgctacaatggacccaatccatctgttccacttcatgcgtcctttccagtgtatgatctcaacatcacggtatacccagtagacaaccagccaccttccattgcaataggtcccgtgtttgttgtagatgagggctgctcaacagcccttactgttaaccatttgtccgccactgaccctgacactgcagcagatgacttggaatttgttttggtttctcctcctcagtttggctacctcgaaaatatactcccttctgtgggttttgaaaaaagcaatattggcataagtatagattcatttcagtggaaagacatgaacgcttttcacattaactatgtgcagtccaggcatctgaggatagaaccaactgccgaccagttcacggtgtacgtcacagatgggaagcatcactccttggagataccattttctattataatcaaccccacaaatgatgaagctcctgactttgtagtgcagaatattactgtgtgtgagggtcagatgaaagagctggactcttccatcatcagcgctgtggacctggacattccccaggatgccctgctgttcagcatcactcaaaagccacgccatggcctcctcatcgatagggggtttagcaaagacttctctgagaataagcagccagccaaccctcaccagaaacatgcacctgttcacagcttttccatggaactcctcaagactggaatgaggttgacgtacatgcatgatgactcagagagccttgctgatgattttacaatccaattgtcagatgggaaacataagatacttaaaaccatttcagtagaggtcatcccagttaatgatgaaaaaccaatgctgagcaagaaggctgaaattgcaatgaatatgggtgaaactcgtattatttccagtgctattctttcagccatagatgaagactcacccagggagaagatttactatgtatttgaaaggcttccccaaaatgggcaacttcagcttaaggaatgtcaactaagatgtggaatatagcaattacctatgacggattagaggaagatgatgaggtctttgaagtaattctgaactcccctgtgaatgcagttcttggcacaaagacaaaagctgcagtgaaaattttggactcaaaaggaggacaatgccatccttcatattcctccaaccaaagcaagcacagcacatgggagaagggcatttggcatctgctgcccccagggtcttcctcatccaccacttctggttcctttcatctggaaagaagacctcttccatcttccatgcagctagcagtcatcaggggagacaccctgcggggctttgattctacagatctttctcaaaggaagcttaggacccgtgggaatggcaaaacagttcgtccatcctctgtttatagaaatggaacagacatcatctataattatcatgggatagtttccttgaaactggaggatgacagtttcccaactcacaaaaggaaggccaaagtatccatcattagtcagccacaaaagacaatcaaagtggcagaactgcctcaagcagataaggtggaatccacaactgactcacacttccccagacaggaccagttgccctcatttccaaagaactgcactctggaattaaagggactcttccattttgaagaaggcatccagaagctgtatcagtgcaatgggatcgcctggaaagcctggagtccccaaaccaaggatgtggaagacaaatcctgtccagccgggtggcaccagcactcaggctactgtcacatcttgatcacagagcagaaaggcacctggaatgcggctgcccaagcttgcagggaacaatacctgggcaaccttgtaactgtattctccaggcagcacatgcggtggctctgggacattggtgggagaaagtccttttggataggtttgaacgaccaagtgcatgctggccactgggagtggatcggtggtgaacctgttgccttcaccaatgggagaagagggccctctcaacgctccaagcttggaaagagctgtgttttggttcaaagacaagggaaatggcaaacaaaagactgtaggagagccaaacctcataattatgtgtgttccagaaaactctaaatataacagaccctacagggggccacctggagtttgtcacctatttattcacaggatctgtgaatattgctccatagaaaacaaattgttatgattgagtgggtatacctttgtgattctgtctagtgaaaatgggacatttttaatagtgccagaaagattgataaataaatattttttacaagataagatacaa

SEQ ID NO: 12070 - DNA, 7324 bp, Homo sapiens
ttagtacaaaactagtagtgagaaaggaagctgggaagagactgggaagaggcaaccgacctcattaacaaaagctcagttttgtccctgcggacccaaccagcagaaggcacggggctagcggtggctgtccgccagggaggtcgggctctgtgtaaacagtagaaggcatctttatcatgcccttctcacagggagtcctgaggcttggcgctcaggaagtttgcaaagctgcagcagctgccttggagaagaccagcaaagaaagtggagtgtgtatgtgaacttcaattctgtattttctgtgaggtgggttaatggatttttagtaaaaagaaatctcaaacacagctgacctgaaagactggaatttcagctctcttccttcccggggttctttttcctcccccttcctctcaaagccctttaaaccagattgctgtgtcagtgactcttatcctgcccgccagttccaagggtttctaactttttgtcttggaaaggaaaaccactacctgattagaaaagcacttgggaagcccattaatcttgccggcgttgtcaggagtgatcagcgagttttattaaaagccctgggattgcctgaaaggcccccttgtctgactttgaaatgaaaggggcatgttaagatctcggggcacattgtcaggacccctcaccctgccccttggactatgagctgaccctccaggaggaagcacagaagccctcctttgttaaagggatttcgccggtggacagagaagagttgggccctgtcagcatgaactctctgagttggggggctgcgaatgccgtgctgctgctgctcctcctggcctgggccagccccaccttcatcagcatcaaccgcggggtgagggtgatgaagggccactctgccttcctgtcaggagatgacctgaagtttgccatccctaaagagaaagatgcctgcaaagtggaagttgtgatgaatgagccaataacccagagggttgggaaactcactccacaggtctttgactgccatttccttcccaacgaagtcaagtatgttcacaatggttgtccaattcttgatgaagacacagtgaagctcagactttacagatttactgaaagagataccttcatagaaacttttatcctgtgggtctatctcctggaaccagactgtaacatcatccatatgagtaacaatgtgctggaggtgcctgaattcaatggcttgtcccaagcgattgataaaaatctgctcagattcgattatgataggatggctagcctggaatgtaccgtcagcctggacactgcgagaactcggctgccagcccatggccagatggttctcggggagcctcgaccagaagaacctcgtggagatcagccacacagttttttcccagagtcccaactgagagcaaaactgaagtgtccaggtgggagctgtaccccaggattaaagaaaataggaagcctcaaagtgagctgtgaggagttcctgctgatgggccttcgttatcagcatctggatcccccttcacccaacattgattatatctccatccaactggacctcacagataccaggagcaaaattgtgtacaagtcagagagtgcgtggctgcctgtctatatcagagctggaattccgaatcagattccaaaggctgcattcatggccgtgtttattctggaagtggatcagttcatcctgacctccttgactacatcagttctggactgtgaagaagatgagacccctaaacccttgctggtgttcaacattactaaagccccgctccagggctatgtgactcacctgttggatcacaccagaccaatctcctcattcacctggaaagatctcagtgacatgcagatcgcctatcagccaccaaacagcagccattctgagaggagacatgatgaggtagaattggaggtatacgacttcttctttgaaaggagtgcacctatgacagtccacatctccatcagaacagcagatacaaatgccccccgtgtatcctggaatacaggtctgagtctccttgaggggcagtctcgagccatcacttgggaacagtttcaggttgtcgacaatgacgacattggtgctgtccggctagtcaccgttggtggcctgcagcatggatggctgactttaagaggggggaaagggtttctcttcaccgtggctgacctccaggctggagttgttcgctatcatcatgatgacagcgactccaccaaagacttcgtggtcttccggatatttgatggccatcacagcatccgtcacaaattccccatcaacgtcttgcccaaagatgatagtcccccgttcctcataaccaatgttgtgattgaactggaggaggggcagaccatcctgatccagggatccatgctgcgagcttcagatgtggacgccagtgatgactacatcttcttcaatatcacaaagcctccacaggctggggagatcatgaagaagccagggccaggactgataggctatcctgtccatggcttccttcagagggatttgtttaatggaatcatttattatcgtcattttggtggagaaatctttgaagattcttttcaatttgtcctgtgggacagccatgaacctccaaatctttcagtgccacaggtggcaacaatccatataactccagtggatgaccagcttccaaaagaggctcctggagtttctcggcatttggttgtcaaggaaactgaggtggcctatataactaagaaacagctacattttatagattcagaatcatatgacagggagctggtctacacaataactactcctccatttttctccttcagccacagacacttggatgctgggaaattatttatggtggacagcataccaaaagtagttaagaatcctacggccctggagctgaggtcattcactcagcatgctgtgaactatatgaaagtggcctacatgccccccatgcaagacattggtccccattgcagagatgtccagttcacattttctgtcagtaaccaacatggcggtactttgcatgggatctgctttaacattacaatcctcccagtggacaatcaagttcctgaggcgttcaccaaccctctgaaagtgactgagggaggtcaaagcatcatcagcacagagcacattctaatttctgatgcagataccaagctggacaatattgacctctccctgcgggaattgcctctgcacggaagggtggagctgaatggatttcctctaaattcagggggcacattttcttggggcgatctccataccttaaaagttaggtatcaacatgatggaactgaagttcttcaggatgacctactcttggaggtcaccgatggcacaaattcagcagaatttgtactacatgttgaggtattccctgtcaacgatgagccaccagtcttaaaggctgacctcatgcctgtcatgaattgctcagagggaggagaggtggtcatcacctctgaatacatttttgctactgatgtggacagcgataacttgaagttgatgtttgtgattgctcgcgaacctcagcatggggtggtgaggagagctggagtcacagtggatcagttctctcagagagatgttatctcagaggccgtgacatacaaacacacaggtggcgagattggcctgatgccttgttttgacaccattacattggtggtttcggatggagaggctggcccttttgtgaatggctgttgctacaatggacccaatccatctgttccacttcatgcgtcctttccagtgtatgatctcaacatcacggtatacccagtagacaaccagccaccttccattgcaataggtcccgtgtttgttgtagatgagggctgctcaacagcccttactgttaaccatttgtccgccactgaccctgacactgcagcagatgacttggaatttgttttggtttctcctcctcagtttggctacctcgaaaatatactcccttctgtgggttttgaaaaaagcaatattggcataagtatagattcatttcagtggaaagacatgaacgcttttcacattaactatgtgcagtccaggcatctgaggatagaaccaactgccgaccagttcacggtgtacgtcacagatgggaagcatcactccttggagataccattttctattataatcaaccccacaaatgatgaagctcctgactttgtagtgcagaatattactgtgtgtgagggtcagatgaaagagctggactcttccatcatcagcgctgtggacctggacattccccaggatgccctgctgttcagcatcactcaaaagccacgccatggcctcctcatcgatagggggtttagcaaagacttctctgagaataagcagccagccaaccctcaccagaaacatgcacctgttcacagcttttccatggaactcctcaagactggaatgaggttgacgtacatgcatgatgactcagagagccttgctgatgattttacaatccaattgtcagatgggaaacataagatacttaaaaccatttcagtagaggtcatcccagttaatgatgaaaaaccaatgctgagcaagaaggctgaaattgcaatgaatatgggtgaaactcgtattatttccagtgctattctttcagccatagatgaagactcacccagggagaagatttactatgtatttgaaaggcttccccaaaatgggcaacttcagcttaagatagggagggactgggttcctctctcccctggcatgaaatgcactcaggaggaagtggatctgaacttgctgagatacacacacaccggggcaatggattcccagaatcaagatagcttcaccttctacctttgggatggcaacaacaggtcccctgctcttgactgtcaaatcaccatcaaggacatggaaaaaggtgatattgtcatccttacaaaaccactcgtggtgtctaaaggtgatagaggtttcttaacaaccaccacgctcctggctgtggacggaacagacaagcctgaggaactgctctatgtcatcacctcccctccgcgatatggccagatcgaatatgttcactatcctggagttcccattacaaacttcagccaaatggatgtagtggggcagacagtttgctatgtacacaagagcaaggtgactgtctccagtgacagattcagattcatcatcagcaatggactgcggaccgagcacggggtgtttgagatcacactggagactgtggacagagccctgcctgtggtaaccaggaacaaggggttgagactggcccaaggggccgtgggcctgctttcccctgacctccttcagctgaccgaccctgatacacctgcggagaacctcaccttcctcttggttcagctcccccagcatggccagctctacctgtgggggacagggctacttcaacacaatttcacccagcaggatgtggacagcaagaatgtggcctatcggcactcaggaggggactcccagactgactgctttactttcatggccacagatgggacaaaccaaggctttattgtgaatgggagagtgtgggaagaacctgttttattcaccattcaggtagaccaattggacaaaacagctcctcgtatcacactcttgcattccccttctcaagtggggctcctgaaaaatggctgctacgggatttacatcacttcccgcgtgttgaaggcatcagaccctgacactgaggacgatcagatcatctttaaaattctacaaggcccaaaacatggacatctggagaacacaacaacaggtgaatttatccatgagaaatttagccaaaaggacttaaacagtaagactattctttacatcataaacccatctttggaagtaaattcagataccgtggaatttcaaatcatggaccccacagggaactcggccactcctcaaattttggaactgaagtggtctcatattgaatggtcacagaccgaatatgaagtctgtgagaatgtgggtttgttgcccttggaaattatcagaaggggatattccatggactcggcctttgtgggtataaaggtcaaccaagtgtcagctgcagttggaaaagatttcaccgtgattccatctaaactgattcagtttgacccaggaatgtcaactaagatgtggaatatagcaattacctatgacggattagaggaagatgatgaggtctttgaagtaattctgaactcccctgtgaatgcagttcttggcacaaagacaaaagctgcagtgaaaattttggactcaaaaggaggacaatgccatccttcatattcctccaaccaaagcaagcacagcacatgggagaagggcatttggcatctgctgcccccagggtcttcctcatccaccacttctggttcctttcatctggaaagaagacctcttccatcttccatgcagctagcagtcatcaggggagacaccctgcggggctttgattctacagatctttctcaaaggaagcttaggacccgtgggaatggcaaaacagttcgtccatcctctgtttatagaaatggaacagacatcatctataattatcatgggatagtttccttgaaactggaggatgacagtttcccaactcacaaaaggaaggccaaagtatccatcattagtcagccacaaaagacaatcaaagtggcagaactgcctcaagcagataaggtggaatccacaactgactcacacttccccagacaggaccagttgccctcatttccaaagaactgcactctggaattaaagggactcttccattttgaagaaggcatccagaagctgtatcagtgcaatgggatcgcctggaaagcctggagtccccaaaccaaggatgtggaagacaaatcctgtccagccgggtggcaccagcactcaggctactgtcacatcttgatcacagagcagaaaggcacctggaatgcggctgcccaagcttgcagggaacaatacctgggcaaccttgtaactgtattctccaggcagcacatgcggtggctctgggacattggtgggagaaagtccttttggataggtttgaacgaccaagtgcatgctggccactgggagtggatcggtggtgaacctgttgccttcaccaatgggagaagagggccctctcaacgctccaagcttggaaagagctgtgttttggttcaaagacaagggaaatggcaaacaaaagactgtaggagagccaaacctcataattatgtgtgttccagaaaactctaa

SEQ ID NO: 12071 - DNA, 2481 bp, Homo sapiens
agtctgcagggaggaaagtcagaattagatattcaagatggccgcctctgatggagtccctggcactcactcaagcttgcatttggtagatggtgacacaagaatccatgctgaaggctgccttgcctctctttaccagattcatcatcagcaatggactgcggaccgagcacggggtgtttgagatcacactggagactgtggacagagccctgcctgtggtaaccaggaacaaggggttgagactggcccaaggggccgtgggcctgctttcccctgacctccttcagctgaccgaccctgatacacctgcggagaacctcaccttcctcttggttcagctcccccagcatggccagctctacctgtgggggacagggctacttcaacacaatttcacccagcaggatgtggacagcaagaatgtggcctatcggcactcaggaggggactcccagactgactgctttactttcatggccacagatgggacaaaccaaggctttattgtgaatgggagagtgtgggaagaacctgttttattcaccattcaggtagaccaattggacaaaacagctcctcgtatcacactcttgcattccccttctcaagtggggctcctgaaaaatggctgctacgggatttacatcacttcccgcgtgttgaaggcatcagaccctgacactgaggacgatcagatcatctttaaaattctacaaggcccaaaacatggacatctggagaacacaacaacaggtgaatttatccatgagaaatttagccaaaaggacttaaacagtaagactattctttacatcataaacccatctttggaagtaaattcagataccgtggaatttcaaatcatggaccccacagggaactcggccactcctcaaattttggaactgaagtggtctcatattgaatggtcacagaccgaatatgaagtctgtgagaatgtgggtttgttgcccttggaaattatcagaaggggatattccatggactcggcctttgtgggtataaaggtcaaccaagtgtcagctgcagttggaaaagatttcaccgtgattccatctaaactgattcagtttgacccaggaatgtcaactaagatgtggaatatagcaattacctatgacggattagaggaagatgatgaggtctttgaagtaattctgaactcccctgtgaatgcagttcttggcacaaagacaaaagctgcagtgaaaattttggactcaaaaggaggacaatgccatccttcatattcctccaaccaaagcaagcacagcacatgggagaagggcatttggcatctgctgcccccagggtcttcctcatccaccacttctggttcctttcatctggaaagaagacctcttccatcttccatgcagctagcagtcatcaggggagacaccctgcggggctttgattctacagatctttctcaaaggaagcttaggacccgtgggaatggcaaaacagttcgtccatcctctgtttatagaaatggaacagacatcatctataattatcatgggatagtttccttgaaactggaggatgacagtttcccaactcacaaaaggaaggccaaagtatccatcattagtcagccacaaaagacaatcaaagtggcagaactgcctcaagcagataaggtggaatccacaactgactcacacttccccagacaggaccagttgccctcatttccaaagaactgcactctggaattaaagggactcttccattttgaagaaggcatccagaagctgtatcagtgcaatgggatcgcctggaaagcctggagtccccaaaccaaggatgtggaagacaaatcctgtccagccgggtggcaccagcactcaggctactgtcacatcttgatcacagagcagaaaggcacctggaatgcggctgcccaagcttgcagggaacaatacctgggcaaccttgtaactgtattctccaggcagcacatgcggtggctctgggacattggtgggagaaagtccttttggataggtttgaacgaccaagtgcatgctggccactgggagtggatcggtggtgaacctgttgccttcaccaatgggagaagagggccctctcaacgctccaagcttggaaagagctgtgttttggttcaaagacaagggaaatggcaaacaaaagactgtaggagagccaaacctcataattatgtgtgttccagaaaactctaaatataacagaccctacagggggccacctggagtttgtcacctatttattcacaggatctgtgaatattgctccatagaaaacaaattgttatgattgagtgggtatacctttgtgattctgtctagtgaaaatgggacatttttaatagtgccagaaagattgataaataaatattttttacaagataagatacaatttttgtatctcaataccttttaaaataaatgccagcagtattataaa

SEQ ID NO: 12072 - DNA, 10086 bp, Homo sapiens
acacaaaaagccttacaaatggaagaactaaggtggtacttaaaaacagcaccttaggatctagttccatcctatcttttcccttaaatgccatgacaaaagttaaaacgggccctgtcccttctgaatgctgggcttctcatctaaatttaaataaaaacctttgaagatgggaatgtgttggaagaaaagaagggcagaaaaaaagtgtgttggaagagtctgtggagtcctgaggcttggcgctcaggaagtttgcaaagctgcagcagctgccttggagaagaccagcaaagaaagtggagtgtgtatgtgaacttcaattctgtattttctgtgaggtgggttaatggatttttagtaaaaagaaatctcaaacacagctgacctgaaagactggaatttcagctctcttccttcccggggttctttttcctcccccttcctctcaaagccctttaaaccagattgctgtgtcagtgactcttatcctgcccgccagttccaagggtttctaactttttgtcttggaaaggaaaaccactacctgattagaaaagcacttgggaagcccattaatcttgccggcgttgtcaggagtgatcagcgagttttattaaaagccctgggattgcctgaaaggcccccttgtctgactttgaaatgaaaggggcatgttaagatctcggggcacattgtcaggacccctcaccctgccccttggactatgagctgaccctccaggaggaagcacagaagccctcctttgttaaagggatttcgccggtggacagagaagagttgggccctgtcagcatgaactctctgagttggggggctgcgaatgccgtgctgctgctgctcctcctggcctgggccagccccaccttcatcagcatcaaccgcggggtgagggtgatgaagggccactctgccttcctgtcaggagatgacctgaagtttgccatccctaaagagaaagatgcctgcaaagtggaagttgtgatgaatgagccaataacccagagggttgggaaactcactccacaggtctttgactgccatttccttcccaacgaagtcaagtatgttcacaatggttgtccaattcttgatgaagacacagtgaagctcagactttacagatttactgaaagagataccttcatagaaacttttatcctgtgggtctatctcctggaaccagactgtaacatcatccatatgagtaacaatgtgctggaggtgcctgaattcaatggcttgtcccaagcgattgataaaaatctgctcagattcgattatgataggatggctagcctggaatgtaccgtcagcctggacactgcgagaactcggctgccagcccatggccagatggttctcggggagcctcgaccagaagaacctcgtggagatcagccacacagttttttcccagagtcccaactgagagcaaaactgaagtgtccaggtgggagctgtaccccaggattaaagaaaataggaagcctcaaagtgagctgtgaggagttcctgctgatgggccttcgttatcagcatctggatcccccttcacccaacattgattatatctccatccaactggacctcacagataccaggagcaaaattgtgtacaagtcagagagtgcgtggctgcctgtctatatcagagctggaattccgaatcagattccaaaggctgcattcatggccgtgtttattctggaagtggatcagttcatcctgacctccttgactacatcagttctggactgtgaagaagatgagacccctaaacccttgctggtgttcaacattactaaagccccgctccagggctatgtgactcacctgttggatcacaccagaccaatctcctcattcacctggaaagatctcagtgacatgcagatcgcctatcagccaccaaacagcagccattctgagaggagacatgatgaggtagaattggaggtatacgacttcttctttgaaaggagtgcacctatgacagtccacatctccatcagaacagcagatacaaatgccccccgtgtatcctggaatacaggtctgagtctccttgaggggcagtctcgagccatcacttgggaacagtttcaggttgtcgacaatgacgacattggtgctgtccggctagtcaccgttggtggcctgcagcatggatggctgactttaagaggggggaaagggtttctcttcaccgtggctgacctccaggctggagttgttcgctatcatcatgatgacagcgactccaccaaagacttcgtggtcttccggatatttgatggccatcacagcatccgtcacaaattccccatcaacgtcttgcccaaagatgatagtcccccgttcctcataaccaatgttgtgattgaactggaggaggggcagaccatcctgatccagggatccatgctgcgagcttcagatgtggacgccagtgatgactacatcttcttcaatatcacaaagcctccacaggctggggagatcatgaagaagccagggccaggactgataggctatcctgtccatggcttccttcagagggatttgtttaatggaatcatttattatcgtcattttggtggagaaatctttgaagattcttttcaatttgtcctgtgggacagccatgaacctccaaatctttcagtgccacaggtggcaacaatccatataactccagtggatgaccagcttccaaaagaggctcctggagtttctcggcatttggttgtcaaggaaactgaggtggcctatataactaagaaacagctacattttatagattcagaatcatatgacagggagctggtctacacaataactactcctccatttttctccttcagccacagacacttggatgctgggaaattatttatggtggacagcataccaaaagtagttaagaatcctacggccctggagctgaggtcattcactcagcatgctgtgaactatatgaaagtggcctacatgccccccatgcaagacattggtccccattgcagagatgtccagttcacattttctgtcagtaaccaacatggcggtactttgcatgggatctgctttaacattacaatcctcccagtggacaatcaagttcctgaggcgttcaccaaccctctgaaagtgactgagggaggtcaaagcatcatcagcacagagcacattctaatttctgatgcagataccaagctggacaatattgacctctccctgcgggaattgcctctgcacggaagggtggagctgaatggatttcctctaaattcagggggcacattttcttggggcgatctccataccttaaaagttaggtatcaacatgatggaactgaagttcttcaggatgacctactcttggaggtcaccgatggcacaaattcagcagaatttgtactacatgttgaggtattccctgtcaacgatgagccaccagtcttaaaggctgacctcatgcctgtcatgaattgctcagagggaggagaggtggtcatcacctctgaatacatttttgctactgatgtggacagcgataacttgaagttgatgtttgtgattgctcgcgaacctcagcatggggtggtgaggagagctggagtcacagtggatcagttctctcagagagatgttatctcagaggccgtgacatacaaacacacaggtggcgagattggcctgatgccttgttttgacaccattacattggtggtttcggatggagaggctggcccttttgtgaatggctgttgctacaatggacccaatccatctgttccacttcatgcgtcctttccagtgtatgatctcaacatcacggtatacccagtagacaaccagccaccttccattgcaataggtcccgtgtttgttgtagatgagggctgctcaacagcccttactgttaaccatttgtccgccactgaccctgacactgcagcagatgacttggaatttgttttggtttctcctcctcagtttggctacctcgaaaatatactcccttctgtgggttttgaaaaaagcaatattggcataagtatagattcatttcagtggaaagacatgaacgcttttcacattaactatgtgcagtccaggcatctgaggatagaaccaactgccgaccagttcacggtgtacgtcacagatgggaagcatcactccttggagataccattttctattataatcaaccccacaaatgatgaagctcctgactttgtagtgcagaatattactgtgtgtgagggtcagatgaaagagctggactcttccatcatcagcgctgtggacctggacattccccaggatgccctgctgttcagcatcactcaaaagccacgccatggcctcctcatcgatagggggtttagcaaagacttctctgagaataagcagccagccaaccctcaccagaaacatgcacctgttcacagcttttccatggaactcctcaagactggaatgaggttgacgtacatgcatgatgactcagagagccttgctgatgattttacaatccaattgtcagatgggaaacataagatacttaaaaccatttcagtagaggtcatcccagttaatgatgaaaaaccaatgctgagcaagaaggctgaaattgcaatgaatatgggtgaaactcgtattatttccagtgctattctttcagccatagatgaagactcacccagggagaagatttactatgtatttgaaaggcttccccaaaatgggcaacttcagcttaagatagggagggactgggttcctctctcccctggcatgaaatgcactcaggaggaagtggatctgaacttgctgagatacacacacaccggggcaatggattcccagaatcaagatagcttcaccttctacctttgggatggcaacaacaggtcccctgctcttgactgtcaaatcaccatcaaggacatggaaaaaggtgatattgtcatccttacaaaaccactcgtggtgtctaaaggtgatagaggtttcttaacaaccaccacgctcctggctgtggacggaacagacaagcctgaggaactgctctatgtcatcacctcccctccgcgatatggccagatcgaatatgttcactatcctggagttcccattacaaacttcagccaaatggatgtagtggggcagacagtttgctatgtacacaagagcaaggtgactgtctccagtgacagattcagattcatcatcagcaatggactgcggaccgagcacggggtgtttgagatcacactggagactgtggacagagccctgcctgtggtaaccaggaacaaggggttgagactggcccaaggggccgtgggcctgctttcccctgacctccttcagctgaccgaccctgatacacctgcggagaacctcaccttcctcttggttcagctcccccagcatggccagctctacctgtgggggacagggctacttcaacacaatttcacccagcaggatgtggacagcaagaatgtggcctatcggcactcaggaggggactcccagactgactgctttactttcatggccacagatgggacaaaccaaggctttattgtgaatgggagagtgtgggaagaacctgttttattcaccattcaggtagaccaattggacaaaacagctcctcgtatcacactcttgcattccccttctcaagtggggctcctgaaaaatggctgctacgggatttacatcacttcccgcgtgttgaaggcatcagaccctgacactgaggacgatcagatcatctttaaaattctacaaggcccaaaacatggacatctggagaacacaacaacaggtgaatttatccatgagaaatttagccaaaaggacttaaacagtaagactattctttacatcataaacccatctttggaagtaaattcagataccgtggaatttcaaatcatggaccccacagggaactcggccactcctcaaattttggaactgaagtggtctcatattgaatggtcacagaccgaatatgaagtctgtgagaatgtgggtttgttgcccttggaaattatcagaaggggatattccatggactcggcctttgtgggtataaaggtcaaccaagtgtcagctgcagttggaaaagatttcaccgtgattccatctaaactgattcagtttgacccaggaatgtcaactaagatgtggaatatagcaattacctatgacggattagaggaagatgatgaggtctttgaagtaattctgaactcccctgtgaatgcagttcttggcacaaagacaaaagctgcagtgaaaattttggactcaaaaggaggacaatgccatccttcatattcctccaaccaaagcaagcacagcacatgggagaagggcatttggcatctgctgcccccagggtcttcctcatccaccacttctggttcctttcatctggaaagaagacctcttccatcttccatgcagctagcagtcatcaggggagacaccctgcggggctttgattctacagatctttctcaaaggaagcttaggacccgtgggaatggcaaaacagttcgtccatcctctgtttatagaaatggaacagacatcatctataattatcatgggatagtttccttgaaactggaggatgacagtttcccaactcacaaaaggaaggccaaagtatccatcattagtcagccacaaaagacaatcaaagtggcagaactgcctcaagcagataaggtggaatccacaactgactcacacttccccagacaggaccagttgccctcatttccaaagaactgcactctggaattaaagggactcttccattttgaagaaggcatccagaagctgtatcagtgcaatgggatcgcctggaaagcctggagtccccaaaccaaggatgtggaagacaaatcctgtccagccgggtggcaccagcactcaggctactgtcacatcttgatcacagagcagaaaggcacctggaatgcggctgcccaagcttgcagggaacaatacctgggcaaccttgtaactgtattctccaggcagcacatgcggtggctctgggacattggtgggagaaagtccttttggataggtttgaacgaccaagtgcatgctggccactgggagtggatcggtggtgaacctgttgccttcaccaatgggagaagagggccctctcaacgctccaagcttggaaagagctgtgttttggttcaaagacaagggaaatggcaaacaaaagactgtaggagagccaaacctcataattatgtgtgttccagaaaactctaaatataacagaccctacagggggccacctggagtttgtcacctatttattcacaggatctgtgaatattgctccatagaaaacaaattgttatgattgagtgggtatacctttgtgattctgtctagtgaaaatgggacatttttaatagtgccagaaagattgataaataaatattttttacaagataagatacaatttttgtatctcaataccttttaaaataaatgccagcagtattataaagtgtaaggtttgtttattccagaagaccctcacccttaccccattccaaatctcagggagcaccagtctcatagtccttggatttttttaaaaaaaatttttggtcccgttacctctaatgaatttattctgaaatatgtatcgtaggtgctcctaccactttagtctgagtgaagctaactctactagttcattaaaccaaagttgaaccgcaaagttgtccctttggagccctttaaatgtgaaatctaagattagaggctggggttgaaaaagagaattttctatgatgaaaaagaaagactttagatgaaagaatcttgtaggtggaggctcatctacaaagctgtagttcaggtaagaattcggggggctggctgtactcagagttctactcatcactattcatgaaacagatctccctttccaatttgagtgttggcattgtaccatcccaaagctaatgattgggtttccccagccttacagagtcatgagaaatttcaagtaacataatctgttcctctgtgtttattgtactgacaagcatttctcagggacacttgggataaggagtatatatgaatgatggttgacacatggaagaaaaatactgcttcctcagaaatgtcctgatgaactgtgctgatgaacagagaaaaataataccgaaaacagagcccctgaaagcctacattctcggaaaggattttgaggaattttgagccaccttaaatctttaatatttgcagaaatgccatgttaactagattctctaacggaaaggtaccttattaatttataatctcaggtgagtggaacatttttgtaacaatgaagtatgttgcagcgttaccagaactcccttctgaaatcaaggtttaacagttataggaaattagaatgtctgaaacatttatttaaagtttttctcttttcataatcactgagaaatatggttgtgccaaatgtcacttgctctatgagcaccaatgtaacttcagaatcaaattggggttatcaagtaggctagagctctggtgctggttttattataaaaataccttgagtgttgtagacactaaaactgcttgaagaaagtcagttcagtttctgggatataaaaacatggcaagctttttttatttcagttcatttatcaaggttgtaattaatagaaacatttagaaagagatattggaatatgatccagacattctgtctattacttaaatctaaacataattatagtgtcagagggtccttacctgagatgtcgcaggtgggctccagattggcataatgtacaggttctctgtgagacacaagcagtttctggcatttaaccaaaagatgccacacctatcctcttaccagctcctttcaaattccttctggtccacaggcttcttgcagtatggaaatgtgagatttgggctaaagaaaaaatagttgtttacctaaagggttaagtcctaggaaggaagtagaagtttgggaaatgagggattcaagggccactccttccactggaactctaaaactatataaaccatctaaaactggaaatctagaactatgtcaactgtgtagaaccttgtcagcatggcagatttattatacatttctgcaatataaatgataaatgatactgaactaattgcaaatgttagcataaagagtgttttgatttttataacaattagaaatgctacaagaatatttaaaaatattcctgatcatgaaagcattaatcaaattagaaaatccaagtcattttaagaagataaaaatagaaattcaggcaagtttgggtgatgggcggtattcatcacaaccttcattttattcttacaattgagctttgactcagggggaaaagaagtaaatgattgtcaaggttccctctgccttgattgatagtttctgatgggagtgggaaggaaggaattggagtaatgggtagaatgggaatgagagattacgggagagagagatgagatgggttgaacagaagaggatgggaactgatggtagctaggaaggaaagcgtcaagaaggacctgaatgtacccagcttttctccccaaacttcaataccacctcaggaaaaggcccactgtgtccaggggcgtcagtccagctcaatagtgtctagcttttcagaatcttctgattgtttggtctttaacaaaaacatagcatctatttgctaacaataaacttaagcaacatatgataatcatttcatctccttccaagaagtggtgaaaatgaaccaggtgacattaatttaacttctgtttttgtttatttttaatacaaccaaaaagatatgcacatattttaatttacattatggtactgtataatttaaaccataaactggtgctgattaatttctgcaacaaagcagcatattaaatgtactacatctagtgttgtagcaaaattaataaacttgttttaagttctgagacactttc

SEQ ID NO: 12073 - DNA, 1421 bp, Homo sapiens
gatgctggatgagtccttggcagtcaggaggtccaaaaaatgcaaagaaatgataatgcactgggagaagaaagaagatattgacatcgtgaacacagtagaccaattggacaaaacagctcctcgtatcacactcttgcattccccttctcaagtggggctcctgaaaaatggctgctacgggatttacatcacttcccgcgtgttgaaggcatcagaccctgacactgaggacgatcagatcatctttaaaattctacaaggcccaaaacatggacatctggagaacacaacaacaggtgaatttatccatgagaaatttagccaaaaggacttaaacagtaagactattctttacatcataaacccatctttggaagtaaattcagataccgtggaatttcaaatcatggaccccacagggaactcggccactcctcaaattttggaactgaagtggtctcatattgaatggtcacagaccgaatatgaagtctgtgagaatgtgggtttgttgcccttggaaattatcagaaggggatattccatggactcggcctttgtgggtataaaggtcaaccaagtgtcagctgcagttggaaaagatttcaccgtgattccatctaaactgattcagtttgacccaggttcgtccatcctctgtttatagaaatggaacagacatcatctataattatcatgggatagtttccttgaaactggaggatgacagtttcccaactcacaaaaggaaggccaaagtatccatcattagtcagccacaaaagacaatcaaagtggcagaactgcctcaagcagataaggtggaatccacaactgactcacacttccccagacaggaccagttgccctcatttccaaagaactgcactctggaattaaagggactcttccattttgaagaaggcatccagaagctgtatcagtgcaatgggatcgcctggaaagcctggagtccccaaaccaaggatgtggaagacaaatcctgtccagccgggtggcaccagcactcaggctactgtcacatcttgatcacagagcagaaaggcacctggaatgcggctgcccaagcttgcagggaacaatacctgggcaaccttgtaactgtattctccaggcagcacatgcggtggctctgggacattggtgggagaaagtccttttggataggtttgaacgaccaagtgcatgctggccactgggagtggatcggtggtgaacctgttgccttcaccaatgggagaagagggccctctcaacgctccaagcttggaaagagctgtgttttggttcaaagacaagggaaatggcaaacaaaagactgtaggagagccaaacctcataattatgtgtgttccagaaaactctaaatataacagaccctacagggggccacctgg

SEQ ID NO: 12074 - DNA, 16867 bp, Homo sapiens
gggagaagatttactatgtatttgaaaggcttccccaaaatgggcaacttcagcttaaggttagtgacttcttacttttatttttcaaaactaacgtagcaggtataaatcttctcaatatacacatttctatgatgggatttattctctgatagacatatatttgcctagaagtagaaaatttaattttactagttcagggtgaattcatgctgttctaaagtctttgtcaacatggggtaaattcaacaaatattaagattcttcattgctccctctcccgtaggattatccctaaattctgagggagggaattactggggtaaaccaagctgtctgctttctgaggataatccaggatcttttgtgatatcttcatttctaccagatttttgacttgtgattcatgtaactttcctctttagcatccatcatctcaattataaaactccttcaagtctacagtctttcttgttctctcaatctctctctctctctgtgtgtgtgtgtgtgtgtgtgtgtgtgtgtgcgtgtgtgtgtgggtgtgtgtatttcagctaaattctagatcattctcaggaaaatgaaaactttcattattttttcatgataatcaggtccaaggaaacttggagggctgcctctagctcctctggccctaatgtctctgttaaaacattatctgaatcccagcactttgggaggccaaggtgggcggatcacaaggtcaggagatcaagaccatcctggccaacgtggtgaaaccccatctctactaaaaatgcaaaaattagccgggtgtggcagcacacacatgtaatcccagctactcattactctgcaggcggaggcaggagaattacttgaacccgggagaggggggagaggttgcagtgagctgagattgtgctgctgcactccagcctgggtgacagagcaagactccgtcttaaaaaacaaaacaaaacaaaacaaaacaaaccattatctgagtattatcacctcctgccttctcaatgatttgccacagtgagcatctttctttctttccttccaattctcatctttgtcgctgagcaggggccatccttatgtcttctccagggagactacttactccacaaacaatatgccaaattgttctgtattctatctgacatgaacttaaaagacgaaagttcagtgtcttcatcccactgcagtcccacctccccttgcagcaccagaacccttattgtttaggttcagatgggcaaagtcttggaccaaaaaggcagtgtgggagaaaacttcacgtgggagtcatcccatcctgctagcataacagattttaacaactgccaaatttgaatcccatgaactgcatgacaccgtaaattaacattcctggaattgtatatgttctcaaaattagatgctttaatggaaagcaaataagcatggaaacaataaagggaggattctaggggtaggtcacctgggttttactgctaactcaatagcttgctctgtgatttgataaaatgtccttgtttcactttaggcctagaatagcaaaatttcagtctgattcagactgtgtgcatgatgcccaaggatcagcccaacgtgaattatatagatcagtcacctgagaaggtcagttgagtaatcagtccaaatgtttatttcaatggtagattaagactagcaaccacaaccaccaaccatccccattgcaattatttgatggaatgcttaactttccatctagtggaggcacagtcctagaaaagcagcaagaattcattctatgtggaacagcttgattgtcatagattgtaggcaccatagagaatcagagtgaagagcaatcactgatttaaattgaggtacagctgtgtccttatttcatttcaaagagtaatgaagcagaaatgcagtgagagctcacacatttgggtggcttgggaacggaactgttttggatatgtgaaaatgcagatgggtccaggttcccagtatggctccacacagttctctcccagctccctagcagttctccgagtctttccaagaccaaggaccaggactccagccctcctggactctcccaagagttatcgttttcttattgacttctcttagttttcgccatcttgaatctgacttttattttctttctatttctgggtcttcaaatgattttattaagtcagtcttacattttggagtgcaagtaaggaattacatggagacaagagagaggaaaagatgtcttcttctgtgcttacttccttagacaagattagaaaagggaaaatgtgaaatacaattgcaggctttcccgtttaaaacctgaaagagtctgttttaaaaattatattggcaaataggtcttatggaaacaaactctagcttaattattatgatgtaattaacttccatccagtgagcgtgagggcagaacataagtctacaaacatcagatggataaacatattaaagagaaagaaacgttatcaagtagaatgacataaaggcaagtggtagcacaatggcaagagaggaggacaaagctcttttgccaggaactgggagtctgtggaatctggaagtctgtattctatctgacatgaacttaaaagatgaaaggtcagtgtcttcatcccactgctgtgccacctccccttgctgtaccagagcccccattgtttaggttcagatgggcaaagtcttggaccaaagtatcaaggggaataaaaagtaaatgatttacatttctgttttagactcttaaatgagacagtaaaaccacaggataatatcatataataaattttaagatgactttaaaaaattatgtctgatgactttttatgagccattcctagggaaagctatgtaccttaaatgaacaataataggattattaataagataataaagatttatgattacattttctaacactgtcagttgttagccacccccctcagcataagaacctttttaaattcaaaatgccacaatttctgcatcaagctctgtacaaaacatatgcttaaataatgttggcttacttttagaagattctgataaaaacaatatacgatatttgcagtttatattttttgatgacttaggatataaatgtaggtagtgatagtgatccccatcattttctttctttagtaaggctggaaacatactggggagtaaatgcatctgttctatttttgttctgtctacttcagacaagcccagtaatgagccatgttgaaaaaaagtatatttgactagttgaacatgaaaagaactaaaaaatggaaactctgaaagaaatacatttaatttctaaagaatcccttccaagagctcgattacccacctcctcttattaattggaatattcaatcagctatggttgcttatgaggaacaccttggaagtaacaatgctgttgaattgtttgacttcgtctgaaaccctttggttgaagccggtgtttttccaaggtctcaaattattctaatatatttctttgaaaagaaaaaaaaatcaggtaaagtggcaaaaagtagtctggaatttccctgaaatattatttatattggaggtttttaggggatacagaaaatgtccactaacgtacgttgggggaaaagaaaaaaccatgagcagctgactaactctggctccttccagatagggagggactgggttcctctctcccctggcatgaaatgcactcaggaggaagtggatctgaacttgctgagatacacacacaccggggcaatggattcccagaatcaagatagcttcaccttctacctttgggatggcaacaacaggtcccctgctcttgactgtcaaatcaccatcaaggacatggaaaaaggtaaaagcacgtctaccaaggtttactgggatcaactttgctaactggtataagtattccacattcgtttctttctctctctttccctcccttctttccttttttcctgccactcttcatctttgaaattctatcatttgtgtttagatcctttggcttctcacctgctttgcctgggacctatgtggttcacagaagtagccaatccattcgttattttaaaaagtttattggaaattcagccttgcacacaatatggctatacaggctactttaactgttaggatttttttgctttaagtaaaattttaccaagttgatgtgtaactctagttttatcttcaggaagtgatctatcactggaaaatggagtttcaaaggaaaagtacttctaaaacaataaaataataaatgaaaaatacattttaaaatttaaaaataataaagataaactttgtcattagaaaggctggaagttgctgcttctttcactttgaaagtgctaacatatactctttagggacaaggaaagacactataagatcaacttcttgtgagttaattaagcagagtcagttgtataagtggtgaatgggggagagttaaatggaagatggaggagagtttgtttaaaaagctcagcaaggaagagtagaagctcttgatacccaactgttactaccctgtaattttgcttcagcttatgtgaggatcatatctcattcatctgtattatcccaggatctagatattcccaggatgaagcataatcttagatcctcagtacatgcttgattgactgaatgcttccctttttttgccttggctgccaggaagctcagaggtaaattgaatgcttaagtgcaataataaaaaaaaaatcttgctttatgtgtggcagaattataattgtcctaaatttttaaaaaattaattcagtttgatcttgagatgtttacattgagctgtgtaataatatattttatttgcttatttcctggttgtaaatgtgttccttaaagaagtctaatgagtgatttcagataagctagatgttactgtacacatttatctctccctgcaaaacaactatgttcatcataaatgtatgtccaggcaaatcgtaatacaagtaatatattagggcagacaactagtgtattagagtaggccaccttctcattggctcagcacaacacaactttacagtgacataggagagctctgttccacatagtcatctagggactctttatatctagacattcccttattctgaaggccttagagtcactcaagaagtgagatatggaagaaaattaggggatgtcatgcactaggtgtgaaggttgtgtacctctcttgtacacattccagtggctgaatcacagccacatgccacattaagagaggctgggcaatagaaactttagctttgcacccaggaagaaaggaaataaagttagccagtgcgttgccagactctgctgcaattgacatgtgattattttctaaaaggatttttgaaaacctataccgagtagacacattatcctattaacattttcagttcaaattttttcttctttgtttcttcttacaaagtggtgttttgtcactgtacagttttttgttttgttttgttttgttttgttttacttaacatgagttttttcaggttgctgcataactttgtagccataattgtttatctctaaacaagactatactaaagagttagatttaatcacaaccttaaagttgagcatttggttgtttccatttgggagctattataaataacattaagcttcccaactgctgtgttgctgtgttttctgatttgcacagtggcagaaatgatgttgagatctttcagataagtttaggaggacattgtctatagttgactctaacctacactctgcccttacagtgctgaaaacttgcatcaaggcaagagctggttgctcttcctcccctcaggtccatttcctgctcctggtgaaacctctcgtgggtgctttgtgtttcccccacctaattcattcttcttacttccttgatgtattcatcttgcttctgtctgtagcatctgtggctaaggttttgatttaaatttagaatggtctttgattctacgtaggactgaagttgcaaagcattttgagataaaagcatagtatatgaaaagaccaatttagtaatctgaaatagcgttttccaatcatggcaccattgacattttgggatggaggattctttattgcaggtgactcccttgtgcattgtaaaatgtttagcagcatcccaggtctctgaatctagaagccagtagcaactcccagttatgacaaccaaaaatgtctccagacattgccaaatgtcccttggggagcaaaattgcctgtcgttgagaaccactggttaaaattgtaccactttgatggtttatttgtatttcttatttcttcatgaggctgaatatctttaaaaaaatttttttggccactgtgtttttaagttcagaaatagcttggcatttacatcacgtgtttttctttttggatattcaccctttcagtattagttcacaagagctccctaggtattaaagacagggaacaaaataatgcagtgtttaagagcttgtgctctgggctcagatggcttgcgtacgaattctcactcaatgttttattaattttgtaaccacaagcaggtaagttagcatttctataccttagcttcctcatttgtaatttgggcatatgatatgacaatacctcacaagattagtgtgaaggtgtaagggtctttagttctgtacctgacatagagtagaagccctatatttgagatatgatcacttggtaatggacgtcaggtgaacaaaattcaattatggtccctagtttgtgaaactgcatcattggtccatgtgtgacccacttctaccttcctcagtcatacatttaaaaaaaatagtggtgaattatgcataacacaaaatgtaccatcttaaccatttttaagtgtaccagttcatagtgttaaatatattcatgttgttgtccatccaatctccagaattttttcatctcagaaaacttaaagtctatacccattaaataatgactcctcatttccccctccctggcaaccattgtcctgtgttctgtctctatgagttttgctactctaggtacttcatgtaagtggatatcttttcatgactggcttatttcacttagcataatgtccccaaggttcatgcatgttgtagcatgtgccaggactcccttcccttttaaggctgaatggtattacagtgtatgtatatgccacattttgtttatccactcatctgttgagaggcacttgagttgtttgcatctcttggctattgtgaataatcctgatatgaatatggttgtataaatatacatttaaaaaatatatcatgaacatttgtgcaactaccacacaattgaaggactggaatattaacaatagacatcttcctacgttctccagaaaaaaataccattctaaattttgtatttcttcttacttttatcattttctcagcttgctcatataactaatgaatgttaataaactacatctgtgttgttccatgtagctgtagttcattcatttgactactgcatgaaattcagttgtgtgaacagaacacagtttgtgtatacattcactttttgaaaaggcatttgggttgcatgtaatgctttcaattacagacagtactgcaatgaccatttgggtgcatgtctccaagcgtagcagggcaagtgtttctttcaagtacatagctggggtggaattgctgggtcaaggtatacgtgaacattcgactctttacaaaataatgccaaatcttgtaccaatttacactctttccaaaattgtatgcaagactctcttgagctatgtcttcaacactttgtacagtcaggcttctacatccttgccaatcaaaaagttatgagatgacaatttatcatgatatttgtatttccataattactaatgagcttgagcatttaaaaatatctttactggccacgtgaatttcttcttctgtgaaatatctgctcatgccttttggttaattatttttattcataatagttatataaacctttctatgtcgtattaattttgatttttgcacagttttggcctttgtcttctgcctttgccttggacataatgtgttttttgatatgattattgaccataacctcttatgtcatgtaggtgatattgtcatccttacaaaaccactcgtggtgtctaaaggtgatagaggtttcttaacaaccaccacgctcctggctgtggacggaacagacaagcctgaggaactgctctatgtcatcacctcccctccgcgatatggccagatcgaatatgttcactatcctggagttcccattacaaacttcagccaaatggatgtagtggggcagacagtttgctatgtacacaagagcaaggtgactgtctccagtgacagattcaggtgagccccatggaaacttttcaaaccccttctttggattaatacttacagaaaaggagatctgttaatgtgcttcactatagtaaccatttcacaaaatacatgtatcttataacatcacgctgtataccttaaatttatagaatgaaatttgttttttaaaaaaaggaaagaaaaggagaaaaaaatgagtcatttttcagctctggtgcagctgtgtttttcttttactgtcttgttgtatgtaaggtgaagccacacgattaaaatgacagaagcaaagcaagaaattagggcctgttattgaaaaatatacacagtaaacagatctttatgcaagttctgctacgaggagaaatgtgaaaagctgaggctcccagctaaagatagatctggaaaagtcatttccctctttttggagtatgtttttctgtctgacgaaaagggatttattagtaaacatttggcataaacagagactgccttttgacacaatgtgttctggtaactgtatcataaatcatgttgtcataaagtagatcatatttccccatagaaacaatgttgtaattgggggctgcgcacctgttccagaattccgtatcaaataaatcattggaatgaataacaatctggtgaaaaggcaaagatacaacattaatgaaaatctacattcatttaaaatatggaaatttgtttcaagtcacataaagcaagagccaagtccagaagatctataatctcgcagctctcaaagctggttgatcctgaggtcctggagagaaacacagatccccaggccgggcatgagaactgggaaatgttggactttgaacgaaccattgtatacaatccagttttgagttctgtcagttcagaaggaggcctggagagcactggtttgtctattgtacacccacacttttggttcctggtgcaattttcaccacgtcacaatacagtcttctaaagagcactataaaataacataaatggagcatactcctatattattcaatgggttcccataaactatcaagtatcactgtcacacccatgttcgaatatcactgtcctctatcttacttttacctatctaaattcaatatatctgctctgataaacactggttagatgtcagtaaagaggatgctgctcacctttttagcattaaaatgatttttgaaagctgatttggataatccaacaaaacaaaacaaaaaatcccagaaagctggaacgaatatcttatttttttctcttgataagtgtcccttaacaagcaggtaatcatttaattgatcaatattttaactagttcagtctttgagtgttgctaggcattcactaaaatgtgagatgtggggattccttttcaagctggctcttttgtttgagagatggagtagtgaagttaagatacaggcttgggggcaagaactgcctgagtgactcacaactctgtgacaatcatcaggttacacaacctcctgtgctcttgtttcctcttctttgaaatggaatgatgctcgtagcacctgcctcacaaggttgcgggaggtttatatgagcttatgcatgtaaagtattagtagaacaacacctggcacataggaagaactaagtaagtgttagctactactcttactgtcgttgttgttgtcattatattctttccttgacgaccttcttccaatctttacaacaccaagtatgatcttgaaggaggaaaggagttaccaagaggagcaatgattgttctttttttcctgtttgcttatgaaggctgggtgcttcttggcttaatacatttgtatcagatccagggcttttaattttacatgcatttctggaacttctagcttctttcatttcctgcttccctccgtcaatgcccacaggacagtctgctgaagacattagtgactgtcttgaagaaaccagtgaccttgctggagaacacaggactgaatgcataaagatgttcagaaatgaaggttagatattaatcgaatggtgagaataaagaacaaaacctccgtatgaaacgattggcaatactgtaaaaatttcctaatttgcatccagagaaagtcttattagatggcattttagaaatcatttatcccaggaatttctacatttctggatcctcagataattgccagagagaactacaaaatgcaaattcttgggccttaccccagagaggcaactttggtaagtccagtctcaggcccagaaatctgtatttttgaaagatatcttcaggtaattctgatgcagtcaggactagccatcaatagtctggtctagtctgttgttctgaattgttctgaggagcctcaagaatttatggaagttgaggctggggcagtggctcacgcctgtaatcccagcactttaggaggacgaggcaggtggatcacctgaggtcaggagttcgagaccagcctggccaacatggcgaaaccccgtctctactaaaaatacaaaaaattagttgggagtggtggcgggcacctgtaatcctagctacttaggaggctgtggcaagagaattgcttgagcccgggaggcagaagttgcagtgagccacgatggtgccactacactccagcctgggcaacaagagcgaaactccatctcaaaaaaaagaatttatagaagcctttttagggcctcccagagattgagattctggggccttcagcccaatgtactgatggaacttaggtgtgtgtgttgtgtgtgagtgtgtgtgggtgttgatactaaaaacagtactataaataccataaaactaaatataagaaaacaaattttttatgcttgcaagtattcagtttttagtagttaaaaggtttccttttaaatacattgattcaagttaaaaattgaattgatagaaaactagtaaataataagagtacacatagtacaggcatatggcaaaaatatggtttcaattactcaagattaggaaacaaggttttagggagaaaataaacaataaaggctgaaaagcattgatttggtgcaatcccttatttacacataggaaagctagcattgcctgaacacctgcaatgcaccagagaatgtcctggactttttttatatgttatttttcttaagccttatgacaccaccttgcgagagatgcaatagtgttcccattgtacacatgagaaaaccaaggttccaagaggcaaaggaagtcacctaaactgacataactgagtatcactgctgaatttggggctcagagctcatttccagtagaaggttctttccattatacctcgttgtaccaaaaatttgtggagaatatgcatttgtgtgaaggaacctcctcaatgtgtcattctgatatttggccagcagttttacatatttataatggaagagcctagcgtctgcccaagacccaaattttaatcttgtcatttcactaacccaatcacggactgctatgttgtttgtcaagtggcgctaaaccaaagctgaaagcctgttttaatgaaagtgtgatcatggtgctttttaaaaattaaatatatgcaaccaatctaatcacctaaatttatgttgcttgctgttaaatttggcaaggaatttggctgggtagaagagataaattctgtggcagaggattttcccccttccatttttaatgtaagctatggcagcattaattaaatgggggagtttaatagtcagattttaccttctgcaaaaatattttgtgaatcataaatttctcctgcattgtttggtgctgctggcctggaagaaagatttggcagcatgttctaggacagatgacaccgagtgattagcaagctgacttcagctgctggcagccgggtactaaaagaacatgctaatgtcctccattttgacatgccggctggactttttttttttttttttctgaggagctggcgctatttatgattccatttttatctcttaaatgccatgacagatggcagcttcttcagccaactctattgccaggcaatgcagaaagcttgaaagcaccgtggtaatggtgaaatcagaccaggcaggcaccccagtcaaatctgagagttattccccaaatttcatgagagcggtggtcatcttggctgcatctcttctcagggggatgtaacaagggaaattaaacaaaatggatccacagaaggagctgctaccaccaacttcttcacctcagaatggataccaacatagcaatggctttatggttttaaacattgagaatgtatttggaggatttaggggagggggtatttggaagaccatctgattgatcagcttttccagacatgaacagcactgaccttttttcacgtgtactgctagctttattttgactgggaactcaaccgtaaccattcattctgtccctctctctgatgatgtctctctgcctgtgagtagtttgcactgttacttgtgaaagtggaatgatgttatttgatccagtcatgtttagaaattgcatcattttcacccctggcctattagctttaggtcagcactgacagctgccttggtgtcccagataggagcgctggcctcagaaaacatatttcttactcttctgtggtctgtggcccgcgtgccctcactcccatctgtctgatggcaggctgcctgtttccaacgtgggcagatcacgatcttccagcagggaggggtttgagatggacagcctggatcataagacaactgcggtgacctcacagaggccatgcacgcatcgagtagatgtggccgtcctgagatgagctttgaggaccccgtcaggcattcttgcaattcagtctgcagggaggaaagtcagaattagatattcaagatggccgcctctgatggagtccctggcactcactcaagcttgcatttgggtttgttgctcctggtcccatctctccccttctttcttcttccttctctgctgatatttgacatacttttaatagtgcacaatgtctatagctctacaattaatgctaatgctaaaaatacacgtcctttggcttatatttgcgctaaggtaccaatggctgatttaacactctccacagagcacacttgatacagggatctggtaaggaacagagagccagtttaatgtgaaacagggtagaatgagaggtgtgaaacatatttctggagggggaaaatgggaaaaagggaacttggaggcactgagggagcacctagcctccttcctattttattgtgggtcagatgataggatctggggggaatatgaaaaagtaacagaaaaacaatagaataaaggcataactctgttctcaggctctgcctgagaaataaagcataattttatacctaaaaatgtatatcagtttacttttgaaactgtgaaggtgactaagtaaaaagtttgaagaacagacatatttttctaggttcctttattttcttttttaaaattatttttctttttttaagatgggcttttgccatgttgcccaggctggtctcaaactcctgagctcgagcgctccacccaccccagcctcccagagtgtccaagctataggcgtgagctaccgcgcctgacttcctttcctttccttcccttcccttcccttcccttcccttcccttcccttcccttcccttcccttcccttcccttccctccctcccctccctcccctccctcccctcccttccctccctttcctttcctctttttttttttttttttttttttgagacaggttctctgtctgttgcccaggctggagtgcggtggcacgttcatggctcactgtagcctcaacctcccaggatcaagtgatccttccacctcagcctccctagtagctggggctacaggcacgcaccacacccagctaaattttgtattttttgtagagaaagggttttgccatgttacccaggctgatattgaactcctggactcaagccatctgcccgccttggccagccaaggtactgggtttacaggtgtgagccactgcaccagcctcttttattttttttaataaataattgatttttataaatgcctcatgatccagtaatgaaattgcccaatttgttaaaaatatacttatcaaaggtttaattttatgaaaggaaaactgattggtttgttttgagaaaattatgtgattttgctcaatctataattctaaaggtaactgaatacctttattcaaggtgtaaaaaatgctgctgtgggggaaatgtatgaggtttcattctttacaagtcgaggtgtgtgaaatgtcaaaatttactttatttgttgtatttcacttagcaattttaactttttggacatagatttctttttctttgcatcaaatcagatatattttccttgtcaacagtcttattaactagataattagaaaactaaaaaacttcagcatagccttcaaagcaatatcagtactcagccaaactcatctctttttactttttgtctaactgccctccctgagtccgtggtcgcaggcaggctggttgactcgttgctttcacactatctaatagcttcaggtttcttcatgctcaaaaggatcaatgctcaaaccctgaaggacaagacacatttcacaaagaataaagggattgttagtcaaatctgccagatttgtaaaataaatataaatgccataccttctctagttaaaaaagaacttccaaagaaaatatacaatttatatatgtatataaaatttatacataaaaatgttatgtatagtttatacattctacgaaagcattagttttagaggtttttgtatcggtggaatagaagagtgcatcctctacgaatatttccagcaactatggtacatggagaaaagctaacaaggcacaattctgtgattatttctaagtacatttctttggtgtacagtgaatttgtcagtcccattggatagtaacgatttcctaactttttggagttttaatattgtgccttgtttgcataatttcatgatactcttaatcttattgaaataaaaattacatattgtaatgctacaaagatcatttaaatcagtgttattgtgaaattggcttcagtaggtagaatgtgatttcatgatcaatagaatcaaaagcacattaagatatcacaaacctaagactgtaagaaagattttgcttgtctcaaatgtgtatcatttcagctttctttttatagttttgcaatggtgctcaggcaccacaactcttttgtggtggattgctaaaccagaatttgttttaaactctgcaagagtagtgggtgcagggattaaaagacctgcattctagtctcagcttcatctcctacctgcccttatgatctcccaccaactttgtgaacctttctttgaagcaggaaaataatccttgtgtagcataactctcatctgtcttatagggggagaaagtgcagaagcacatgtaaaccataagagattagagcctcccgtcatattttagagttgggtggtacttaatgatcttctggtccatccccttcatttttcagagccatggaaatgaggcctggaaggggaagatgatttaagtgagattacatgtctgagaaatgtgatctgctattaagaaatttaccataaaaacgtatgagtagaatgaattagctaaattcaactcatttagcactttattgtattggcctcccagttgtcagacttacaactttagtctattacacaccaatgaagaaaaaaacaattgaaaaattataaataaataaagggggtatactcttcaaatttgtatgatgagtctcattggatgtgaaatttttatttgcgtcaaggaaccacattaagcactgatgagcctgagaaatatgattgtcagaatttccctgttccatcacatgggtctgtcattaatgttgttgggaaaatattcttgggtgtagaatggtccatttatgcattactctagtgactggtttaatgatagggatttttctgcaagatctgcccttgatttttcatttgagtcacaacacgacaataccctttagtaaaggtgtgtattgttatcatttcattccagtagatggtgacacaagaatccatgctgaaggctgccttgcctctctttaccagattcatcatcagcaatggactgcggaccgagcacggggtgtttgagatcacactggagactgtggacagagccctgcctgtggtaaccaggaacaaggggttgagactggcccaaggggccgtgggcctgctttcccctgacctccttcagctgaccgaccctgatacacctgcggagaacctcaccttcctcttggttcagctcccccagcatggccagctctacctgtgggggacagggctacttcaacacaatttcacccagcagg

SEQ ID NO: 12075 - DNA, 741 bp, Homo sapiens
gggagaagatttactatgtatttgaaaggcttccccaaaatgggcaacttcagcttaaggaggaagtggatctgaacttgctgagatacacacacaccggggcaatggattcccagaatcaagatagcttcaccttctacctttgggatggcaacaacaggtcccctgctcttgactgtcaaatcaccatcaaggacatggaaaaaggtgatattgtcatccttacaaaaccactcgtggtgtctaaaggtgatagaggtttcttaacaaccaccacgctcctggctgtggacggaacagacaagcctgaggaactgctctatgtcatcacctcccctccgcgatatggccagatcgaatatgttcactatcctggagttcccattacaaacttcagccaaatggatgtagtggggcagacagtttgctatgtacacaagagcaaggtgactgtctccagtgacagattcagattcatcatcagcaatggactgcggaccgagcacggggtgtttgagatcacactggagactgtggacagagccctgcctgtggtaaccaggaacaaggggttgagactggcccaaggggccgtgggcctgctttcccctgacctccttcagctgaccgaccctgatacacctgcggagaacctcaccttcctcttggttcagctcccccagcatggccagctctacctgtgggggacagggctacttcaacacaatttcacccagcagg

SEQ ID NO: 12076 - DNA, 8812 bp, Homo sapiens
gtgatattgtcatccttacaaaaccactcgtggtgtctaaaggtgatagaggtttcttaacaaccaccacgctcctggctgtggacggaacagacaagcctgaggaactgctctatgtcatcacctcccctccgcgatatggccagatcgaatatgttcactatcctggagttcccattacaaacttcagccaaatggatgtagtggggcagacagtttgctatgtacacaagagcaaggtgactgtctccagtgacagattcaggtgagccccatggaaacttttcaaaccccttctttggattaatacttacagaaaaggagatctgttaatgtgcttcactatagtaaccatttcacaaaatacatgtatcttataacatcacgctgtataccttaaatttatagaatgaaatttgttttttaaaaaaaggaaagaaaaggagaaaaaaatgagtcatttttcagctctggtgcagctgtgtttttcttttactgtcttgttgtatgtaaggtgaagccacacgattaaaatgacagaagcaaagcaagaaattagggcctgttattgaaaaatatacacagtaaacagatctttatgcaagttctgctacgaggagaaatgtgaaaagctgaggctcccagctaaagatagatctggaaaagtcatttccctctttttggagtatgtttttctgtctgacgaaaagggatttattagtaaacatttggcataaacagagactgccttttgacacaatgtgttctggtaactgtatcataaatcatgttgtcataaagtagatcatatttccccatagaaacaatgttgtaattgggggctgcgcacctgttccagaattccgtatcaaataaatcattggaatgaataacaatctggtgaaaaggcaaagatacaacattaatgaaaatctacattcatttaaaatatggaaatttgtttcaagtcacataaagcaagagccaagtccagaagatctataatctcgcagctctcaaagctggttgatcctgaggtcctggagagaaacacagatccccaggccgggcatgagaactgggaaatgttggactttgaacgaaccattgtatacaatccagttttgagttctgtcagttcagaaggaggcctggagagcactggtttgtctattgtacacccacacttttggttcctggtgcaattttcaccacgtcacaatacagtcttctaaagagcactataaaataacataaatggagcatactcctatattattcaatgggttcccataaactatcaagtatcactgtcacacccatgttcgaatatcactgtcctctatcttacttttacctatctaaattcaatatatctgctctgataaacactggttagatgtcagtaaagaggatgctgctcacctttttagcattaaaatgatttttgaaagctgatttggataatccaacaaaacaaaacaaaaaatcccagaaagctggaacgaatatcttatttttttctcttgataagtgtcccttaacaagcaggtaatcatttaattgatcaatattttaactagttcagtctttgagtgttgctaggcattcactaaaatgtgagatgtggggattccttttcaagctggctcttttgtttgagagatggagtagtgaagttaagatacaggcttgggggcaagaactgcctgagtgactcacaactctgtgacaatcatcaggttacacaacctcctgtgctcttgtttcctcttctttgaaatggaatgatgctcgtagcacctgcctcacaaggttgcgggaggtttatatgagcttatgcatgtaaagtattagtagaacaacacctggcacataggaagaactaagtaagtgttagctactactcttactgtcgttgttgttgtcattatattctttccttgacgaccttcttccaatctttacaacaccaagtatgatcttgaaggaggaaaggagttaccaagaggagcaatgattgttctttttttcctgtttgcttatgaaggctgggtgcttcttggcttaatacatttgtatcagatccagggcttttaattttacatgcatttctggaacttctagcttctttcatttcctgcttccctccgtcaatgcccacaggacagtctgctgaagacattagtgactgtcttgaagaaaccagtgaccttgctggagaacacaggactgaatgcataaagatgttcagaaatgaaggttagatattaatcgaatggtgagaataaagaacaaaacctccgtatgaaacgattggcaatactgtaaaaatttcctaatttgcatccagagaaagtcttattagatggcattttagaaatcatttatcccaggaatttctacatttctggatcctcagataattgccagagagaactacaaaatgcaaattcttgggccttaccccagagaggcaactttggtaagtccagtctcaggcccagaaatctgtatttttgaaagatatcttcaggtaattctgatgcagtcaggactagccatcaatagtctggtctagtctgttgttctgaattgttctgaggagcctcaagaatttatggaagttgaggctggggcagtggctcacgcctgtaatcccagcactttaggaggacgaggcaggtggatcacctgaggtcaggagttcgagaccagcctggccaacatggcgaaaccccgtctctactaaaaatacaaaaaattagttgggagtggtggcgggcacctgtaatcctagctacttaggaggctgtggcaagagaattgcttgagcccgggaggcagaagttgcagtgagccacgatggtgccactacactccagcctgggcaacaagagcgaaactccatctcaaaaaaaagaatttatagaagcctttttagggcctcccagagattgagattctggggccttcagcccaatgtactgatggaacttaggtgtgtgtgttgtgtgtgagtgtgtgtgggtgttgatactaaaaacagtactataaataccataaaactaaatataagaaaacaaattttttatgcttgcaagtattcagtttttagtagttaaaaggtttccttttaaatacattgattcaagttaaaaattgaattgatagaaaactagtaaataataagagtacacatagtacaggcatatggcaaaaatatggtttcaattactcaagattaggaaacaaggttttagggagaaaataaacaataaaggctgaaaagcattgatttggtgcaatcccttatttacacataggaaagctagcattgcctgaacacctgcaatgcaccagagaatgtcctggactttttttatatgttatttttcttaagccttatgacaccaccttgcgagagatgcaatagtgttcccattgtacacatgagaaaaccaaggttccaagaggcaaaggaagtcacctaaactgacataactgagtatcactgctgaatttggggctcagagctcatttccagtagaaggttctttccattatacctcgttgtaccaaaaatttgtggagaatatgcatttgtgtgaaggaacctcctcaatgtgtcattctgatatttggccagcagttttacatatttataatggaagagcctagcgtctgcccaagacccaaattttaatcttgtcatttcactaacccaatcacggactgctatgttgtttgtcaagtggcgctaaaccaaagctgaaagcctgttttaatgaaagtgtgatcatggtgctttttaaaaattaaatatatgcaaccaatctaatcacctaaatttatgttgcttgctgttaaatttggcaaggaatttggctgggtagaagagataaattctgtggcagaggattttcccccttccatttttaatgtaagctatggcagcattaattaaatgggggagtttaatagtcagattttaccttctgcaaaaatattttgtgaatcataaatttctcctgcattgtttggtgctgctggcctggaagaaagatttggcagcatgttctaggacagatgacaccgagtgattagcaagctgacttcagctgctggcagccgggtactaaaagaacatgctaatgtcctccattttgacatgccggctggactttttttttttttttttctgaggagctggcgctatttatgattccatttttatctcttaaatgccatgacagatggcagcttcttcagccaactctattgccaggcaatgcagaaagcttgaaagcaccgtggtaatggtgaaatcagaccaggcaggcaccccagtcaaatctgagagttattccccaaatttcatgagagcggtggtcatcttggctgcatctcttctcagggggatgtaacaagggaaattaaacaaaatggatccacagaaggagctgctaccaccaacttcttcacctcagaatggataccaacatagcaatggctttatggttttaaacattgagaatgtatttggaggatttaggggagggggtatttggaagaccatctgattgatcagcttttccagacatgaacagcactgaccttttttcacgtgtactgctagctttattttgactgggaactcaaccgtaaccattcattctgtccctctctctgatgatgtctctctgcctgtgagtagtttgcactgttacttgtgaaagtggaatgatgttatttgatccagtcatgtttagaaattgcatcattttcacccctggcctattagctttaggtcagcactgacagctgccttggtgtcccagataggagcgctggcctcagaaaacatatttcttactcttctgtggtctgtggcccgcgtgccctcactcccatctgtctgatggcaggctgcctgtttccaacgtgggcagatcacgatcttccagcagggaggggtttgagatggacagcctggatcataagacaactgcggtgacctcacagaggccatgcacgcatcgagtagatgtggccgtcctgagatgagctttgaggaccccgtcaggcattcttgcaattcagtctgcagggaggaaagtcagaattagatattcaagatggccgcctctgatggagtccctggcactcactcaagcttgcatttgggtttgttgctcctggtcccatctctccccttctttcttcttccttctctgctgatatttgacatacttttaatagtgcacaatgtctatagctctacaattaatgctaatgctaaaaatacacgtcctttggcttatatttgcgctaaggtaccaatggctgatttaacactctccacagagcacacttgatacagggatctggtaaggaacagagagccagtttaatgtgaaacagggtagaatgagaggtgtgaaacatatttctggagggggaaaatgggaaaaagggaacttggaggcactgagggagcacctagcctccttcctattttattgtgggtcagatgataggatctggggggaatatgaaaaagtaacagaaaaacaatagaataaaggcataactctgttctcaggctctgcctgagaaataaagcataattttatacctaaaaatgtatatcagtttacttttgaaactgtgaaggtgactaagtaaaaagtttgaagaacagacatatttttctaggttcctttattttcttttttaaaattatttttctttttttaagatgggcttttgccatgttgcccaggctggtctcaaactcctgagctcgagcgctccacccaccccagcctcccagagtgtccaagctataggcgtgagctaccgcgcctgacttcctttcctttccttcccttcccttcccttcccttcccttcccttcccttcccttcccttcccttcccttcccttccctccctcccctccctcccctccctcccctcccttccctccctttcctttcctctttttttttttttttttttttttgagacaggttctctgtctgttgcccaggctggagtgcggtggcacgttcatggctcactgtagcctcaacctcccaggatcaagtgatccttccacctcagcctccctagtagctggggctacaggcacgcaccacacccagctaaattttgtattttttgtagagaaagggttttgccatgttacccaggctgatattgaactcctggactcaagccatctgcccgccttggccagccaaggtactgggtttacaggtgtgagccactgcaccagcctcttttattttttttaataaataattgatttttataaatgcctcatgatccagtaatgaaattgcccaatttgttaaaaatatacttatcaaaggtttaattttatgaaaggaaaactgattggtttgttttgagaaaattatgtgattttgctcaatctataattctaaaggtaactgaatacctttattcaaggtgtaaaaaatgctgctgtgggggaaatgtatgaggtttcattctttacaagtcgaggtgtgtgaaatgtcaaaatttactttatttgttgtatttcacttagcaattttaactttttggacatagatttctttttctttgcatcaaatcagatatattttccttgtcaacagtcttattaactagataattagaaaactaaaaaacttcagcatagccttcaaagcaatatcagtactcagccaaactcatctctttttactttttgtctaactgccctccctgagtccgtggtcgcaggcaggctggttgactcgttgctttcacactatctaatagcttcaggtttcttcatgctcaaaaggatcaatgctcaaaccctgaaggacaagacacatttcacaaagaataaagggattgttagtcaaatctgccagatttgtaaaataaatataaatgccataccttctctagttaaaaaagaacttccaaagaaaatatacaatttatatatgtatataaaatttatacataaaaatgttatgtatagtttatacattctacgaaagcattagttttagaggtttttgtatcggtggaatagaagagtgcatcctctacgaatatttccagcaactatggtacatggagaaaagctaacaaggcacaattctgtgattatttctaagtacatttctttggtgtacagtgaatttgtcagtcccattggatagtaacgatttcctaactttttggagttttaatattgtgccttgtttgcataatttcatgatactcttaatcttattgaaataaaaattacatattgtaatgctacaaagatcatttaaatcagtgttattgtgaaattggcttcagtaggtagaatgtgatttcatgatcaatagaatcaaaagcacattaagatatcacaaacctaagactgtaagaaagattttgcttgtctcaaatgtgtatcatttcagctttctttttatagttttgcaatggtgctcaggcaccacaactcttttgtggtggattgctaaaccagaatttgttttaaactctgcaagagtagtgggtgcagggattaaaagacctgcattctagtctcagcttcatctcctacctgcccttatgatctcccaccaactttgtgaacctttctttgaagcaggaaaataatccttgtgtagcataactctcatctgtcttatagggggagaaagtgcagaagcacatgtaaaccataagagattagagcctcccgtcatattttagagttgggtggtacttaatgatcttctggtccatccccttcatttttcagagccatggaaatgaggcctggaaggggaagatgatttaagtgagattacatgtctgagaaatgtgatctgctattaagaaatttaccataaaaacgtatgagtagaatgaattagctaaattcaactcatttagcactttattgtattggcctcccagttgtcagacttacaactttagtctattacacaccaatgaagaaaaaaacaattgaaaaattataaataaataaagggggtatactcttcaaatttgtatgatgagtctcattggatgtgaaatttttatttgcgtcaaggaaccacattaagcactgatgagcctgagaaatatgattgtcagaatttccctgttccatcacatgggtctgtcattaatgttgttgggaaaatattcttgggtgtagaatggtccatttatgcattactctagtgactggtttaatgatagggatttttctgcaagatctgcccttgatttttcatttgagtcacaacacgacaataccctttagtaaaggtgtgtattgttatcatttcattccagtagatggtgacacaagaatccatgctgaaggctgccttgcctctctttaccagattcatcatcagcaatggactgcggaccgagcacggggtgtttgagatcacactggagactgtggacagagccctgcctgtggtaaccaggaacaaggggttgagactggcccaaggggccgtgggcctgctttcccctgacctccttcagctgaccgaccctgatacacctgcggagaacctcaccttcctcttggttcagctcccccagcatggccagctctacctgtgggggacagggctacttcaacacaatttcacccagcaggatgtggacagcaagaatgtggcctatcggcactcaggaggggactcccagactgactgctttactttcatggccacagatgggacaaaccaaggctttattgtgaatgggag

SEQ ID NO: 12077 - DNA, 699 bp, Homo sapiens
gtgatattgtcatccttacaaaaccactcgtggtgtctaaaggtgatagaggtttcttaacaaccaccacgctcctggctgtggacggaacagacaagcctgaggaactgctctatgtcatcacctcccctccgcgatatggccagatcgaatatgttcactatcctggagttcccattacaaacttcagccaaatggatgtagtggggcagacagtttgctatgtacacaagagcaaggtgactgtctccagtgacagattcagtagatggtgacacaagaatccatgctgaaggctgccttgcctctctttaccagattcatcatcagcaatggactgcggaccgagcacggggtgtttgagatcacactggagactgtggacagagccctgcctgtggtaaccaggaacaaggggttgagactggcccaaggggccgtgggcctgctttcccctgacctccttcagctgaccgaccctgatacacctgcggagaacctcaccttcctcttggttcagctcccccagcatggccagctctacctgtgggggacagggctacttcaacacaatttcacccagcaggatgtggacagcaagaatgtggcctatcggcactcaggaggggactcccagactgactgctttactttcatggccacagatgggacaaaccaaggctttattgtgaatgggag

SEQ ID NO: 12078 - DNA, 24201 bp, Homo sapiens
cactcaggaggggactcccagactgactgctttactttcatggccacagatgggacaaaccaaggctttattgtgaatgggagagtgtgggaagaacctgttttattcaccattcaggcaagtatgaaaaacacagttcatttgccagagatgtgaaaacagtgacatcgagaattttttttttttttttttttttttgagagggagtctctctctgtcacccaggctgcagtgcagtggcgtgatcttggctcacttcaatctccacctcctgggctcaagcgattctcctgcctcagcctcctgagtagctgggcctatagtcatgtgccaccatgcccagctaacttttttgcatttttagtagagacacggtttcaccatgtcagtcaggctggtggcgaactcctgacttcaaatgatccacctgcctcggcctcccaaagtgctgggattacagtcgtgagctatcacgcctggccaagaactattttttaatttcttttcctctttcattcaagtacagattatgcatctacagcaaaacagcaatattaatatgaatgaaagagatatggtcccctcataggtgctaatgactgaccgtgagtgttgatggtagcacagaaaggagcaaaagccacacgctttggagtcagacagacctagctttgaatttctgctttgcaatgtattagccgtctgaccttaaagagttctttaactcttctgaatctacttttccttctttgaaaaacatgcctacagcattgtggtgagaattcagtaggattaggtatccaaagcagtagtatatggcctgaaacatatttgatgttgaaacttacaaggcagcatctttacactattacacatataataatgatgagggtaataatagcagcaattgcagttcctttagtgttaactgcaagctagacccactccacataaatcttatttgattctcataaaactcatatgaagcaagttttgttatttacattttatagatgagggtacaagttcaggagttaaataatttgatcaaatacacacaaaggcctcaagtctttctgatcccaaattctgtgtcctttctatgacactacactgccacatttgttgactgttacaaggattcctggagggcataatgtgtttttcttttttaagtcaaaacacatcaagtatattctggctctcaaacccttgaatctactctccttggaagtagttcaccctcttctacacactcacaccaaacacaaaatagataaaatttatctctcacttcagaatactttctgactagtaaaatagttacatttttccttgctctgagagagagagagagagagagagagagagagagagagagagagagagagagatttattttaggaaattggctcattggctcatgcaattttagggcctggcatgtccgaaatacacagggcacgttggcaggctacaaatttcagcaggagttaacgttgcaatctttagcccaaaggcagtctggaggcaacattccttcctttttggggggcttcagtcttttctcttaaagcctacaactgattggttgaagcccacttgcattatggagggtgatctctttactcaaaatgtactgatgtaaacgtaatcccatctaatacacaccctgcaaagttgacacatgaaatgaagcctcacagactcttatctatgagggaagtcttgagatcatagagtggatgctggatgagtccttggcagtcaggaggtccaaaaaatgcaaagaaatgataatgcactgggagaagaaagaagatattgacatcgtgaacacagtaagaagcactttgtattaaaattattgtttttatttttatcatatgttttaattgatcttagtcactttcccttttcagtctgttagtgtcttttttttattcctaactcccctaacctaggttgataccagtctctgtactgtccaaccagggatacttttctgggtctctttggctgcaaattcatacgaattctaaattctgagtgcagatgttagagttccttcctacactccatagcacagatggaaaagaggatggagattggggaaagtaccagaacttgaatcaggtctttcccaacaccaacactcatcttaaagagcatggctattgtaagagagttatctattggaagttgtggaatttactgataggaaaatgttggacatatattgtaaagtttctttttttttgtcaaaagtataaggctttccttgcaaaaaaaaaaaaaaatcattacgtgtaaaaaccccacaaggtaagcttcaaaattcctcccataattccccagaaccctcagtctctttgagcagagaagtcaagaggctttagaaagtgactgaccccaccagcagtgtaggagagatgacactcagtgtcttgccttcaagagctttttctgccaagacaatatggatgttgatcaccgttgagtgataaactgtcccaaataagtctcccaactatgggtaaactattcttctggtggtacctgagtaattgagggcaaaactgctgcaacacacaggtgtatttgactgataccagcaggcacaacctgacattcatttggtaggaaatcttttctgtctgaccaagattattgcaactgatgcaacctgtacttctcctttaaaggggtcaggtgagcgagaaaaatgtgatgccattgctttctgtgcattttctgtaaatacaacacaagttatcaggggacagagctttctttaaaaaaaaatcttgcaacccaatatttaaaaatgcttctgggatactaagccagaagatctacttttgacaaagctagaagttgaataagatctaggatatattttaatgtgaccagagacatgacgggaccgtgttgctagagtttagatgtccttttaaaaacacatgatcacgacaggcatttattacttttgtaacactttcatttttaaggaattataacatccaaaaccaaaataaaacaaccatctacattcaactattcatttagtatcaactctgggtatttcttatatggcttagaagtactttaattttcctcttcttccactaaccatctctcttactggccacttggttgtgggagcttcttccctcacgggccacaatgacaatttaatacccaatctcattgctttgaaagttgccacccatactcttcaggagaggagaagaatgactgtgacttttgaaaatgtcagttgctttttcagtttataaaataactatgtattgtaaataattcataaactacaagaaaaaaaattcttgacaaccataccactcaaaaacctattgttggtggctttcttttattttgttcaattagaaatgggatgatattatatatactattttttatgcatattgcctgtttccatcttcatgtgttatgaacatttccttatgtcattaactattcctgatagttcttgataactaatcatattcctgataacatgatttttaaaggctgcatggaactcagtctcaggtcgagatggtttataaatcccctggtggacttttcattccttttgtaaattgctattataaatagtattttggtgaatatatatctaatcatttttgcatacatatctgtttctgcaagatacagaaaaattttcactgttttgcacccctaccagcaaaatataaaaatatctgtttcttcacatatttatcatcatgagttataattatttctgtttttttttaagaatcttgccaatttgagaggaaaaaatggttggttgtgacaaaatttctcatgaaataaacagaggaggagttgtaatctttccccaccccaaaagaaatgaacacatttgtgcaaatgctcccagatttttgcctatgtctatacaaacattatgtatagataaatatatatttttaacaaaaatagtattataattatattcgaattctattctgcaacttgctagggtttttcagttaacacaaaattgtggaaatttttcatcatcaattcattttctcccttattcttttgaatagctacagagtagttcattgtatcataatacacaaaaatatacatggtcttatcattgacaagaattctttactttgctagggcaaactaagatttacagtagtatcaggttggtgtaaatgaaattaagaaccgagagattaggagtgaggggaatgaagattcttgtacatgttttctagtatcagtggtggatctgttctaatccatccaaacctgctccatccataacctacaacagtcatcttgcaaatgcaagatgcactgagctccgtacagactgaacgaggtcctttgttgtgtttgaacctacagtgtaggttgtgaagatgtcatccaccatcttcacaaatctggtccacctgttcagctacctggctctcatcttcaatgaaagaaatatgcaaatgtctagaaataatcacctttcactttttccttactgaggtatctctatttttattcaacatttttgccagttgaaaaaagacatgccaaaaaaatttctatatatttgtaaaccctcacaattttgtgtctgtaaatcactaaataccaggaaaataggagaagttcttctgtggagttaacatgaagtctgctctagaattcttgggtcaattttagtgtattcatttaatagacattccctgggcttctattatggttcaggcactgtgccaagtgcagggaatccatggcggtgaaagacctgacgcctgccctctcggaacttgtatcctaagtggcagtcaagcaatagacaaattgataaagtggagtcaaggtttacagtggaaaattggcctctgttccaagcactgtgatatttgctgaggctgttgtgaacaggactgtctttagcaggaatccactagtgaggagtataaggaatccaaaacgtgggacagtgtgtcattgttgaaccaataaagcccaacgttgcatgggggtgaggggcctttggacaacattttatgtcattgttgatgatccaggtagaccaattggacaaaacagctcctcgtatcacactcttgcattccccttctcaagtggggctcctgaaaaatggctgctacgggatttacatcacttcccgcgtgttgaaggcatcagaccctgacactgaggacgatcagatcatctttaaaattctacaaggcccaaaacatggacatctggagaacacaacaacaggtactggcctccttaatccttacaattgccattttaaaatacccagtggctggcagggctagagagtaatttaattaagtgcaggcccatttggtaaacactccccagggcttactgatagatgcagtttataaatcaatattgctcctaaagagggtttgaagctgagccttcctaaatttatcctgactggaagaaccaaatactgatatacaactgtttatttatattttttttctcaacagctgattataatatattcaaaggaacataatatcaggaccaaatttcctatttgtgactaattttttattctgtcatgaattctaaatgactctaaatgatgtcagatctttttttaaaagttcttggtttttttcctaatggattctctggattgtatattatttctactttatgagcacaatgatcataatacatcattaaacaggatggcaccaagttacagatttttattactgtatctttctactctccttctctttattttcatttttttaaggcaaatatttctgaagcagtcaacttaatgcctaatttaagctcgctgcatttgagttttaagatagttacagtaatgttaatttcttgttttaaaatgtactttagctgttttttaaagctgtgtttaaaataaaatagccatacaattttattagcttttatttaatgttttgtttgattacccatgatattcatttatttctttttttaggtgaatttatccatgagaaatttagccaaaaggacttaaacagtaagactattctttacatcataaacccatctttggaagtaaattcagataccgtggaatttcaaatcatggaccccacagggaactcggccactcctcaaatgtaaattctcttgcttattcagtagtcctatatgttacatccataatgtatctgaatattaggaaagtgaaatgttctttttaaaacagaacccaagaagataaattaatagaccatttcacaagctcatggaatttattttggagaatgaattttctttttattactgcttgaaaataggaaagccagtagctttacagagtacagaaacattaaaaagctaagttgacgttcatattatgcatgtcaaggtacacacttttatacacagggagggttctgtcttaccaattcactagcatccaacactgagtttgcaggttcatgtagcaattgtgcagcaagaggtcactctaggaccgtgttagcaactatagccttctaaaatatctgcagtcggggaaatgaggtagtcaagaagagttagccaaacatcttctctttctcttatgaagaaaattacaattacttgacagtatgtttataaggtgataaacttatcccatgtaagacaaatataatgtaaagaggaaactagactttggaaggtatataaagggtatgaccctcaaaatagcaagagtaacaaatcttcaaaattaacgagattaacagaccacagcaatttcactgactgggtccctactctagacttttcttgaatgtagaccttgaatatcttaccagctaacagatagtcatagaaaggtcggtcagagtccagttattctggtactgtgctgttttttgtttgtttgtttgttcattttgtttgtttgtttttgataccctcccagaaaccccaaagaaaagttgttcacttatccttgttttagtagtcaccatatcctagtcatactaagcatcataagtgatacagctctgtgctctgttatactccttttatgatggagtatagattaagaaaagaaagctgagaaactcctctgcagtcttcagaattcttgcattttcttttggatcctgaattgtagttctaaaatctgaccagcagaggtcacagtagtcattgtcagaaaaaagctagcctccttttcttagcaaaacacattcccagcgtcccactccgttgcctcgataaaatgcagagcctggcccagatttattaactccacagacttttatcgagtggctactatatgccaggtgcacagtactaggagctggggaataggttagagcaaagtagacctggcccgtgatattaaaatgtaatctcgagattacaaaatgtaaaacatatgacctccacccattaaactgtctttgcctaagacaaataattcccaggatcacaatctttatgggaaaatatgtcaagtacttgcaatgtcagacaaatatcttccaattctcaagaaaatgtaaaaaaaaaaaaaaaaaacctgctccaaaaatgttaatacgtggacttcactttttttttttaacattttaaaaataattcaagtaagaaaacataggaatgttgatcagacttgctactgacctaatgctcacctcttgtcctccatgtgtgagcgcagtgtagctgacagaggattttcttcccccagtaatgatgctaggctgatactgcttcacccatagcccctttcaatctttgtcactatcaaggacattgcttttggaagatgatttatatttttaaatatactctcaaattcatatgagaattacagcaaaatttgcttaatttaattataaccttaaatgaggccatttaaatatcctcctgcttttgttggctattaactttcatgtgtctgtgctggagatgtttccagttcaacttgacgtaatttgttcatttgttcatgactgaacaaaatgctgtggcatatgcctaccaaggggtaatatagagagaagttttatttggttctgacatatattaggctattttctttataagcgatgggggggtaaaattactcagcatttatcatcatcatttttgaacggtatagttgtcctcaaccccatttgtaagcagatgttattggaactaggtgcacaattttccagtaaaaagcaaggttatgaatagtggttcatcttcccaagacagccaggcagaacgtagttacaggtacaatataaattacagccatttgcaatataattggtgtttgctctatttcattgctattcatttaatcatcagaaccacctatgagtcaggtaccatcataatctgaaatttacagatgagaaaactgaggacagagctagaaagtgacttttctaagtggaaatgcagctttagagtgcatgatttttctcagcacactgaagaacttcttgcccattttaaggactgtgctaatctggcctgaagggaatggaacaccagacttgtcttcttctttctcttcagacattggccacccaagcaagaaagaaggaatacttactcatataggaccttaaagttcagtgggattttttaacatgtacattatagatctctatattagtgtgcacttcgtatctaacacactagaatttatactatagataataaaccaccgaacttggagctagaggacaaggtttgagctttggctctgcccttcatctagtaactgttcaagccttagttatctcttctgtaaaatgggagcgatactacaatttgtttagaaaaacaaaagaaatgtgtaacgtatatgaaagcatcttgtgtatttaaactccttaacaaatgcaacttgtggtgattactgttgtagttaattcatgtaggtacaataattgactgaagaagtatcccggaaacatttggtggattagaaagcctgcctctaattagaaattgatcctgggatgaatcacaaagtgaacagtcaatatgcatattaatcaatgagctaaacgctgtggaactttgtggtgttctttggcttagacaggattaatagattcatattccccatatttgaaggggtgaaacctctgtgataaagctcaagggactgcggggtgccatctggaacagaaatggacctgttttagagcacgggaaggacccatgttcagtggaaaattcagaatcttgactgttggtcagttttggctattgcaggattcctgtggagtcctgaaggatgaatagatgctccactctaaaaagcattaggaaatgcttgtttcgtgagattcatcaagttactgccagctagctagcttgcgtgcttgtttaactgcatcacatcctggaatcatcgagatgtgcgtgtggattgggaatctctcagaaatgaagcctacgcagcaaacctcaacccaactgggctatagaatcacctctctctacctgccaccccacacacaggcagaatagctcagggaaccaatttttcatggaatgcatctgggagtcactttattgtaaatagaaattattttataatgctgatatccttggaaatttgcgtaaagatttagatttagctaagtgcctacatttcaggcactgtgctaagtgttttcatgagttgtctaattttatctgcaaaacacaatcctctgaggataaggaaataaagctcaaggcttttaagtaattatcctgaagtcactggagagtgaaccctgacctccagacctaagtgagtgcgcatcttattgcctcaccccctggctgcaccccttgacaagcttgtgcctgttttctagtccaagttgaatctccaagatgatccgcagaagccccaaactaagttacacaggacccacatcattcatgaaaagcacttttgtggaccacagaatgtggccaacttctgaccaaagttgttttcctaatacagcttctacgtggacctctttcttgtgcccactggagaaaagtgaacttcaaaagcaatgttgaatgcagaagtctttgataattcagtgactgtttctccggttctgcactctgattcttcacctccctctggcaactcacattctaactgttctgttgtccatttttggctttaaaagagaagggacagaagactaaaaggaatttccatcaggcaaacgttgcaatgtttagcagcttttatgaaacacctgataggggaaggtgtttggctagctaatacctgcacattacctgcaagccaggagttaaggtttttgtcttcagactagatcttaggaaagcacagaggaagggaaggaaaatagcatttattgggcacccactgtgtacaggtgctttatacatactaactaattttaattttaatcattttacatgagtgtaattctcctcatttttaagataatgaaaaccgaggcccagagagactgagtaactgaccgtaatcacacactaaatcacatactaatcagtggttacaaggtgtgcttgattctaaagcacttgttttgggtgcacactatgctgcctcttggctaaacactgtttccccattatcaagagaaaaagagaaaaatgaaaacacaggtgttcatagcattcgattacggagtttaatagcatcatctatgaattgagaagtcttagattggatacttgaaaaaatatttttttaacattttcaggaattcttgtcacatgctacttgattataaatgaagatatagttataaggatagtaatttaatcacaattttagcttctgtaaaccttttgctgagaagctcaaaatacttaatgagaattcatgaaggttcacttaacccctttgaagtacagacttatcattattgcattttgtaataatgacattattataggaagaaaggaaactgaggcatagacaggctaaatatctttttcacagactcttgttaacctggattaatgccccaattcctaaactggtgatttaactccaggtatttctttcagcttcttgtttcatcataaatgaatcaagtagctagaaaataaaatatcagaaagaacatatttattactccaggaccgggtgtctcaacattggcactataggcattttgaaacagaccattcggtgtcacaggggagtctcctgagcactgcagaacattcagcagcaccccaggcctctctcagctgaaggccagcaccatcctcttcccagttgtggcaacgaataccatctccagaaaatgccaaatgttaagaattacacgcatgccttagaaaatagcatacatatgttttaagaaattatgaattatgttagaatgctcatttatcaatgccatctttctctctatgctaataaagcctaacaatagtcaaagaatccagaataagtcagggctagagaaaacatgtgaggatcatctagcctagcaattttttccaagtgtgtgacagatgatgttagtaaggttggggagaaaaatattttcgatggttgtattagtctgctttcacactgctaataaagacatacctgagactgggtaatttataaagaaaaagaggtttaatgaactcatagtttcaaatagttggggaggactcacaagcatggcagaaggcaaaaggcaagtcttacatggtggcaggcaagagagaatgagagccaagtgaaaagggaaacccctcgtaaagtcatcagatctcgtgagacttattcactaccacaagaacagtatggtggaaaccacccccatgattcagttatctcccaccaggtccctcccacaacatgtgggaattatgggagctgcaattcaagatgagctacaattcaacatgtggggatacagccaaaccatatcaatggtcaacttagctcaggagacagtgggataaacaagattcattcattcagttaacagatatttaatgagcactcaccatgttttagatgctctacaagacacctgggttatcacaatgaaccaaagacctgtgcttccttggagcatacataggatctaaatcaatgtgatagcatgcttgctgtacgtggtacatgctctggaaaaatgaaaaacttgaccaggagcagggggatcagcaagtgctgtgtttgggaaagacattgtgattttaaattgggtgtttaaacaacatttcctttacctgactgcttagagctggtgagtgacagagggacctgaagcctcacaagttcaaatccaattttatttccactgctccatgccatgtcttccacttacaacagtggttttcagggatccgaatttatcttcacattgaaccagcttttgctttcttttttttgagatggagtcttgctctgccgcccaggctggagtgcagtggcatgatctcggctcactgcaacctctgtctccaggtgaaccagctttttctattgtgatgaacacattaaaaccgcatatggaagaagttctcaagtgggggtgacttttctcccaaggagcatttgtcaaggtcccgaaacagttttggctgtcgtgactggagggaagtggtgctcctacatctaatgcgaggaggacagaggtgctgctaaacatcattcccacacaggacagcctcccgcaacaaagaattgtctggtccaaaatgggtgggaaagcctgacttagaggcttagggagttttcccctcctgctaaatgacttgaagcgattgccacatgggttacacataaaatgtgtccatggcatacagttctgactgtaaaatgagcgtcactcaatggtgacaggaaactggaagcactgttaaaatgggaagatatgaaccaatccttatctacatgacacctacacatctagaactttacgaatttctctcatgggctcctggatctggacatttacatgatgccaggcatatagctgtgtggcttcttgcaggcaaaattcccaagtgattgactacatctcttatttttcttccaggtgtttgtgtacagtttaagcaatcacagtctctgcgtagaaagatcttctcaaatatactactgcaaaaagcaaaaaaaaaaaaaaaatcacattcaaaacatatattgtacatattctgtgggtatgcaggtcctttgctatttagatatttttctcaaaaatatatagcctggcttaaatttcacggcttttcaatagctctttattatttgtagcgaataattttaagaaaataaaatagagcattgtgtaatgaccaccttgacctataaacgttatgcagcattcaaatggtgcatcagggaaatgcatgcacattcccaaacagtaagaccctttataccttgaagctgaacagccctctgaatggttcccttctgaatttagatcagaaatcaaattgcatttagcttttcgccttgaggtcaccaggatctacagaatgacattgatggatttttacttgtcatggttagcattagcaatggatgaattctcagaagaattggacattgaaactcatttgaaccctactgatggctgaaatccatgcaaatgtatttgtttcattctttcccactgtcctcctttccttcccatttcatctttctctcttttcccctaatccatcttgctgactttttttttctttctcattcaactggatccttttgggattctttgcaacatatttctattggcatttatgatatccttgttgtttgttatcttgtaattctttaggcacacactaatccctcctatctgtgggagatatgttctaagacctccagcagatgtctaaagtgcaaatagtattgaaccctatgtacactgtgctttttcctgtactgcacatacgttgctaggataaagtttaatgtacaagctaggcacagtaagagattaataactaataaaatagaacaactatcatgggatgccagcatcactactcttgcactttggggccatgattatgtaaaattagagtgacttgaacacaagcactgtgacactgtggctggcagtcaatctgataaccaagccagctacagagtgactaatgggcaggtagcatctactgtgtggatgtgctggacaaagggatgattcttgccccaagtggaacagcaggggatgatgtgagatttcatcacactactcagaacagcatgatgtttaaaagttatgaattatttgtttctgggatttttcacttaatattttcagatcacggttgaccacaagtaactgaaaccttcagaaagcaaattgtgaaaaagagggattaccgtagtcatttatttctgtttcttgatctgtttcatgcgagatttaaattcagttgcatcagagacccataaagtttccaatttttttaatacaaggatcctcttttcttgtttaaaattctattaatatgaagtagcaataaactcaaacaataaattttaaatctgactgaataaacaggtatgtttatatagattcatgagcccctgtaataattccatgctcttaccctacccttgccccctagcccatgatgctcagctatgaacctacactgttgagtttatctggctcgtgagcttaatccatagaacgtgattatgacacatgatcagtgtggacacagtggttatttgaagacaaacttcctccctaatatgaatggccccaggaaagcctggagagtgtgtgaaatatgtgaacacatgttccatatggtggcacccagaatttctagttccacaaaaaaagaaagaaattataataaataaacttaaaagtaaagaggaaagagtctaaatctgactagaggtttgggaagtacaagtaaggcaaccactaaggattttgtaaatctagaataaaaggcaactgaataaaaaacaatggaggtgcagttaacaatcgtagtgaaggttgcttgtgtcttttatcctgctctatagtaaggttacagatggcaaaaaaaaggcaagacctcaaaaaggaaaatgtttctgggtaaagataaaaccgtattgctctgcttgagctcacaaaagagtcgcaaagaacttcagttggggagagaaatggtagaggttggatggaagatttggcattagatttatgcttgaatttcatctctgctattagctttgtcatgactttttgcctttaagttagttacttaacctctctgaagcttgtttgtctgtttgtttttgaaaaaaaatgttcctctctagatgaagattaaagaagacagtttccaccaaatgttggactcactaaatatattgtggaaagaaagactatcctctatttctcaggtttatttagttatatagttgcatccaagcctcataccagtagagtcctttttttatgcacagaaagagaaacaaataacacttatgaaacacatgtacattttaattcccaagcacatcctcaaaaatattttgttattaaactgaacccaagttcagagaatatctctgtctggaattgttcttgttgtaccaattatccttatctaaatgataagatagaagacttcctatcagtgtcttttccaaaaaggaatgtctccttgaacttaacaactgctggttcctttcccttcaaaacattcacgattgagtccccttttagttgtaaatatctgggagacattcagcagccttttaaccttagattcttcatttgtgaaatggaattctaatccttgctctgtctaccttacagggttgttgtaaggatcaaatgagataatgttagtagacattctttgtgaactaaaatgtgtcaaataagtcttaaggaatttccatcactggtgtaggttgatcaaccacgtttttccactagtccgctcagcagagaatccctataggcatatactatgcattctcatgatttctcttttcctttcacacacagtttggaactgaagtggtctcatattgaatggtcacagaccgaatatgaagtctgtgagaatgtgggtttgttgcccttggaaattatcagaaggggatattccatggactcggcctttgtgggtataaaggtaatgactctgaaatgtaaattatcaagctaaaacttatgttgttctttggtgtctttcattatattttttttagaaaaattcagagtgaccaaggaaatttcaaattgcagggagatcccactattctgaggattctaagcacaaaacctccttggccctccatccatcatctaagttcataaactctgagatatgattttttagtgtacgtgttgctgaagctagcacaagagatattattattattattgttattttgagacaaagtctcgctcttgtcgcccaggctggagtgcaatggcacaatctcggctcacagcaacctccacctcccagattcaagtgattctcctgcctcaggctcccgagtagctgggattacaggcacctgccaccaggccctgctaatttttgtatttttagtggagacggggtttcaccatgttggccaggctggtctcgaactcctcacctcaggcaatccatccaccttggccttcgaaagtgctgggattacaagcgtgagccaccttgcctggctgagatattaatttttaaaatccatttttaattttgaaagctgttatttgtttctatgaactctttagactttgaggttttatttcatagggagctatattcaactttgtgaacttgggctgaactctgctttagaaagagatgttgtatgcaagacattctgtggggtacccagagcaaatttcagtcccaagaggctttctcttagtattcacctcagtcacttcccatgggctcagttgatgaggcaaataggcagcttaaacccatctatcttaagagttgtccaagccatacaaaattaggagagcatatactaatacaggcaccctgaaatatgaagaattttcagttaaccacttctagatcagtcaacttgctatttcttttcattgatgtgacccatgaagcacaacctatggcttctagaattgaagaattttttttaggagtcgttataacaagagcgcttcaagagaatgagagcatgaaacacttgtacacactaatgatggagaatgagctgtaaagactcccccccaccccatccccccaccatctgatgaaaaagacactggtattagcttctggggaaaaggccatttctattaagtctcaatttaataatgaactcaaatcactctcagaagcctgggaacataaatttgaccatatccaggctcagtatttatctttccagtggacacaggtcctttttcctagatctgttggttacttttttgttattaagacaggagaaaacttggcatgccctatagttttccagaagattgcttatggaataaggaagaatctgcctggatggttttctaataatcctcccgtcctccatagaaagcaccatatgctctaggctggagttttgggccacgccaccattcaccttgccaggtagaaagaagaggcatggtgttacatggaaccttatgcttatttatgctgaaagtgcacaacaaacgtgccagctgagtgtgcaggccttcatcaagcacagtcccagagtctttcaggacaactctaccctgagcacaacctgcagccttacactagagcttggctgcttgactgggagcagggaaagaggtggtgcttttaccctgtgtggattgccctggtttgaattgtgcaccttcacctgactgatttctccaaccaccttgcctcagaccattccttttcccacataggattctgtaaactcagtggtagtaaatactaggtaattggacatgcaagaaccatgcagggaaatgcaacttccagcatatggtggatacaggtgtataatgggctgccttttcacaatgaaaggtggttccagaggagccttggcattgtagacaaagagcaaatggaagcttaggaaggtaatccccttttccagcaaaatgtttccactgctaaccaattaatatatgagggggcctttgatttgaaatggacatattgtctgaggccatagaagtaggaatttttcagcttttcattatgcacttcattcttttgtcagaaggtacagaaatatattatcccacattcctgaccatcttaaacatctaaaaaatacacacaagtaacagaaatgcttgcacacggttctcatttgatgacttatttttcaaatcagccaaagacactttttttttgttttttgagatggaatctcactctatcacccgggctggagtgcaatggcaccatctcggctcactgcaacctccacctcccaagttcaagctcttctcctgcctcagcctccccaggaggtgggattacaggcggccgccaccatgcctggccaatttttttgtttttggtagagacggggtttcaccatgttggccaggttggtcttgaactcctgacctcaagtgatccacccacctctgcctcccagagtgctgggattacaggcgtgagccaccgtgccggctcaaggacacttcttaacatgtgtttgggcaccctttgggtggaattcaaggccatgacttcagagcgctaaaatcgcctctttggtttttagtcttggggctggagctgagaagcaggggtgtatcaatagtctccttagactagggcatttttgttgttgttgttttaaaacacctacctgacggggtccttgaaagtccttggttttgggtgtggatctcctttgtctggttgttcaccaggtcttccggttccacaaaactctcctttcatgtttgtgaagagtaatggcttcatccagacaggaaaatgaaccagatgtgtttgagttaatctagtctaaaggctttcagtgccctggagcttgcaggatacctccaagctagctgacagatcatcacatgggttgtcaggggtacctgctttttcttctcctcatcaattttctccctccttttcttttgagggactattttaaaaccaaattgggatagaaggaaggtaataaaattgtgcttgcaacaaagacaaaaatatagtttaaaattcatgttcctttcttcaataactaaatcatttataaaggaaaaaccaaacaaaacaaaagctttcctttccattgatattagcctaggaaaaagtcaactttaaggaaaatgcatgttgcctggatcccaaatggcttatataatttttttaaaaaccctacctaatattaaaaacagatttaagagcatgagtttagtccagtatgagggagaatagctgtttctctattgtagaatatttatttttatcttaaaaagatttttttttccctcctaaggtcaaccaagtgtcagctgcagttggaaaagatttcaccgtgattccatctaaactgattcagtttgacccaggtacattttgtgtctgcagtttgttttatgtgttttgttttttgtttttttttgtaggcatgtctggagattgtagagaagatagaatgttacacaactttagccaactagaaactcctcagggagccataccacctcactctaaaagagaggtgtttggatttgaggttttgcccttatttttttttagtaacaaatgaattttgatttcaaatgagaagaaagattataataaatatgagatatcaaagcaaacatccaagacaatccagaaaaaaatacagtcacttagaaattatttgaagttctaacacaaagctgttatagtttaattgcctcagatattttatgaaaattttcagaatgttatgtttatatggattcctaaagggcatttctaaatgatccctcatggaataggttgatattaggagattccaggggaaattattatttagttaagtagcacttactttgttttaaatttgtggaaaaattttgctaggtgcaagtggaaataaaaaaggctggtacttgctctcaagtgtgttccattgtgtgagaaacacagacaagaattaacactcactgatagtgcactgggacccaaaagatgagctgttgttcaggctaagagaaatcttggaagacttcccacgggaggcagtattttagcatttagatgaagaagaaaactccaggatgaaggactaacacaaaagcaccaacacacctttggggagctgtgcctaaagctgaggctggagcccggccatctttccctggcttctgtggatgggacaggtagctctgcctcactcactgcatgccactctctatttccctggggtttgagatggatctgaatcaaatgtgggggcttgggagtggcaaatacaatgggcctggagaagcagacaggactgtggctttgtgctttcctgccaaggagatgttctgcatactgagaacactcctctaagtgtgaactattgacatcatctgccactaactcataaagagttgagcaaaggcaaaagaaaatggcctaagtaccagcaccacctcaaaattgcctatcttaatgtcaaacacagaaaagaaatggctctctgcagttcactgcaagtagcatgatgcttgaggactgtgttagtttcttcaggctgtcataacacagcatcaaacagtgggtagcttgaaacagagacatcgagtgtctcagttctggaggctagaggcccaagatcaagctgtcagcatgaaggattacttctgaatcgattccatgcctctcttccatgcttccggtggctgggtggcaaacgttggcattcttagtgtctgctgcctcacctgcatctctgctttcatcttcacgtagcgttctccttgtgtgcatgtctgtgttataaagtccctgccccttttttcttttttgagatggagtcacgctgcgtcacccaggctggagtgcagtggtgcaatctcagctcactgcaacctctgcctcctgggttcaagcaattatcctgccttggcctcccaagtagctgggactacaggcgcacaccaccacacctggctaatttttttgtatttttagtagagacggggtttcaccttattggccagactggtctcaaactcctgactttgtgatctgcctacctcagcctcccaaagtgctgggattacaggcatgagtcactgtgcccagccaagtccccctttttatacaataccagtcataatggatgaggagcccaccttattccagtatgacctcacattaactaattacacctgtaattaccctagttccaaataaggtcacattcagaggtactgggagtgaggacgtgaattttttagaaacgccattcagcctataacagtgaaccttcacttcgacatgcaaaaatctgtattttgtttttggcctccttcctgtgatagttaacattctaactcagataagctggttcttccagctgacctccttttgtgggaagagatcctgttatatatgggaaagattcctgttatttatgtgctgtttactcccacactggtacaggctcttgcggccaacccaacaatccctacaatgaaagggtgagatgatgtgcgccatgtcccttcctacttcatgttaaggcacttccaacttttccatttcttgagtctttgccatatgtcatcttcataatttgaggtctgtttgctacaagatcaggagtaattttggctgctagtaggtttcaggagcccatcaggtgctctgtttggactgataggaactagaacgtgtcacactacaagagactctgaaatctgtctcttggagattccactggataagataaatacccatttgtctagaagagctcacatgctgttttgagtagatactaatgacttctgggggctgtaaataatcttatgattttagatattatttagacaatttaagaaataatataagcatatcttataaattaagaaaaaaacaattggctgttcattgttttagaatttattaacccagaagcagttttgcaaactgaaatcttgctttagagaattttgaagttctccatgtccacaggtccagtaaatatttactcctatcttgttaatccttgcctcttctgggtctggtgtccccatccccatatccaccccttttaccaagggaaatcaatttgtttcttttaaaacggcagcttccatgattgggtgaagaaacagagtgaaaaaccgaagacagtgggatgccgtaaggtttgagaactcttacgtgggagctggaaggaagcttgccttgaagttgcaactatgctaccaaaccaaaaaaataccaaacaaacaaaagcaaaccctaactactttgcattcagctattgtgactagtcttgagtggatataaaaatactcctaagaaaatgattgttttcctttaaaatatgcattattgaaaggcttgcagcattcttaattgatcatcattccttagagtcaaaatgttttccaagggaacagatctctaatgtggcatttactaaaaaatattgagaaaatgtctttcaatagagaaatctgctttgcaggaaaacatccaggaactcacctactctgtaaagtggaatatgtctgcataaaatgacacctctgttttctcttcagcaccttttgttttgtgggaacagggagccagtccaagccttctgaaaatgcttgtatatctcagggacttagcaaatactttgcaccttgaaagtgaaagaggaagggaaaaaatgataaagttttgacttccaatctcattaacctaaagagttagtcctctgtgcacacctggaaggcatagaaaccaagttggaatgcacacaaacaaatcagaagcacttaaatgaaactcaaaagatattttctccaacccctaaccatctggttctactccgtaaggtccaacaaaaaccttaagttttttgttttttgtttgtttgtttgtttgtttggggggtactataattttaaaaaattaaccttaaaatcagagagtcggttgggagttggaaatattttctgtattggattttatttacatgatgcttaactttatggtctttgagggtcaaaacagttctccaagtactaataatcatattattcatatgctttcttcattgaccacctcttatcttttcatgccaattgtattacagcagctgtctatgtggtcttcaaacttctagcctatctgtctatctgcctggatctccagactttctcacataacactctcaggttcattttgctaatccactttcagtgtgtgacttctttgttcaagacccttccctcttgcctatgttgtaaagtctgaatctggccaggtgcccagggctctctgcagtctggctacaaataatctttgcagccttatggcctcctgtccacccatgtaacctctctattccagccagctaattcactcacccttcccgagtcaagacctctgctttgctatcttcctgtctttacttatgttgttttcctgtttcctccctcctaatcctttcacttctaaagcccacatttatataggctctacaatctattctgtatcttttagtaggtaaacatacatagctttcaataattatttgacttttctggttttgcttctgtctcccccaaaagattttaagctcccttagatcagggcttggcttatgttacacctctggtattctccatagcatctaatgcaaagataagcatatcataagtacaaaatatatattttgatgtattgatttatccatccatgagatgggaattgtatggtattattatacatactagatgcttcaacttctgcttttgcaaagactgtgaacgtaattggtttaaaaactcagtactggaagcttaataaattagctgtcagcctgtttttgaataaaatctatttattccaagtacacctaattttttcccctctaagtgcagccagccaaaagtagaagaagtggatagcttcacctttccattgacttctgttgaggattgaagagactgattagatcatgagatctatgtgaggcataccttcaagaaagaggccaccatatagatggacagttgagaggtataagtc

SEQ ID NO: 12079 - DNA, 815 bp, Homo sapiens
cactcaggaggggactcccagactgactgctttactttcatggccacagatgggacaaaccaaggctttattgtgaatgggagagtgtgggaagaacctgttttattcaccattcaggtagaccaattggacaaaacagctcctcgtatcacactcttgcattccccttctcaagtggggctcctgaaaaatggctgctacgggatttacatcacttcccgcgtgttgaaggcatcagaccctgacactgaggacgatcagatcatctttaaaattctacaaggcccaaaacatggacatctggagaacacaacaacaggtgaatttatccatgagaaatttagccaaaaggacttaaacagtaagactattctttacatcataaacccatctttggaagtaaattcagataccgtggaatttcaaatcatggaccccacagggaactcggccactcctcaaattttggaactgaagtggtctcatattgaatggtcacagaccgaatatgaagtctgtgagaatgtgggtttgttgcccttggaaattatcagaaggggatattccatggactcggcctttgtgggtataaaggtcaaccaagtgtcagctgcagttggaaaagatttcaccgtgattccatctaaactgattcagtttgacccagccagccaaaagtagaagaagtggatagcttcacctttccattgacttctgttgaggattgaagagactgattagatcatgagatctatgtgaggcataccttcaagaaagaggccaccatatagatggacagttgagaggtataagtc

SEQ ID NO: 12080 - DNA, 8613 bp, Homo sapiens
gaaggctgaaattgcaatgaatatgggtgaaactcgtattatttccagtgctattctttcagccatagatgaagactcacccagggagaagatttactatgtatttgaaaggcttccccaaaatgggcaacttcagcttaaggttagtgacttcttacttttatttttcaaaactaacgtagcaggtataaatcttctcaatatacacatttctatgatgggatttattctctgatagacatatatttgcctagaagtagaaaatttaattttactagttcagggtgaattcatgctgttctaaagtctttgtcaacatggggtaaattcaacaaatattaagattcttcattgctccctctcccgtaggattatccctaaattctgagggagggaattactggggtaaaccaagctgtctgctttctgaggataatccaggatcttttgtgatatcttcatttctaccagatttttgacttgtgattcatgtaactttcctctttagcatccatcatctcaattataaaactccttcaagtctacagtctttcttgttctctcaatctctctctctctctgtgtgtgtgtgtgtgtgtgtgtgtgtgtgtgcgtgtgtgtgtgggtgtgtgtatttcagctaaattctagatcattctcaggaaaatgaaaactttcattattttttcatgataatcaggtccaaggaaacttggagggctgcctctagctcctctggccctaatgtctctgttaaaacattatctgaatcccagcactttgggaggccaaggtgggcggatcacaaggtcaggagatcaagaccatcctggccaacgtggtgaaaccccatctctactaaaaatgcaaaaattagccgggtgtggcagcacacacatgtaatcccagctactcattactctgcaggcggaggcaggagaattacttgaacccgggagaggggggagaggttgcagtgagctgagattgtgctgctgcactccagcctgggtgacagagcaagactccgtcttaaaaaacaaaacaaaacaaaacaaaacaaaccattatctgagtattatcacctcctgccttctcaatgatttgccacagtgagcatctttctttctttccttccaattctcatctttgtcgctgagcaggggccatccttatgtcttctccagggagactacttactccacaaacaatatgccaaattgttctgtattctatctgacatgaacttaaaagacgaaagttcagtgtcttcatcccactgcagtcccacctccccttgcagcaccagaacccttattgtttaggttcagatgggcaaagtcttggaccaaaaaggcagtgtgggagaaaacttcacgtgggagtcatcccatcctgctagcataacagattttaacaactgccaaatttgaatcccatgaactgcatgacaccgtaaattaacattcctggaattgtatatgttctcaaaattagatgctttaatggaaagcaaataagcatggaaacaataaagggaggattctaggggtaggtcacctgggttttactgctaactcaatagcttgctctgtgatttgataaaatgtccttgtttcactttaggcctagaatagcaaaatttcagtctgattcagactgtgtgcatgatgcccaaggatcagcccaacgtgaattatatagatcagtcacctgagaaggtcagttgagtaatcagtccaaatgtttatttcaatggtagattaagactagcaaccacaaccaccaaccatccccattgcaattatttgatggaatgcttaactttccatctagtggaggcacagtcctagaaaagcagcaagaattcattctatgtggaacagcttgattgtcatagattgtaggcaccatagagaatcagagtgaagagcaatcactgatttaaattgaggtacagctgtgtccttatttcatttcaaagagtaatgaagcagaaatgcagtgagagctcacacatttgggtggcttgggaacggaactgttttggatatgtgaaaatgcagatgggtccaggttcccagtatggctccacacagttctctcccagctccctagcagttctccgagtctttccaagaccaaggaccaggactccagccctcctggactctcccaagagttatcgttttcttattgacttctcttagttttcgccatcttgaatctgacttttattttctttctatttctgggtcttcaaatgattttattaagtcagtcttacattttggagtgcaagtaaggaattacatggagacaagagagaggaaaagatgtcttcttctgtgcttacttccttagacaagattagaaaagggaaaatgtgaaatacaattgcaggctttcccgtttaaaacctgaaagagtctgttttaaaaattatattggcaaataggtcttatggaaacaaactctagcttaattattatgatgtaattaacttccatccagtgagcgtgagggcagaacataagtctacaaacatcagatggataaacatattaaagagaaagaaacgttatcaagtagaatgacataaaggcaagtggtagcacaatggcaagagaggaggacaaagctcttttgccaggaactgggagtctgtggaatctggaagtctgtattctatctgacatgaacttaaaagatgaaaggtcagtgtcttcatcccactgctgtgccacctccccttgctgtaccagagcccccattgtttaggttcagatgggcaaagtcttggaccaaagtatcaaggggaataaaaagtaaatgatttacatttctgttttagactcttaaatgagacagtaaaaccacaggataatatcatataataaattttaagatgactttaaaaaattatgtctgatgactttttatgagccattcctagggaaagctatgtaccttaaatgaacaataataggattattaataagataataaagatttatgattacattttctaacactgtcagttgttagccacccccctcagcataagaacctttttaaattcaaaatgccacaatttctgcatcaagctctgtacaaaacatatgcttaaataatgttggcttacttttagaagattctgataaaaacaatatacgatatttgcagtttatattttttgatgacttaggatataaatgtaggtagtgatagtgatccccatcattttctttctttagtaaggctggaaacatactggggagtaaatgcatctgttctatttttgttctgtctacttcagacaagcccagtaatgagccatgttgaaaaaaagtatatttgactagttgaacatgaaaagaactaaaaaatggaaactctgaaagaaatacatttaatttctaaagaatcccttccaagagctcgattacccacctcctcttattaattggaatattcaatcagctatggttgcttatgaggaacaccttggaagtaacaatgctgttgaattgtttgacttcgtctgaaaccctttggttgaagccggtgtttttccaaggtctcaaattattctaatatatttctttgaaaagaaaaaaaaatcaggtaaagtggcaaaaagtagtctggaatttccctgaaatattatttatattggaggtttttaggggatacagaaaatgtccactaacgtacgttgggggaaaagaaaaaaccatgagcagctgactaactctggctccttccagatagggagggactgggttcctctctcccctggcatgaaatgcactcaggaggaagtggatctgaacttgctgagatacacacacaccggggcaatggattcccagaatcaagatagcttcaccttctacctttgggatggcaacaacaggtcccctgctcttgactgtcaaatcaccatcaaggacatggaaaaaggtaaaagcacgtctaccaaggtttactgggatcaactttgctaactggtataagtattccacattcgtttctttctctctctttccctcccttctttccttttttcctgccactcttcatctttgaaattctatcatttgtgtttagatcctttggcttctcacctgctttgcctgggacctatgtggttcacagaagtagccaatccattcgttattttaaaaagtttattggaaattcagccttgcacacaatatggctatacaggctactttaactgttaggatttttttgctttaagtaaaattttaccaagttgatgtgtaactctagttttatcttcaggaagtgatctatcactggaaaatggagtttcaaaggaaaagtacttctaaaacaataaaataataaatgaaaaatacattttaaaatttaaaaataataaagataaactttgtcattagaaaggctggaagttgctgcttctttcactttgaaagtgctaacatatactctttagggacaaggaaagacactataagatcaacttcttgtgagttaattaagcagagtcagttgtataagtggtgaatgggggagagttaaatggaagatggaggagagtttgtttaaaaagctcagcaaggaagagtagaagctcttgatacccaactgttactaccctgtaattttgcttcagcttatgtgaggatcatatctcattcatctgtattatcccaggatctagatattcccaggatgaagcataatcttagatcctcagtacatgcttgattgactgaatgcttccctttttttgccttggctgccaggaagctcagaggtaaattgaatgcttaagtgcaataataaaaaaaaaatcttgctttatgtgtggcagaattataattgtcctaaatttttaaaaaattaattcagtttgatcttgagatgtttacattgagctgtgtaataatatattttatttgcttatttcctggttgtaaatgtgttccttaaagaagtctaatgagtgatttcagataagctagatgttactgtacacatttatctctccctgcaaaacaactatgttcatcataaatgtatgtccaggcaaatcgtaatacaagtaatatattagggcagacaactagtgtattagagtaggccaccttctcattggctcagcacaacacaactttacagtgacataggagagctctgttccacatagtcatctagggactctttatatctagacattcccttattctgaaggccttagagtcactcaagaagtgagatatggaagaaaattaggggatgtcatgcactaggtgtgaaggttgtgtacctctcttgtacacattccagtggctgaatcacagccacatgccacattaagagaggctgggcaatagaaactttagctttgcacccaggaagaaaggaaataaagttagccagtgcgttgccagactctgctgcaattgacatgtgattattttctaaaaggatttttgaaaacctataccgagtagacacattatcctattaacattttcagttcaaattttttcttctttgtttcttcttacaaagtggtgttttgtcactgtacagttttttgttttgttttgttttgttttgttttacttaacatgagttttttcaggttgctgcataactttgtagccataattgtttatctctaaacaagactatactaaagagttagatttaatcacaaccttaaagttgagcatttggttgtttccatttgggagctattataaataacattaagcttcccaactgctgtgttgctgtgttttctgatttgcacagtggcagaaatgatgttgagatctttcagataagtttaggaggacattgtctatagttgactctaacctacactctgcccttacagtgctgaaaacttgcatcaaggcaagagctggttgctcttcctcccctcaggtccatttcctgctcctggtgaaacctctcgtgggtgctttgtgtttcccccacctaattcattcttcttacttccttgatgtattcatcttgcttctgtctgtagcatctgtggctaaggttttgatttaaatttagaatggtctttgattctacgtaggactgaagttgcaaagcattttgagataaaagcatagtatatgaaaagaccaatttagtaatctgaaatagcgttttccaatcatggcaccattgacattttgggatggaggattctttattgcaggtgactcccttgtgcattgtaaaatgtttagcagcatcccaggtctctgaatctagaagccagtagcaactcccagttatgacaaccaaaaatgtctccagacattgccaaatgtcccttggggagcaaaattgcctgtcgttgagaaccactggttaaaattgtaccactttgatggtttatttgtatttcttatttcttcatgaggctgaatatctttaaaaaaatttttttggccactgtgtttttaagttcagaaatagcttggcatttacatcacgtgtttttctttttggatattcaccctttcagtattagttcacaagagctccctaggtattaaagacagggaacaaaataatgcagtgtttaagagcttgtgctctgggctcagatggcttgcgtacgaattctcactcaatgttttattaattttgtaaccacaagcaggtaagttagcatttctataccttagcttcctcatttgtaatttgggcatatgatatgacaatacctcacaagattagtgtgaaggtgtaagggtctttagttctgtacctgacatagagtagaagccctatatttgagatatgatcacttggtaatggacgtcaggtgaacaaaattcaattatggtccctagtttgtgaaactgcatcattggtccatgtgtgacccacttctaccttcctcagtcatacatttaaaaaaaatagtggtgaattatgcataacacaaaatgtaccatcttaaccatttttaagtgtaccagttcatagtgttaaatatattcatgttgttgtccatccaatctccagaattttttcatctcagaaaacttaaagtctatacccattaaataatgactcctcatttccccctccctggcaaccattgtcctgtgttctgtctctatgagttttgctactctaggtacttcatgtaagtggatatcttttcatgactggcttatttcacttagcataatgtccccaaggttcatgcatgttgtagcatgtgccaggactcccttcccttttaaggctgaatggtattacagtgtatgtatatgccacattttgtttatccactcatctgttgagaggcacttgagttgtttgcatctcttggctattgtgaataatcctgatatgaatatggttgtataaatatacatttaaaaaatatatcatgaacatttgtgcaactaccacacaattgaaggactggaatattaacaatagacatcttcctacgttctccagaaaaaaataccattctaaattttgtatttcttcttacttttatcattttctcagcttgctcatataactaatgaatgttaataaactacatctgtgttgttccatgtagctgtagttcattcatttgactactgcatgaaattcagttgtgtgaacagaacacagtttgtgtatacattcactttttgaaaaggcatttgggttgcatgtaatgctttcaattacagacagtactgcaatgaccatttgggtgcatgtctccaagcgtagcagggcaagtgtttctttcaagtacatagctggggtggaattgctgggtcaaggtatacgtgaacattcgactctttacaaaataatgccaaatcttgtaccaatttacactctttccaaaattgtatgcaagactctcttgagctatgtcttcaacactttgtacagtcaggcttctacatccttgccaatcaaaaagttatgagatgacaatttatcatgatatttgtatttccataattactaatgagcttgagcatttaaaaatatctttactggccacgtgaatttcttcttctgtgaaatatctgctcatgccttttggttaattatttttattcataatagttatataaacctttctatgtcgtattaattttgatttttgcacagttttggcctttgtcttctgcctttgccttggacataatgtgttttttgatatgattattgaccataacctcttatgtcatgtaggtgatattgtcatccttacaaaaccactcgtggtgtctaaaggtgatagaggtttcttaacaaccaccacgctcctggctgtggacggaacagacaagcctgaggaactgctctatgtcatcacctcccctccgcgatatggccagatcgaatatgttcactatcctggagttcccattacaaacttcagccaaatggatgtagtggggcagacagtttgctatgtacacaagagcaaggtgactgtctccagtgacagattcaggtgagccccatggaaacttttcaaaccccttctttggattaatacttacagaaaaggagatctgttaatgtgcttcactatagtaaccatttcacaaa

SEQ ID NO: 12081 - DNA, 701 bp, Homo sapiens
gaaggctgaaattgcaatgaatatgggtgaaactcgtattatttccagtgctattctttcagccatagatgaagactcacccagggagaagatttactatgtatttgaaaggcttccccaaaatgggcaacttcagcttaagatagggagggactgggttcctctctcccctggcatgaaatgcactcaggaggaagtggatctgaacttgctgagatacacacacaccggggcaatggattcccagaatcaagatagcttcaccttctacctttgggatggcaacaacaggtcccctgctcttgactgtcaaatcaccatcaaggacatggaaaaaggtgatattgtcatccttacaaaaccactcgtggtgtctaaaggtgatagaggtttcttaacaaccaccacgctcctggctgtggacggaacagacaagcctgaggaactgctctatgtcatcacctcccctccgcgatatggccagatcgaatatgttcactatcctggagttcccattacaaacttcagccaaatggatgtagtggggcagacagtttgctatgtacacaagagcaaggtgactgtctccagtgacagattcaggtgagccccatggaaacttttcaaaccccttctttggattaatacttacagaaaaggagatctgttaatgtgcttcactatagtaaccatttcacaaa

SEQ ID NO: 12082 - DNA, 22281 bp, Homo sapiens
gccctggtcccggagtcgccgctgggcctgtccgctggcgtcatggtgagcaggggcgggagcggggctggggtcctcggcaggggcccggagacctcggggcagggaggcctcggtacacggagaccctgggaatgggaggcctggagcgctgggtttctggaattgagagctcggtgctcttgtgggggtctccgtggggcaaactcaggatgctcccggccccggggcctggcagcactcgggactgagacctgggctgtccagagccctgtgctcacaggggtggtcatagaacgcccagggcccggggtcggcggcgcacggtccccagaagagtgaacatgcgtcaaggggactctcatcctggaatggcagactcggtctgttggatccctgggacctagggtttcagctcacgaggctttgcagagcaccagggtccccatggaatagagccggaggcaggaattaccctaagacctttggtctcccggatggagagcctggggcacaccagagtggctagagatccctctacaccaaggaggcccggacaggtccagtgcccttggagtgcccagggcacaaccttgggatacaggaaccactgttcccttggaaagcctggcaggagtcaggcccagaccgagaagaggaaggcggagctcgtggcctcatcagctccatgtctgtctttctcttgtaaagggctctccctttgtggtacaggaattgtcagtaactcaatttctgggcaggtgtggcagggtgggtttcagctggtggggggaggaaagctctgggagccccaccaagtccctgcagctggctgtgaaggtcccaaatgctaagtaatgctgaaccttcctccactgccttcagggctttgtgatgaggtagccttcttggagtggagggattaaaaagagagcagtacattacgaattaaatttaagtagatgggttttctgacccaggaagggtcttctgaaaaccgactatgaaagaaactaccaaactaggccaggagtctgggcgcggtggctcacgcctgtaatcccatcactttgggaggccgaggcaggcggatcatgaggtcaggagatccagaccatcctggccaacatggtgaaaatccatatctattaaacatacaaaaattagctgggtgtggtggcgtgtgcctgtagttccagctactcgggaggctgaggcaggagaatcacttggacctgggaggcggaggttgcagcgagccgagatcgcaccaccgcactccagcctggcaacacgtctcttaaaaaaaaaaaaaaaaagcagggtgtagtggctgacgcctgtaaacccagcactttaggagtccaaggtgggtggatcacttgaggccaggagttggagaccagcctggccaacatggtgaaaccctgtctttactaaaaatacacacacacacacactcacacacacacacacacaaaattagccgggtgtggtggtacgcacctatagtcccagctacttgggaggctgaggcaggagaatttcttgaacctggaaggtagaggttgtgtagtgggatttttaaggaattagagagaccgatggggttcaggaggatatttattaattatttaggtgcaccggcccagtcagattaaaatccaaaggactgagccctgaacaaagagttaagttaccttttaagcttttcgtggggcagagggagatctgtgcagggggaagcatgcttcagatgtgagaaataaaggcagttgttcagttgaaacatgcattacatcatttcttactttttaaggaaaaacatgttttgcgacttgagtttatctgcctagtgaccttgcagccgcacagctacagaatcagggtcttcacaatgcctgggaagggaggagagacaaggctcactagccgcagaaaaacaggcagttaatttttaaaggactccagctctttctctttttcagggggagttgggttttcttatatataactgagtttctgcttacacactttttaatttcttttaattcctgttccagttgcagtgagccaggattgcaccactgcactccagcctgggtgacagagcaagactccatctcaaaaaaaacaaaaacaaaaacaaaaaacaaaaaaatgcaacagcaaacacaacagcaaacactaaacacaaccaaactacttctgtttctgttaggttgtgggaatatgggccttggtctgttggatccttggaccaaggaatatgggtgatatttctgttttcttctcatcagtgttttctaaaatttccacataatattttctctctctctttttttttttttttttgaggtagagtcttaccctgtcacccaggctggagtgcagtggcatgatcttggctcactgcaacctctgccacctgggttcaagcgattctcctgcctcggcctcccgagtacctgggactacaggtgcccgccaccacgcctggctaatttttttgtatttttagtagagacagggtttcaccatgttggccaggctggtcttgaactgctgacctcaagtgatccgcccgcctcagcctcccaaagtgctgggatgacaggtgtgagccactgtgcctggctccacctaatgttttcattcaggactaaatgaaacataaatgaagataaatgggccagtcgcggtggctcacgcctgtaatcccagcactttgggaggcttaggtgggcagatcacgggtcaggagttcgagtacagcctggccaacatagtgaaaccccgtctctactaaaaatacaaaaaattagccggacgtggtggtgggcacctgtaatcccagctactcaggaggctgaggcaggagaatggcttgaatccgggaggcggaggttgcagtgagctgagatcgcaccattgcactccagcctgggcaacagagcaagactctgtctcaaaaaaaaaaaaaaaaaaaaaaaagagagttcaagaccagcctggccaacatggtgaaacctcgtctctactaaaatacaaaaaaaaattagccaggcgtggtggcgggcacctgtagtcccagctcctcgtggaggctgaggcaggagaattgtttgaacccaagaggtggaggttgcagtgagccaaggcagcctggatgacgagggagactccatctcaaaaaaaaaaaaaaaaagataaatggatttaggttttaatgtttttaaaaaataaataaaatttccacatgaaatttgtaattttaaaaacgttacatagctgggcacagcagcagtgaactcctgtggtcccagctccttgggaggctgaggtgggagtatcagttgagcccaggaattggagtctgcagtgagctatgtgatcacaccactgcactccagcttgggcgacagagcaagactttgtctttaaaaaaggttaccgagacatgtagacacagaaaagcatgggctgaagactactgggagtagcaaagtcagcaggataggatatggaaatttgttacctgcttgagtgccctgtaaatgggtggccagacagaactgctcctggtgtcatgcgtggtttcagcaacttccacaagggggtggggttagaaggttctctcccatccttgtcaaagttgctaaaaccacgcacgacgccatgtgcagttccgtctggcagcccatttacagggctctcgtggtgggtgctgtctgcccaagctttcttgaccaggcttctctgaaggaagtttctctttgaaagaaaggaaacttgtggttgtcacaaccgatcgtggttatggaggcatttctccctaagcttactgaatggtgtcttgcaggtcttttccatggtggtcaccaatgttgccgccagcatggtaacatttggcagtgtggtattgagggtctttcctctgttttgcatccacagcagaggtctttactttttaccaaggagtgagtgggtttggaatgggttcccccctctcttagtttttggagacggggtctcgttctactgcccaggctggagtgcggtggtgcaccatagctcactgcagccttaaacttctaggctcaagtgattgtcctgccttggcctcccaaagtgctgggatgacacgtgtgagccactgcgcctggtcaccgtataccaaggaatgagtgggtttggaatgagttccctctcttttctttttttttttttttaagttacagtttgctttttgagatggagtctcactttgttgcccaggctggagtgcaatggtgggatcttggctcactgcagcctctgcctcccgggttcaagcgattcttctgcctcagcctcccgagtaactgggactataggcacacaccagcacacctggctaggtttcctctcttttttttttttttgagatggagtctcactctgtcgtcctggctggagtgcagtggtgtgatctcggctcactgcaaactccatgccccaggttcaagccattctcctgcctcagcctcccgagtagctgggactacaggcgcccaccggcacgcccggctaatttttttttgtatttttagtagagatggggtttcactgtgttagccgggatggtcttgatctcctgacctcgtgatccgtccacctcggcctcccaaagtgctgggattacaggcgtgagccaccacgcccggctcctctcttttctagaaggaatgttctccttctcaaaaggaaggtttctcctttgtgcttctccaaatgcaacaacaggatgtgtgtgtggtaaagggtgggaacactcagggcaatgatgtgctccaggtgagcagaagggagagaggttccagaaccttctctgccaaatgttcctgggagcaaatcagagccagccaagaaggggaagctgttagagtctctcttaccccattatttccaccaaaggcaccgaaaaagaaagggaagaaaggcaaagccaaaggcaccccgattgtcgatgggctcgctccagaggacatgagcaaggagcaggtgagcagagcgggctgtggcccagtccccgggtgggcgtgggcgggcaccacgcagggtgcctacgccgagtgtccatcttgccatgtggatccacccttctgtccaagccagaacacgccccccgcgtggcccataattcccatcagcggcaaagctttcggctgcaccatgtcttttcagaaaggtagtgcagcctgtgaaagagctttgtaacagggtggtaggagtgtggaaggacatgcttttctgatctaaaagctgtttttaatttcgtgtattctctttcaatcttaccctttttttgcacctgatgtgtatagacttatcgtagaacacacatgtagcattctcctttattttattcaccattaaacattatgtcaaaaaggaagtttttgaaagaaggatgatttacttcaaatcacatctgaatctgattaatcgttcatttttttttttttttttttttttttttttgagacggagtctcactctgtcgcccaggctggagtgcagtggcgcgatctcggctcactgtgagctccacctcccgggttcacaccattctcctgcctcagcctcccgagtagctgggactacaggcacctgccaccacgcctggctaattttttttttgtatttttagtagagacggggtttcaccgtgttagccaggatggtctcgatctcctgacctcgtgatccactcgcctcggcctcccaaagtgctgggattacaggcatgagccaccacgcctggccagtcattcattgtttttgataaaagtcccaacaaggagtaacagcatcagggctgcctttttcttgttgcttattttggggaggaggtgatgtttttatagtttctttgtaggagttagtttaagtctcttcttcatttggatgtagttaagggctacagaacataattacataattacaattttacctaaaaggctcctggagacggcagtgtgtggcaagcacggtgcaccctctggcctctgccctcatggacgactgcctgtgagcacctgacatgggacatgagggctgtgtcaactctgtgttattgttaataaatcttaccttcttttgatagttgtaagataaaaaatcaatacgaaggagactgaaagagtctcatgacctgaagttggagctaggcagaggtccttgaacaatggtaaagaatggctttattttacatgcaggcaaaccattggcagtttaagccagtggctaagcagagaggtgatggggtcaggtttgtgttctggaaagatgtctggagctgctggatggagaatggattgaacactgcgttgtcccagcatgtgagctgctgcccgtctccctgtccgcttcccattcctgtggagacaggccttgtggggcagtggccatggagcctacggggcagcctacggggcaggctacggggcagcttacggggcaggctatggggcagcctacggggcaggctacggggcaggcccttgcactgcacatcgcacgttgagccacagactcagaaggcttcttcagggtccaggcaggtggggagggatgggggtgacctggagactcctgccccgcagcagaggacagtttcatctgttcactggggagtgccttgtgggcctaggagttcagtgctgtttttttctgattttccaagagaagctggaaatctggatatttataagaaatctgaatattgagtgatggcaaaatctcaacaccatgtgagccaaacagaccagtcaggagccctggttcaggctctgcccaggagcctctaaaggtctgtgacgtgaagacatttgtcgttgtgccgaggcactggttggattcgggggtgcgtgtctccctcatgtctgcccggcatcctcggctcagaacccctcctgctgctccttcttgtttgctcgttgtcttgtcttcttttgaggtgagaaatgtgttttccctgtggggaatgtggtgttgagaaagaaaaaggctcacagtaagtggcctggggctgtgcccgaaaagtaactgattctgacggaatctcgctgtgtggcccaggctggagtgcggtggcgcgacctcggctcactgcaagctccacctcctgggttcacaccatcctgctgcttcaggctgcccagtagctgggactgcaggtgcctgccatcacgcccggctaatttttttgtatttttagtagagacgaggtttcaccgtgttagccaggatggccttgatctcctgacctcatgatctgcctgtctctgcctcccaaagtgctgggattacaggtgtgagccaccgcgcctggcagtaactgattcttaagggaaatgagctcccgagaaagctggaagcctgtcctacatttttttttaacctatttgcagattcgcaattgaaccctcttgagattttagagtctactggttttgtatattttttgcttaacattatatcttcaaaggtgaattttttttcatttagcattatgatatgaatttgtttaaatgctgctacatcatttgcatattttttttgggttaatgtgatatttctcctagttgatatactctaatttttcaaccatttccatatttatttatttattgtttagagacagggtcctgctctgtcacccaggtggagtgcagtggtgtgatcacggctcacggcagccttgacctcccaggtccaaacgatcctcctacctcagtcttctgagtagctgggactataggcatgtgccaccactcctggctaatttttttttttttttttttttgtagagacagggttttgccatgttgcctaggctgttcaactctggggctcaaaagatcctcccaaagtggtgggagccaccatgcctggctgtttgtgtattttttgagacagattctcactctgtcacccaggctggagtgtagtggcatgatcataactaaccgcagcctcaaccccctgagcttgagtgaccctcccacctcagctctcccagtagctgagactataggtgcgtgccatcatgcctagttaatgaaaaaaagtttttgcagagatggggtcttgctatgttgcccaagctggtcttcagctcctgggcgcgagggatccttcaacctcagcctcccagagtgctggggttgcaggcgagagccaccgcgcctcgcttatttccctgtttaaactggtcttaggttatttcctttttgatatttttgctgttgtaataatggtgtgggtaatatctttgagcaagatgctcttatatttcttttgagaaattttttaggcatcaattctcaggaatggatgaaaggatctagttattttatgattattggccaaattgaagagaattctgccacctgctgaatgcattctgtctccggagcttcctagccttatattttaactttttacatttagctgtttatttttaggtgaagttgagtcctccctctttcttccttgcctttcgccggccacacgccccgttgccgtgcatgggcccctgctcagtgcctcacctgacccactgcacctggccaggtggaggagcatgtcagccgcatccgggaggagctggaccgcgagcgggaggaacgaaactacttccagctggagcgggacaagatccacaccttctgggagatcacacggaggcagctggaggagaagaaggctgagctgcggaacaaagaccgggagatggaagaagccgaggagaggcaccaggtggagatcaaggtgagtggggccggcctgcacgtgctaacctggtcaccacagagccccagaggagctggatccagtgagggtgcaggtgggacattttctgttcttggctttgggagtcacagccttaaaggtgttttttataaaagcctgagggagagaccctgcaggtcctgagggtttaaaatgctgcctccacaacatggaaggaatatgggctctgggggcagactggcctgtttgcaactcagctctgccacttaataccccatgagctggggatgcacctcacctcccagccttggtgtcctgctctgtgcctcaagtgtacaggtttgcataggtgaacaggcatgtgtagctgtgtaaaggtgaggcatgcaagtgagcaggtggatgcaagtgagcatgtgtgtgcaggtgaggaggcgtggccaggtgaggaggtatgtgcaggtgaggtgtggggaggtgagcacgtggggcaggtatgtgcaggtgagcaggtaggtgcaagtgaccaggtgtctacaggtatgtacaggtgaggaggtgtagtacaggtgtagtgcaggcgaccaggtgtgtacgggaatttacaggtgaggaggtgtacaggtgaccaggtgtgtacaggtatggacaggtgagaaggtgtggtacaggtgtggtgcaggtgagcaggggggtacaggtatgtacaggtgaggtgtgttacaggtacggtgcaggtgatcaggtgtatacaggaatgtacaagtgaggaggtgtggtacaggtgaccaggtgtgtacaggtatggacaggtgaggaggtgtggtacaggtgtggtgtgggtgagcaggagtgtacaggtatgtacaggtgaggaggtgtggtacaggtgaccaggtgtgtacgggtacggacaggtgaggaggtgtggtacaggtgtggtatgggtgaccaggtgtgtacaggtatggacaggtgaggaggtgtggtacaggtgaccaggtgtgtacgggtacggacaggtgaggaggtgtggtgcaggtgtggtatgggtgaccaggtgtgtacaggtatggatggacaggtaaggaggtgtggtacaggtgaccaggtgtgtacaggtatggacaggtgaggaggtgtggtacaggtgtgctatgggtgaccaggtgtgcacaggtacggaaaggtgaggaggtgtggtgcaggtgagcagatggtactcccattgccctgcaggtgtacaagcagaaagtgaagcacctgctatatgagcaccagaacaacctgacagagatgaaggctgagggcactgtagtcatgaagctggcacagaaagagcaccgcatacaggagagtgtgctgcgcaaggacatgcgggcactgaaggtggagctcaaggagcaggagctggccagtgaggtggtggtgaagaacctgcggctggtaggtgtggcgggggcacctggaggctgacaggttgttgggacggcaagcctagtgctgcatgaactcctgtttattcaacagcaactgggaattcatatttctgcataagactttctgcatttttgcaatttgttgaaaaaaaattttttaaagcatgcatccaaacaaaccccattttgggaccaagtacacaattctgtctcagacctgagcaaaaaattgacgtcaccgaagagaaaaaatccagcttaggatctttcatgtgctgctgacacctgacacccagagacttttcctagggaatagcatcatatgcatttagtagaatgcaaaccaaccattaaaatatccagtgtgttgactcctgggcactgtgacagtttgtcacacaagctggtctgatttttacttttgaggctgggggtttccagggcaccattaaaattcatctgtgcacctggttcagtggctcacacccaaaatcccagcacttgggagggtcaggtgggagaagtggttgaggccaatagtttgagactagcttgggtgaaatagttgaaccccatgtctaaaaaatttaaaagaaaacattagctggtgtagtggcacatgccgatagtttcagctacttgggaggctgaggcgggaggatcccttgagctcaggaagtcaaggctgtggtgagctaggattgtgccactgcattccagcctaggtgacagagtgagacaaaacaaaaaggaaagagatcatttgctgagtgtccattagctgctaggtcctgatctgatctctgacaaaacgcctgcccgactggggctgttggtctagaaaggagagacaacaggtgagttggaagacaaaataaacgtgccagatacaacagagtatctggtggggaagagtgccatagaaggatcgaagtggggagaggtggggtgcggttttgtacaagcagttgaccggctgggagacgggatgggccagtgggaaagctcagagtgaccaggaggagactgtgggagagggtcagagcttgtccgcctcgaaagccgtggtggggactggagacgggtcagagctcgtccgcctcgaaagccgtggtggggactgggactttgaccctggtggagtctgttgccctctgagaacttgggcagaggagagatgtgtctcactaaggttcttcctggctgctgggttgaggagactttctgaacacatttgcctcacgcctggaagcagtccagcctccactgaatctggaagaaacttggtgacgttgctgacttcgcagcaaagcctgagagtgccgaagtcttgagccctccagaattagctggtcttaacccaggtcctggatatgatattgttacataatcagagtttcctgttgggtaaaaatatggctttaggccgggtgcggtggctcacgcctgtaatcccagcactttgggaggccgaggagggtgtatcacgaggtcaggagtttgagaccagcctgaccaacgtggtgaaaccccgtctctactaaaaatacaaaaattagccgggcgtggtggcgcacacctataatcccagctactcgggacgctgaggcagaagaatcacttgaacctgggagacggaggttgcggtgagccgagattgtgccactgcactccagcctgggcgacagtgtgagagtctgtctcaaaaaaaagaaaaattactgctttaaaaataatttatttttttatgcaaattttaaatatataatgtttatttaaatatataataattgttcattaaaactatatatttatttatttttagagatgaggtctcactctgtctcccgggctgcagtgcaatggtacaatcatagctcactgcagcctcgaacttctagtctcaagtgatccttctgccttagcctcccaagtagctggaactatagatatgagccaccacacccacctaatcttttttttttttttttttttttttttttgagatggagttttgctcttgttgcccaggctggagtgcagtggcacaatctcagttcaccacaacctctgcctcccgggttcaagctattctcctgcctcagcctctcgactagctgggattacaggcatgtgccaccatgcccggctaattttgtatttttagtagagacggggtttctccatgttggtcaggctggtcttaaactcccgacctcaggtggtctgtccagctcggcctcccaaagtgctgggattacaggcgtgagccactgtgcccggcaatctttaaattttctgtagaagatcttgctatgttgcttaggctgcccttgaactcttgacctcaagtgatcctcctgccttggcctccagcgtgctgggatgacaggaatgaatccttttaatatgctgcttcaggcagcagtgcagcaggttggaagctacacacggcacctggaaagatcccacagctctgtgtggatgtggctgctgctcttcaggctgtgggatggtttggcgatggaaccaagcgggttcagtgctcacgacgtctgttcatgttctctctcaagcttagaggtgactttagttgagggaggtgagttagggaatatggaggtgaccaaaaccatgaggaacagggtcagcctgaagggagcgggcttccctctgtgtccggctgtgtagtaatggccgcttctccctgtgcagaaacacaccgaggagatcaccaggatgcggaatgattttgagaggcaagttcgaggtcagtttcccgtgtgctcattgtgtaggtgccagagacacccccgccccatcagagaggaatttacctccagagcttgttaactcagggagcaaaaactggattaaaacagccaaggcatgcaagagaaagaacatggaagtttccaaggccagtggacccactcagaatcccagaacaacctatttccatgtgagtttgggaggctgtgattaccacacacattcccactcctagctaaaatcagtagttatcagcaggtggtagctattcagtgccgtgggcagccttcttaaaatagtcttctccatggctcctggtctgagaaggctccaatttcagaagtctctgtgttttactaataaaggctgattgtggctgggtggccacacaggcctcggttactgctcactggggtcagctgacattcagctgttggcacccccagtgcagggagcgattagcaatgcctgtcactggcaaaggcaggccgacagtggtgtgtgtgctgagtgtgagcatcagcagaaaaactcagtctaaacccctttgttcttctcttgcagagcttttgcctgcaaggctgttctgaccacagtgggcgttttgggcccgtttacaggctccatgttctgtagccgtaggggcaccacgtcttcctctgctaagctgctgtttgctgctgcctttcagaaattgaggccaagtatgataagaagatgaagatgctgagggacgaactcgacttgcggagaaagactgagctccacgaagtggaggagaggaagaatggccagatccacacgctgatgcagcgccacgaggaggccttcaccgacattaagaactactacaacgacatcaccctcaacaacctggccctcatcaactccctcaaggtgctgtgcgtgggctgggctggggaggcacactctgcctgtcctagaatgtgggctgcagagtcctggggatccagaccccagctctccaccccaacacacccagtactttttataagattgtttgacaatgcccctctcatatccttaactgaaattcctaaataacgtaacctatctctacctattgttaaaagcagtcaggatattgccctcaccgtagtgcagagggggaagtaatgaagtgtgttctggtttgtaaaagctcagatggaaccgcagtgagggccgtgatgtggctggagtggataggtgtcatagtcactgcctgcgacaggtggataggtgtcatcgtcactgcatgctggcagtgacaggattttctacagtagacaacggcccttggtggaatcttgaacaaagtatagtccttcagtctgcatggaagctgcattcccagaaaactcagaataagttgaagctgcagaaatactgtttatacatagaagacgtctaggtgccagcatgcctgaggctggcagcagctggtgatgggcaggagagcacccagctctcaccatgcaggccacagcccctttggttctgcctgctgagcccctgccgggcctgtgcttgtgcctgcaggagcagatggaggacatgcggaagaaggaggaccacctggagagggagatggcagaggtgtctgggcagaacaagcgcctggcagaccctctccagaaggctcgggaggagatgagcgagatgcagaaacagctcgcaaactacgagagggacaagcagatcctgcttgtgagtttcccgctggattcctctccctccttggcatgagcttgcctaggctcaggagggaggagcatcacagggaggggcttggcccttagggcaggaagggagacggggaggcctgcatttctcctttctctgcctcgtgttctcctggggaaagtaaagtctgggggtgttttggagacaaggccctcatcttcaccacgtgctaccggccggccttggtgagactcagctgcttgtgtcctggaaccaggtctttctggcgattatttttggccttgccatctcccaggagcccgtgttacttggatgactgtgaatcttgaatactttctgtcccctactccctgtttttcctccagtgcacaaaagcccgtttgaaagtcagggagaaagagctgaaagacctgcagtgggagcatgaagtgttagagcagcgattcaccaaggtgagtggcaccacgctggccctgcagttggcggtgggtgttagagcaacggttcaccaagttcaccaaggtgagcgggcactaggctggccctgcagtggggatggcacccctgctagccagggacggggctctccttgtggcccctggaccagcttcagatgccttggccaggtttctgggttctgaagctggaggccctgttccctgtaactcattccgcagcttctaagaggcaaaaacctgtggcctgttctgcatgcatattctgcagaaggcctggggtcttgatggggaacggatcacacatgactttcgtcccctcgagagctcacctctgaaagcacatgagggaggctcttaagtgtaagtgaagatgagtctccggctgctcagtgctggtcctcacactggcgagttttatgggctcccttccaggtttcctgcatgctctcgtgtggatgtgactttgtatgttacgaacacgggatcaggccataagcacaatttgctttttaatctcacagtgtatcaggctgcacataggaagcggtctcatccttttcacagctgcttggtgctgcgttttgtgaacgtttgatcatttagccgactcccgtctgtttctaatgctctgctgctataagcattgctgcctcaatccttttaaatttgtctttgtgcacttgtgtgagattgcttcttaggaaagccagttcctagcagtgggattgttgagtctgagggttctgttctgaggaccctgatcatctgtccagagggctgctctgagtcacacacctgccagggtgcggaggggccgtttccatcctcacctgcaccagatctgacaggtttaaacctttgcagaagtgactgggtggaaaacatctcatttcgtgggcacttccaagattcgcagtgagtggtaggggtgctcggtcctgtctctgtcccttaaagacgctccttgcctctgttcagtttcaaagttctggccaaggaccaatccctgcagcatgggcccctcaaggctttgtctgtggtgtgcggggccagggcatcttatcttgagccgcagttatatgtgctgttttgttctctaacctaattgaaatttttgaacacaaaccgttgtagtgggattcgcttctcagaaatatcccatctgtctgtcagatctagccccaccttcagagacacctcaggtcctgcacgacgtgcattgctaggctgtgccaactcttggcacctaagggaagggcacctgcaaggtagtcagtgagatcctgaggactgctgtgttagacaaggggcccttccttctccctgtgggttttgaggtggacattattgggaagaggacagcagagacgtgcctgggttggagccttgttttctgtcacattttcttccatttgaatgtggttcctgacagtgtccaagctggtgtctcttcctagagaaccgagagctcaaatttatcagcaaaatttagagaccaaggcagttatttatttatttatttatttatttatttatttatttatttttgagatggagtttcgctcttgttgcccaggctggagtacaatggcacgatctcggctcactgcaacctccacctcctgggttcaagtgatactcctgcctcggcctcccgagtagctgggattacaggcgcctgccaccacgcccggctaatgtttggtatttctgatagagacagggtttcactctgttggccaggctggtctcgaactcctgacctcaggcgatccacccacctcaccctcccaaagtgctgggattacaggcgtgagccaccacacgctgctcagggtgttcacttttttatagtcttcaacaaagtctagatttttttagaatgcacaattaataagtagaagaattaggagataaaaaagaacagttttactggctggcaggtagctggctccaaggccgtgctccagatccaccatttgtggggcggacagcacatgtgatgccaggatctggggctggccaagggagcatatcctccaaggggccccacctgcaagctcggcctgctggatgccctggatctcaaatctcacctgagcccacagccctcactcgggcaagactggcctcggccacccatgaagcagctttcagggtggggctgcttcagctcttaccaggacacttatggcttccagagacaccttcctgagagaagggcttatgctgatgtgttcctcctgccttccactgcgtggatggctctacaaagggccagggcgcaggcagtgtggacaacacactgaccccggtgctgtgggagtgggcactgttgggaggcagcgtgttccaggcaggtgcagaggtgggaggcagcatcttcccagcgagatgtccccaggtgaggggcctcatcgcccacccccagcgctgtccctacaggtgcagcaggagcgggacgagctctatcggaagttcaccgcagccatccaggaggtgcagcagaagacagggttcaagaacctcgtgctagaacgcaagctgcaggctctgagcgccgctgtggagaagaaggaggtgcagttcaacgaggtcctggctgcctctaacctggaccctgcagccctgacgctggtgtcccgcaagctggaggtaggccctagacaggctcctgaccccagtgggcggcctcatccctgtggcaagagtcttcagttctgtgctgctcctcggataggcacagagacccctcggtcggccactgaggaggggcattcatgggtttcctgtggccagtttcgggccagttgggaactgtggaagggctgggcaggggaaccagatcagggcccactctgctattgatggggagcacagggctggagggggctggttggggccagcacagaatggggacgggcagagggttggagagccgccaggaggctgagtccacaggtggggctgggaggggccgaggtgacttggtgtttgcacatgggggaacgacgggtcccggcccagtgggcggtggtgcctgtgggaccctggtcatctgggatggcctggctctcagggcctgaggtagtgaggctgtataggaggggcctcacctgggccagaggcactgtggccccgggactgaaaactcatctttgtttgctcagcactgggcccagtgagcacaggcaggtgagggagtgagggtcccactgttgggaggtgggggaggcgtgtttccagctcctggctgagggctgcacccagcctgctgctaagccaccgaaatgagggtgaagagagcagtcgtggcctgtgagggtcattgcagctgcgcccacgcgccagggtgaggatggaggatggagctaaatgtgggtcaacccctcctttcctggtcattgttacctcgacttctaagtgaggaatcttctggggaaatgacagaggcccccgcagggacactgtttgctgctggccaggtgtgagggggctgctgtgtcagtgggcagcagggacggctctaaagccaggctgggcccagcagtgccccacaggcaggagcccaagaagtccctgcctcgccacgtggtgagacccttgcccacatctgggcggggccagcgctgctgaagactacttttttctgttacaaaaaagtgggatagccgggcgcggtggctcacgcctgtaatcccagcactttgggaggctgaggtgggcagatcacgagtttgggagttcaagaccagcctggccaagatggtgaaaccccgtctctactaaaaatacaaaaattagctgggcttggtggcgggtgtaatcccagctatttgggaggctgaggcagagaattcctggcacctgggaggcggaggttgcggtgagcctagatcgcgccactgcactccagcctgggcaacggggcgagactccatctcagaaaaaaaagtgagatagtacattcacaagcctcaagaaatttaagcaatatgtaggtggtgtttagtgaccagtctccacagtgtggctgcacgctgcctgccctcacctcatctgcatttcttgtggtctggactgctctttgagttttttcttgagacggtgtcttgctctgtcacccagactggagtgcagtggctcaatctcggcgcactgcaacctccgtttcccaggttcaagcaattctcatgcctcagcctcctgagtagctgggattacacaggtgtgagccaccgtgcccggctacttttcgtatagtagagacggggtttcgccacgttggccaggctggtctcaaactcctgacctcaagtgatctgccctccttggcctcccacactgctgggatcacaggtgtgagcggcagtgcctggcctggactgttgctggagaggcaggttgtgcaagctcccagttctctgcttcttccttgttttctctccacccttggagacctttttctgctgacaaccctgtgtggatggatgcatccatcaaaccaggctgctattcgctggatctctcagaacgcccactggagtccccaggccgctcccgttgcctcggccaaaagatgagtctcaaactcccatcacctctctctcctcaggatgttcttgagtcgaagaacagcaccatcaaggacctgcagtatgagctggcccaggtctgtaaggtacggctgtgccctgccctccctcaggggcaccccctcggtgcccagactgttctaaatgcagacggtctctgaggaccccacctgtgcccacttcgtacctcgtttgacaaggcagctgtcactgtccccacgtgagggtgcagtcatagccgagagcatctggattctgtgtggtctggggcagtgcactgctgtctaggccatgtctctgctgggatgggtgtagggggggacctggacgcttccctggtcagccccttcccctgggcagggagtcagaaggtgctgtgcccaccggggaaggaaacagacgtcattcaacaggggaagggagggcgtgaagaacctgagtgggaaacacccagccagggcccagagccctcccagaccacagctctgccctgagtgtccctgccctctgcctccgtctcgtcatttgtggaataggaatagtgacagcctctccctgtcgtgctacctgagccaacgcagtgaaggtgcttggagctgtgtcccacacgggaaatgactgataagcctttggctttatccttctgcaccgtgatgctcacgctgcccctccatggagctgcactcagctctggtggtcctgagcgtggggaccctcagctccctgacactgccctgtctccacaggcccataacgacctgctgcgcacgtatgaggcaaagctgctggccttcgggatccctctggacaacgtgggcttcaagcccttggaaacagctgtgatcggacagacactgggccagggccccgcgggactggtgggcaccccgacgtagctgcccccctggggggccacagcccagagaaccagcctaggaacactcgggatgacaccccttatcacaccaaggacagcaagttttttagattttatcatcagcaaatgaaagcttttcacatgttcttgccatcctctttcctggctctgtggaggagaaccacctgcaggaccctcacccatggtgtccctgtcgctcccttccctgggtgccgcacgtccagcctgtgtccaggcctactccctggtctcacctccgaccacagtcggcggcaccttctcagagtgccccgcactcacctgggggttggggcagtgccgcgctgtgctgcctgtcttcgcgccactgttgtcccaccgaatggacagctttgcaggtgctggcactaacttcattgacacctgagtcacagctgcccagtgggattctccagggggccgggacttccctaggaagtggtgagccaatgctccctgatgagcacaaagcccgctctgttgagggctgggtgggtgcagccagcgtgcgggaacgggcaggcagcctcccgctgccagtcttcgctctaactccctcggtaggtgatgtaggaccaggggcacgtggaacttctgggccttgctggtgatggttaaaacaacctgagatggagaggccaggagagagtataaggggatagcagcaaaccacctatctggccccaacacacctgagagaattcagcagcccagactgagggtctgggatggggtgaaccttccgcaccagagggacactccacagaagccacagcccagtaagtcaggcgcttctgcggcggctccagtgtggggtgaggcagtgaggttaggcccagagagctggagttggctcagatgaaaacctctgtcaacaaagaggggatgaatcacccttggcccagcctccccacaaagcctgaccctgggcaggtgagtgacgggtgtgtcctcgtagagtctattgctgcctggacacctttcttttgggagctcaaagcaagtgagctcacctacctgccaccgcccaggaccagtctgcccactgcctaaatgatgcccggccagcaggacctggcctgcagatcccagtgagtcatgagcctcagccccctccagcccactggggctctcacctccacatgtgggtagaagctttcctgccccctcttcctccagtagccctcagtgtcgaaggtgagcttgtaggtgcctgccttcatctggtccaggacagtgaccatctgggtctgtgtagctggggagaggatgaggctgcagagatggggaccagaagccccccaccccagctttcctgggtctgcatcccagtgggcctcagacactgccctgccacctgtcagacttgggtgagcagacacagtgaggctgttaggtcctgcagttccagagcagtctagggacaccactgccctgtctttaggaaatcacaacacagagaagcaaaaagggaaaaagtctcccacaatttatcccatgagcaagaaccactttatagctggcatatatttttccagattttctctatgcataagtatatttgtttaaaaacttataaagtggattatactatt

SEQ ID NO: 12083 - DNA, 3094 bp, Homo sapiens
gccctggtcccggagtcgccgctgggcctgtccgctggcgtcatggcaccgaaaaagaaagggaagaaaggcaaagccaaaggcaccccgattgtcgatgggctcgctccagaggacatgagcaaggagcaggtggaggagcatgtcagccgcatccgggaggagctggaccgcgagcgggaggaacgaaactacttccagctggagcgggacaagatccacaccttctgggagatcacacggaggcagctggaggagaagaaggctgagctgcggaacaaagaccgggagatggaagaagccgaggagaggcaccaggtggagatcaaggtgtacaagcagaaagtgaagcacctgctatatgagcaccagaacaacctgacagagatgaaggctgagggcactgtagtcatgaagctggcacagaaagagcaccgcatacaggagagtgtgctgcgcaaggacatgcgggcactgaaggtggagctcaaggagcaggagctggccagtgaggtggtggtgaagaacctgcggctgaaacacaccgaggagatcaccaggatgcggaatgattttgagaggcaagttcgagaaattgaggccaagtatgataagaagatgaagatgctgagggacgaactcgacttgcggagaaagactgagctccacgaagtggaggagaggaagaatggccagatccacacgctgatgcagcgccacgaggaggccttcaccgacattaagaactactacaacgacatcaccctcaacaacctggccctcatcaactccctcaaggagcagatggaggacatgcggaagaaggaggaccacctggagagggagatggcagaggtgtctgggcagaacaagcgcctggcagaccctctccagaaggctcgggaggagatgagcgagatgcagaaacagctcgcaaactacgagagggacaagcagatcctgctttgcacaaaagcccgtttgaaagtcagggagaaagagctgaaagacctgcagtgggagcatgaagtgttagagcagcgattcaccaaggtgcagcaggagcgggacgagctctatcggaagttcaccgcagccatccaggaggtgcagcagaagacagggttcaagaacctcgtgctagaacgcaagctgcaggctctgagcgccgctgtggagaagaaggaggtgcagttcaacgaggtcctggctgcctctaacctggaccctgcagccctgacgctggtgtcccgcaagctggaggatgttcttgagtcgaagaacagcaccatcaaggacctgcagtatgagctggcccaggtctgtaaggcccataacgacctgctgcgcacgtatgaggcaaagctgctggccttcgggatccctctggacaacgtgggcttcaagcccttggaaacagctgtgatcggacagacactgggccagggccccgcgggactggtgggcaccccgacgtagctgcccccctggggggccacagcccagagaaccagcctaggaacactcgggatgacaccccttatcacaccaaggacagcaagttttttagattttatcatcagcaaatgaaagcttttcacatgttcttgccatcctctttcctggctctgtggaggagaaccacctgcaggaccctcacccatggtgtccctgtcgctcccttccctgggtgccgcacgtccagcctgtgtccaggcctactccctggtctcacctccgaccacagtcggcggcaccttctcagagtgccccgcactcacctgggggttggggcagtgccgcgctgtgctgcctgtcttcgcgccactgttgtcccaccgaatggacagctttgcaggtgctggcactaacttcattgacacctgagtcacagctgcccagtgggattctccagggggccgggacttccctaggaagtggtgagccaatgctccctgatgagcacaaagcccgctctgttgagggctgggtgggtgcagccagcgtgcgggaacgggcaggcagcctcccgctgccagtcttcgctctaactccctcggtaggtgatgtaggaccaggggcacgtggaacttctgggccttgctggtgatggttaaaacaacctgagatggagaggccaggagagagtataaggggatagcagcaaaccacctatctggccccaacacacctgagagaattcagcagcccagactgagggtctgggatggggtgaaccttccgcaccagagggacactccacagaagccacagcccagtaagtcaggcgcttctgcggcggctccagtgtggggtgaggcagtgaggttaggcccagagagctggagttggctcagatgaaaacctctgtcaacaaagaggggatgaatcacccttggcccagcctccccacaaagcctgaccctgggcaggtgagtgacgggtgtgtcctcgtagagtctattgctgcctggacacctttcttttgggagctcaaagcaagtgagctcacctacctgccaccgcccaggaccagtctgcccactgcctaaatgatgcccggccagcaggacctggcctgcagatcccagtgagtcatgagcctcagccccctccagcccactggggctctcacctccacatgtgggtagaagctttcctgccccctcttcctccagtagccctcagtgtcgaaggtgagcttgtaggtgcctgccttcatctggtccaggacagtgaccatctgggtctgtgtagctggggagaggatgaggctgcagagatggggaccagaagccccccaccccagctttcctgggtctgcatcccagtgggcctcagacactgccctgccacctgtcagacttgggtgagcagacacagtgaggctgttaggtcctgcagttccagagcagtctagggacaccactgccctgtctttaggaaatcacaacacagagaagcaaaaagggaaaaagtctcccacaatttatcccatgagcaagaaccactttatagctggcatatatttttccagattttctctatgcataagtatatttgtttaaaaacttataaagtggattatactatt

SEQ ID NO: 12084 - DNA, 23830 bp, Homo sapiens
gggccgcgccccgccgcggacaccaccgggacctggctgcgccctcccgaccccggccgggcgtccggggctcctgcgcactcacttggcggccgcgcccgctggcgtcctcttgttctcttccaggtacttgcgtgtggggcgccgactgtgtgcgggcgcccctcggggctggcgaggggcacaggaggggcctgactcgcgctgggtaatgacagactcacagagcgccctggatggcgcgaattaacgcggggggcgggtgggggcgagggcgtgtgcttgggaggctggaaggggcgggatgggggatgggaggtaaggagagggcggcgggcccgggctgcagagagcgccaaggcagtttcgatgaaactgacccccatgtccctatcgcccagattcagcgattgccagctcctggcctgggccactgcttctctgtcctcattcacttccctccactgctgggtcattttgaagcaaattatatacacattagatcattgcatttgtaagtacttcaatatttatctctcaaagaaagtccgtttgcaggagcattgactcatgcctgtaatcccagccctttgggaggctgaggtgggagcacagcttgagctcaggagtccaaggctgccgtgagctatgattgtatgtctcaaaaaaaaaaaagaaaagaaaagaaaagaaaaagtctagtcttcataaacactcttgttaacccagcatccaggccttcactgagttgatgccgtggcctgaggcggtttacctggtggatagtgggtggcaggaagcatcagacatcagacagagggcagtcggtttgtttgtattaacatttgctctgggattttgcaggaaactcagatgccatttatctgggtttctgagctgcacagcttgacactgaatgaaagtatcttaagccacatatgtgaagaaaaggctcttttctaaaaatctgaactcgaattcaatatgaaaagaacaggtcgcagtgggccctgtcgggatcccagggagccgcaattcagggctccctgaatgattcatctctgcagcccacaccgacagaccaggattgctcttagcttgtgaaaaatgagtaccctgtctaggctatcctgagctaaccctcctattcttgccctttttgctgaaaggaattattgttaatacagctatttaattcaggacactcatccagacttctgaagcaaaaagccaatcagcatgaagctgctagcatattggttttgtgaagtaagtgttaaattataataattacccccactgtgctctccagcgtcactgtctgaccaccctgtcccagggggaggaggcccctctcaggccaagggagtctggcacagtgatgctggctcctggttgcccaggcacagtgaccagccagacttcacagaggcctcagggcttactataaataaatcactgctttgtgcaagctgagccaatgcagttcttccaactggctgctcctctccaagaacaatcaggacttaggtgggcaaacaggaagtctctcatcacagtggttctcagattcccaccactgtgtgggtgcctgaggcctgagcaaacccagctcatgtggcaacttcctcccccagctggacaggaagacctaggtccaccaggccttctttcatttctcacactttgcccccagcacaactttctacgagcatggattctgtactcttcatccccagacacatgggagaacaagatctgctacaagaccttttctttttttttttgagacagggtctcaggtctcattctgttacctaggctggagtgaagtggtgtgatcttggctcactgcaacctccacctccagggctcaaacgattctcccacctcaacctcccaagtagatgaccactttttaagaagatgttaaagatgagagcttagggctgggcgtggggctcacgtgctcccagcactttgggaggccgaggcaggaggatcacttgaggccaggagtttgagaccactctgggcaataaagcaagaccccgtctctattaaaaacttaaaaaaaaaagctgggtatggtgtctcacacctgtagtcctggcttctcaggaggctgaggtgggaggattgcttgagcccaggaggtcgaggctgcagtgagttgtgatcacagcctaggcgacagaaggagaccctgtctccaaaaaaaaaaaaaaaaaaaagcacctgtttatgacaaactcagctttctgggtgacatagatggttgtatgtaggtaacagggtggtttcacggatggcagattcattttagaaattgtaaaatggctagcagttttcagaacaagagattagttagaaaaggaaagtggcagctgtttgttttctgcagggcctgtcgggaagcctctggtttcttttcatccgtgaggagtggggaggaggcctcttcaggaagagcagtttatttttgtgaaaggaatacttactgatttcaaacatttggaactaaactggaacgtatttttctttccgatttctgcgtttttgaggtgtgtgtaaacccaccagcgcagcagctgggagggcccttcaaaggtgggcgggtggggtgagtgaggcccaggggatagagtgtttgcccagatttgaatctcatttggggaaagtttcagaggcttgggtggctgattgatcattccttcaatggtccttcatcagcacgtctttactgagcacgtgctgtgtgctgttctaggcgctgaaggatagaagtgaagggttcccccctcgtggagcttaggttccagcaataagcaaaacatgccctgcagcgaaaggcttctgggctgccggcgacattttcccaacgttcacaaccgggttccttccggacgcccgtctctagggacgcactcccgcctttggcagggccgctgcccggcggagtctcgcgaggatcttgtgacttatcgcggcatcgcccagcggttgccgggaaacggcgtggcttccgggggcgggcgccctggtcccggagtcgccgctgggcctgtccgctggcgtcatggtgagcaggggcgggagcggggctggggtcctcggcaggggcccggagacctcggggcagggaggcctcggtacacggagaccctgggaatgggaggcctggagcgctgggtttctggaattgagagctcggtgctcttgtgggggtctccgtggggcaaactcaggatgctcccggccccggggcctggcagcactcgggactgagacctgggctgtccagagccctgtgctcacaggggtggtcatagaacgcccagggcccggggtcggcggcgcacggtccccagaagagtgaacatgcgtcaaggggactctcatcctggaatggcagactcggtctgttggatccctgggacctagggtttcagctcacgaggctttgcagagcaccagggtccccatggaatagagccggaggcaggaattaccctaagacctttggtctcccggatggagagcctggggcacaccagagtggctagagatccctctacaccaaggaggcccggacaggtccagtgcccttggagtgcccagggcacaaccttgggatacaggaaccactgttcccttggaaagcctggcaggagtcaggcccagaccgagaagaggaaggcggagctcgtggcctcatcagctccatgtctgtctttctcttgtaaagggctctccctttgtggtacaggaattgtcagtaactcaatttctgggcaggtgtggcagggtgggtttcagctggtggggggaggaaagctctgggagccccaccaagtccctgcagctggctgtgaaggtcccaaatgctaagtaatgctgaaccttcctccactgccttcagggctttgtgatgaggtagccttcttggagtggagggattaaaaagagagcagtacattacgaattaaatttaagtagatgggttttctgacccaggaagggtcttctgaaaaccgactatgaaagaaactaccaaactaggccaggagtctgggcgcggtggctcacgcctgtaatcccatcactttgggaggccgaggcaggcggatcatgaggtcaggagatccagaccatcctggccaacatggtgaaaatccatatctattaaacatacaaaaattagctgggtgtggtggcgtgtgcctgtagttccagctactcgggaggctgaggcaggagaatcacttggacctgggaggcggaggttgcagcgagccgagatcgcaccaccgcactccagcctggcaacacgtctcttaaaaaaaaaaaaaaaaagcagggtgtagtggctgacgcctgtaaacccagcactttaggagtccaaggtgggtggatcacttgaggccaggagttggagaccagcctggccaacatggtgaaaccctgtctttactaaaaatacacacacacacacactcacacacacacacacacaaaattagccgggtgtggtggtacgcacctatagtcccagctacttgggaggctgaggcaggagaatttcttgaacctggaaggtagaggttgtgtagtgggatttttaaggaattagagagaccgatggggttcaggaggatatttattaattatttaggtgcaccggcccagtcagattaaaatccaaaggactgagccctgaacaaagagttaagttaccttttaagcttttcgtggggcagagggagatctgtgcagggggaagcatgcttcagatgtgagaaataaaggcagttgttcagttgaaacatgcattacatcatttcttactttttaaggaaaaacatgttttgcgacttgagtttatctgcctagtgaccttgcagccgcacagctacagaatcagggtcttcacaatgcctgggaagggaggagagacaaggctcactagccgcagaaaaacaggcagttaatttttaaaggactccagctctttctctttttcagggggagttgggttttcttatatataactgagtttctgcttacacactttttaatttcttttaattcctgttccagttgcagtgagccaggattgcaccactgcactccagcctgggtgacagagcaagactccatctcaaaaaaaacaaaaacaaaaacaaaaaacaaaaaaatgcaacagcaaacacaacagcaaacactaaacacaaccaaactacttctgtttctgttaggttgtgggaatatgggccttggtctgttggatccttggaccaaggaatatgggtgatatttctgttttcttctcatcagtgttttctaaaatttccacataatattttctctctctctttttttttttttttttgaggtagagtcttaccctgtcacccaggctggagtgcagtggcatgatcttggctcactgcaacctctgccacctgggttcaagcgattctcctgcctcggcctcccgagtacctgggactacaggtgcccgccaccacgcctggctaatttttttgtatttttagtagagacagggtttcaccatgttggccaggctggtcttgaactgctgacctcaagtgatccgcccgcctcagcctcccaaagtgctgggatgacaggtgtgagccactgtgcctggctccacctaatgttttcattcaggactaaatgaaacataaatgaagataaatgggccagtcgcggtggctcacgcctgtaatcccagcactttgggaggcttaggtgggcagatcacgggtcaggagttcgagtacagcctggccaacatagtgaaaccccgtctctactaaaaatacaaaaaattagccggacgtggtggtgggcacctgtaatcccagctactcaggaggctgaggcaggagaatggcttgaatccgggaggcggaggttgcagtgagctgagatcgcaccattgcactccagcctgggcaacagagcaagactctgtctcaaaaaaaaaaaaaaaaaaaaaaaagagagttcaagaccagcctggccaacatggtgaaacctcgtctctactaaaatacaaaaaaaaattagccaggcgtggtggcgggcacctgtagtcccagctcctcgtggaggctgaggcaggagaattgtttgaacccaagaggtggaggttgcagtgagccaaggcagcctggatgacgagggagactccatctcaaaaaaaaaaaaaaaaagataaatggatttaggttttaatgtttttaaaaaataaataaaatttccacatgaaatttgtaattttaaaaacgttacatagctgggcacagcagcagtgaactcctgtggtcccagctccttgggaggctgaggtgggagtatcagttgagcccaggaattggagtctgcagtgagctatgtgatcacaccactgcactccagcttgggcgacagagcaagactttgtctttaaaaaaggttaccgagacatgtagacacagaaaagcatgggctgaagactactgggagtagcaaagtcagcaggataggatatggaaatttgttacctgcttgagtgccctgtaaatgggtggccagacagaactgctcctggtgtcatgcgtggtttcagcaacttccacaagggggtggggttagaaggttctctcccatccttgtcaaagttgctaaaaccacgcacgacgccatgtgcagttccgtctggcagcccatttacagggctctcgtggtgggtgctgtctgcccaagctttcttgaccaggcttctctgaaggaagtttctctttgaaagaaaggaaacttgtggttgtcacaaccgatcgtggttatggaggcatttctccctaagcttactgaatggtgtcttgcaggtcttttccatggtggtcaccaatgttgccgccagcatggtaacatttggcagtgtggtattgagggtctttcctctgttttgcatccacagcagaggtctttactttttaccaaggagtgagtgggtttggaatgggttcccccctctcttagtttttggagacggggtctcgttctactgcccaggctggagtgcggtggtgcaccatagctcactgcagccttaaacttctaggctcaagtgattgtcctgccttggcctcccaaagtgctgggatgacacgtgtgagccactgcgcctggtcaccgtataccaaggaatgagtgggtttggaatgagttccctctcttttctttttttttttttttaagttacagtttgctttttgagatggagtctcactttgttgcccaggctggagtgcaatggtgggatcttggctcactgcagcctctgcctcccgggttcaagcgattcttctgcctcagcctcccgagtaactgggactataggcacacaccagcacacctggctaggtttcctctcttttttttttttttgagatggagtctcactctgtcgtcctggctggagtgcagtggtgtgatctcggctcactgcaaactccatgccccaggttcaagccattctcctgcctcagcctcccgagtagctgggactacaggcgcccaccggcacgcccggctaatttttttttgtatttttagtagagatggggtttcactgtgttagccgggatggtcttgatctcctgacctcgtgatccgtccacctcggcctcccaaagtgctgggattacaggcgtgagccaccacgcccggctcctctcttttctagaaggaatgttctccttctcaaaaggaaggtttctcctttgtgcttctccaaatgcaacaacaggatgtgtgtgtggtaaagggtgggaacactcagggcaatgatgtgctccaggtgagcagaagggagagaggttccagaaccttctctgccaaatgttcctgggagcaaatcagagccagccaagaaggggaagctgttagagtctctcttaccccattatttccaccaaaggcaccgaaaaagaaagggaagaaaggcaaagccaaaggcaccccgattgtcgatgggctcgctccagaggacatgagcaaggagcaggtgagcagagcgggctgtggcccagtccccgggtgggcgtgggcgggcaccacgcagggtgcctacgccgagtgtccatcttgccatgtggatccacccttctgtccaagccagaacacgccccccgcgtggcccataattcccatcagcggcaaagctttcggctgcaccatgtcttttcagaaaggtagtgcagcctgtgaaagagctttgtaacagggtggtaggagtgtggaaggacatgcttttctgatctaaaagctgtttttaatttcgtgtattctctttcaatcttaccctttttttgcacctgatgtgtatagacttatcgtagaacacacatgtagcattctcctttattttattcaccattaaacattatgtcaaaaaggaagtttttgaaagaaggatgatttacttcaaatcacatctgaatctgattaatcgttcatttttttttttttttttttttttttttttgagacggagtctcactctgtcgcccaggctggagtgcagtggcgcgatctcggctcactgtgagctccacctcccgggttcacaccattctcctgcctcagcctcccgagtagctgggactacaggcacctgccaccacgcctggctaattttttttttgtatttttagtagagacggggtttcaccgtgttagccaggatggtctcgatctcctgacctcgtgatccactcgcctcggcctcccaaagtgctgggattacaggcatgagccaccacgcctggccagtcattcattgtttttgataaaagtcccaacaaggagtaacagcatcagggctgcctttttcttgttgcttattttggggaggaggtgatgtttttatagtttctttgtaggagttagtttaagtctcttcttcatttggatgtagttaagggctacagaacataattacataattacaattttacctaaaaggctcctggagacggcagtgtgtggcaagcacggtgcaccctctggcctctgccctcatggacgactgcctgtgagcacctgacatgggacatgagggctgtgtcaactctgtgttattgttaataaatcttaccttcttttgatagttgtaagataaaaaatcaatacgaaggagactgaaagagtctcatgacctgaagttggagctaggcagaggtccttgaacaatggtaaagaatggctttattttacatgcaggcaaaccattggcagtttaagccagtggctaagcagagaggtgatggggtcaggtttgtgttctggaaagatgtctggagctgctggatggagaatggattgaacactgcgttgtcccagcatgtgagctgctgcccgtctccctgtccgcttcccattcctgtggagacaggccttgtggggcagtggccatggagcctacggggcagcctacggggcaggctacggggcagcttacggggcaggctatggggcagcctacggggcaggctacggggcaggcccttgcactgcacatcgcacgttgagccacagactcagaaggcttcttcagggtccaggcaggtggggagggatgggggtgacctggagactcctgccccgcagcagaggacagtttcatctgttcactggggagtgccttgtgggcctaggagttcagtgctgtttttttctgattttccaagagaagctggaaatctggatatttataagaaatctgaatattgagtgatggcaaaatctcaacaccatgtgagccaaacagaccagtcaggagccctggttcaggctctgcccaggagcctctaaaggtctgtgacgtgaagacatttgtcgttgtgccgaggcactggttggattcgggggtgcgtgtctccctcatgtctgcccggcatcctcggctcagaacccctcctgctgctccttcttgtttgctcgttgtcttgtcttcttttgaggtgagaaatgtgttttccctgtggggaatgtggtgttgagaaagaaaaaggctcacagtaagtggcctggggctgtgcccgaaaagtaactgattctgacggaatctcgctgtgtggcccaggctggagtgcggtggcgcgacctcggctcactgcaagctccacctcctgggttcacaccatcctgctgcttcaggctgcccagtagctgggactgcaggtgcctgccatcacgcccggctaatttttttgtatttttagtagagacgaggtttcaccgtgttagccaggatggccttgatctcctgacctcatgatctgcctgtctctgcctcccaaagtgctgggattacaggtgtgagccaccgcgcctggcagtaactgattcttaagggaaatgagctcccgagaaagctggaagcctgtcctacatttttttttaacctatttgcagattcgcaattgaaccctcttgagattttagagtctactggttttgtatattttttgcttaacattatatcttcaaaggtgaattttttttcatttagcattatgatatgaatttgtttaaatgctgctacatcatttgcatattttttttgggttaatgtgatatttctcctagttgatatactctaatttttcaaccatttccatatttatttatttattgtttagagacagggtcctgctctgtcacccaggtggagtgcagtggtgtgatcacggctcacggcagccttgacctcccaggtccaaacgatcctcctacctcagtcttctgagtagctgggactataggcatgtgccaccactcctggctaatttttttttttttttttttttgtagagacagggttttgccatgttgcctaggctgttcaactctggggctcaaaagatcctcccaaagtggtgggagccaccatgcctggctgtttgtgtattttttgagacagattctcactctgtcacccaggctggagtgtagtggcatgatcataactaaccgcagcctcaaccccctgagcttgagtgaccctcccacctcagctctcccagtagctgagactataggtgcgtgccatcatgcctagttaatgaaaaaaagtttttgcagagatggggtcttgctatgttgcccaagctggtcttcagctcctgggcgcgagggatccttcaacctcagcctcccagagtgctggggttgcaggcgagagccaccgcgcctcgcttatttccctgtttaaactggtcttaggttatttcctttttgatatttttgctgttgtaataatggtgtgggtaatatctttgagcaagatgctcttatatttcttttgagaaattttttaggcatcaattctcaggaatggatgaaaggatctagttattttatgattattggccaaattgaagagaattctgccacctgctgaatgcattctgtctccggagcttcctagccttatattttaactttttacatttagctgtttatttttaggtgaagttgagtcctccctctttcttccttgcctttcgccggccacacgccccgttgccgtgcatgggcccctgctcagtgcctcacctgacccactgcacctggccaggtggaggagcatgtcagccgcatccgggaggagctggaccgcgagcgggaggaacgaaactacttccagctggagcgggacaagatccacaccttctgggagatcacacggaggcagctggaggagaagaaggctgagctgcggaacaaagaccgggagatggaagaagccgaggagaggcaccaggtggagatcaaggtgagtggggccggcctgcacgtgctaacctggtcaccacagagccccagaggagctggatccagtgagggtgcaggtgggacattttctgttcttggctttgggagtcacagccttaaaggtgttttttataaaagcctgagggagagaccctgcaggtcctgagggtttaaaatgctgcctccacaacatggaaggaatatgggctctgggggcagactggcctgtttgcaactcagctctgccacttaataccccatgagctggggatgcacctcacctcccagccttggtgtcctgctctgtgcctcaagtgtacaggtttgcataggtgaacaggcatgtgtagctgtgtaaaggtgaggcatgcaagtgagcaggtggatgcaagtgagcatgtgtgtgcaggtgaggaggcgtggccaggtgaggaggtatgtgcaggtgaggtgtggggaggtgagcacgtggggcaggtatgtgcaggtgagcaggtaggtgcaagtgaccaggtgtctacaggtatgtacaggtgaggaggtgtagtacaggtgtagtgcaggcgaccaggtgtgtacgggaatttacaggtgaggaggtgtacaggtgaccaggtgtgtacaggtatggacaggtgagaaggtgtggtacaggtgtggtgcaggtgagcaggggggtacaggtatgtacaggtgaggtgtgttacaggtacggtgcaggtgatcaggtgtatacaggaatgtacaagtgaggaggtgtggtacaggtgaccaggtgtgtacaggtatggacaggtgaggaggtgtggtacaggtgtggtgtgggtgagcaggagtgtacaggtatgtacaggtgaggaggtgtggtacaggtgaccaggtgtgtacgggtacggacaggtgaggaggtgtggtacaggtgtggtatgggtgaccaggtgtgtacaggtatggacaggtgaggaggtgtggtacaggtgaccaggtgtgtacgggtacggacaggtgaggaggtgtggtgcaggtgtggtatgggtgaccaggtgtgtacaggtatggatggacaggtaaggaggtgtggtacaggtgaccaggtgtgtacaggtatggacaggtgaggaggtgtggtacaggtgtgctatgggtgaccaggtgtgcacaggtacggaaaggtgaggaggtgtggtgcaggtgagcagatggtactcccattgccctgcaggtgtacaagcagaaagtgaagcacctgctatatgagcaccagaacaacctgacagagatgaaggctgagggcactgtagtcatgaagctggcacagaaagagcaccgcatacaggagagtgtgctgcgcaaggacatgcgggcactgaaggtggagctcaaggagcaggagctggccagtgaggtggtggtgaagaacctgcggctggtaggtgtggcgggggcacctggaggctgacaggttgttgggacggcaagcctagtgctgcatgaactcctgtttattcaacagcaactgggaattcatatttctgcataagactttctgcatttttgcaatttgttgaaaaaaaattttttaaagcatgcatccaaacaaaccccattttgggaccaagtacacaattctgtctcagacctgagcaaaaaattgacgtcaccgaagagaaaaaatccagcttaggatctttcatgtgctgctgacacctgacacccagagacttttcctagggaatagcatcatatgcatttagtagaatgcaaaccaaccattaaaatatccagtgtgttgactcctgggcactgtgacagtttgtcacacaagctggtctgatttttacttttgaggctgggggtttccagggcaccattaaaattcatctgtgcacctggttcagtggctcacacccaaaatcccagcacttgggagggtcaggtgggagaagtggttgaggccaatagtttgagactagcttgggtgaaatagttgaaccccatgtctaaaaaatttaaaagaaaacattagctggtgtagtggcacatgccgatagtttcagctacttgggaggctgaggcgggaggatcccttgagctcaggaagtcaaggctgtggtgagctaggattgtgccactgcattccagcctaggtgacagagtgagacaaaacaaaaaggaaagagatcatttgctgagtgtccattagctgctaggtcctgatctgatctctgacaaaacgcctgcccgactggggctgttggtctagaaaggagagacaacaggtgagttggaagacaaaataaacgtgccagatacaacagagtatctggtggggaagagtgccatagaaggatcgaagtggggagaggtggggtgcggttttgtacaagcagttgaccggctgggagacgggatgggccagtgggaaagctcagagtgaccaggaggagactgtgggagagggtcagagcttgtccgcctcgaaagccgtggtggggactggagacgggtcagagctcgtccgcctcgaaagccgtggtggggactgggactttgaccctggtggagtctgttgccctctgagaacttgggcagaggagagatgtgtctcactaaggttcttcctggctgctgggttgaggagactttctgaacacatttgcctcacgcctggaagcagtccagcctccactgaatctggaagaaacttggtgacgttgctgacttcgcagcaaagcctgagagtgccgaagtcttgagccctccagaattagctggtcttaacccaggtcctggatatgatattgttacataatcagagtttcctgttgggtaaaaatatggctttaggccgggtgcggtggctcacgcctgtaatcccagcactttgggaggccgaggagggtgtatcacgaggtcaggagtttgagaccagcctgaccaacgtggtgaaaccccgtctctactaaaaatacaaaaattagccgggcgtggtggcgcacacctataatcccagctactcgggacgctgaggcagaagaatcacttgaacctgggagacggaggttgcggtgagccgagattgtgccactgcactccagcctgggcgacagtgtgagagtctgtctcaaaaaaaagaaaaattactgctttaaaaataatttatttttttatgcaaattttaaatatataatgtttatttaaatatataataattgttcattaaaactatatatttatttatttttagagatgaggtctcactctgtctcccgggctgcagtgcaatggtacaatcatagctcactgcagcctcgaacttctagtctcaagtgatccttctgccttagcctcccaagtagctggaactatagatatgagccaccacacccacctaatcttttttttttttttttttttttttttttgagatggagttttgctcttgttgcccaggctggagtgcagtggcacaatctcagttcaccacaacctctgcctcccgggttcaagctattctcctgcctcagcctctcgactagctgggattacaggcatgtgccaccatgcccggctaattttgtatttttagtagagacggggtttctccatgttggtcaggctggtcttaaactcccgacctcaggtggtctgtccagctcggcctcccaaagtgctgggattacaggcgtgagccactgtgcccggcaatctttaaattttctgtagaagatcttgctatgttgcttaggctgcccttgaactcttgacctcaagtgatcctcctgccttggcctccagcgtgctgggatgacaggaatgaatccttttaatatgctgcttcaggcagcagtgcagcaggttggaagctacacacggcacctggaaagatcccacagctctgtgtggatgtggctgctgctcttcaggctgtgggatggtttggcgatggaaccaagcgggttcagtgctcacgacgtctgttcatgttctctctcaagcttagaggtgactttagttgagggaggtgagttagggaatatggaggtgaccaaaaccatgaggaacagggtcagcctgaagggagcgggcttccctctgtgtccggctgtgtagtaatggccgcttctccctgtgcagaaacacaccgaggagatcaccaggatgcggaatgattttgagaggcaagttcgaggtcagtttcccgtgtgctcattgtgtaggtgccagagacacccccgccccatcagagaggaatttacctccagagcttgttaactcagggagcaaaaactggattaaaacagccaaggcatgcaagagaaagaacatggaagtttccaaggccagtggacccactcagaatcccagaacaacctatttccatgtgagtttgggaggctgtgattaccacacacattcccactcctagctaaaatcagtagttatcagcaggtggtagctattcagtgccgtgggcagccttcttaaaatagtcttctccatggctcctggtctgagaaggctccaatttcagaagtctctgtgttttactaataaaggctgattgtggctgggtggccacacaggcctcggttactgctcactggggtcagctgacattcagctgttggcacccccagtgcagggagcgattagcaatgcctgtcactggcaaaggcaggccgacagtggtgtgtgtgctgagtgtgagcatcagcagaaaaactcagtctaaacccctttgttcttctcttgcagagcttttgcctgcaaggctgttctgaccacagtgggcgttttgggcccgtttacaggctccatgttctgtagccgtaggggcaccacgtcttcctctgctaagctgctgtttgctgctgcctttcagaaattgaggccaagtatgataagaagatgaagatgctgagggacgaactcgacttgcggagaaagactgagctccacgaagtggaggagaggaagaatggccagatccacacgctgatgcagcgccacgaggaggccttcaccgacattaagaactactacaacgacatcaccctcaacaacctggccctcatcaactccctcaaggtgctgtgcgtgggctgggctggggaggcacactctgcctgtcctagaatgtgggctgcagagtcctggggatccagaccccagctctccaccccaacacacccagtactttttataagattgtttgacaatgcccctctcatatccttaactgaaattcctaaataacgtaacctatctctacctattgttaaaagcagtcaggatattgccctcaccgtagtgcagagggggaagtaatgaagtgtgttctggtttgtaaaagctcagatggaaccgcagtgagggccgtgatgtggctggagtggataggtgtcatagtcactgcctgcgacaggtggataggtgtcatcgtcactgcatgctggcagtgacaggattttctacagtagacaacggcccttggtggaatcttgaacaaagtatagtccttcagtctgcatggaagctgcattcccagaaaactcagaataagttgaagctgcagaaatactgtttatacatagaagacgtctaggtgccagcatgcctgaggctggcagcagctggtgatgggcaggagagcacccagctctcaccatgcaggccacagcccctttggttctgcctgctgagcccctgccgggcctgtgcttgtgcctgcaggagcagatggaggacatgcggaagaaggaggaccacctggagagggagatggcagaggtgtctgggcagaacaagcgcctggcagaccctctccagaaggctcgggaggagatgagcgagatgcagaaacagctcgcaaactacgagagggacaagcagatcctgcttgtgagtttcccgctggattcctctccctccttggcatgagcttgcctaggctcaggagggaggagcatcacagggaggggcttggcccttagggcaggaagggagacggggaggcctgcatttctcctttctctgcctcgtgttctcctggggaaagtaaagtctgggggtgttttggagacaaggccctcatcttcaccacgtgctaccggccggccttggtgagactcagctgcttgtgtcctggaaccaggtctttctggcgattatttttggccttgccatctcccaggagcccgtgttacttggatgactgtgaatcttgaatactttctgtcccctactccctgtttttcctccagtgcacaaaagcccgtttgaaagtcagggagaaagagctgaaagacctgcagtgggagcatgaagtgttagagcagcgattcaccaaggtgagtggcaccacgctggccctgcagttggcggtgggtgttagagcaacggttcaccaagttcaccaaggtgagcgggcactaggctggccctgcagtggggatggcacccctgctagccagggacggggctctccttgtggcccctggaccagcttcagatgccttggccaggtttctgggttctgaagctggaggccctgttccctgtaactcattccgcagcttctaagaggcaaaaacctgtggcctgttctgcatgcatattctgcagaaggcctggggtcttgatggggaacggatcacacatgactttcgtcccctcgagagctcacctctgaaagcacatgagggaggctcttaagtgtaagtgaagatgagtctccggctgctcagtgctggtcctcacactggcgagttttatgggctcccttccaggtttcctgcatgctctcgtgtggatgtgactttgtatgttacgaacacgggatcaggccataagcacaatttgctttttaatctcacagtgtatcaggctgcacataggaagcggtctcatccttttcacagctgcttggtgctgcgttttgtgaacgtttgatcatttagccgactcccgtctgtttctaatgctctgctgctataagcattgctgcctcaatccttttaaatttgtctttgtgcacttgtgtgagattgcttcttaggaaagccagttcctagcagtgggattgttgagtctgagggttctgttctgaggaccctgatcatctgtccagagggctgctctgagtcacacacctgccagggtgcggaggggccgtttccatcctcacctgcaccagatctgacaggtttaaacctttgcagaagtgactgggtggaaaacatctcatttcgtgggcacttccaagattcgcagtgagtggtaggggtgctcggtcctgtctctgtcccttaaagacgctccttgcctctgttcagtttcaaagttctggccaaggaccaatccctgcagcatgggcccctcaaggctttgtctgtggtgtgcggggccagggcatcttatcttgagccgcagttatatgtgctgttttgttctctaacctaattgaaatttttgaacacaaaccgttgtagtgggattcgcttctcagaaatatcccatctgtctgtcagatctagccccaccttcagagacacctcaggtcctgcacgacgtgcattgctaggctgtgccaactcttggcacctaagggaagggcacctgcaaggtagtcagtgagatcctgaggactgctgtgttagacaaggggcccttccttctccctgtgggttttgaggtggacattattgggaagaggacagcagagacgtgcctgggttggagccttgttttctgtcacattttcttccatttgaatgtggttcctgacagtgtccaagctggtgtctcttcctagagaaccgagagctcaaatttatcagcaaaatttagagaccaaggcagttatttatttatttatttatttatttatttatttatttatttttgagatggagtttcgctcttgttgcccaggctggagtacaatggcacgatctcggctcactgcaacctccacctcctgggttcaagtgatactcctgcctcggcctcccgagtagctgggattacaggcgcctgccaccacgcccggctaatgtttggtatttctgatagagacagggtttcactctgttggccaggctggtctcgaactcctgacctcaggcgatccacccacctcaccctcccaaagtgctgggattacaggcgtgagccaccacacgctgctcagggtgttcacttttttatagtcttcaacaaagtctagatttttttagaatgcacaattaataagtagaagaattaggagataaaaaagaacagttttactggctggcaggtagctggctccaaggccgtgctccagatccaccatttgtggggcggacagcacatgtgatgccaggatctggggctggccaagggagcatatcctccaaggggccccacctgcaagctcggcctgctggatgccctggatctcaaatctcacctgagcccacagccctcactcgggcaagactggcctcggccacccatgaagcagctttcagggtggggctgcttcagctcttaccaggacacttatggcttccagagacaccttcctgagagaagggcttatgctgatgtgttcctcctgccttccactgcgtggatggctctacaaagggccagggcgcaggcagtgtggacaacacactgaccccggtgctgtgggagtgggcactgttgggaggcagcgtgttccaggcaggtgcagaggtgggaggcagcatcttcccagcgagatgtccccaggtgaggggcctcatcgcccacccccagcgctgtccctacaggtgcagcaggagcgggacgagctctatcggaagttcaccgcagccatccaggaggtgcagcagaagacagggttcaagaacctcgtgctagaacgcaagctgcaggctctgagcgccgctgtggagaagaaggaggtgcagttcaacgaggtcctggctgcctctaacctggaccctgcagccctgacgctggtgtcccgcaagctggaggtaggccctagacaggctcctgaccccagtgggcggcctcatccctgtggcaagagtcttcagttctgtgctgctcctcggataggcacagagacccctcggtcggccactgaggaggggcattcatgggtttcctgtggccagtttcgggccagttgggaactgtggaagggctgggcaggggaaccagatcagggcccactctgctattgatggggagcacagggctggagggggctggttggggccagcacagaatggggacgggcagagggttggagagccgccaggaggctgagtccacaggtggggctgggaggggccgaggtgacttggtgtttgcacatgggggaacgacgggtcccggcccagtgggcggtggtgcctgtgggaccctggtcatctgggatggcctggctctcagggcctgaggtagtgaggctgtataggaggggcctcacctgggccagaggcactgtggccccgggactgaaaactcatctttgtttgctcagcactgggcccagtgagcacaggcaggtgagggagtgagggtcccactgttgggaggtgggggaggcgtgtttccagctcctggctgagggctgcacccagcctgctgctaagccaccgaaatgagggtgaagagagcagtcgtggcctgtgagggtcattgcagctgcgcccacgcgccagggtgaggatggaggatggagctaaatgtgggtcaacccctcctttcctggtcattgttacctcgacttctaagtgaggaatcttctggggaaatgacagaggcccccgcagggacactgtttgctgctggccaggtgtgagggggctgctgtgtcagtgggcagcagggacggctctaaagccaggctgggcccagcagtgccccacaggcaggagcccaagaagtccctgcctcgccacgtggtgagacccttgcccacatctgggcggggccagcgctgctgaagactacttttttctgttacaaaaaagtgggatagccgggcgcggtggctcacgcctgtaatcccagcactttgggaggctgaggtgggcagatcacgagtttgggagttcaagaccagcctggccaagatggtgaaaccccgtctctactaaaaatacaaaaattagctgggcttggtggcgggtgtaatcccagctatttgggaggctgaggcagagaattcctggcacctgggaggcggaggttgcggtgagcctagatcgcgccactgcactccagcctgggcaacggggcgagactccatctcagaaaaaaaagtgagatagtacattcacaagcctcaagaaatttaagcaatatgtaggtggtgtttagtgaccagtctccacagtgtggctgcacgctgcctgccctcacctcatctgcatttcttgtggtctggactgctctttgagttttttcttgagacggtgtcttgctctgtcacccagactggagtgcagtggctcaatctcggcgcactgcaacctccgtttcccaggttcaagcaattctcatgcctcagcctcctgagtagctgggattacacaggtgtgagccaccgtgcccggctacttttcgtatagtagagacggggtttcgccacgttggccaggctggtctcaaactcctgacctcaagtgatctgccctccttggcctcccacactgctgggatcacaggtgtgagcggcagtgcctggcctggactgttgctggagaggcaggttgtgcaagctcccagttctctgcttcttccttgttttctctccacccttggagacctttttctgctgacaaccctgtgtggatggatgcatccatcaaaccaggctgctattcgctggatctctcagaacgcccactggagtccccaggccgctcccgttgcctcggccaaaagatgagtctcaaactcccatcacctctctctcctcaggatgttcttgagtcgaagaacagcaccatcaaggacctgcagtatgagctggcccaggtctgtaaggtacggctgtgccctgccctccctcaggggcaccccctcggtgcccagactgttctaaatgcagacggtctctgaggaccccacctgtgcccacttcgtacctcgtttgacaaggcagctgtcactgtccccacgtgagggtgcagtcatagccgagagcatctggattctgtgtggtctggggcagtgcactgctgtctaggccatgtctctgctgggatgggtgtagggggggacctggacgcttccctggtcagccccttcccctgggcagggagtcagaaggtgctgtgcccaccggggaaggaaacagacgtcattcaacaggggaagggagggcgtgaagaacctgagtgggaaacacccagccagggcccagagccctcccagaccacagctctgccctgagtgtccctgccctctgcctccgtctcgtcatttgtggaataggaatagtgacagcctctccctgtcgtgctacctgagccaacgcagtgaaggtgcttggagctgtgtcccacacgggaaatgactgataagcctttggctttatccttctgcaccgtgatgctcacgctgcccctccatggagctgcactcagctctggtggtcctgagcgtggggaccctcagctccctgacactgccctgtctccacaggcccataacgacctgctgcgcacgtatgaggcaaagctgctggccttcgggatccctctggacaacgtgggcttcaagcccttggaaacagctgtgatcggacagacactgggccagggccccgcgggactggtgggcaccccgacgtagctgcccccctggggggccacagcccagagaaccagcctaggaacactcgggatgacaccccttatcacaccaaggacagcaagttttttagattttatcatcagcaaatgaaagcttttcacatgtt

SEQ ID NO: 12085 - DNA, 1687 bp, Homo sapiens
gggccgcgccccgccgcggacaccaccgggacctggctgcgccctcccgaccccggccgggcgtccggggctcctgcgcactcacttggcggccgcgcccgctggcgtcctcttgttctcttccaggcaccgaaaaagaaagggaagaaaggcaaagccaaaggcaccccgattgtcgatgggctcgctccagaggacatgagcaaggagcaggtggaggagcatgtcagccgcatccgggaggagctggaccgcgagcgggaggaacgaaactacttccagctggagcgggacaagatccacaccttctgggagatcacacggaggcagctggaggagaagaaggctgagctgcggaacaaagaccgggagatggaagaagccgaggagaggcaccaggtggagatcaaggtgtacaagcagaaagtgaagcacctgctatatgagcaccagaacaacctgacagagatgaaggctgagggcactgtagtcatgaagctggcacagaaagagcaccgcatacaggagagtgtgctgcgcaaggacatgcgggcactgaaggtggagctcaaggagcaggagctggccagtgaggtggtggtgaagaacctgcggctgaaacacaccgaggagatcaccaggatgcggaatgattttgagaggcaagttcgagaaattgaggccaagtatgataagaagatgaagatgctgagggacgaactcgacttgcggagaaagactgagctccacgaagtggaggagaggaagaatggccagatccacacgctgatgcagcgccacgaggaggccttcaccgacattaagaactactacaacgacatcaccctcaacaacctggccctcatcaactccctcaaggagcagatggaggacatgcggaagaaggaggaccacctggagagggagatggcagaggtgtctgggcagaacaagcgcctggcagaccctctccagaaggctcgggaggagatgagcgagatgcagaaacagctcgcaaactacgagagggacaagcagatcctgctttgcacaaaagcccgtttgaaagtcagggagaaagagctgaaagacctgcagtgggagcatgaagtgttagagcagcgattcaccaaggtgcagcaggagcgggacgagctctatcggaagttcaccgcagccatccaggaggtgcagcagaagacagggttcaagaacctcgtgctagaacgcaagctgcaggctctgagcgccgctgtggagaagaaggaggtgcagttcaacgaggtcctggctgcctctaacctggaccctgcagccctgacgctggtgtcccgcaagctggaggatgttcttgagtcgaagaacagcaccatcaaggacctgcagtatgagctggcccaggtctgtaaggcccataacgacctgctgcgcacgtatgaggcaaagctgctggccttcgggatccctctggacaacgtgggcttcaagcccttggaaacagctgtgatcggacagacactgggccagggccccgcgggactggtgggcaccccgacgtagctgcccccctggggggccacagcccagagaaccagcctaggaacactcgggatgacaccccttatcacaccaaggacagcaagttttttagattttatcatcagcaaatgaaagcttttcacatgtt

SEQ ID NO: 12086 - DNA, 14244 bp, Homo sapiens
ctggtcccggagtcgccgctgggcctgtccgctggcgtcatggtgagcaggggcgggagcggggctggggtcctcggcaggggcccggagacctcggggcagggaggcctcggtacacggagaccctgggaatgggaggcctggagcgctgggtttctggaattgagagctcggtgctcttgtgggggtctccgtggggcaaactcaggatgctcccggccccggggcctggcagcactcgggactgagacctgggctgtccagagccctgtgctcacaggggtggtcatagaacgcccagggcccggggtcggcggcgcacggtccccagaagagtgaacatgcgtcaaggggactctcatcctggaatggcagactcggtctgttggatccctgggacctagggtttcagctcacgaggctttgcagagcaccagggtccccatggaatagagccggaggcaggaattaccctaagacctttggtctcccggatggagagcctggggcacaccagagtggctagagatccctctacaccaaggaggcccggacaggtccagtgcccttggagtgcccagggcacaaccttgggatacaggaaccactgttcccttggaaagcctggcaggagtcaggcccagaccgagaagaggaaggcggagctcgtggcctcatcagctccatgtctgtctttctcttgtaaagggctctccctttgtggtacaggaattgtcagtaactcaatttctgggcaggtgtggcagggtgggtttcagctggtggggggaggaaagctctgggagccccaccaagtccctgcagctggctgtgaaggtcccaaatgctaagtaatgctgaaccttcctccactgccttcagggctttgtgatgaggtagccttcttggagtggagggattaaaaagagagcagtacattacgaattaaatttaagtagatgggttttctgacccaggaagggtcttctgaaaaccgactatgaaagaaactaccaaactaggccaggagtctgggcgcggtggctcacgcctgtaatcccatcactttgggaggccgaggcaggcggatcatgaggtcaggagatccagaccatcctggccaacatggtgaaaatccatatctattaaacatacaaaaattagctgggtgtggtggcgtgtgcctgtagttccagctactcgggaggctgaggcaggagaatcacttggacctgggaggcggaggttgcagcgagccgagatcgcaccaccgcactccagcctggcaacacgtctcttaaaaaaaaaaaaaaaaagcagggtgtagtggctgacgcctgtaaacccagcactttaggagtccaaggtgggtggatcacttgaggccaggagttggagaccagcctggccaacatggtgaaaccctgtctttactaaaaatacacacacacacacactcacacacacacacacacaaaattagccgggtgtggtggtacgcacctatagtcccagctacttgggaggctgaggcaggagaatttcttgaacctggaaggtagaggttgtgtagtgggatttttaaggaattagagagaccgatggggttcaggaggatatttattaattatttaggtgcaccggcccagtcagattaaaatccaaaggactgagccctgaacaaagagttaagttaccttttaagcttttcgtggggcagagggagatctgtgcagggggaagcatgcttcagatgtgagaaataaaggcagttgttcagttgaaacatgcattacatcatttcttactttttaaggaaaaacatgttttgcgacttgagtttatctgcctagtgaccttgcagccgcacagctacagaatcagggtcttcacaatgcctgggaagggaggagagacaaggctcactagccgcagaaaaacaggcagttaatttttaaaggactccagctctttctctttttcagggggagttgggttttcttatatataactgagtttctgcttacacactttttaatttcttttaattcctgttccagttgcagtgagccaggattgcaccactgcactccagcctgggtgacagagcaagactccatctcaaaaaaaacaaaaacaaaaacaaaaaacaaaaaaatgcaacagcaaacacaacagcaaacactaaacacaaccaaactacttctgtttctgttaggttgtgggaatatgggccttggtctgttggatccttggaccaaggaatatgggtgatatttctgttttcttctcatcagtgttttctaaaatttccacataatattttctctctctctttttttttttttttttgaggtagagtcttaccctgtcacccaggctggagtgcagtggcatgatcttggctcactgcaacctctgccacctgggttcaagcgattctcctgcctcggcctcccgagtacctgggactacaggtgcccgccaccacgcctggctaatttttttgtatttttagtagagacagggtttcaccatgttggccaggctggtcttgaactgctgacctcaagtgatccgcccgcctcagcctcccaaagtgctgggatgacaggtgtgagccactgtgcctggctccacctaatgttttcattcaggactaaatgaaacataaatgaagataaatgggccagtcgcggtggctcacgcctgtaatcccagcactttgggaggcttaggtgggcagatcacgggtcaggagttcgagtacagcctggccaacatagtgaaaccccgtctctactaaaaatacaaaaaattagccggacgtggtggtgggcacctgtaatcccagctactcaggaggctgaggcaggagaatggcttgaatccgggaggcggaggttgcagtgagctgagatcgcaccattgcactccagcctgggcaacagagcaagactctgtctcaaaaaaaaaaaaaaaaaaaaaaaagagagttcaagaccagcctggccaacatggtgaaacctcgtctctactaaaatacaaaaaaaaattagccaggcgtggtggcgggcacctgtagtcccagctcctcgtggaggctgaggcaggagaattgtttgaacccaagaggtggaggttgcagtgagccaaggcagcctggatgacgagggagactccatctcaaaaaaaaaaaaaaaaagataaatggatttaggttttaatgtttttaaaaaataaataaaatttccacatgaaatttgtaattttaaaaacgttacatagctgggcacagcagcagtgaactcctgtggtcccagctccttgggaggctgaggtgggagtatcagttgagcccaggaattggagtctgcagtgagctatgtgatcacaccactgcactccagcttgggcgacagagcaagactttgtctttaaaaaaggttaccgagacatgtagacacagaaaagcatgggctgaagactactgggagtagcaaagtcagcaggataggatatggaaatttgttacctgcttgagtgccctgtaaatgggtggccagacagaactgctcctggtgtcatgcgtggtttcagcaacttccacaagggggtggggttagaaggttctctcccatccttgtcaaagttgctaaaaccacgcacgacgccatgtgcagttccgtctggcagcccatttacagggctctcgtggtgggtgctgtctgcccaagctttcttgaccaggcttctctgaaggaagtttctctttgaaagaaaggaaacttgtggttgtcacaaccgatcgtggttatggaggcatttctccctaagcttactgaatggtgtcttgcaggtcttttccatggtggtcaccaatgttgccgccagcatggtaacatttggcagtgtggtattgagggtctttcctctgttttgcatccacagcagaggtctttactttttaccaaggagtgagtgggtttggaatgggttcccccctctcttagtttttggagacggggtctcgttctactgcccaggctggagtgcggtggtgcaccatagctcactgcagccttaaacttctaggctcaagtgattgtcctgccttggcctcccaaagtgctgggatgacacgtgtgagccactgcgcctggtcaccgtataccaaggaatgagtgggtttggaatgagttccctctcttttctttttttttttttttaagttacagtttgctttttgagatggagtctcactttgttgcccaggctggagtgcaatggtgggatcttggctcactgcagcctctgcctcccgggttcaagcgattcttctgcctcagcctcccgagtaactgggactataggcacacaccagcacacctggctaggtttcctctcttttttttttttttgagatggagtctcactctgtcgtcctggctggagtgcagtggtgtgatctcggctcactgcaaactccatgccccaggttcaagccattctcctgcctcagcctcccgagtagctgggactacaggcgcccaccggcacgcccggctaatttttttttgtatttttagtagagatggggtttcactgtgttagccgggatggtcttgatctcctgacctcgtgatccgtccacctcggcctcccaaagtgctgggattacaggcgtgagccaccacgcccggctcctctcttttctagaaggaatgttctccttctcaaaaggaaggtttctcctttgtgcttctccaaatgcaacaacaggatgtgtgtgtggtaaagggtgggaacactcagggcaatgatgtgctccaggtgagcagaagggagagaggttccagaaccttctctgccaaatgttcctgggagcaaatcagagccagccaagaaggggaagctgttagagtctctcttaccccattatttccaccaaaggcaccgaaaaagaaagggaagaaaggcaaagccaaaggcaccccgattgtcgatgggctcgctccagaggacatgagcaaggagcaggtgagcagagcgggctgtggcccagtccccgggtgggcgtgggcgggcaccacgcagggtgcctacgccgagtgtccatcttgccatgtggatccacccttctgtccaagccagaacacgccccccgcgtggcccataattcccatcagcggcaaagctttcggctgcaccatgtcttttcagaaaggtagtgcagcctgtgaaagagctttgtaacagggtggtaggagtgtggaaggacatgcttttctgatctaaaagctgtttttaatttcgtgtattctctttcaatcttaccctttttttgcacctgatgtgtatagacttatcgtagaacacacatgtagcattctcctttattttattcaccattaaacattatgtcaaaaaggaagtttttgaaagaaggatgatttacttcaaatcacatctgaatctgattaatcgttcatttttttttttttttttttttttttttttgagacggagtctcactctgtcgcccaggctggagtgcagtggcgcgatctcggctcactgtgagctccacctcccgggttcacaccattctcctgcctcagcctcccgagtagctgggactacaggcacctgccaccacgcctggctaattttttttttgtatttttagtagagacggggtttcaccgtgttagccaggatggtctcgatctcctgacctcgtgatccactcgcctcggcctcccaaagtgctgggattacaggcatgagccaccacgcctggccagtcattcattgtttttgataaaagtcccaacaaggagtaacagcatcagggctgcctttttcttgttgcttattttggggaggaggtgatgtttttatagtttctttgtaggagttagtttaagtctcttcttcatttggatgtagttaagggctacagaacataattacataattacaattttacctaaaaggctcctggagacggcagtgtgtggcaagcacggtgcaccctctggcctctgccctcatggacgactgcctgtgagcacctgacatgggacatgagggctgtgtcaactctgtgttattgttaataaatcttaccttcttttgatagttgtaagataaaaaatcaatacgaaggagactgaaagagtctcatgacctgaagttggagctaggcagaggtccttgaacaatggtaaagaatggctttattttacatgcaggcaaaccattggcagtttaagccagtggctaagcagagaggtgatggggtcaggtttgtgttctggaaagatgtctggagctgctggatggagaatggattgaacactgcgttgtcccagcatgtgagctgctgcccgtctccctgtccgcttcccattcctgtggagacaggccttgtggggcagtggccatggagcctacggggcagcctacggggcaggctacggggcagcttacggggcaggctatggggcagcctacggggcaggctacggggcaggcccttgcactgcacatcgcacgttgagccacagactcagaaggcttcttcagggtccaggcaggtggggagggatgggggtgacctggagactcctgccccgcagcagaggacagtttcatctgttcactggggagtgccttgtgggcctaggagttcagtgctgtttttttctgattttccaagagaagctggaaatctggatatttataagaaatctgaatattgagtgatggcaaaatctcaacaccatgtgagccaaacagaccagtcaggagccctggttcaggctctgcccaggagcctctaaaggtctgtgacgtgaagacatttgtcgttgtgccgaggcactggttggattcgggggtgcgtgtctccctcatgtctgcccggcatcctcggctcagaacccctcctgctgctccttcttgtttgctcgttgtcttgtcttcttttgaggtgagaaatgtgttttccctgtggggaatgtggtgttgagaaagaaaaaggctcacagtaagtggcctggggctgtgcccgaaaagtaactgattctgacggaatctcgctgtgtggcccaggctggagtgcggtggcgcgacctcggctcactgcaagctccacctcctgggttcacaccatcctgctgcttcaggctgcccagtagctgggactgcaggtgcctgccatcacgcccggctaatttttttgtatttttagtagagacgaggtttcaccgtgttagccaggatggccttgatctcctgacctcatgatctgcctgtctctgcctcccaaagtgctgggattacaggtgtgagccaccgcgcctggcagtaactgattcttaagggaaatgagctcccgagaaagctggaagcctgtcctacatttttttttaacctatttgcagattcgcaattgaaccctcttgagattttagagtctactggttttgtatattttttgcttaacattatatcttcaaaggtgaattttttttcatttagcattatgatatgaatttgtttaaatgctgctacatcatttgcatattttttttgggttaatgtgatatttctcctagttgatatactctaatttttcaaccatttccatatttatttatttattgtttagagacagggtcctgctctgtcacccaggtggagtgcagtggtgtgatcacggctcacggcagccttgacctcccaggtccaaacgatcctcctacctcagtcttctgagtagctgggactataggcatgtgccaccactcctggctaatttttttttttttttttttttgtagagacagggttttgccatgttgcctaggctgttcaactctggggctcaaaagatcctcccaaagtggtgggagccaccatgcctggctgtttgtgtattttttgagacagattctcactctgtcacccaggctggagtgtagtggcatgatcataactaaccgcagcctcaaccccctgagcttgagtgaccctcccacctcagctctcccagtagctgagactataggtgcgtgccatcatgcctagttaatgaaaaaaagtttttgcagagatggggtcttgctatgttgcccaagctggtcttcagctcctgggcgcgagggatccttcaacctcagcctcccagagtgctggggttgcaggcgagagccaccgcgcctcgcttatttccctgtttaaactggtcttaggttatttcctttttgatatttttgctgttgtaataatggtgtgggtaatatctttgagcaagatgctcttatatttcttttgagaaattttttaggcatcaattctcaggaatggatgaaaggatctagttattttatgattattggccaaattgaagagaattctgccacctgctgaatgcattctgtctccggagcttcctagccttatattttaactttttacatttagctgtttatttttaggtgaagttgagtcctccctctttcttccttgcctttcgccggccacacgccccgttgccgtgcatgggcccctgctcagtgcctcacctgacccactgcacctggccaggtggaggagcatgtcagccgcatccgggaggagctggaccgcgagcgggaggaacgaaactacttccagctggagcgggacaagatccacaccttctgggagatcacacggaggcagctggaggagaagaaggctgagctgcggaacaaagaccgggagatggaagaagccgaggagaggcaccaggtggagatcaaggtgagtggggccggcctgcacgtgctaacctggtcaccacagagccccagaggagctggatccagtgagggtgcaggtgggacattttctgttcttggctttgggagtcacagccttaaaggtgttttttataaaagcctgagggagagaccctgcaggtcctgagggtttaaaatgctgcctccacaacatggaaggaatatgggctctgggggcagactggcctgtttgcaactcagctctgccacttaataccccatgagctggggatgcacctcacctcccagccttggtgtcctgctctgtgcctcaagtgtacaggtttgcataggtgaacaggcatgtgtagctgtgtaaaggtgaggcatgcaagtgagcaggtggatgcaagtgagcatgtgtgtgcaggtgaggaggcgtggccaggtgaggaggtatgtgcaggtgaggtgtggggaggtgagcacgtggggcaggtatgtgcaggtgagcaggtaggtgcaagtgaccaggtgtctacaggtatgtacaggtgaggaggtgtagtacaggtgtagtgcaggcgaccaggtgtgtacgggaatttacaggtgaggaggtgtacaggtgaccaggtgtgtacaggtatggacaggtgagaaggtgtggtacaggtgtggtgcaggtgagcaggggggtacaggtatgtacaggtgaggtgtgttacaggtacggtgcaggtgatcaggtgtatacaggaatgtacaagtgaggaggtgtggtacaggtgaccaggtgtgtacaggtatggacaggtgaggaggtgtggtacaggtgtggtgtgggtgagcaggagtgtacaggtatgtacaggtgaggaggtgtggtacaggtgaccaggtgtgtacgggtacggacaggtgaggaggtgtggtacaggtgtggtatgggtgaccaggtgtgtacaggtatggacaggtgaggaggtgtggtacaggtgaccaggtgtgtacgggtacggacaggtgaggaggtgtggtgcaggtgtggtatgggtgaccaggtgtgtacaggtatggatggacaggtaaggaggtgtggtacaggtgaccaggtgtgtacaggtatggacaggtgaggaggtgtggtacaggtgtgctatgggtgaccaggtgtgcacaggtacggaaaggtgaggaggtgtggtgcaggtgagcagatggtactcccattgccctgcaggtgtacaagcagaaagtgaagcacctgctatatgagcaccagaacaacctgacagagatgaaggctgagggcactgtagtcatgaagctggcacagaaagagcaccgcatacaggagagtgtgctgcgcaaggacatgcgggcactgaaggtggagctcaaggagcaggagctggccagtgaggtggtggtgaagaacctgcggctggtaggtgtggcgggggcacctggaggctgacaggttgttgggacggcaagcctagtgctgcatgaactcctgtttattcaacagcaactgggaattcatatttctgcataagactttctgcatttttgcaatttgttgaaaaaaaattttttaaagcatgcatccaaacaaaccccattttgggaccaagtacacaattctgtctcagacctgagcaaaaaattgacgtcaccgaagagaaaaaatccagcttaggatctttcatgtgctgctgacacctgacacccagagacttttcctagggaatagcatcatatgcatttagtagaatgcaaaccaaccattaaaatatccagtgtgttgactcctgggcactgtgacagtttgtcacacaagctggtctgatttttacttttgaggctgggggtttccagggcaccattaaaattcatctgtgcacctggttcagtggctcacacccaaaatcccagcacttgggagggtcaggtgggagaagtggttgaggccaatagtttgagactagcttgggtgaaatagttgaaccccatgtctaaaaaatttaaaagaaaacattagctggtgtagtggcacatgccgatagtttcagctacttgggaggctgaggcgggaggatcccttgagctcaggaagtcaaggctgtggtgagctaggattgtgccactgcattccagcctaggtgacagagtgagacaaaacaaaaaggaaagagatcatttgctgagtgtccattagctgctaggtcctgatctgatctctgacaaaacgcctgcccgactggggctgttggtctagaaaggagagacaacaggtgagttggaagacaaaataaacgtgccagatacaacagagtatctggtggggaagagtgccatagaaggatcgaagtggggagaggtggggtgcggttttgtacaagcagttgaccggctgggagacgggatgggccagtgggaaagctcagagtgaccaggaggagactgtgggagagggtcagagcttgtccgcctcgaaagccgtggtggggactggagacgggtcagagctcgtccgcctcgaaagccgtggtggggactgggactttgaccctggtggagtctgttgccctctgagaacttgggcagaggagagatgtgtctcactaaggttcttcctggctgctgggttgaggagactttctgaacacatttgcctcacgcctggaagcagtccagcctccactgaatctggaagaaacttggtgacgttgctgacttcgcagcaaagcctgagagtgccgaagtcttgagccctccagaattagctggtcttaacccaggtcctggatatgatattgttacataatcagagtttcctgttgggtaaaaatatggctttaggccgggtgcggtggctcacgcctgtaatcccagcactttgggaggccgaggagggtgtatcacgaggtcaggagtttgagaccagcctgaccaacgtggtgaaaccccgtctctactaaaaatacaaaaattagccgggcgtggtggcgcacacctataatcccagctactcgggacgctgaggcagaagaatcacttgaacctgggagacggaggttgcggtgagccgagattgtgccactgcactccagcctgggcgacagtgtgagagtctgtctcaaaaaaaagaaaaattactgctttaaaaataatttatttttttatgcaaattttaaatatataatgtttatttaaatatataataattgttcattaaaactatatatttatttatttttagagatgaggtctcactctgtctcccgggctgcagtgcaatggtacaatcatagctcactgcagcctcgaacttctagtctcaagtgatccttctgccttagcctcccaagtagctggaactatagatatgagccaccacacccacctaatcttttttttttttttttttttttttttttgagatggagttttgctcttgttgcccaggctggagtgcagtggcacaatctcagttcaccacaacctctgcctcccgggttcaagctattctcctgcctcagcctctcgactagctgggattacaggcatgtgccaccatgcccggctaattttgtatttttagtagagacggggtttctccatgttggtcaggctggtcttaaactcccgacctcaggtggtctgtccagctcggcctcccaaagtgctgggattacaggcgtgagccactgtgcccggcaatctttaaattttctgtagaagatcttgctatgttgcttaggctgcccttgaactcttgacctcaagtgatcctcctgccttggcctccagcgtgctgggatgacaggaatgaatccttttaatatgctgcttcaggcagcagtgcagcaggttggaagctacacacggcacctggaaagatcccacagctctgtgtggatgtggctgctgctcttcaggctgtgggatggtttggcgatggaaccaagcgggttcagtgctcacgacgtctgttcatgttctctctcaagcttagaggtgactttagttgagggaggtgagttagggaatatggaggtgaccaaaaccatgaggaacagggtcagcctgaagggagcgggcttccctctgtgtccggctgtgtagtaatggccgcttctccctgtgcagaaacacaccgaggagatcaccaggatgcggaatgattttgagaggcaagttcgaggtcagtttcccgtgtgctcattgtgtaggtgccagagacacccccgccccatcagagaggaatttacctccagagcttgttaactcagggagcaaaaactggattaaaacagccaaggcatgcaagagaaagaacatggaagtttccaaggccagtggacccactcagaatcccagaacaacctatttccatgtgagtttgggaggctgtgattaccacacacattcccactcctagctaaaatcagtagttatcagcaggtggtagctattcagtgccgtgggcagccttcttaaaatagtcttctccatggctcctggtctgagaaggctccaatttcagaagtctctgtgttttactaataaaggctgattgtggctgggtggccacacaggcctcggttactgctcactggggtcagctgacattcagctgttggcacccccagtgcagggagcgattagcaatgcctgtcactggcaaaggcaggccgacagtggtgtgtgtgctgagtgtgagcatcagcagaaaaactcagtctaaacccctttgttcttctcttgcagagcttttgcctgcaaggctgttctgaccacagtgggcgttttgggcccgtttacaggctccatgttctgtagccgtaggggcaccacgtcttcctctgctaagctgctgtttgctgctgcctttcagaaattgaggccaagtatgataagaagatgaagatgctgagggacgaactcgacttgcggagaaagactgagctccacgaagtggaggagaggaagaatggccagatccacacgctgatgcagcgccacgaggaggccttcaccgacattaagaactactacaacgacatcaccctcaacaacctggccctcatcaactccctcaaggtgctgtgcgtgggctgggctggggaggcacactctgcctgtcctagaatgtgggctgcagagtcctggggatccagaccccagctctccaccccaacacacccagtactttttataagattgtttgacaatgcccctctcatatccttaactgaaattcctaaataacgtaacctatctctacctattgttaaaagcagtcaggatattgccctcaccgtagtgcagagggggaagtaatgaagtgtgttctggtttgtaaaagctcagatggaaccgcagtgagggccgtgatgtggctggagtggataggtgtcatagtcactgcctgcgacaggtg

SEQ ID NO: 12087 - DNA, 1080 bp, Homo sapiens
ctggtcccggagtcgccgctgggcctgtccgctggcgtcatggcaccgaaaaagaaagggaagaaaggcaaagccaaaggcaccccgattgtcgatgggctcgctccagaggacatgagcaaggagcaggtggaggagcatgtcagccgcatccgggaggagctggaccgcgagcgggaggaacgaaactacttccagctggagcgggacaagatccacaccttctgggagatcacacggaggcagctggaggagaagaaggctgagctgcggaacaaagaccgggagatggaagaagccgaggagaggcaccaggtggagatcaaggtgtacaagcagaaagtgaagcacctgctatatgagcaccagaacaacctgacagagatgaaggctgagggcactgtagtcatgaagctggcacagaaagagcaccgcatacaggagagtgtgctgcgcaaggacatgcgggcactgaaggtggagctcaaggagcaggagctggccagtgaggtggtggtgaagaacctgcggctgaaattgaggccaagtatgataagaagatgaagatgctgagggacgaactcgacttgcggagaaagactgagctccacgaagtggaggagaggaagaatggccagatccacacgctgatgcagcgccacgaggaggccttcaccgacattaagaactactacaacgacatcaccctcaacaacctggccctcatcaactccctcaaggtgctgtgcgtgggctgggctggggaggcacactctgcctgtcctagaatgtgggctgcagagtcctggggatccagaccccagctctccaccccaacacacccagtactttttataagattgtttgacaatgcccctctcatatccttaactgaaattcctaaataacgtaacctatctctacctattgttaaaagcagtcaggatattgccctcaccgtagtgcagagggggaagtaatgaagtgtgttctggtttgtaaaagctcagatggaaccgcagtgagggccgtgatgtggctggagtggataggtgtcatagtcactgcctgcgacaggtg

SEQ ID NO: 12088 - DNA, 19765 bp, Homo sapiens
gcttccgggggcgggcgccctggtcccggagtcgccgctgggcctgtccgctggcgtcatggtgagcaggggcgggagcggggctggggtcctcggcaggggcccggagacctcggggcagggaggcctcggtacacggagaccctgggaatgggaggcctggagcgctgggtttctggaattgagagctcggtgctcttgtgggggtctccgtggggcaaactcaggatgctcccggccccggggcctggcagcactcgggactgagacctgggctgtccagagccctgtgctcacaggggtggtcatagaacgcccagggcccggggtcggcggcgcacggtccccagaagagtgaacatgcgtcaaggggactctcatcctggaatggcagactcggtctgttggatccctgggacctagggtttcagctcacgaggctttgcagagcaccagggtccccatggaatagagccggaggcaggaattaccctaagacctttggtctcccggatggagagcctggggcacaccagagtggctagagatccctctacaccaaggaggcccggacaggtccagtgcccttggagtgcccagggcacaaccttgggatacaggaaccactgttcccttggaaagcctggcaggagtcaggcccagaccgagaagaggaaggcggagctcgtggcctcatcagctccatgtctgtctttctcttgtaaagggctctccctttgtggtacaggaattgtcagtaactcaatttctgggcaggtgtggcagggtgggtttcagctggtggggggaggaaagctctgggagccccaccaagtccctgcagctggctgtgaaggtcccaaatgctaagtaatgctgaaccttcctccactgccttcagggctttgtgatgaggtagccttcttggagtggagggattaaaaagagagcagtacattacgaattaaatttaagtagatgggttttctgacccaggaagggtcttctgaaaaccgactatgaaagaaactaccaaactaggccaggagtctgggcgcggtggctcacgcctgtaatcccatcactttgggaggccgaggcaggcggatcatgaggtcaggagatccagaccatcctggccaacatggtgaaaatccatatctattaaacatacaaaaattagctgggtgtggtggcgtgtgcctgtagttccagctactcgggaggctgaggcaggagaatcacttggacctgggaggcggaggttgcagcgagccgagatcgcaccaccgcactccagcctggcaacacgtctcttaaaaaaaaaaaaaaaaagcagggtgtagtggctgacgcctgtaaacccagcactttaggagtccaaggtgggtggatcacttgaggccaggagttggagaccagcctggccaacatggtgaaaccctgtctttactaaaaatacacacacacacacactcacacacacacacacacaaaattagccgggtgtggtggtacgcacctatagtcccagctacttgggaggctgaggcaggagaatttcttgaacctggaaggtagaggttgtgtagtgggatttttaaggaattagagagaccgatggggttcaggaggatatttattaattatttaggtgcaccggcccagtcagattaaaatccaaaggactgagccctgaacaaagagttaagttaccttttaagcttttcgtggggcagagggagatctgtgcagggggaagcatgcttcagatgtgagaaataaaggcagttgttcagttgaaacatgcattacatcatttcttactttttaaggaaaaacatgttttgcgacttgagtttatctgcctagtgaccttgcagccgcacagctacagaatcagggtcttcacaatgcctgggaagggaggagagacaaggctcactagccgcagaaaaacaggcagttaatttttaaaggactccagctctttctctttttcagggggagttgggttttcttatatataactgagtttctgcttacacactttttaatttcttttaattcctgttccagttgcagtgagccaggattgcaccactgcactccagcctgggtgacagagcaagactccatctcaaaaaaaacaaaaacaaaaacaaaaaacaaaaaaatgcaacagcaaacacaacagcaaacactaaacacaaccaaactacttctgtttctgttaggttgtgggaatatgggccttggtctgttggatccttggaccaaggaatatgggtgatatttctgttttcttctcatcagtgttttctaaaatttccacataatattttctctctctctttttttttttttttttgaggtagagtcttaccctgtcacccaggctggagtgcagtggcatgatcttggctcactgcaacctctgccacctgggttcaagcgattctcctgcctcggcctcccgagtacctgggactacaggtgcccgccaccacgcctggctaatttttttgtatttttagtagagacagggtttcaccatgttggccaggctggtcttgaactgctgacctcaagtgatccgcccgcctcagcctcccaaagtgctgggatgacaggtgtgagccactgtgcctggctccacctaatgttttcattcaggactaaatgaaacataaatgaagataaatgggccagtcgcggtggctcacgcctgtaatcccagcactttgggaggcttaggtgggcagatcacgggtcaggagttcgagtacagcctggccaacatagtgaaaccccgtctctactaaaaatacaaaaaattagccggacgtggtggtgggcacctgtaatcccagctactcaggaggctgaggcaggagaatggcttgaatccgggaggcggaggttgcagtgagctgagatcgcaccattgcactccagcctgggcaacagagcaagactctgtctcaaaaaaaaaaaaaaaaaaaaaaaagagagttcaagaccagcctggccaacatggtgaaacctcgtctctactaaaatacaaaaaaaaattagccaggcgtggtggcgggcacctgtagtcccagctcctcgtggaggctgaggcaggagaattgtttgaacccaagaggtggaggttgcagtgagccaaggcagcctggatgacgagggagactccatctcaaaaaaaaaaaaaaaaagataaatggatttaggttttaatgtttttaaaaaataaataaaatttccacatgaaatttgtaattttaaaaacgttacatagctgggcacagcagcagtgaactcctgtggtcccagctccttgggaggctgaggtgggagtatcagttgagcccaggaattggagtctgcagtgagctatgtgatcacaccactgcactccagcttgggcgacagagcaagactttgtctttaaaaaaggttaccgagacatgtagacacagaaaagcatgggctgaagactactgggagtagcaaagtcagcaggataggatatggaaatttgttacctgcttgagtgccctgtaaatgggtggccagacagaactgctcctggtgtcatgcgtggtttcagcaacttccacaagggggtggggttagaaggttctctcccatccttgtcaaagttgctaaaaccacgcacgacgccatgtgcagttccgtctggcagcccatttacagggctctcgtggtgggtgctgtctgcccaagctttcttgaccaggcttctctgaaggaagtttctctttgaaagaaaggaaacttgtggttgtcacaaccgatcgtggttatggaggcatttctccctaagcttactgaatggtgtcttgcaggtcttttccatggtggtcaccaatgttgccgccagcatggtaacatttggcagtgtggtattgagggtctttcctctgttttgcatccacagcagaggtctttactttttaccaaggagtgagtgggtttggaatgggttcccccctctcttagtttttggagacggggtctcgttctactgcccaggctggagtgcggtggtgcaccatagctcactgcagccttaaacttctaggctcaagtgattgtcctgccttggcctcccaaagtgctgggatgacacgtgtgagccactgcgcctggtcaccgtataccaaggaatgagtgggtttggaatgagttccctctcttttctttttttttttttttaagttacagtttgctttttgagatggagtctcactttgttgcccaggctggagtgcaatggtgggatcttggctcactgcagcctctgcctcccgggttcaagcgattcttctgcctcagcctcccgagtaactgggactataggcacacaccagcacacctggctaggtttcctctcttttttttttttttgagatggagtctcactctgtcgtcctggctggagtgcagtggtgtgatctcggctcactgcaaactccatgccccaggttcaagccattctcctgcctcagcctcccgagtagctgggactacaggcgcccaccggcacgcccggctaatttttttttgtatttttagtagagatggggtttcactgtgttagccgggatggtcttgatctcctgacctcgtgatccgtccacctcggcctcccaaagtgctgggattacaggcgtgagccaccacgcccggctcctctcttttctagaaggaatgttctccttctcaaaaggaaggtttctcctttgtgcttctccaaatgcaacaacaggatgtgtgtgtggtaaagggtgggaacactcagggcaatgatgtgctccaggtgagcagaagggagagaggttccagaaccttctctgccaaatgttcctgggagcaaatcagagccagccaagaaggggaagctgttagagtctctcttaccccattatttccaccaaaggcaccgaaaaagaaagggaagaaaggcaaagccaaaggcaccccgattgtcgatgggctcgctccagaggacatgagcaaggagcaggtgagcagagcgggctgtggcccagtccccgggtgggcgtgggcgggcaccacgcagggtgcctacgccgagtgtccatcttgccatgtggatccacccttctgtccaagccagaacacgccccccgcgtggcccataattcccatcagcggcaaagctttcggctgcaccatgtcttttcagaaaggtagtgcagcctgtgaaagagctttgtaacagggtggtaggagtgtggaaggacatgcttttctgatctaaaagctgtttttaatttcgtgtattctctttcaatcttaccctttttttgcacctgatgtgtatagacttatcgtagaacacacatgtagcattctcctttattttattcaccattaaacattatgtcaaaaaggaagtttttgaaagaaggatgatttacttcaaatcacatctgaatctgattaatcgttcatttttttttttttttttttttttttttttgagacggagtctcactctgtcgcccaggctggagtgcagtggcgcgatctcggctcactgtgagctccacctcccgggttcacaccattctcctgcctcagcctcccgagtagctgggactacaggcacctgccaccacgcctggctaattttttttttgtatttttagtagagacggggtttcaccgtgttagccaggatggtctcgatctcctgacctcgtgatccactcgcctcggcctcccaaagtgctgggattacaggcatgagccaccacgcctggccagtcattcattgtttttgataaaagtcccaacaaggagtaacagcatcagggctgcctttttcttgttgcttattttggggaggaggtgatgtttttatagtttctttgtaggagttagtttaagtctcttcttcatttggatgtagttaagggctacagaacataattacataattacaattttacctaaaaggctcctggagacggcagtgtgtggcaagcacggtgcaccctctggcctctgccctcatggacgactgcctgtgagcacctgacatgggacatgagggctgtgtcaactctgtgttattgttaataaatcttaccttcttttgatagttgtaagataaaaaatcaatacgaaggagactgaaagagtctcatgacctgaagttggagctaggcagaggtccttgaacaatggtaaagaatggctttattttacatgcaggcaaaccattggcagtttaagccagtggctaagcagagaggtgatggggtcaggtttgtgttctggaaagatgtctggagctgctggatggagaatggattgaacactgcgttgtcccagcatgtgagctgctgcccgtctccctgtccgcttcccattcctgtggagacaggccttgtggggcagtggccatggagcctacggggcagcctacggggcaggctacggggcagcttacggggcaggctatggggcagcctacggggcaggctacggggcaggcccttgcactgcacatcgcacgttgagccacagactcagaaggcttcttcagggtccaggcaggtggggagggatgggggtgacctggagactcctgccccgcagcagaggacagtttcatctgttcactggggagtgccttgtgggcctaggagttcagtgctgtttttttctgattttccaagagaagctggaaatctggatatttataagaaatctgaatattgagtgatggcaaaatctcaacaccatgtgagccaaacagaccagtcaggagccctggttcaggctctgcccaggagcctctaaaggtctgtgacgtgaagacatttgtcgttgtgccgaggcactggttggattcgggggtgcgtgtctccctcatgtctgcccggcatcctcggctcagaacccctcctgctgctccttcttgtttgctcgttgtcttgtcttcttttgaggtgagaaatgtgttttccctgtggggaatgtggtgttgagaaagaaaaaggctcacagtaagtggcctggggctgtgcccgaaaagtaactgattctgacggaatctcgctgtgtggcccaggctggagtgcggtggcgcgacctcggctcactgcaagctccacctcctgggttcacaccatcctgctgcttcaggctgcccagtagctgggactgcaggtgcctgccatcacgcccggctaatttttttgtatttttagtagagacgaggtttcaccgtgttagccaggatggccttgatctcctgacctcatgatctgcctgtctctgcctcccaaagtgctgggattacaggtgtgagccaccgcgcctggcagtaactgattcttaagggaaatgagctcccgagaaagctggaagcctgtcctacatttttttttaacctatttgcagattcgcaattgaaccctcttgagattttagagtctactggttttgtatattttttgcttaacattatatcttcaaaggtgaattttttttcatttagcattatgatatgaatttgtttaaatgctgctacatcatttgcatattttttttgggttaatgtgatatttctcctagttgatatactctaatttttcaaccatttccatatttatttatttattgtttagagacagggtcctgctctgtcacccaggtggagtgcagtggtgtgatcacggctcacggcagccttgacctcccaggtccaaacgatcctcctacctcagtcttctgagtagctgggactataggcatgtgccaccactcctggctaatttttttttttttttttttttgtagagacagggttttgccatgttgcctaggctgttcaactctggggctcaaaagatcctcccaaagtggtgggagccaccatgcctggctgtttgtgtattttttgagacagattctcactctgtcacccaggctggagtgtagtggcatgatcataactaaccgcagcctcaaccccctgagcttgagtgaccctcccacctcagctctcccagtagctgagactataggtgcgtgccatcatgcctagttaatgaaaaaaagtttttgcagagatggggtcttgctatgttgcccaagctggtcttcagctcctgggcgcgagggatccttcaacctcagcctcccagagtgctggggttgcaggcgagagccaccgcgcctcgcttatttccctgtttaaactggtcttaggttatttcctttttgatatttttgctgttgtaataatggtgtgggtaatatctttgagcaagatgctcttatatttcttttgagaaattttttaggcatcaattctcaggaatggatgaaaggatctagttattttatgattattggccaaattgaagagaattctgccacctgctgaatgcattctgtctccggagcttcctagccttatattttaactttttacatttagctgtttatttttaggtgaagttgagtcctccctctttcttccttgcctttcgccggccacacgccccgttgccgtgcatgggcccctgctcagtgcctcacctgacccactgcacctggccaggtggaggagcatgtcagccgcatccgggaggagctggaccgcgagcgggaggaacgaaactacttccagctggagcgggacaagatccacaccttctgggagatcacacggaggcagctggaggagaagaaggctgagctgcggaacaaagaccgggagatggaagaagccgaggagaggcaccaggtggagatcaaggtgagtggggccggcctgcacgtgctaacctggtcaccacagagccccagaggagctggatccagtgagggtgcaggtgggacattttctgttcttggctttgggagtcacagccttaaaggtgttttttataaaagcctgagggagagaccctgcaggtcctgagggtttaaaatgctgcctccacaacatggaaggaatatgggctctgggggcagactggcctgtttgcaactcagctctgccacttaataccccatgagctggggatgcacctcacctcccagccttggtgtcctgctctgtgcctcaagtgtacaggtttgcataggtgaacaggcatgtgtagctgtgtaaaggtgaggcatgcaagtgagcaggtggatgcaagtgagcatgtgtgtgcaggtgaggaggcgtggccaggtgaggaggtatgtgcaggtgaggtgtggggaggtgagcacgtggggcaggtatgtgcaggtgagcaggtaggtgcaagtgaccaggtgtctacaggtatgtacaggtgaggaggtgtagtacaggtgtagtgcaggcgaccaggtgtgtacgggaatttacaggtgaggaggtgtacaggtgaccaggtgtgtacaggtatggacaggtgagaaggtgtggtacaggtgtggtgcaggtgagcaggggggtacaggtatgtacaggtgaggtgtgttacaggtacggtgcaggtgatcaggtgtatacaggaatgtacaagtgaggaggtgtggtacaggtgaccaggtgtgtacaggtatggacaggtgaggaggtgtggtacaggtgtggtgtgggtgagcaggagtgtacaggtatgtacaggtgaggaggtgtggtacaggtgaccaggtgtgtacgggtacggacaggtgaggaggtgtggtacaggtgtggtatgggtgaccaggtgtgtacaggtatggacaggtgaggaggtgtggtacaggtgaccaggtgtgtacgggtacggacaggtgaggaggtgtggtgcaggtgtggtatgggtgaccaggtgtgtacaggtatggatggacaggtaaggaggtgtggtacaggtgaccaggtgtgtacaggtatggacaggtgaggaggtgtggtacaggtgtgctatgggtgaccaggtgtgcacaggtacggaaaggtgaggaggtgtggtgcaggtgagcagatggtactcccattgccctgcaggtgtacaagcagaaagtgaagcacctgctatatgagcaccagaacaacctgacagagatgaaggctgagggcactgtagtcatgaagctggcacagaaagagcaccgcatacaggagagtgtgctgcgcaaggacatgcgggcactgaaggtggagctcaaggagcaggagctggccagtgaggtggtggtgaagaacctgcggctggtaggtgtggcgggggcacctggaggctgacaggttgttgggacggcaagcctagtgctgcatgaactcctgtttattcaacagcaactgggaattcatatttctgcataagactttctgcatttttgcaatttgttgaaaaaaaattttttaaagcatgcatccaaacaaaccccattttgggaccaagtacacaattctgtctcagacctgagcaaaaaattgacgtcaccgaagagaaaaaatccagcttaggatctttcatgtgctgctgacacctgacacccagagacttttcctagggaatagcatcatatgcatttagtagaatgcaaaccaaccattaaaatatccagtgtgttgactcctgggcactgtgacagtttgtcacacaagctggtctgatttttacttttgaggctgggggtttccagggcaccattaaaattcatctgtgcacctggttcagtggctcacacccaaaatcccagcacttgggagggtcaggtgggagaagtggttgaggccaatagtttgagactagcttgggtgaaatagttgaaccccatgtctaaaaaatttaaaagaaaacattagctggtgtagtggcacatgccgatagtttcagctacttgggaggctgaggcgggaggatcccttgagctcaggaagtcaaggctgtggtgagctaggattgtgccactgcattccagcctaggtgacagagtgagacaaaacaaaaaggaaagagatcatttgctgagtgtccattagctgctaggtcctgatctgatctctgacaaaacgcctgcccgactggggctgttggtctagaaaggagagacaacaggtgagttggaagacaaaataaacgtgccagatacaacagagtatctggtggggaagagtgccatagaaggatcgaagtggggagaggtggggtgcggttttgtacaagcagttgaccggctgggagacgggatgggccagtgggaaagctcagagtgaccaggaggagactgtgggagagggtcagagcttgtccgcctcgaaagccgtggtggggactggagacgggtcagagctcgtccgcctcgaaagccgtggtggggactgggactttgaccctggtggagtctgttgccctctgagaacttgggcagaggagagatgtgtctcactaaggttcttcctggctgctgggttgaggagactttctgaacacatttgcctcacgcctggaagcagtccagcctccactgaatctggaagaaacttggtgacgttgctgacttcgcagcaaagcctgagagtgccgaagtcttgagccctccagaattagctggtcttaacccaggtcctggatatgatattgttacataatcagagtttcctgttgggtaaaaatatggctttaggccgggtgcggtggctcacgcctgtaatcccagcactttgggaggccgaggagggtgtatcacgaggtcaggagtttgagaccagcctgaccaacgtggtgaaaccccgtctctactaaaaatacaaaaattagccgggcgtggtggcgcacacctataatcccagctactcgggacgctgaggcagaagaatcacttgaacctgggagacggaggttgcggtgagccgagattgtgccactgcactccagcctgggcgacagtgtgagagtctgtctcaaaaaaaagaaaaattactgctttaaaaataatttatttttttatgcaaattttaaatatataatgtttatttaaatatataataattgttcattaaaactatatatttatttatttttagagatgaggtctcactctgtctcccgggctgcagtgcaatggtacaatcatagctcactgcagcctcgaacttctagtctcaagtgatccttctgccttagcctcccaagtagctggaactatagatatgagccaccacacccacctaatcttttttttttttttttttttttttttttgagatggagttttgctcttgttgcccaggctggagtgcagtggcacaatctcagttcaccacaacctctgcctcccgggttcaagctattctcctgcctcagcctctcgactagctgggattacaggcatgtgccaccatgcccggctaattttgtatttttagtagagacggggtttctccatgttggtcaggctggtcttaaactcccgacctcaggtggtctgtccagctcggcctcccaaagtgctgggattacaggcgtgagccactgtgcccggcaatctttaaattttctgtagaagatcttgctatgttgcttaggctgcccttgaactcttgacctcaagtgatcctcctgccttggcctccagcgtgctgggatgacaggaatgaatccttttaatatgctgcttcaggcagcagtgcagcaggttggaagctacacacggcacctggaaagatcccacagctctgtgtggatgtggctgctgctcttcaggctgtgggatggtttggcgatggaaccaagcgggttcagtgctcacgacgtctgttcatgttctctctcaagcttagaggtgactttagttgagggaggtgagttagggaatatggaggtgaccaaaaccatgaggaacagggtcagcctgaagggagcgggcttccctctgtgtccggctgtgtagtaatggccgcttctccctgtgcagaaacacaccgaggagatcaccaggatgcggaatgattttgagaggcaagttcgaggtcagtttcccgtgtgctcattgtgtaggtgccagagacacccccgccccatcagagaggaatttacctccagagcttgttaactcagggagcaaaaactggattaaaacagccaaggcatgcaagagaaagaacatggaagtttccaaggccagtggacccactcagaatcccagaacaacctatttccatgtgagtttgggaggctgtgattaccacacacattcccactcctagctaaaatcagtagttatcagcaggtggtagctattcagtgccgtgggcagccttcttaaaatagtcttctccatggctcctggtctgagaaggctccaatttcagaagtctctgtgttttactaataaaggctgattgtggctgggtggccacacaggcctcggttactgctcactggggtcagctgacattcagctgttggcacccccagtgcagggagcgattagcaatgcctgtcactggcaaaggcaggccgacagtggtgtgtgtgctgagtgtgagcatcagcagaaaaactcagtctaaacccctttgttcttctcttgcagagcttttgcctgcaaggctgttctgaccacagtgggcgttttgggcccgtttacaggctccatgttctgtagccgtaggggcaccacgtcttcctctgctaagctgctgtttgctgctgcctttcagaaattgaggccaagtatgataagaagatgaagatgctgagggacgaactcgacttgcggagaaagactgagctccacgaagtggaggagaggaagaatggccagatccacacgctgatgcagcgccacgaggaggccttcaccgacattaagaactactacaacgacatcaccctcaacaacctggccctcatcaactccctcaaggtgctgtgcgtgggctgggctggggaggcacactctgcctgtcctagaatgtgggctgcagagtcctggggatccagaccccagctctccaccccaacacacccagtactttttataagattgtttgacaatgcccctctcatatccttaactgaaattcctaaataacgtaacctatctctacctattgttaaaagcagtcaggatattgccctcaccgtagtgcagagggggaagtaatgaagtgtgttctggtttgtaaaagctcagatggaaccgcagtgagggccgtgatgtggctggagtggataggtgtcatagtcactgcctgcgacaggtggataggtgtcatcgtcactgcatgctggcagtgacaggattttctacagtagacaacggcccttggtggaatcttgaacaaagtatagtccttcagtctgcatggaagctgcattcccagaaaactcagaataagttgaagctgcagaaatactgtttatacatagaagacgtctaggtgccagcatgcctgaggctggcagcagctggtgatgggcaggagagcacccagctctcaccatgcaggccacagcccctttggttctgcctgctgagcccctgccgggcctgtgcttgtgcctgcaggagcagatggaggacatgcggaagaaggaggaccacctggagagggagatggcagaggtgtctgggcagaacaagcgcctggcagaccctctccagaaggctcgggaggagatgagcgagatgcagaaacagctcgcaaactacgagagggacaagcagatcctgcttgtgagtttcccgctggattcctctccctccttggcatgagcttgcctaggctcaggagggaggagcatcacagggaggggcttggcccttagggcaggaagggagacggggaggcctgcatttctcctttctctgcctcgtgttctcctggggaaagtaaagtctgggggtgttttggagacaaggccctcatcttcaccacgtgctaccggccggccttggtgagactcagctgcttgtgtcctggaaccaggtctttctggcgattatttttggccttgccatctcccaggagcccgtgttacttggatgactgtgaatcttgaatactttctgtcccctactccctgtttttcctccagtgcacaaaagcccgtttgaaagtcagggagaaagagctgaaagacctgcagtgggagcatgaagtgttagagcagcgattcaccaaggtgagtggcaccacgctggccctgcagttggcggtgggtgttagagcaacggttcaccaagttcaccaaggtgagcgggcactaggctggccctgcagtggggatggcacccctgctagccagggacggggctctccttgtggcccctggaccagcttcagatgccttggccaggtttctgggttctgaagctggaggccctgttccctgtaactcattccgcagcttctaagaggcaaaaacctgtggcctgttctgcatgcatattctgcagaaggcctggggtcttgatggggaacggatcacacatgactttcgtcccctcgagagctcacctctgaaagcacatgagggaggctcttaagtgtaagtgaagatgagtctccggctgctcagtgctggtcctcacactggcgagttttatgggctcccttccaggtttcctgcatgctctcgtgtggatgtgactttgtatgttacgaacacgggatcaggccataagcacaatttgctttttaatctcacagtgtatcaggctgcacataggaagcggtctcatccttttcacagctgcttggtgctgcgttttgtgaacgtttgatcatttagccgactcccgtctgtttctaatgctctgctgctataagcattgctgcctcaatccttttaaatttgtctttgtgcacttgtgtgagattgcttcttaggaaagccagttcctagcagtgggattgttgagtctgagggttctgttctgaggaccctgatcatctgtccagagggctgctctgagtcacacacctgccagggtgcggaggggccgtttccatcctcacctgcaccagatctgacaggtttaaacctttgcagaagtgactgggtggaaaacatctcatttcgtgggcacttccaagattcgcagtgagtggtaggggtgctcggtcctgtctctgtcccttaaagacgctccttgcctctgttcagtttcaaagttctggccaaggaccaatccctgcagcatgggcccctcaaggctttgtctgtggtgtgcggggccagggcatcttatcttgagccgcagttatatgtgctgttttgttctctaacctaattgaaatttttgaacacaaaccgttgtagtgggattcgcttctcagaaatatcccatctgtctgtcagatctagccccaccttcagagacacctcaggtcctgcacgacgtgcattgctaggctgtgccaactcttggcacctaagggaagggcacctgcaaggtagtcagtgagatcctgaggactgctgtgttagacaaggggcccttccttctccctgtgggttttgaggtggacattattgggaagaggacagcagagacgtgcctgggttggagccttgttttctgtcacattttcttccatttgaatgtggttcctgacagtgtccaagctggtgtctcttcctagagaaccgagagctcaaatttatcagcaaaatttagagaccaaggcagttatttatttatttatttatttatttatttatttatttatttttgagatggagtttcgctcttgttgcccaggctggagtacaatggcacgatctcggctcactgcaacctccacctcctgggttcaagtgatactcctgcctcggcctcccgagtagctgggattacaggcgcctgccaccacgcccggctaatgtttggtatttctgatagagacagggtttcactctgttggccaggctggtctcgaactcctgacctcaggcgatccacccacctcaccctcccaaagtgctgggattacaggcgtgagccaccacacgctgctcagggtgttcacttttttatagtcttcaacaaagtctagatttttttagaatgcacaattaataagtagaagaattaggagataaaaaagaacagttttactggctggcaggtagctggctccaaggccgtgctccagatccaccatttgtggggcggacagcacatgtgatgccaggatctggggctggccaagggagcatatcctccaaggggccccacctgcaagctcggcctgctggatgccctggatctcaaatctcacctgagcccacagccctcactcgggcaagactggcctcggccacccatgaagcagctttcagggtggggctgcttcagctcttaccaggacacttatggcttccagagacaccttcctgagagaagggcttatgctgatgtgttcctcctgccttccactgcgtggatggctctacaaagggccagggcgcaggcagtgtggacaacacactgaccccggtgctgtgggagtgggcactgttgggaggcagcgtgttccaggcaggtgcagaggtgggaggcagcatcttcccagcgagatgtccccaggtgaggggcctcatcgcccacccccagcgctgtccctacaggtgcagcaggagcgggacgagctctatcggaagttcaccgcagccatccaggaggtgcagcagaagacagggttcaagaacctcgtgctagaacgcaagctgcaggctctgagcgccgctgtggagaagaaggaggtgcagttcaacgaggtcctggctgcctctaacctggaccctgcagccctgacgctggtgtcccgcaagctggaggtaggccctagacaggctcctgaccccagtgggcggcctcatccctgtggcaagagtcttcagttctgtgctgctcctcggataggcacagagacccctcggtcggccactgaggaggggcattcatgggtttcctgtggccagtttcgggccagttgggaactgtggaagggctgggcaggggaaccagatcagggcccactctgctattgatggggagcacagggctggagggggctggttggggccagcacagaatggggacgggcagagggttggagagccgccaggaggctgagtccacaggtggggctgggaggggccgaggtgacttggtgtttgcacatgggggaacgacgggtcccggcccagtgggcggtggtgcctgtgggaccctggtcatctgggatggcctggctctcagggcctgaggtagtgaggctgtataggaggggcctcacctgggccagaggcactgtggccccgggactgaaaactcatctttgtttgctcagcactgggcccagtgagcacaggcaggtgagggagtgagggtcccactgttgggaggtgggggaggcgtgtttccagctcctggctgagggctgcacccagcctgctgctaagccaccgaaatgagggtgaagagagcagtcgtggcctgtgagggtcattgcagctgcgcccacgcgccagggtgaggatggaggatggagctaaatgtgggtcaacccctcctttcctggtcattgttacctcgacttctaagtgaggaatcttctggggaaatgacagaggcccccgcagggacactgtttgctgctggccaggtgtgagggggctgctgtgtcagtgggcagcagggacggctctaaagccaggctgggcccagcagtgccccacaggcaggagcccaagaagtccctgcctcgccacgtggtgagacccttgcccacatctgggcggggccagcgctgctgaagactacttttttctgttacaaaaaagtgggatagccgggcgcggtggctcacgcctgtaatcccagcactttgggaggctgaggtgggcagatcacgagtttgggagttcaagaccagcctggccaagatggtgaaaccccgtctctactaaaaatacaaaaattagctgggcttggtggcgggtgtaatcccagctatttgggaggctgaggcagagaattcctggcacctgggaggcggaggttgcggtgagcctagatcgcgccactgcactccagcctgggcaacggggcgagactccatctcagaaaaaaaagtgagatagtacattcacaagcctcaagaaatttaagcaatatgtaggtggtgtttagtgaccagtctccacagtgtggctgcacgctgcctgccctcacctcatctgcatttcttgtggtctggactgctctttgagttttttcttgagacggtgtcttgctctgtcacccagactggagtgcagtggctcaatctcggcgcactgcaacctccgtttcccaggttcaagcaattctcatgcctcagcctcctgagtagctgggattacacaggtgtgagccaccgtgcccggctacttttcgtatagtagagacggggtttcgccacgttggccaggctggtctcaaactcctgacctcaagtgatctgccctccttggcctcccacactgctgggatcacaggtgtgagcggcagtgcctggcctggactgttgctggagaggcaggttgtgcaagctcccagttctctgcttcttccttgttttctctccacccttggagacctttttctgctgacaaccctgtgtggatggatgcatccatcaaaccaggctgctattcgctggatctctcagaacgcccactggagtccccaggccgctcccgttgcctcggcc

SEQ ID NO: 12089 - DNA, 1308 bp, Homo sapiens
gcttccgggggcgggcgccctggtcccggagtcgccgctgggcctgtccgctggcgtcatggtggaggagcatgtcagccgcatccgggaggagctggaccgcgagcgggaggaacgaaactacttccagctggagcgggacaagatccacaccttctgggagatcacacggaggcagctggaggagaagaaggctgagctgcggaacaaagaccgggagatggaagaagccgaggagaggcaccaggtggagatcaaggtgtacaagcagaaagtgaagcacctgctatatgagcaccagaacaacctgacagagatgaaggctgagggcactgtagtcatgaagctggcacagaaagagcaccgcatacaggagagtgtgctgcgcaaggacatgcgggcactgaaggtggagctcaaggagcaggagctggccagtgaggtggtggtgaagaacctgcggctgaaacacaccgaggagatcaccaggatgcggaatgattttgagaggcaagttcgagaaattgaggccaagtatgataagaagatgaagatgctgagggacgaactcgacttgcggagaaagactgagctccacgaagtggaggagaggaagaatggccagatccacacgctgatgcagcgccacgaggaggccttcaccgacattaagaactactacaacgacatcaccctcaacaacctggccctcatcaactccctcaaggagcagatggaggacatgcggaagaaggaggaccacctggagagggagatggcagaggtgtctgggcagaacaagcgcctggcagaccctctccagaaggctcgggaggagatgagcgagatgcagaaacagctcgcaaactacgagagggacaagcagatcctgctttgcacaaaagcccgtttgaaagtcagggagaaagagctgaaagacctgcagtgggagcatgaagtgttagagcagcgattcaccaaggtgcagcaggagcgggacgagctctatcggaagttcaccgcagccatccaggaggtgcagcagaagacagggttcaagaacctcgtgctagaacgcaagctgcaggctctgagcgccgctgtggagaagaaggaggtgcagttcaacgaggtcctggctgcctctaacctggaccctgcagccctgacgctggtgtcccgcaagctggagacctttttctgctgacaaccctgtgtggatggatgcatccatcaaaccaggctgctattcgctggatctctcagaacgcccactggagtccccaggccgctcccgttgcctcggcc

SEQ ID NO: 12090 - DNA, 13128 bp, Homo sapiens
gcggccgcgcccgctggcgtcctcttgttctcttccaggtacttgcgtgtggggcgccgactgtgtgcgggcgcccctcggggctggcgaggggcacaggaggggcctgactcgcgctgggtaatgacagactcacagagcgccctggatggcgcgaattaacgcggggggcgggtgggggcgagggcgtgtgcttgggaggctggaaggggcgggatgggggatgggaggtaaggagagggcggcgggcccgggctgcagagagcgccaaggcagtttcgatgaaactgacccccatgtccctatcgcccagattcagcgattgccagctcctggcctgggccactgcttctctgtcctcattcacttccctccactgctgggtcattttgaagcaaattatatacacattagatcattgcatttgtaagtacttcaatatttatctctcaaagaaagtccgtttgcaggagcattgactcatgcctgtaatcccagccctttgggaggctgaggtgggagcacagcttgagctcaggagtccaaggctgccgtgagctatgattgtatgtctcaaaaaaaaaaaagaaaagaaaagaaaagaaaaagtctagtcttcataaacactcttgttaacccagcatccaggccttcactgagttgatgccgtggcctgaggcggtttacctggtggatagtgggtggcaggaagcatcagacatcagacagagggcagtcggtttgtttgtattaacatttgctctgggattttgcaggaaactcagatgccatttatctgggtttctgagctgcacagcttgacactgaatgaaagtatcttaagccacatatgtgaagaaaaggctcttttctaaaaatctgaactcgaattcaatatgaaaagaacaggtcgcagtgggccctgtcgggatcccagggagccgcaattcagggctccctgaatgattcatctctgcagcccacaccgacagaccaggattgctcttagcttgtgaaaaatgagtaccctgtctaggctatcctgagctaaccctcctattcttgccctttttgctgaaaggaattattgttaatacagctatttaattcaggacactcatccagacttctgaagcaaaaagccaatcagcatgaagctgctagcatattggttttgtgaagtaagtgttaaattataataattacccccactgtgctctccagcgtcactgtctgaccaccctgtcccagggggaggaggcccctctcaggccaagggagtctggcacagtgatgctggctcctggttgcccaggcacagtgaccagccagacttcacagaggcctcagggcttactataaataaatcactgctttgtgcaagctgagccaatgcagttcttccaactggctgctcctctccaagaacaatcaggacttaggtgggcaaacaggaagtctctcatcacagtggttctcagattcccaccactgtgtgggtgcctgaggcctgagcaaacccagctcatgtggcaacttcctcccccagctggacaggaagacctaggtccaccaggccttctttcatttctcacactttgcccccagcacaactttctacgagcatggattctgtactcttcatccccagacacatgggagaacaagatctgctacaagaccttttctttttttttttgagacagggtctcaggtctcattctgttacctaggctggagtgaagtggtgtgatcttggctcactgcaacctccacctccagggctcaaacgattctcccacctcaacctcccaagtagatgaccactttttaagaagatgttaaagatgagagcttagggctgggcgtggggctcacgtgctcccagcactttgggaggccgaggcaggaggatcacttgaggccaggagtttgagaccactctgggcaataaagcaagaccccgtctctattaaaaacttaaaaaaaaaagctgggtatggtgtctcacacctgtagtcctggcttctcaggaggctgaggtgggaggattgcttgagcccaggaggtcgaggctgcagtgagttgtgatcacagcctaggcgacagaaggagaccctgtctccaaaaaaaaaaaaaaaaaaaagcacctgtttatgacaaactcagctttctgggtgacatagatggttgtatgtaggtaacagggtggtttcacggatggcagattcattttagaaattgtaaaatggctagcagttttcagaacaagagattagttagaaaaggaaagtggcagctgtttgttttctgcagggcctgtcgggaagcctctggtttcttttcatccgtgaggagtggggaggaggcctcttcaggaagagcagtttatttttgtgaaaggaatacttactgatttcaaacatttggaactaaactggaacgtatttttctttccgatttctgcgtttttgaggtgtgtgtaaacccaccagcgcagcagctgggagggcccttcaaaggtgggcgggtggggtgagtgaggcccaggggatagagtgtttgcccagatttgaatctcatttggggaaagtttcagaggcttgggtggctgattgatcattccttcaatggtccttcatcagcacgtctttactgagcacgtgctgtgtgctgttctaggcgctgaaggatagaagtgaagggttcccccctcgtggagcttaggttccagcaataagcaaaacatgccctgcagcgaaaggcttctgggctgccggcgacattttcccaacgttcacaaccgggttccttccggacgcccgtctctagggacgcactcccgcctttggcagggccgctgcccggcggagtctcgcgaggatcttgtgacttatcgcggcatcgcccagcggttgccgggaaacggcgtggcttccgggggcgggcgccctggtcccggagtcgccgctgggcctgtccgctggcgtcatggtgagcaggggcgggagcggggctggggtcctcggcaggggcccggagacctcggggcagggaggcctcggtacacggagaccctgggaatgggaggcctggagcgctgggtttctggaattgagagctcggtgctcttgtgggggtctccgtggggcaaactcaggatgctcccggccccggggcctggcagcactcgggactgagacctgggctgtccagagccctgtgctcacaggggtggtcatagaacgcccagggcccggggtcggcggcgcacggtccccagaagagtgaacatgcgtcaaggggactctcatcctggaatggcagactcggtctgttggatccctgggacctagggtttcagctcacgaggctttgcagagcaccagggtccccatggaatagagccggaggcaggaattaccctaagacctttggtctcccggatggagagcctggggcacaccagagtggctagagatccctctacaccaaggaggcccggacaggtccagtgcccttggagtgcccagggcacaaccttgggatacaggaaccactgttcccttggaaagcctggcaggagtcaggcccagaccgagaagaggaaggcggagctcgtggcctcatcagctccatgtctgtctttctcttgtaaagggctctccctttgtggtacaggaattgtcagtaactcaatttctgggcaggtgtggcagggtgggtttcagctggtggggggaggaaagctctgggagccccaccaagtccctgcagctggctgtgaaggtcccaaatgctaagtaatgctgaaccttcctccactgccttcagggctttgtgatgaggtagccttcttggagtggagggattaaaaagagagcagtacattacgaattaaatttaagtagatgggttttctgacccaggaagggtcttctgaaaaccgactatgaaagaaactaccaaactaggccaggagtctgggcgcggtggctcacgcctgtaatcccatcactttgggaggccgaggcaggcggatcatgaggtcaggagatccagaccatcctggccaacatggtgaaaatccatatctattaaacatacaaaaattagctgggtgtggtggcgtgtgcctgtagttccagctactcgggaggctgaggcaggagaatcacttggacctgggaggcggaggttgcagcgagccgagatcgcaccaccgcactccagcctggcaacacgtctcttaaaaaaaaaaaaaaaaagcagggtgtagtggctgacgcctgtaaacccagcactttaggagtccaaggtgggtggatcacttgaggccaggagttggagaccagcctggccaacatggtgaaaccctgtctttactaaaaatacacacacacacacactcacacacacacacacacaaaattagccgggtgtggtggtacgcacctatagtcccagctacttgggaggctgaggcaggagaatttcttgaacctggaaggtagaggttgtgtagtgggatttttaaggaattagagagaccgatggggttcaggaggatatttattaattatttaggtgcaccggcccagtcagattaaaatccaaaggactgagccctgaacaaagagttaagttaccttttaagcttttcgtggggcagagggagatctgtgcagggggaagcatgcttcagatgtgagaaataaaggcagttgttcagttgaaacatgcattacatcatttcttactttttaaggaaaaacatgttttgcgacttgagtttatctgcctagtgaccttgcagccgcacagctacagaatcagggtcttcacaatgcctgggaagggaggagagacaaggctcactagccgcagaaaaacaggcagttaatttttaaaggactccagctctttctctttttcagggggagttgggttttcttatatataactgagtttctgcttacacactttttaatttcttttaattcctgttccagttgcagtgagccaggattgcaccactgcactccagcctgggtgacagagcaagactccatctcaaaaaaaacaaaaacaaaaacaaaaaacaaaaaaatgcaacagcaaacacaacagcaaacactaaacacaaccaaactacttctgtttctgttaggttgtgggaatatgggccttggtctgttggatccttggaccaaggaatatgggtgatatttctgttttcttctcatcagtgttttctaaaatttccacataatattttctctctctctttttttttttttttttgaggtagagtcttaccctgtcacccaggctggagtgcagtggcatgatcttggctcactgcaacctctgccacctgggttcaagcgattctcctgcctcggcctcccgagtacctgggactacaggtgcccgccaccacgcctggctaatttttttgtatttttagtagagacagggtttcaccatgttggccaggctggtcttgaactgctgacctcaagtgatccgcccgcctcagcctcccaaagtgctgggatgacaggtgtgagccactgtgcctggctccacctaatgttttcattcaggactaaatgaaacataaatgaagataaatgggccagtcgcggtggctcacgcctgtaatcccagcactttgggaggcttaggtgggcagatcacgggtcaggagttcgagtacagcctggccaacatagtgaaaccccgtctctactaaaaatacaaaaaattagccggacgtggtggtgggcacctgtaatcccagctactcaggaggctgaggcaggagaatggcttgaatccgggaggcggaggttgcagtgagctgagatcgcaccattgcactccagcctgggcaacagagcaagactctgtctcaaaaaaaaaaaaaaaaaaaaaaaagagagttcaagaccagcctggccaacatggtgaaacctcgtctctactaaaatacaaaaaaaaattagccaggcgtggtggcgggcacctgtagtcccagctcctcgtggaggctgaggcaggagaattgtttgaacccaagaggtggaggttgcagtgagccaaggcagcctggatgacgagggagactccatctcaaaaaaaaaaaaaaaaagataaatggatttaggttttaatgtttttaaaaaataaataaaatttccacatgaaatttgtaattttaaaaacgttacatagctgggcacagcagcagtgaactcctgtggtcccagctccttgggaggctgaggtgggagtatcagttgagcccaggaattggagtctgcagtgagctatgtgatcacaccactgcactccagcttgggcgacagagcaagactttgtctttaaaaaaggttaccgagacatgtagacacagaaaagcatgggctgaagactactgggagtagcaaagtcagcaggataggatatggaaatttgttacctgcttgagtgccctgtaaatgggtggccagacagaactgctcctggtgtcatgcgtggtttcagcaacttccacaagggggtggggttagaaggttctctcccatccttgtcaaagttgctaaaaccacgcacgacgccatgtgcagttccgtctggcagcccatttacagggctctcgtggtgggtgctgtctgcccaagctttcttgaccaggcttctctgaaggaagtttctctttgaaagaaaggaaacttgtggttgtcacaaccgatcgtggttatggaggcatttctccctaagcttactgaatggtgtcttgcaggtcttttccatggtggtcaccaatgttgccgccagcatggtaacatttggcagtgtggtattgagggtctttcctctgttttgcatccacagcagaggtctttactttttaccaaggagtgagtgggtttggaatgggttcccccctctcttagtttttggagacggggtctcgttctactgcccaggctggagtgcggtggtgcaccatagctcactgcagccttaaacttctaggctcaagtgattgtcctgccttggcctcccaaagtgctgggatgacacgtgtgagccactgcgcctggtcaccgtataccaaggaatgagtgggtttggaatgagttccctctcttttctttttttttttttttaagttacagtttgctttttgagatggagtctcactttgttgcccaggctggagtgcaatggtgggatcttggctcactgcagcctctgcctcccgggttcaagcgattcttctgcctcagcctcccgagtaactgggactataggcacacaccagcacacctggctaggtttcctctcttttttttttttttgagatggagtctcactctgtcgtcctggctggagtgcagtggtgtgatctcggctcactgcaaactccatgccccaggttcaagccattctcctgcctcagcctcccgagtagctgggactacaggcgcccaccggcacgcccggctaatttttttttgtatttttagtagagatggggtttcactgtgttagccgggatggtcttgatctcctgacctcgtgatccgtccacctcggcctcccaaagtgctgggattacaggcgtgagccaccacgcccggctcctctcttttctagaaggaatgttctccttctcaaaaggaaggtttctcctttgtgcttctccaaatgcaacaacaggatgtgtgtgtggtaaagggtgggaacactcagggcaatgatgtgctccaggtgagcagaagggagagaggttccagaaccttctctgccaaatgttcctgggagcaaatcagagccagccaagaaggggaagctgttagagtctctcttaccccattatttccaccaaaggcaccgaaaaagaaagggaagaaaggcaaagccaaaggcaccccgattgtcgatgggctcgctccagaggacatgagcaaggagcaggtgagcagagcgggctgtggcccagtccccgggtgggcgtgggcgggcaccacgcagggtgcctacgccgagtgtccatcttgccatgtggatccacccttctgtccaagccagaacacgccccccgcgtggcccataattcccatcagcggcaaagctttcggctgcaccatgtcttttcagaaaggtagtgcagcctgtgaaagagctttgtaacagggtggtaggagtgtggaaggacatgcttttctgatctaaaagctgtttttaatttcgtgtattctctttcaatcttaccctttttttgcacctgatgtgtatagacttatcgtagaacacacatgtagcattctcctttattttattcaccattaaacattatgtcaaaaaggaagtttttgaaagaaggatgatttacttcaaatcacatctgaatctgattaatcgttcatttttttttttttttttttttttttttttgagacggagtctcactctgtcgcccaggctggagtgcagtggcgcgatctcggctcactgtgagctccacctcccgggttcacaccattctcctgcctcagcctcccgagtagctgggactacaggcacctgccaccacgcctggctaattttttttttgtatttttagtagagacggggtttcaccgtgttagccaggatggtctcgatctcctgacctcgtgatccactcgcctcggcctcccaaagtgctgggattacaggcatgagccaccacgcctggccagtcattcattgtttttgataaaagtcccaacaaggagtaacagcatcagggctgcctttttcttgttgcttattttggggaggaggtgatgtttttatagtttctttgtaggagttagtttaagtctcttcttcatttggatgtagttaagggctacagaacataattacataattacaattttacctaaaaggctcctggagacggcagtgtgtggcaagcacggtgcaccctctggcctctgccctcatggacgactgcctgtgagcacctgacatgggacatgagggctgtgtcaactctgtgttattgttaataaatcttaccttcttttgatagttgtaagataaaaaatcaatacgaaggagactgaaagagtctcatgacctgaagttggagctaggcagaggtccttgaacaatggtaaagaatggctttattttacatgcaggcaaaccattggcagtttaagccagtggctaagcagagaggtgatggggtcaggtttgtgttctggaaagatgtctggagctgctggatggagaatggattgaacactgcgttgtcccagcatgtgagctgctgcccgtctccctgtccgcttcccattcctgtggagacaggccttgtggggcagtggccatggagcctacggggcagcctacggggcaggctacggggcagcttacggggcaggctatggggcagcctacggggcaggctacggggcaggcccttgcactgcacatcgcacgttgagccacagactcagaaggcttcttcagggtccaggcaggtggggagggatgggggtgacctggagactcctgccccgcagcagaggacagtttcatctgttcactggggagtgccttgtgggcctaggagttcagtgctgtttttttctgattttccaagagaagctggaaatctggatatttataagaaatctgaatattgagtgatggcaaaatctcaacaccatgtgagccaaacagaccagtcaggagccctggttcaggctctgcccaggagcctctaaaggtctgtgacgtgaagacatttgtcgttgtgccgaggcactggttggattcgggggtgcgtgtctccctcatgtctgcccggcatcctcggctcagaacccctcctgctgctccttcttgtttgctcgttgtcttgtcttcttttgaggtgagaaatgtgttttccctgtggggaatgtggtgttgagaaagaaaaaggctcacagtaagtggcctggggctgtgcccgaaaagtaactgattctgacggaatctcgctgtgtggcccaggctggagtgcggtggcgcgacctcggctcactgcaagctccacctcctgggttcacaccatcctgctgcttcaggctgcccagtagctgggactgcaggtgcctgccatcacgcccggctaatttttttgtatttttagtagagacgaggtttcaccgtgttagccaggatggccttgatctcctgacctcatgatctgcctgtctctgcctcccaaagtgctgggattacaggtgtgagccaccgcgcctggcagtaactgattcttaagggaaatgagctcccgagaaagctggaagcctgtcctacatttttttttaacctatttgcagattcgcaattgaaccctcttgagattttagagtctactggttttgtatattttttgcttaacattatatcttcaaaggtgaattttttttcatttagcattatgatatgaatttgtttaaatgctgctacatcatttgcatattttttttgggttaatgtgatatttctcctagttgatatactctaatttttcaaccatttccatatttatttatttattgtttagagacagggtcctgctctgtcacccaggtggagtgcagtggtgtgatcacggctcacggcagccttgacctcccaggtccaaacgatcctcctacctcagtcttctgagtagctgggactataggcatgtgccaccactcctggctaatttttttttttttttttttttgtagagacagggttttgccatgttgcctaggctgttcaactctggggctcaaaagatcctcccaaagtggtgggagccaccatgcctggctgtttgtgtattttttgagacagattctcactctgtcacccaggctggagtgtagtggcatgatcataactaaccgcagcctcaaccccctgagcttgagtgaccctcccacctcagctctcccagtagctgagactataggtgcgtgccatcatgcctagttaatgaaaaaaagtttttgcagagatggggtcttgctatgttgcccaagctggtcttcagctcctgggcgcgagggatccttcaacctcagcctcccagagtgctggggttgcaggcgagagccaccgcgcctcgcttatttccctgtttaaactggtcttaggttatttcctttttgatatttttgctgttgtaataatggtgtgggtaatatctttgagcaagatgctcttatatttcttttgagaaattttttaggcatcaattctcaggaatggatgaaaggatctagttattttatgattattggccaaattgaagagaattctgccacctgctgaatgcattctgtctccggagcttcctagccttatattttaactttttacatttagctgtttatttttaggtgaagttgagtcctccctctttcttccttgcctttcgccggccacacgccccgttgccgtgcatgggcccctgctcagtgcctcacctgacccactgcacctggccaggtggaggagcatgtcagccgcatccgggaggagctggaccgcgagcgggaggaacgaaactacttccagctggagcgggacaagatccacaccttctgggagatcacacggaggcagctggaggagaagaaggctgagctgcggaacaaagaccgggagatggaagaagccgaggagaggcaccaggtggagatcaaggtgagtggggccggcctgcacgtgctaacctggtcaccacagagccccagaggagctggatccagtgagggtgcaggtgggacattttctgttcttggctttgggagtcacagccttaaaggtgttttttataaaagcctgagggagagaccctgcaggtcctgagggtttaaaatgctgcctccacaacatggaaggaatatgggctctgggggcagactggcctgtttgcaactcagctctgccacttaataccccatgagctggggatgcacctcacctcccagccttggtgtcctgctctgtgcctcaagtgtacaggtttgcataggtgaacaggcatgtgtagctgtgtaaaggtgaggcatgcaagtgagcaggtggatgcaagtgagcatgtgtgtgcaggtgaggaggcgtggccaggtgaggaggtatgtgcaggtgaggtgtggggaggtgagcacgtggggcaggtatgtgcaggtgagcaggtaggtgcaagtgaccaggtgtctacaggtatgtacaggtgaggaggtgtagtacaggtgtagtgcaggcgaccaggtgtgtacgggaatttacaggtgaggaggtgtacaggtgaccaggtgtgtacaggtatggacaggtgagaaggtgtggtacaggtgtggtgcaggtgagcaggggggtacaggtatgtacaggtgaggtgtgttacaggtacggtgcaggtgatcaggtgtatacaggaatgtacaagtgaggaggtgtggtacaggtgaccaggtgtgtacaggtatggacaggtgaggaggtgtggtacaggtgtggtgtgggtgagcaggagtgtacaggtatgtacaggtgaggaggtgtggtacaggtgaccaggtgtgtacgggtacggacaggtgaggaggtgtggtacaggtgtggtatgggtgaccaggtgtgtacaggtatggacaggtgaggaggtgtggtacaggtgaccaggtgtgtacgggtacggacaggtgaggaggtgtggtgcaggtgtggtatgggtgaccaggtgtgtacaggtatggatggacaggtaaggaggtgtggtacaggtgaccaggtgtgtacaggtatggacaggtgaggaggtgtggtacaggtgtgctatgggtgaccaggtgtgcacaggtacggaaaggtgaggaggtgtggtgcaggtgagcagatggtactcccattgccctgcaggtgtacaagcagaaagtgaagcacctgctatatgagcaccagaacaacctgacagagatgaaggctgagggcactgtagtcatgaagctggcacagaaagagcaccgcatacaggagagtgtgctgcgcaaggacatgcgg

SEQ ID NO: 12091 - DNA, 486 bp, Homo sapiens
gcggccgcgcccgctggcgtcctcttgttctcttccaggtgaagttgagtcctccctctttcttccttgcctttcgccggccacacgccccgttgccgtgcatgggcccctgctcagtgcctcacctgacccactgcacctggccaggtggaggagcatgtcagccgcatccgggaggagctggaccgcgagcgggaggaacgaaactacttccagctggagcgggacaagatccacaccttctgggagatcacacggaggcagctggaggagaagaaggctgagctgcggaacaaagaccgggagatggaagaagccgaggagaggcaccaggtggagatcaaggtgtacaagcagaaagtgaagcacctgctatatgagcaccagaacaacctgacagagatgaaggctgagggcactgtagtcatgaagctggcacagaaagagcaccgcatacaggagagtgtgctgcgcaaggacatgcgg

SEQ ID NO: 12092 - DNA, 11624 bp, Homo sapiens
gacccttccctcgcgggccgcgccccgccgcggacaccaccgggacctggctgcgccctcccgaccccggccgggcgtccggggctcctgcgcactcacttggcggccgcgcccgctggcgtcctcttgttctcttccaggtacttgcgtgtggggcgccgactgtgtgcgggcgcccctcggggctggcgaggggcacaggaggggcctgactcgcgctgggtaatgacagactcacagagcgccctggatggcgcgaattaacgcggggggcgggtgggggcgagggcgtgtgcttgggaggctggaaggggcgggatgggggatgggaggtaaggagagggcggcgggcccgggctgcagagagcgccaaggcagtttcgatgaaactgacccccatgtccctatcgcccagattcagcgattgccagctcctggcctgggccactgcttctctgtcctcattcacttccctccactgctgggtcattttgaagcaaattatatacacattagatcattgcatttgtaagtacttcaatatttatctctcaaagaaagtccgtttgcaggagcattgactcatgcctgtaatcccagccctttgggaggctgaggtgggagcacagcttgagctcaggagtccaaggctgccgtgagctatgattgtatgtctcaaaaaaaaaaaagaaaagaaaagaaaagaaaaagtctagtcttcataaacactcttgttaacccagcatccaggccttcactgagttgatgccgtggcctgaggcggtttacctggtggatagtgggtggcaggaagcatcagacatcagacagagggcagtcggtttgtttgtattaacatttgctctgggattttgcaggaaactcagatgccatttatctgggtttctgagctgcacagcttgacactgaatgaaagtatcttaagccacatatgtgaagaaaaggctcttttctaaaaatctgaactcgaattcaatatgaaaagaacaggtcgcagtgggccctgtcgggatcccagggagccgcaattcagggctccctgaatgattcatctctgcagcccacaccgacagaccaggattgctcttagcttgtgaaaaatgagtaccctgtctaggctatcctgagctaaccctcctattcttgccctttttgctgaaaggaattattgttaatacagctatttaattcaggacactcatccagacttctgaagcaaaaagccaatcagcatgaagctgctagcatattggttttgtgaagtaagtgttaaattataataattacccccactgtgctctccagcgtcactgtctgaccaccctgtcccagggggaggaggcccctctcaggccaagggagtctggcacagtgatgctggctcctggttgcccaggcacagtgaccagccagacttcacagaggcctcagggcttactataaataaatcactgctttgtgcaagctgagccaatgcagttcttccaactggctgctcctctccaagaacaatcaggacttaggtgggcaaacaggaagtctctcatcacagtggttctcagattcccaccactgtgtgggtgcctgaggcctgagcaaacccagctcatgtggcaacttcctcccccagctggacaggaagacctaggtccaccaggccttctttcatttctcacactttgcccccagcacaactttctacgagcatggattctgtactcttcatccccagacacatgggagaacaagatctgctacaagaccttttctttttttttttgagacagggtctcaggtctcattctgttacctaggctggagtgaagtggtgtgatcttggctcactgcaacctccacctccagggctcaaacgattctcccacctcaacctcccaagtagatgaccactttttaagaagatgttaaagatgagagcttagggctgggcgtggggctcacgtgctcccagcactttgggaggccgaggcaggaggatcacttgaggccaggagtttgagaccactctgggcaataaagcaagaccccgtctctattaaaaacttaaaaaaaaaagctgggtatggtgtctcacacctgtagtcctggcttctcaggaggctgaggtgggaggattgcttgagcccaggaggtcgaggctgcagtgagttgtgatcacagcctaggcgacagaaggagaccctgtctccaaaaaaaaaaaaaaaaaaaagcacctgtttatgacaaactcagctttctgggtgacatagatggttgtatgtaggtaacagggtggtttcacggatggcagattcattttagaaattgtaaaatggctagcagttttcagaacaagagattagttagaaaaggaaagtggcagctgtttgttttctgcagggcctgtcgggaagcctctggtttcttttcatccgtgaggagtggggaggaggcctcttcaggaagagcagtttatttttgtgaaaggaatacttactgatttcaaacatttggaactaaactggaacgtatttttctttccgatttctgcgtttttgaggtgtgtgtaaacccaccagcgcagcagctgggagggcccttcaaaggtgggcgggtggggtgagtgaggcccaggggatagagtgtttgcccagatttgaatctcatttggggaaagtttcagaggcttgggtggctgattgatcattccttcaatggtccttcatcagcacgtctttactgagcacgtgctgtgtgctgttctaggcgctgaaggatagaagtgaagggttcccccctcgtggagcttaggttccagcaataagcaaaacatgccctgcagcgaaaggcttctgggctgccggcgacattttcccaacgttcacaaccgggttccttccggacgcccgtctctagggacgcactcccgcctttggcagggccgctgcccggcggagtctcgcgaggatcttgtgacttatcgcggcatcgcccagcggttgccgggaaacggcgtggcttccgggggcgggcgccctggtcccggagtcgccgctgggcctgtccgctggcgtcatggtgagcaggggcgggagcggggctggggtcctcggcaggggcccggagacctcggggcagggaggcctcggtacacggagaccctgggaatgggaggcctggagcgctgggtttctggaattgagagctcggtgctcttgtgggggtctccgtggggcaaactcaggatgctcccggccccggggcctggcagcactcgggactgagacctgggctgtccagagccctgtgctcacaggggtggtcatagaacgcccagggcccggggtcggcggcgcacggtccccagaagagtgaacatgcgtcaaggggactctcatcctggaatggcagactcggtctgttggatccctgggacctagggtttcagctcacgaggctttgcagagcaccagggtccccatggaatagagccggaggcaggaattaccctaagacctttggtctcccggatggagagcctggggcacaccagagtggctagagatccctctacaccaaggaggcccggacaggtccagtgcccttggagtgcccagggcacaaccttgggatacaggaaccactgttcccttggaaagcctggcaggagtcaggcccagaccgagaagaggaaggcggagctcgtggcctcatcagctccatgtctgtctttctcttgtaaagggctctccctttgtggtacaggaattgtcagtaactcaatttctgggcaggtgtggcagggtgggtttcagctggtggggggaggaaagctctgggagccccaccaagtccctgcagctggctgtgaaggtcccaaatgctaagtaatgctgaaccttcctccactgccttcagggctttgtgatgaggtagccttcttggagtggagggattaaaaagagagcagtacattacgaattaaatttaagtagatgggttttctgacccaggaagggtcttctgaaaaccgactatgaaagaaactaccaaactaggccaggagtctgggcgcggtggctcacgcctgtaatcccatcactttgggaggccgaggcaggcggatcatgaggtcaggagatccagaccatcctggccaacatggtgaaaatccatatctattaaacatacaaaaattagctgggtgtggtggcgtgtgcctgtagttccagctactcgggaggctgaggcaggagaatcacttggacctgggaggcggaggttgcagcgagccgagatcgcaccaccgcactccagcctggcaacacgtctcttaaaaaaaaaaaaaaaaagcagggtgtagtggctgacgcctgtaaacccagcactttaggagtccaaggtgggtggatcacttgaggccaggagttggagaccagcctggccaacatggtgaaaccctgtctttactaaaaatacacacacacacacactcacacacacacacacacaaaattagccgggtgtggtggtacgcacctatagtcccagctacttgggaggctgaggcaggagaatttcttgaacctggaaggtagaggttgtgtagtgggatttttaaggaattagagagaccgatggggttcaggaggatatttattaattatttaggtgcaccggcccagtcagattaaaatccaaaggactgagccctgaacaaagagttaagttaccttttaagcttttcgtggggcagagggagatctgtgcagggggaagcatgcttcagatgtgagaaataaaggcagttgttcagttgaaacatgcattacatcatttcttactttttaaggaaaaacatgttttgcgacttgagtttatctgcctagtgaccttgcagccgcacagctacagaatcagggtcttcacaatgcctgggaagggaggagagacaaggctcactagccgcagaaaaacaggcagttaatttttaaaggactccagctctttctctttttcagggggagttgggttttcttatatataactgagtttctgcttacacactttttaatttcttttaattcctgttccagttgcagtgagccaggattgcaccactgcactccagcctgggtgacagagcaagactccatctcaaaaaaaacaaaaacaaaaacaaaaaacaaaaaaatgcaacagcaaacacaacagcaaacactaaacacaaccaaactacttctgtttctgttaggttgtgggaatatgggccttggtctgttggatccttggaccaaggaatatgggtgatatttctgttttcttctcatcagtgttttctaaaatttccacataatattttctctctctctttttttttttttttttgaggtagagtcttaccctgtcacccaggctggagtgcagtggcatgatcttggctcactgcaacctctgccacctgggttcaagcgattctcctgcctcggcctcccgagtacctgggactacaggtgcccgccaccacgcctggctaatttttttgtatttttagtagagacagggtttcaccatgttggccaggctggtcttgaactgctgacctcaagtgatccgcccgcctcagcctcccaaagtgctgggatgacaggtgtgagccactgtgcctggctccacctaatgttttcattcaggactaaatgaaacataaatgaagataaatgggccagtcgcggtggctcacgcctgtaatcccagcactttgggaggcttaggtgggcagatcacgggtcaggagttcgagtacagcctggccaacatagtgaaaccccgtctctactaaaaatacaaaaaattagccggacgtggtggtgggcacctgtaatcccagctactcaggaggctgaggcaggagaatggcttgaatccgggaggcggaggttgcagtgagctgagatcgcaccattgcactccagcctgggcaacagagcaagactctgtctcaaaaaaaaaaaaaaaaaaaaaaaagagagttcaagaccagcctggccaacatggtgaaacctcgtctctactaaaatacaaaaaaaaattagccaggcgtggtggcgggcacctgtagtcccagctcctcgtggaggctgaggcaggagaattgtttgaacccaagaggtggaggttgcagtgagccaaggcagcctggatgacgagggagactccatctcaaaaaaaaaaaaaaaaagataaatggatttaggttttaatgtttttaaaaaataaataaaatttccacatgaaatttgtaattttaaaaacgttacatagctgggcacagcagcagtgaactcctgtggtcccagctccttgggaggctgaggtgggagtatcagttgagcccaggaattggagtctgcagtgagctatgtgatcacaccactgcactccagcttgggcgacagagcaagactttgtctttaaaaaaggttaccgagacatgtagacacagaaaagcatgggctgaagactactgggagtagcaaagtcagcaggataggatatggaaatttgttacctgcttgagtgccctgtaaatgggtggccagacagaactgctcctggtgtcatgcgtggtttcagcaacttccacaagggggtggggttagaaggttctctcccatccttgtcaaagttgctaaaaccacgcacgacgccatgtgcagttccgtctggcagcccatttacagggctctcgtggtgggtgctgtctgcccaagctttcttgaccaggcttctctgaaggaagtttctctttgaaagaaaggaaacttgtggttgtcacaaccgatcgtggttatggaggcatttctccctaagcttactgaatggtgtcttgcaggtcttttccatggtggtcaccaatgttgccgccagcatggtaacatttggcagtgtggtattgagggtctttcctctgttttgcatccacagcagaggtctttactttttaccaaggagtgagtgggtttggaatgggttcccccctctcttagtttttggagacggggtctcgttctactgcccaggctggagtgcggtggtgcaccatagctcactgcagccttaaacttctaggctcaagtgattgtcctgccttggcctcccaaagtgctgggatgacacgtgtgagccactgcgcctggtcaccgtataccaaggaatgagtgggtttggaatgagttccctctcttttctttttttttttttttaagttacagtttgctttttgagatggagtctcactttgttgcccaggctggagtgcaatggtgggatcttggctcactgcagcctctgcctcccgggttcaagcgattcttctgcctcagcctcccgagtaactgggactataggcacacaccagcacacctggctaggtttcctctcttttttttttttttgagatggagtctcactctgtcgtcctggctggagtgcagtggtgtgatctcggctcactgcaaactccatgccccaggttcaagccattctcctgcctcagcctcccgagtagctgggactacaggcgcccaccggcacgcccggctaatttttttttgtatttttagtagagatggggtttcactgtgttagccgggatggtcttgatctcctgacctcgtgatccgtccacctcggcctcccaaagtgctgggattacaggcgtgagccaccacgcccggctcctctcttttctagaaggaatgttctccttctcaaaaggaaggtttctcctttgtgcttctccaaatgcaacaacaggatgtgtgtgtggtaaagggtgggaacactcagggcaatgatgtgctccaggtgagcagaagggagagaggttccagaaccttctctgccaaatgttcctgggagcaaatcagagccagccaagaaggggaagctgttagagtctctcttaccccattatttccaccaaaggcaccgaaaaagaaagggaagaaaggcaaagccaaaggcaccccgattgtcgatgggctcgctccagaggacatgagcaaggagcaggtgagcagagcgggctgtggcccagtccccgggtgggcgtgggcgggcaccacgcagggtgcctacgccgagtgtccatcttgccatgtggatccacccttctgtccaagccagaacacgccccccgcgtggcccataattcccatcagcggcaaagctttcggctgcaccatgtcttttcagaaaggtagtgcagcctgtgaaagagctttgtaacagggtggtaggagtgtggaaggacatgcttttctgatctaaaagctgtttttaatttcgtgtattctctttcaatcttaccctttttttgcacctgatgtgtatagacttatcgtagaacacacatgtagcattctcctttattttattcaccattaaacattatgtcaaaaaggaagtttttgaaagaaggatgatttacttcaaatcacatctgaatctgattaatcgttcatttttttttttttttttttttttttttttgagacggagtctcactctgtcgcccaggctggagtgcagtggcgcgatctcggctcactgtgagctccacctcccgggttcacaccattctcctgcctcagcctcccgagtagctgggactacaggcacctgccaccacgcctggctaattttttttttgtatttttagtagagacggggtttcaccgtgttagccaggatggtctcgatctcctgacctcgtgatccactcgcctcggcctcccaaagtgctgggattacaggcatgagccaccacgcctggccagtcattcattgtttttgataaaagtcccaacaaggagtaacagcatcagggctgcctttttcttgttgcttattttggggaggaggtgatgtttttatagtttctttgtaggagttagtttaagtctcttcttcatttggatgtagttaagggctacagaacataattacataattacaattttacctaaaaggctcctggagacggcagtgtgtggcaagcacggtgcaccctctggcctctgccctcatggacgactgcctgtgagcacctgacatgggacatgagggctgtgtcaactctgtgttattgttaataaatcttaccttcttttgatagttgtaagataaaaaatcaatacgaaggagactgaaagagtctcatgacctgaagttggagctaggcagaggtccttgaacaatggtaaagaatggctttattttacatgcaggcaaaccattggcagtttaagccagtggctaagcagagaggtgatggggtcaggtttgtgttctggaaagatgtctggagctgctggatggagaatggattgaacactgcgttgtcccagcatgtgagctgctgcccgtctccctgtccgcttcccattcctgtggagacaggccttgtggggcagtggccatggagcctacggggcagcctacggggcaggctacggggcagcttacggggcaggctatggggcagcctacggggcaggctacggggcaggcccttgcactgcacatcgcacgttgagccacagactcagaaggcttcttcagggtccaggcaggtggggagggatgggggtgacctggagactcctgccccgcagcagaggacagtttcatctgttcactggggagtgccttgtgggcctaggagttcagtgctgtttttttctgattttccaagagaagctggaaatctggatatttataagaaatctgaatattgagtgatggcaaaatctcaacaccatgtgagccaaacagaccagtcaggagccctggttcaggctctgcccaggagcctctaaaggtctgtgacgtgaagacatttgtcgttgtgccgaggcactggttggattcgggggtgcgtgtctccctcatgtctgcccggcatcctcggctcagaacccctcctgctgctccttcttgtttgctcgttgtcttgtcttcttttgaggtgagaaatgtgttttccctgtggggaatgtggtgttgagaaagaaaaaggctcacagtaagtggcctggggctgtgcccgaaaagtaactgattctgacggaatctcgctgtgtggcccaggctggagtgcggtggcgcgacctcggctcactgcaagctccacctcctgggttcacaccatcctgctgcttcaggctgcccagtagctgggactgcaggtgcctgccatcacgcccggctaatttttttgtatttttagtagagacgaggtttcaccgtgttagccaggatggccttgatctcctgacctcatgatctgcctgtctctgcctcccaaagtgctgggattacaggtgtgagccaccgcgcctggcagtaactgattcttaagggaaatgagctcccgagaaagctggaagcctgtcctacatttttttttaacctatttgcagattcgcaattgaaccctcttgagattttagagtctactggttttgtatattttttgcttaacattatatcttcaaaggtgaattttttttcatttagcattatgatatgaatttgtttaaatgctgctacatcatttgcatattttttttgggttaatgtgatatttctcctagttgatatactctaatttttcaaccatttccatatttatttatttattgtttagagacagggtcctgctctgtcacccaggtggagtgcagtggtgtgatcacggctcacggcagccttgacctcccaggtccaaacgatcctcctacctcagtcttctgagtagctgggactataggcatgtgccaccactcctggctaatttttttttttttttttttttgtagagacagggttttgccatgttgcctaggctgttcaactctggggctcaaaagatcctcccaaagtggtgggagccaccatgcctggctgtttgtgtattttttgagacagattctcactctgtcacccaggctggagtgtagtggcatgatcataactaaccgcagcctcaaccccctgagcttgagtgaccctcccacctcagctctcccagtagctgagactataggtgcgtgccatcatgcctagttaatgaaaaaaagtttttgcagagatggggtcttgctatgttgcccaagctggtcttcagctcctgggcgcgagggatccttcaacctcagcctcccagagtgctggggttgcaggcgagagccaccgcgcctcgcttatttccctgtttaaactggtcttaggttatttcctttttgatatttttgctgttgtaataatggtgtgggtaatatctttgagcaagatgctcttatatttcttttgagaaattttttaggcatcaattctcaggaatggatgaaaggatctagttattttatgattattggccaaattgaagagaattctgccacctgctgaatgcattctgtctccggagcttcctagccttatattttaactttttacatttagctgtttatttttaggtgaagttgagtcctccctctttcttccttgcctttcgccggccacacgccccgttgccgtgc

SEQ ID NO: 12093 - DNA, 546 bp, Homo sapiens
gacccttccctcgcgggccgcgccccgccgcggacaccaccgggacctggctgcgccctcccgaccccggccgggcgtccggggctcctgcgcactcacttggcggccgcgcccgctggcgtcctcttgttctcttccagctatttaattcaggacactcatccagacttctgaagcaaaaagccaatcagcatgaagctgctagcatattggttttgtgaaggcctgtcgggaagcctctggtttcttttcatccgtgaggagtggggaggaggcctcttcaggaagagcagtttatttttgtgaaaggaatacttactgatttcaaacatttggaactaaactggaacgtatttttctttccgatttctgcgtttttgaggcaccgaaaaagaaagggaagaaaggcaaagccaaaggcaccccgattgtcgatgggctcgctccagaggacatgagcaaggagcagctgtttatttttaggtgaagttgagtcctccctctttcttccttgcctttcgccggccacacgccccgttgccgtgc

SEQ ID NO: 12094 - DNA, 10705 bp, Homo sapiens
gagtggggaggaggcctcttcaggaagagcagtttatttttgtgaaaggaatacttactgatttcaaacatttggaactaaactggaacgtatttttctttccgatttctgcgtttttgaggtgtgtgtaaacccaccagcgcagcagctgggagggcccttcaaaggtgggcgggtggggtgagtgaggcccaggggatagagtgtttgcccagatttgaatctcatttggggaaagtttcagaggcttgggtggctgattgatcattccttcaatggtccttcatcagcacgtctttactgagcacgtgctgtgtgctgttctaggcgctgaaggatagaagtgaagggttcccccctcgtggagcttaggttccagcaataagcaaaacatgccctgcagcgaaaggcttctgggctgccggcgacattttcccaacgttcacaaccgggttccttccggacgcccgtctctagggacgcactcccgcctttggcagggccgctgcccggcggagtctcgcgaggatcttgtgacttatcgcggcatcgcccagcggttgccgggaaacggcgtggcttccgggggcgggcgccctggtcccggagtcgccgctgggcctgtccgctggcgtcatggtgagcaggggcgggagcggggctggggtcctcggcaggggcccggagacctcggggcagggaggcctcggtacacggagaccctgggaatgggaggcctggagcgctgggtttctggaattgagagctcggtgctcttgtgggggtctccgtggggcaaactcaggatgctcccggccccggggcctggcagcactcgggactgagacctgggctgtccagagccctgtgctcacaggggtggtcatagaacgcccagggcccggggtcggcggcgcacggtccccagaagagtgaacatgcgtcaaggggactctcatcctggaatggcagactcggtctgttggatccctgggacctagggtttcagctcacgaggctttgcagagcaccagggtccccatggaatagagccggaggcaggaattaccctaagacctttggtctcccggatggagagcctggggcacaccagagtggctagagatccctctacaccaaggaggcccggacaggtccagtgcccttggagtgcccagggcacaaccttgggatacaggaaccactgttcccttggaaagcctggcaggagtcaggcccagaccgagaagaggaaggcggagctcgtggcctcatcagctccatgtctgtctttctcttgtaaagggctctccctttgtggtacaggaattgtcagtaactcaatttctgggcaggtgtggcagggtgggtttcagctggtggggggaggaaagctctgggagccccaccaagtccctgcagctggctgtgaaggtcccaaatgctaagtaatgctgaaccttcctccactgccttcagggctttgtgatgaggtagccttcttggagtggagggattaaaaagagagcagtacattacgaattaaatttaagtagatgggttttctgacccaggaagggtcttctgaaaaccgactatgaaagaaactaccaaactaggccaggagtctgggcgcggtggctcacgcctgtaatcccatcactttgggaggccgaggcaggcggatcatgaggtcaggagatccagaccatcctggccaacatggtgaaaatccatatctattaaacatacaaaaattagctgggtgtggtggcgtgtgcctgtagttccagctactcgggaggctgaggcaggagaatcacttggacctgggaggcggaggttgcagcgagccgagatcgcaccaccgcactccagcctggcaacacgtctcttaaaaaaaaaaaaaaaaagcagggtgtagtggctgacgcctgtaaacccagcactttaggagtccaaggtgggtggatcacttgaggccaggagttggagaccagcctggccaacatggtgaaaccctgtctttactaaaaatacacacacacacacactcacacacacacacacacaaaattagccgggtgtggtggtacgcacctatagtcccagctacttgggaggctgaggcaggagaatttcttgaacctggaaggtagaggttgtgtagtgggatttttaaggaattagagagaccgatggggttcaggaggatatttattaattatttaggtgcaccggcccagtcagattaaaatccaaaggactgagccctgaacaaagagttaagttaccttttaagcttttcgtggggcagagggagatctgtgcagggggaagcatgcttcagatgtgagaaataaaggcagttgttcagttgaaacatgcattacatcatttcttactttttaaggaaaaacatgttttgcgacttgagtttatctgcctagtgaccttgcagccgcacagctacagaatcagggtcttcacaatgcctgggaagggaggagagacaaggctcactagccgcagaaaaacaggcagttaatttttaaaggactccagctctttctctttttcagggggagttgggttttcttatatataactgagtttctgcttacacactttttaatttcttttaattcctgttccagttgcagtgagccaggattgcaccactgcactccagcctgggtgacagagcaagactccatctcaaaaaaaacaaaaacaaaaacaaaaaacaaaaaaatgcaacagcaaacacaacagcaaacactaaacacaaccaaactacttctgtttctgttaggttgtgggaatatgggccttggtctgttggatccttggaccaaggaatatgggtgatatttctgttttcttctcatcagtgttttctaaaatttccacataatattttctctctctctttttttttttttttttgaggtagagtcttaccctgtcacccaggctggagtgcagtggcatgatcttggctcactgcaacctctgccacctgggttcaagcgattctcctgcctcggcctcccgagtacctgggactacaggtgcccgccaccacgcctggctaatttttttgtatttttagtagagacagggtttcaccatgttggccaggctggtcttgaactgctgacctcaagtgatccgcccgcctcagcctcccaaagtgctgggatgacaggtgtgagccactgtgcctggctccacctaatgttttcattcaggactaaatgaaacataaatgaagataaatgggccagtcgcggtggctcacgcctgtaatcccagcactttgggaggcttaggtgggcagatcacgggtcaggagttcgagtacagcctggccaacatagtgaaaccccgtctctactaaaaatacaaaaaattagccggacgtggtggtgggcacctgtaatcccagctactcaggaggctgaggcaggagaatggcttgaatccgggaggcggaggttgcagtgagctgagatcgcaccattgcactccagcctgggcaacagagcaagactctgtctcaaaaaaaaaaaaaaaaaaaaaaaagagagttcaagaccagcctggccaacatggtgaaacctcgtctctactaaaatacaaaaaaaaattagccaggcgtggtggcgggcacctgtagtcccagctcctcgtggaggctgaggcaggagaattgtttgaacccaagaggtggaggttgcagtgagccaaggcagcctggatgacgagggagactccatctcaaaaaaaaaaaaaaaaagataaatggatttaggttttaatgtttttaaaaaataaataaaatttccacatgaaatttgtaattttaaaaacgttacatagctgggcacagcagcagtgaactcctgtggtcccagctccttgggaggctgaggtgggagtatcagttgagcccaggaattggagtctgcagtgagctatgtgatcacaccactgcactccagcttgggcgacagagcaagactttgtctttaaaaaaggttaccgagacatgtagacacagaaaagcatgggctgaagactactgggagtagcaaagtcagcaggataggatatggaaatttgttacctgcttgagtgccctgtaaatgggtggccagacagaactgctcctggtgtcatgcgtggtttcagcaacttccacaagggggtggggttagaaggttctctcccatccttgtcaaagttgctaaaaccacgcacgacgccatgtgcagttccgtctggcagcccatttacagggctctcgtggtgggtgctgtctgcccaagctttcttgaccaggcttctctgaaggaagtttctctttgaaagaaaggaaacttgtggttgtcacaaccgatcgtggttatggaggcatttctccctaagcttactgaatggtgtcttgcaggtcttttccatggtggtcaccaatgttgccgccagcatggtaacatttggcagtgtggtattgagggtctttcctctgttttgcatccacagcagaggtctttactttttaccaaggagtgagtgggtttggaatgggttcccccctctcttagtttttggagacggggtctcgttctactgcccaggctggagtgcggtggtgcaccatagctcactgcagccttaaacttctaggctcaagtgattgtcctgccttggcctcccaaagtgctgggatgacacgtgtgagccactgcgcctggtcaccgtataccaaggaatgagtgggtttggaatgagttccctctcttttctttttttttttttttaagttacagtttgctttttgagatggagtctcactttgttgcccaggctggagtgcaatggtgggatcttggctcactgcagcctctgcctcccgggttcaagcgattcttctgcctcagcctcccgagtaactgggactataggcacacaccagcacacctggctaggtttcctctcttttttttttttttgagatggagtctcactctgtcgtcctggctggagtgcagtggtgtgatctcggctcactgcaaactccatgccccaggttcaagccattctcctgcctcagcctcccgagtagctgggactacaggcgcccaccggcacgcccggctaatttttttttgtatttttagtagagatggggtttcactgtgttagccgggatggtcttgatctcctgacctcgtgatccgtccacctcggcctcccaaagtgctgggattacaggcgtgagccaccacgcccggctcctctcttttctagaaggaatgttctccttctcaaaaggaaggtttctcctttgtgcttctccaaatgcaacaacaggatgtgtgtgtggtaaagggtgggaacactcagggcaatgatgtgctccaggtgagcagaagggagagaggttccagaaccttctctgccaaatgttcctgggagcaaatcagagccagccaagaaggggaagctgttagagtctctcttaccccattatttccaccaaaggcaccgaaaaagaaagggaagaaaggcaaagccaaaggcaccccgattgtcgatgggctcgctccagaggacatgagcaaggagcaggtgagcagagcgggctgtggcccagtccccgggtgggcgtgggcgggcaccacgcagggtgcctacgccgagtgtccatcttgccatgtggatccacccttctgtccaagccagaacacgccccccgcgtggcccataattcccatcagcggcaaagctttcggctgcaccatgtcttttcagaaaggtagtgcagcctgtgaaagagctttgtaacagggtggtaggagtgtggaaggacatgcttttctgatctaaaagctgtttttaatttcgtgtattctctttcaatcttaccctttttttgcacctgatgtgtatagacttatcgtagaacacacatgtagcattctcctttattttattcaccattaaacattatgtcaaaaaggaagtttttgaaagaaggatgatttacttcaaatcacatctgaatctgattaatcgttcatttttttttttttttttttttttttttttgagacggagtctcactctgtcgcccaggctggagtgcagtggcgcgatctcggctcactgtgagctccacctcccgggttcacaccattctcctgcctcagcctcccgagtagctgggactacaggcacctgccaccacgcctggctaattttttttttgtatttttagtagagacggggtttcaccgtgttagccaggatggtctcgatctcctgacctcgtgatccactcgcctcggcctcccaaagtgctgggattacaggcatgagccaccacgcctggccagtcattcattgtttttgataaaagtcccaacaaggagtaacagcatcagggctgcctttttcttgttgcttattttggggaggaggtgatgtttttatagtttctttgtaggagttagtttaagtctcttcttcatttggatgtagttaagggctacagaacataattacataattacaattttacctaaaaggctcctggagacggcagtgtgtggcaagcacggtgcaccctctggcctctgccctcatggacgactgcctgtgagcacctgacatgggacatgagggctgtgtcaactctgtgttattgttaataaatcttaccttcttttgatagttgtaagataaaaaatcaatacgaaggagactgaaagagtctcatgacctgaagttggagctaggcagaggtccttgaacaatggtaaagaatggctttattttacatgcaggcaaaccattggcagtttaagccagtggctaagcagagaggtgatggggtcaggtttgtgttctggaaagatgtctggagctgctggatggagaatggattgaacactgcgttgtcccagcatgtgagctgctgcccgtctccctgtccgcttcccattcctgtggagacaggccttgtggggcagtggccatggagcctacggggcagcctacggggcaggctacggggcagcttacggggcaggctatggggcagcctacggggcaggctacggggcaggcccttgcactgcacatcgcacgttgagccacagactcagaaggcttcttcagggtccaggcaggtggggagggatgggggtgacctggagactcctgccccgcagcagaggacagtttcatctgttcactggggagtgccttgtgggcctaggagttcagtgctgtttttttctgattttccaagagaagctggaaatctggatatttataagaaatctgaatattgagtgatggcaaaatctcaacaccatgtgagccaaacagaccagtcaggagccctggttcaggctctgcccaggagcctctaaaggtctgtgacgtgaagacatttgtcgttgtgccgaggcactggttggattcgggggtgcgtgtctccctcatgtctgcccggcatcctcggctcagaacccctcctgctgctccttcttgtttgctcgttgtcttgtcttcttttgaggtgagaaatgtgttttccctgtggggaatgtggtgttgagaaagaaaaaggctcacagtaagtggcctggggctgtgcccgaaaagtaactgattctgacggaatctcgctgtgtggcccaggctggagtgcggtggcgcgacctcggctcactgcaagctccacctcctgggttcacaccatcctgctgcttcaggctgcccagtagctgggactgcaggtgcctgccatcacgcccggctaatttttttgtatttttagtagagacgaggtttcaccgtgttagccaggatggccttgatctcctgacctcatgatctgcctgtctctgcctcccaaagtgctgggattacaggtgtgagccaccgcgcctggcagtaactgattcttaagggaaatgagctcccgagaaagctggaagcctgtcctacatttttttttaacctatttgcagattcgcaattgaaccctcttgagattttagagtctactggttttgtatattttttgcttaacattatatcttcaaaggtgaattttttttcatttagcattatgatatgaatttgtttaaatgctgctacatcatttgcatattttttttgggttaatgtgatatttctcctagttgatatactctaatttttcaaccatttccatatttatttatttattgtttagagacagggtcctgctctgtcacccaggtggagtgcagtggtgtgatcacggctcacggcagccttgacctcccaggtccaaacgatcctcctacctcagtcttctgagtagctgggactataggcatgtgccaccactcctggctaatttttttttttttttttttttgtagagacagggttttgccatgttgcctaggctgttcaactctggggctcaaaagatcctcccaaagtggtgggagccaccatgcctggctgtttgtgtattttttgagacagattctcactctgtcacccaggctggagtgtagtggcatgatcataactaaccgcagcctcaaccccctgagcttgagtgaccctcccacctcagctctcccagtagctgagactataggtgcgtgccatcatgcctagttaatgaaaaaaagtttttgcagagatggggtcttgctatgttgcccaagctggtcttcagctcctgggcgcgagggatccttcaacctcagcctcccagagtgctggggttgcaggcgagagccaccgcgcctcgcttatttccctgtttaaactggtcttaggttatttcctttttgatatttttgctgttgtaataatggtgtgggtaatatctttgagcaagatgctcttatatttcttttgagaaattttttaggcatcaattctcaggaatggatgaaaggatctagttattttatgattattggccaaattgaagagaattctgccacctgctgaatgcattctgtctccggagcttcctagccttatattttaactttttacatttagctgtttatttttaggtgaagttgagtcctccctctttcttccttgcctttcgccggccacacgccccgttgccgtgcatgggcccctgctcagtgcctcacctgacccactgcacctggccaggtggaggagcatgtcagccgcatccgggaggagctggaccgcgagcgggaggaacgaaactacttccagctggagcgggacaagatccacaccttctgggagatcacacggaggcagctggaggagaagaaggctgagctgcggaacaaagaccgggagatggaagaagccgaggagaggcaccaggtggagatcaaggtgagtggggccggcctgcacgtgctaacctggtcaccacagagccccagaggagctggatccagtgagggtgcaggtgggacattttctgttcttggctttgggagtcacagccttaaaggtgttttttataaaagcctgagggagagaccctgcaggtcctgagggtttaaaatgctgcctccacaacatggaaggaatatgggctctgggggcagactggcctgtttgcaactcagctctgccacttaataccccatgagctggggatgcacctcacctcccagccttggtgtcctgctctgtgcctcaagtgtacaggtttgcataggtgaacaggcatgtgtagctgtgtaaaggtgaggcatgcaagtgagcaggtggatgcaagtgagcatgtgtgtgcaggtgaggaggcgtggccaggtgaggaggtatgtgcaggtgaggtgtggggaggtgagcacgtggggcaggtatgtgcaggtgagcaggtaggtgcaagtgaccaggtgtctacaggtatgtacaggtgaggaggtgtagtacaggtgtagtgcaggcgaccaggtgtgtacgggaatttacaggtgaggaggtgtacaggtgaccaggtgtgtacaggtatggacaggtgagaaggtgtggtacaggtgtggtgcaggtgagcaggggggtacaggtatgtacaggtgaggtgtgttacaggtacggtgcaggtgatcaggtgtatacaggaatgtacaagtgaggaggtgtggtacaggtgaccaggtgtgtacaggtatggacaggtgaggaggtgtggtacaggtgtggtgtgggtgagcaggagtgtacaggtatgtacaggtgaggaggtgtggtacaggtgaccaggtgtgtacgggtacggacaggtgaggaggtgtggtacaggtgtggtatgggtgaccaggtgtgtacaggtatggacaggtgaggaggtgtggtacaggtgaccaggtgtgtacgggtacggacaggtgaggaggtgtggtgcaggtgtggtatgggtgaccaggtgtgtacaggtatggatggacaggtaaggaggtgtggtacaggtgaccaggtgtgtacaggtatggacaggtgaggaggtgtggtacaggtgtgctatgggtgaccaggtgtgcacaggtacggaaaggtgaggaggtgtggtgcaggtgagcagatggtactcccattgccctgcaggtgtacaagcagaaagtgaagcacctgctatatgagcaccagaacaacctgacagagatgaaggctgagggca

SEQ ID NO: 12095 - DNA, 479 bp, Homo sapiens
gagtggggaggaggcctcttcaggaagagcagtttatttttgtgaaaggaatacttactgatttcaaacatttggaactaaactggaacgtatttttctttccgatttctgcgtttttgaggcaccgaaaaagaaagggaagaaaggcaaagccaaaggcaccccgattgtcgatgggctcgctccagaggacatgagcaaggagcaggtggaggagcatgtcagccgcatccgggaggagctggaccgcgagcgggaggaacgaaactacttccagctggagcgggacaagatccacaccttctgggagatcacacggaggcagctggaggagaagaaggctgagctgcggaacaaagaccgggagatggaagaagccgaggagaggcaccaggtggagatcaaggtgtacaagcagaaagtgaagcacctgctatatgagcaccagaacaacctgacagagatgaaggctgagggca

SEQ ID NO: 12096 - DNA, 3430 bp, Homo sapiens
ttatggcttccagagacaccttcctgagagaagggcttatgctgatgtgttcctcctgccttccactgcgtggatggctctacaaagggccagggcgcaggcagtgtggacaacacactgaccccggtgctgtgggagtgggcactgttgggaggcagcgtgttccaggcaggtgcagaggtgggaggcagcatcttcccagcgagatgtccccaggtgaggggcctcatcgcccacccccagcgctgtccctacaggtgcagcaggagcgggacgagctctatcggaagttcaccgcagccatccaggaggtgcagcagaagacagggttcaagaacctcgtgctagaacgcaagctgcaggctctgagcgccgctgtggagaagaaggaggtgcagttcaacgaggtcctggctgcctctaacctggaccctgcagccctgacgctggtgtcccgcaagctggaggtaggccctagacaggctcctgaccccagtgggcggcctcatccctgtggcaagagtcttcagttctgtgctgctcctcggataggcacagagacccctcggtcggccactgaggaggggcattcatgggtttcctgtggccagtttcgggccagttgggaactgtggaagggctgggcaggggaaccagatcagggcccactctgctattgatggggagcacagggctggagggggctggttggggccagcacagaatggggacgggcagagggttggagagccgccaggaggctgagtccacaggtggggctgggaggggccgaggtgacttggtgtttgcacatgggggaacgacgggtcccggcccagtgggcggtggtgcctgtgggaccctggtcatctgggatggcctggctctcagggcctgaggtagtgaggctgtataggaggggcctcacctgggccagaggcactgtggccccgggactgaaaactcatctttgtttgctcagcactgggcccagtgagcacaggcaggtgagggagtgagggtcccactgttgggaggtgggggaggcgtgtttccagctcctggctgagggctgcacccagcctgctgctaagccaccgaaatgagggtgaagagagcagtcgtggcctgtgagggtcattgcagctgcgcccacgcgccagggtgaggatggaggatggagctaaatgtgggtcaacccctcctttcctggtcattgttacctcgacttctaagtgaggaatcttctggggaaatgacagaggcccccgcagggacactgtttgctgctggccaggtgtgagggggctgctgtgtcagtgggcagcagggacggctctaaagccaggctgggcccagcagtgccccacaggcaggagcccaagaagtccctgcctcgccacgtggtgagacccttgcccacatctgggcggggccagcgctgctgaagactacttttttctgttacaaaaaagtgggatagccgggcgcggtggctcacgcctgtaatcccagcactttgggaggctgaggtgggcagatcacgagtttgggagttcaagaccagcctggccaagatggtgaaaccccgtctctactaaaaatacaaaaattagctgggcttggtggcgggtgtaatcccagctatttgggaggctgaggcagagaattcctggcacctgggaggcggaggttgcggtgagcctagatcgcgccactgcactccagcctgggcaacggggcgagactccatctcagaaaaaaaagtgagatagtacattcacaagcctcaagaaatttaagcaatatgtaggtggtgtttagtgaccagtctccacagtgtggctgcacgctgcctgccctcacctcatctgcatttcttgtggtctggactgctctttgagttttttcttgagacggtgtcttgctctgtcacccagactggagtgcagtggctcaatctcggcgcactgcaacctccgtttcccaggttcaagcaattctcatgcctcagcctcctgagtagctgggattacacaggtgtgagccaccgtgcccggctacttttcgtatagtagagacggggtttcgccacgttggccaggctggtctcaaactcctgacctcaagtgatctgccctccttggcctcccacactgctgggatcacaggtgtgagcggcagtgcctggcctggactgttgctggagaggcaggttgtgcaagctcccagttctctgcttcttccttgttttctctccacccttggagacctttttctgctgacaaccctgtgtggatggatgcatccatcaaaccaggctgctattcgctggatctctcagaacgcccactggagtccccaggccgctcccgttgcctcggccaaaagatgagtctcaaactcccatcacctctctctcctcaggatgttcttgagtcgaagaacagcaccatcaaggacctgcagtatgagctggcccaggtctgtaaggtacggctgtgccctgccctccctcaggggcaccccctcggtgcccagactgttctaaatgcagacggtctctgaggaccccacctgtgcccacttcgtacctcgtttgacaaggcagctgtcactgtccccacgtgagggtgcagtcatagccgagagcatctggattctgtgtggtctggggcagtgcactgctgtctaggccatgtctctgctgggatgggtgtagggggggacctggacgcttccctggtcagccccttcccctgggcagggagtcagaaggtgctgtgcccaccggggaaggaaacagacgtcattcaacaggggaagggagggcgtgaagaacctgagtgggaaacacccagccagggcccagagccctcccagaccacagctctgccctgagtgtccctgccctctgcctccgtctcgtcatttgtggaataggaatagtgacagcctctccctgtcgtgctacctgagccaacgcagtgaaggtgcttggagctgtgtcccacacgggaaatgactgataagcctttggctttatccttctgcaccgtgatgctcacgctgcccctccatggagctgcactcagctctggtggtcctgagcgtggggaccctcagctccctgacactgccctgtctccacaggcccataacgacctgctgcgcacgtatgaggcaaagctgctggccttcgggatccctctggacaacgtgggcttcaagcccttggaaacagctgtgatcggacagacactgggccagggccccgcgggactggtgggcaccccgacgtagctgcccccctggggggccacagcccagagaaccagcctaggaacactcgggatgacaccccttatcacaccaaggacagcaagttttttagattttatcatcagcaaatgaaagcttttcacatgtt

SEQ ID NO: 12097 - DNA, 810 bp, Homo sapiens
ttatggcttccagagacaccttcctgagagaagggcttatgctgatgtgttcctcctgccttccactgcgtggatggctctacaaagggccagggcgcaggcagtgtggacaacacactgaccccggtgctgtgggagtgggcactgttgggaggcagcgtgttccaggcaggtgcagaggtgggaggcagcatcttcccagcgagatgtccccaggtgaggggcctcatcgcccacccccagcgctgtccctacaggtgcagcaggagcgggacgagctctatcggaagttcaccgcagccatccaggaggtgcagcagaagacagggttcaagaacctcgtgctagaacgcaagctgcaggctctgagcgccgctgtggagaagaaggaggtgcagttcaacgaggtcctggctgcctctaacctggaccctgcagccctgacgctggtgtcccgcaagctggaggatgttcttgagtcgaagaacagcaccatcaaggacctgcagtatgagctggcccaggtctgtaaggcccataacgacctgctgcgcacgtatgaggcaaagctgctggccttcgggatccctctggacaacgtgggcttcaagcccttggaaacagctgtgatcggacagacactgggccagggccccgcgggactggtgggcaccccgacgtagctgcccccctggggggccacagcccagagaaccagcctaggaacactcgggatgacaccccttatcacaccaaggacagcaagttttttagattttatcatcagcaaatgaaagcttttcacatgtt

SEQ ID NO: 12098 - DNA, 1616 bp, Homo sapiens
cgccccatcagagaggaatttacctccagagcttgttaactcagggagcaaaaactggattaaaacagccaaggcatgcaagagaaagaacatggaagtttccaaggccagtggacccactcagaatcccagaacaacctatttccatgtgagtttgggaggctgtgattaccacacacattcccactcctagctaaaatcagtagttatcagcaggtggtagctattcagtgccgtgggcagccttcttaaaatagtcttctccatggctcctggtctgagaaggctccaatttcagaagtctctgtgttttactaataaaggctgattgtggctgggtggccacacaggcctcggttactgctcactggggtcagctgacattcagctgttggcacccccagtgcagggagcgattagcaatgcctgtcactggcaaaggcaggccgacagtggtgtgtgtgctgagtgtgagcatcagcagaaaaactcagtctaaacccctttgttcttctcttgcagagcttttgcctgcaaggctgttctgaccacagtgggcgttttgggcccgtttacaggctccatgttctgtagccgtaggggcaccacgtcttcctctgctaagctgctgtttgctgctgcctttcagaaattgaggccaagtatgataagaagatgaagatgctgagggacgaactcgacttgcggagaaagactgagctccacgaagtggaggagaggaagaatggccagatccacacgctgatgcagcgccacgaggaggccttcaccgacattaagaactactacaacgacatcaccctcaacaacctggccctcatcaactccctcaaggtgctgtgcgtgggctgggctggggaggcacactctgcctgtcctagaatgtgggctgcagagtcctggggatccagaccccagctctccaccccaacacacccagtactttttataagattgtttgacaatgcccctctcatatccttaactgaaattcctaaataacgtaacctatctctacctattgttaaaagcagtcaggatattgccctcaccgtagtgcagagggggaagtaatgaagtgtgttctggtttgtaaaagctcagatggaaccgcagtgagggccgtgatgtggctggagtggataggtgtcatagtcactgcctgcgacaggtggataggtgtcatcgtcactgcatgctggcagtgacaggattttctacagtagacaacggcccttggtggaatcttgaacaaagtatagtccttcagtctgcatggaagctgcattcccagaaaactcagaataagttgaagctgcagaaatactgtttatacatagaagacgtctaggtgccagcatgcctgaggctggcagcagctggtgatgggcaggagagcacccagctctcaccatgcaggccacagcccctttggttctgcctgctgagcccctgccgggcctgtgcttgtgcctgcaggagcagatggaggacatgcggaagaaggaggaccacctggagagggagatggcagaggtgtctgggcagaacaagcgcctggcagaccctctccagaaggctcgggaggagatgag

SEQ ID NO: 12099 - DNA, 470 bp, Homo sapiens
cgccccatcagagaggaatttacctccagagcttgttaactcagggagcaaaaactggattaaaacagccaaggcatgcaagagaaagaacatggaagtttccaaggccagtggacccactcagaatcccagaacaacctatttccataaattgaggccaagtatgataagaagatgaagatgctgagggacgaactcgacttgcggagaaagactgagctccacgaagtggaggagaggaagaatggccagatccacacgctgatgcagcgccacgaggaggccttcaccgacattaagaactactacaacgacatcaccctcaacaacctggccctcatcaactccctcaaggagcagatggaggacatgcggaagaaggaggaccacctggagagggagatggcagaggtgtctgggcagaacaagcgcctggcagaccctctccagaaggctcgggaggagatgag

SEQ ID NO: 12100 - DNA, 5327 bp, Homo sapiens
gggggcgggcgccctggtcccggagtcgccgctgggcctgtccgctggcgtcatggtgagcaggggcgggagcggggctggggtcctcggcaggggcccggagacctcggggcagggaggcctcggtacacggagaccctgggaatgggaggcctggagcgctgggtttctggaattgagagctcggtgctcttgtgggggtctccgtggggcaaactcaggatgctcccggccccggggcctggcagcactcgggactgagacctgggctgtccagagccctgtgctcacaggggtggtcatagaacgcccagggcccggggtcggcggcgcacggtccccagaagagtgaacatgcgtcaaggggactctcatcctggaatggcagactcggtctgttggatccctgggacctagggtttcagctcacgaggctttgcagagcaccagggtccccatggaatagagccggaggcaggaattaccctaagacctttggtctcccggatggagagcctggggcacaccagagtggctagagatccctctacaccaaggaggcccggacaggtccagtgcccttggagtgcccagggcacaaccttgggatacaggaaccactgttcccttggaaagcctggcaggagtcaggcccagaccgagaagaggaaggcggagctcgtggcctcatcagctccatgtctgtctttctcttgtaaagggctctccctttgtggtacaggaattgtcagtaactcaatttctgggcaggtgtggcagggtgggtttcagctggtggggggaggaaagctctgggagccccaccaagtccctgcagctggctgtgaaggtcccaaatgctaagtaatgctgaaccttcctccactgccttcagggctttgtgatgaggtagccttcttggagtggagggattaaaaagagagcagtacattacgaattaaatttaagtagatgggttttctgacccaggaagggtcttctgaaaaccgactatgaaagaaactaccaaactaggccaggagtctgggcgcggtggctcacgcctgtaatcccatcactttgggaggccgaggcaggcggatcatgaggtcaggagatccagaccatcctggccaacatggtgaaaatccatatctattaaacatacaaaaattagctgggtgtggtggcgtgtgcctgtagttccagctactcgggaggctgaggcaggagaatcacttggacctgggaggcggaggttgcagcgagccgagatcgcaccaccgcactccagcctggcaacacgtctcttaaaaaaaaaaaaaaaaagcagggtgtagtggctgacgcctgtaaacccagcactttaggagtccaaggtgggtggatcacttgaggccaggagttggagaccagcctggccaacatggtgaaaccctgtctttactaaaaatacacacacacacacactcacacacacacacacacaaaattagccgggtgtggtggtacgcacctatagtcccagctacttgggaggctgaggcaggagaatttcttgaacctggaaggtagaggttgtgtagtgggatttttaaggaattagagagaccgatggggttcaggaggatatttattaattatttaggtgcaccggcccagtcagattaaaatccaaaggactgagccctgaacaaagagttaagttaccttttaagcttttcgtggggcagagggagatctgtgcagggggaagcatgcttcagatgtgagaaataaaggcagttgttcagttgaaacatgcattacatcatttcttactttttaaggaaaaacatgttttgcgacttgagtttatctgcctagtgaccttgcagccgcacagctacagaatcagggtcttcacaatgcctgggaagggaggagagacaaggctcactagccgcagaaaaacaggcagttaatttttaaaggactccagctctttctctttttcagggggagttgggttttcttatatataactgagtttctgcttacacactttttaatttcttttaattcctgttccagttgcagtgagccaggattgcaccactgcactccagcctgggtgacagagcaagactccatctcaaaaaaaacaaaaacaaaaacaaaaaacaaaaaaatgcaacagcaaacacaacagcaaacactaaacacaaccaaactacttctgtttctgttaggttgtgggaatatgggccttggtctgttggatccttggaccaaggaatatgggtgatatttctgttttcttctcatcagtgttttctaaaatttccacataatattttctctctctctttttttttttttttttgaggtagagtcttaccctgtcacccaggctggagtgcagtggcatgatcttggctcactgcaacctctgccacctgggttcaagcgattctcctgcctcggcctcccgagtacctgggactacaggtgcccgccaccacgcctggctaatttttttgtatttttagtagagacagggtttcaccatgttggccaggctggtcttgaactgctgacctcaagtgatccgcccgcctcagcctcccaaagtgctgggatgacaggtgtgagccactgtgcctggctccacctaatgttttcattcaggactaaatgaaacataaatgaagataaatgggccagtcgcggtggctcacgcctgtaatcccagcactttgggaggcttaggtgggcagatcacgggtcaggagttcgagtacagcctggccaacatagtgaaaccccgtctctactaaaaatacaaaaaattagccggacgtggtggtgggcacctgtaatcccagctactcaggaggctgaggcaggagaatggcttgaatccgggaggcggaggttgcagtgagctgagatcgcaccattgcactccagcctgggcaacagagcaagactctgtctcaaaaaaaaaaaaaaaaaaaaaaaagagagttcaagaccagcctggccaacatggtgaaacctcgtctctactaaaatacaaaaaaaaattagccaggcgtggtggcgggcacctgtagtcccagctcctcgtggaggctgaggcaggagaattgtttgaacccaagaggtggaggttgcagtgagccaaggcagcctggatgacgagggagactccatctcaaaaaaaaaaaaaaaaagataaatggatttaggttttaatgtttttaaaaaataaataaaatttccacatgaaatttgtaattttaaaaacgttacatagctgggcacagcagcagtgaactcctgtggtcccagctccttgggaggctgaggtgggagtatcagttgagcccaggaattggagtctgcagtgagctatgtgatcacaccactgcactccagcttgggcgacagagcaagactttgtctttaaaaaaggttaccgagacatgtagacacagaaaagcatgggctgaagactactgggagtagcaaagtcagcaggataggatatggaaatttgttacctgcttgagtgccctgtaaatgggtggccagacagaactgctcctggtgtcatgcgtggtttcagcaacttccacaagggggtggggttagaaggttctctcccatccttgtcaaagttgctaaaaccacgcacgacgccatgtgcagttccgtctggcagcccatttacagggctctcgtggtgggtgctgtctgcccaagctttcttgaccaggcttctctgaaggaagtttctctttgaaagaaaggaaacttgtggttgtcacaaccgatcgtggttatggaggcatttctccctaagcttactgaatggtgtcttgcaggtcttttccatggtggtcaccaatgttgccgccagcatggtaacatttggcagtgtggtattgagggtctttcctctgttttgcatccacagcagaggtctttactttttaccaaggagtgagtgggtttggaatgggttcccccctctcttagtttttggagacggggtctcgttctactgcccaggctggagtgcggtggtgcaccatagctcactgcagccttaaacttctaggctcaagtgattgtcctgccttggcctcccaaagtgctgggatgacacgtgtgagccactgcgcctggtcaccgtataccaaggaatgagtgggtttggaatgagttccctctcttttctttttttttttttttaagttacagtttgctttttgagatggagtctcactttgttgcccaggctggagtgcaatggtgggatcttggctcactgcagcctctgcctcccgggttcaagcgattcttctgcctcagcctcccgagtaactgggactataggcacacaccagcacacctggctaggtttcctctcttttttttttttttgagatggagtctcactctgtcgtcctggctggagtgcagtggtgtgatctcggctcactgcaaactccatgccccaggttcaagccattctcctgcctcagcctcccgagtagctgggactacaggcgcccaccggcacgcccggctaatttttttttgtatttttagtagagatggggtttcactgtgttagccgggatggtcttgatctcctgacctcgtgatccgtccacctcggcctcccaaagtgctgggattacaggcgtgagccaccacgcccggctcctctcttttctagaaggaatgttctccttctcaaaaggaaggtttctcctttgtgcttctccaaatgcaacaacaggatgtgtgtgtggtaaagggtgggaacactcagggcaatgatgtgctccaggtgagcagaagggagagaggttccagaaccttctctgccaaatgttcctgggagcaaatcagagccagccaagaaggggaagctgttagagtctctcttaccccattatttccaccaaaggcaccgaaaaagaaagggaagaaaggcaaagccaaaggcaccccgattgtcgatgggctcgctccagaggacatgagcaaggagcaggtgagcagagcgggctgtggcccagtccccgggtgggcgtgggcgggcaccacgcagggtgcctacgccgagtgtccatcttgccatgtggatccacccttctgtccaagccagaacacgccccccgcgtggcccataattcccatcagcggcaaagctttcggctgcaccatgtcttttcagaaaggtagtgcagcctgtgaaagagctttgtaacagggtggtaggagtgtggaaggacatgcttttctgatctaaaagctgtttttaattt

SEQ ID NO: 12101 - DNA, 416 bp, Homo sapiens
gggggcgggcgccctggtcccggagtcgccgctgggcctgtccgctggcgtcatggcaccgaaaaagaaagggaagaaaggcaaagccaaaggcaccccgattgtcgatgggctcgctccagaggacatgagcaaggagcaggtgagcagagcgggctgtggcccagtccccgggtgggcgtgggcgggcaccacgcagggtgcctacgccgagtgtccatcttgccatgtggatccacccttctgtccaagccagaacacgccccccgcgtggcccataattcccatcagcggcaaagctttcggctgcaccatgtcttttcagaaaggtagtgcagcctgtgaaagagctttgtaacagggtggtaggagtgtggaaggacatgcttttctgatctaaaagctgtttttaattt

SEQ ID NO: 12102 - DNA, 986 bp, Homo sapiens
aaaaactggattaaaacagccaaggcatgcaagagaaagaacatggaagtttccaaggccagtggacccactcagaatcccagaacaacctatttccatgtgagtttgggaggctgtgattaccacacacattcccactcctagctaaaatcagtagttatcagcaggtggtagctattcagtgccgtgggcagccttcttaaaatagtcttctccatggctcctggtctgagaaggctccaatttcagaagtctctgtgttttactaataaaggctgattgtggctgggtggccacacaggcctcggttactgctcactggggtcagctgacattcagctgttggcacccccagtgcagggagcgattagcaatgcctgtcactggcaaaggcaggccgacagtggtgtgtgtgctgagtgtgagcatcagcagaaaaactcagtctaaacccctttgttcttctcttgcagagcttttgcctgcaaggctgttctgaccacagtgggcgttttgggcccgtttacaggctccatgttctgtagccgtaggggcaccacgtcttcctctgctaagctgctgtttgctgctgcctttcagaaattgaggccaagtatgataagaagatgaagatgctgagggacgaactcgacttgcggagaaagactgagctccacgaagtggaggagaggaagaatggccagatccacacgctgatgcagcgccacgaggaggccttcaccgacattaagaactactacaacgacatcaccctcaacaacctggccctcatcaactccctcaaggtgctgtgcgtgggctgggctggggaggcacactctgcctgtcctagaatgtgggctgcagagtcctggggatccagaccccagctctccaccccaacacacccagtactttttataagattgtttgacaatgcccctctcatatccttaactgaaattcctaaataacgtaacctatct

SEQ ID NO: 12103 - DNA, 485 bp, Homo sapiens
aaaaactggattaaaacagccaaggcatgcaagagaaagaacatggaagtttccaaggccagtggacccactcagaatcccagaacaacctatttccataaattgaggccaagtatgataagaagatgaagatgctgagggacgaactcgacttgcggagaaagactgagctccacgaagtggaggagaggaagaatggccagatccacacgctgatgcagcgccacgaggaggccttcaccgacattaagaactactacaacgacatcaccctcaacaacctggccctcatcaactccctcaaggtgctgtgcgtgggctgggctggggaggcacactctgcctgtcctagaatgtgggctgcagagtcctggggatccagaccccagctctccaccccaacacacccagtactttttataagattgtttgacaatgcccctctcatatccttaactgaaattcctaaataacgtaacctatct

SEQ ID NO: 12104 - DNA, 14394 bp, Homo sapiens
gaaacggcgtggcttccgggggcgggcgccctggtcccggagtcgccgctgggcctgtccgctggcgtcatggtgagcaggggcgggagcggggctggggtcctcggcaggggcccggagacctcggggcagggaggcctcggtacacggagaccctgggaatgggaggcctggagcgctgggtttctggaattgagagctcggtgctcttgtgggggtctccgtggggcaaactcaggatgctcccggccccggggcctggcagcactcgggactgagacctgggctgtccagagccctgtgctcacaggggtggtcatagaacgcccagggcccggggtcggcggcgcacggtccccagaagagtgaacatgcgtcaaggggactctcatcctggaatggcagactcggtctgttggatccctgggacctagggtttcagctcacgaggctttgcagagcaccagggtccccatggaatagagccggaggcaggaattaccctaagacctttggtctcccggatggagagcctggggcacaccagagtggctagagatccctctacaccaaggaggcccggacaggtccagtgcccttggagtgcccagggcacaaccttgggatacaggaaccactgttcccttggaaagcctggcaggagtcaggcccagaccgagaagaggaaggcggagctcgtggcctcatcagctccatgtctgtctttctcttgtaaagggctctccctttgtggtacaggaattgtcagtaactcaatttctgggcaggtgtggcagggtgggtttcagctggtggggggaggaaagctctgggagccccaccaagtccctgcagctggctgtgaaggtcccaaatgctaagtaatgctgaaccttcctccactgccttcagggctttgtgatgaggtagccttcttggagtggagggattaaaaagagagcagtacattacgaattaaatttaagtagatgggttttctgacccaggaagggtcttctgaaaaccgactatgaaagaaactaccaaactaggccaggagtctgggcgcggtggctcacgcctgtaatcccatcactttgggaggccgaggcaggcggatcatgaggtcaggagatccagaccatcctggccaacatggtgaaaatccatatctattaaacatacaaaaattagctgggtgtggtggcgtgtgcctgtagttccagctactcgggaggctgaggcaggagaatcacttggacctgggaggcggaggttgcagcgagccgagatcgcaccaccgcactccagcctggcaacacgtctcttaaaaaaaaaaaaaaaaagcagggtgtagtggctgacgcctgtaaacccagcactttaggagtccaaggtgggtggatcacttgaggccaggagttggagaccagcctggccaacatggtgaaaccctgtctttactaaaaatacacacacacacacactcacacacacacacacacaaaattagccgggtgtggtggtacgcacctatagtcccagctacttgggaggctgaggcaggagaatttcttgaacctggaaggtagaggttgtgtagtgggatttttaaggaattagagagaccgatggggttcaggaggatatttattaattatttaggtgcaccggcccagtcagattaaaatccaaaggactgagccctgaacaaagagttaagttaccttttaagcttttcgtggggcagagggagatctgtgcagggggaagcatgcttcagatgtgagaaataaaggcagttgttcagttgaaacatgcattacatcatttcttactttttaaggaaaaacatgttttgcgacttgagtttatctgcctagtgaccttgcagccgcacagctacagaatcagggtcttcacaatgcctgggaagggaggagagacaaggctcactagccgcagaaaaacaggcagttaatttttaaaggactccagctctttctctttttcagggggagttgggttttcttatatataactgagtttctgcttacacactttttaatttcttttaattcctgttccagttgcagtgagccaggattgcaccactgcactccagcctgggtgacagagcaagactccatctcaaaaaaaacaaaaacaaaaacaaaaaacaaaaaaatgcaacagcaaacacaacagcaaacactaaacacaaccaaactacttctgtttctgttaggttgtgggaatatgggccttggtctgttggatccttggaccaaggaatatgggtgatatttctgttttcttctcatcagtgttttctaaaatttccacataatattttctctctctctttttttttttttttttgaggtagagtcttaccctgtcacccaggctggagtgcagtggcatgatcttggctcactgcaacctctgccacctgggttcaagcgattctcctgcctcggcctcccgagtacctgggactacaggtgcccgccaccacgcctggctaatttttttgtatttttagtagagacagggtttcaccatgttggccaggctggtcttgaactgctgacctcaagtgatccgcccgcctcagcctcccaaagtgctgggatgacaggtgtgagccactgtgcctggctccacctaatgttttcattcaggactaaatgaaacataaatgaagataaatgggccagtcgcggtggctcacgcctgtaatcccagcactttgggaggcttaggtgggcagatcacgggtcaggagttcgagtacagcctggccaacatagtgaaaccccgtctctactaaaaatacaaaaaattagccggacgtggtggtgggcacctgtaatcccagctactcaggaggctgaggcaggagaatggcttgaatccgggaggcggaggttgcagtgagctgagatcgcaccattgcactccagcctgggcaacagagcaagactctgtctcaaaaaaaaaaaaaaaaaaaaaaaagagagttcaagaccagcctggccaacatggtgaaacctcgtctctactaaaatacaaaaaaaaattagccaggcgtggtggcgggcacctgtagtcccagctcctcgtggaggctgaggcaggagaattgtttgaacccaagaggtggaggttgcagtgagccaaggcagcctggatgacgagggagactccatctcaaaaaaaaaaaaaaaaagataaatggatttaggttttaatgtttttaaaaaataaataaaatttccacatgaaatttgtaattttaaaaacgttacatagctgggcacagcagcagtgaactcctgtggtcccagctccttgggaggctgaggtgggagtatcagttgagcccaggaattggagtctgcagtgagctatgtgatcacaccactgcactccagcttgggcgacagagcaagactttgtctttaaaaaaggttaccgagacatgtagacacagaaaagcatgggctgaagactactgggagtagcaaagtcagcaggataggatatggaaatttgttacctgcttgagtgccctgtaaatgggtggccagacagaactgctcctggtgtcatgcgtggtttcagcaacttccacaagggggtggggttagaaggttctctcccatccttgtcaaagttgctaaaaccacgcacgacgccatgtgcagttccgtctggcagcccatttacagggctctcgtggtgggtgctgtctgcccaagctttcttgaccaggcttctctgaaggaagtttctctttgaaagaaaggaaacttgtggttgtcacaaccgatcgtggttatggaggcatttctccctaagcttactgaatggtgtcttgcaggtcttttccatggtggtcaccaatgttgccgccagcatggtaacatttggcagtgtggtattgagggtctttcctctgttttgcatccacagcagaggtctttactttttaccaaggagtgagtgggtttggaatgggttcccccctctcttagtttttggagacggggtctcgttctactgcccaggctggagtgcggtggtgcaccatagctcactgcagccttaaacttctaggctcaagtgattgtcctgccttggcctcccaaagtgctgggatgacacgtgtgagccactgcgcctggtcaccgtataccaaggaatgagtgggtttggaatgagttccctctcttttctttttttttttttttaagttacagtttgctttttgagatggagtctcactttgttgcccaggctggagtgcaatggtgggatcttggctcactgcagcctctgcctcccgggttcaagcgattcttctgcctcagcctcccgagtaactgggactataggcacacaccagcacacctggctaggtttcctctcttttttttttttttgagatggagtctcactctgtcgtcctggctggagtgcagtggtgtgatctcggctcactgcaaactccatgccccaggttcaagccattctcctgcctcagcctcccgagtagctgggactacaggcgcccaccggcacgcccggctaatttttttttgtatttttagtagagatggggtttcactgtgttagccgggatggtcttgatctcctgacctcgtgatccgtccacctcggcctcccaaagtgctgggattacaggcgtgagccaccacgcccggctcctctcttttctagaaggaatgttctccttctcaaaaggaaggtttctcctttgtgcttctccaaatgcaacaacaggatgtgtgtgtggtaaagggtgggaacactcagggcaatgatgtgctccaggtgagcagaagggagagaggttccagaaccttctctgccaaatgttcctgggagcaaatcagagccagccaagaaggggaagctgttagagtctctcttaccccattatttccaccaaaggcaccgaaaaagaaagggaagaaaggcaaagccaaaggcaccccgattgtcgatgggctcgctccagaggacatgagcaaggagcaggtgagcagagcgggctgtggcccagtccccgggtgggcgtgggcgggcaccacgcagggtgcctacgccgagtgtccatcttgccatgtggatccacccttctgtccaagccagaacacgccccccgcgtggcccataattcccatcagcggcaaagctttcggctgcaccatgtcttttcagaaaggtagtgcagcctgtgaaagagctttgtaacagggtggtaggagtgtggaaggacatgcttttctgatctaaaagctgtttttaatttcgtgtattctctttcaatcttaccctttttttgcacctgatgtgtatagacttatcgtagaacacacatgtagcattctcctttattttattcaccattaaacattatgtcaaaaaggaagtttttgaaagaaggatgatttacttcaaatcacatctgaatctgattaatcgttcatttttttttttttttttttttttttttttgagacggagtctcactctgtcgcccaggctggagtgcagtggcgcgatctcggctcactgtgagctccacctcccgggttcacaccattctcctgcctcagcctcccgagtagctgggactacaggcacctgccaccacgcctggctaattttttttttgtatttttagtagagacggggtttcaccgtgttagccaggatggtctcgatctcctgacctcgtgatccactcgcctcggcctcccaaagtgctgggattacaggcatgagccaccacgcctggccagtcattcattgtttttgataaaagtcccaacaaggagtaacagcatcagggctgcctttttcttgttgcttattttggggaggaggtgatgtttttatagtttctttgtaggagttagtttaagtctcttcttcatttggatgtagttaagggctacagaacataattacataattacaattttacctaaaaggctcctggagacggcagtgtgtggcaagcacggtgcaccctctggcctctgccctcatggacgactgcctgtgagcacctgacatgggacatgagggctgtgtcaactctgtgttattgttaataaatcttaccttcttttgatagttgtaagataaaaaatcaatacgaaggagactgaaagagtctcatgacctgaagttggagctaggcagaggtccttgaacaatggtaaagaatggctttattttacatgcaggcaaaccattggcagtttaagccagtggctaagcagagaggtgatggggtcaggtttgtgttctggaaagatgtctggagctgctggatggagaatggattgaacactgcgttgtcccagcatgtgagctgctgcccgtctccctgtccgcttcccattcctgtggagacaggccttgtggggcagtggccatggagcctacggggcagcctacggggcaggctacggggcagcttacggggcaggctatggggcagcctacggggcaggctacggggcaggcccttgcactgcacatcgcacgttgagccacagactcagaaggcttcttcagggtccaggcaggtggggagggatgggggtgacctggagactcctgccccgcagcagaggacagtttcatctgttcactggggagtgccttgtgggcctaggagttcagtgctgtttttttctgattttccaagagaagctggaaatctggatatttataagaaatctgaatattgagtgatggcaaaatctcaacaccatgtgagccaaacagaccagtcaggagccctggttcaggctctgcccaggagcctctaaaggtctgtgacgtgaagacatttgtcgttgtgccgaggcactggttggattcgggggtgcgtgtctccctcatgtctgcccggcatcctcggctcagaacccctcctgctgctccttcttgtttgctcgttgtcttgtcttcttttgaggtgagaaatgtgttttccctgtggggaatgtggtgttgagaaagaaaaaggctcacagtaagtggcctggggctgtgcccgaaaagtaactgattctgacggaatctcgctgtgtggcccaggctggagtgcggtggcgcgacctcggctcactgcaagctccacctcctgggttcacaccatcctgctgcttcaggctgcccagtagctgggactgcaggtgcctgccatcacgcccggctaatttttttgtatttttagtagagacgaggtttcaccgtgttagccaggatggccttgatctcctgacctcatgatctgcctgtctctgcctcccaaagtgctgggattacaggtgtgagccaccgcgcctggcagtaactgattcttaagggaaatgagctcccgagaaagctggaagcctgtcctacatttttttttaacctatttgcagattcgcaattgaaccctcttgagattttagagtctactggttttgtatattttttgcttaacattatatcttcaaaggtgaattttttttcatttagcattatgatatgaatttgtttaaatgctgctacatcatttgcatattttttttgggttaatgtgatatttctcctagttgatatactctaatttttcaaccatttccatatttatttatttattgtttagagacagggtcctgctctgtcacccaggtggagtgcagtggtgtgatcacggctcacggcagccttgacctcccaggtccaaacgatcctcctacctcagtcttctgagtagctgggactataggcatgtgccaccactcctggctaatttttttttttttttttttttgtagagacagggttttgccatgttgcctaggctgttcaactctggggctcaaaagatcctcccaaagtggtgggagccaccatgcctggctgtttgtgtattttttgagacagattctcactctgtcacccaggctggagtgtagtggcatgatcataactaaccgcagcctcaaccccctgagcttgagtgaccctcccacctcagctctcccagtagctgagactataggtgcgtgccatcatgcctagttaatgaaaaaaagtttttgcagagatggggtcttgctatgttgcccaagctggtcttcagctcctgggcgcgagggatccttcaacctcagcctcccagagtgctggggttgcaggcgagagccaccgcgcctcgcttatttccctgtttaaactggtcttaggttatttcctttttgatatttttgctgttgtaataatggtgtgggtaatatctttgagcaagatgctcttatatttcttttgagaaattttttaggcatcaattctcaggaatggatgaaaggatctagttattttatgattattggccaaattgaagagaattctgccacctgctgaatgcattctgtctccggagcttcctagccttatattttaactttttacatttagctgtttatttttaggtgaagttgagtcctccctctttcttccttgcctttcgccggccacacgccccgttgccgtgcatgggcccctgctcagtgcctcacctgacccactgcacctggccaggtggaggagcatgtcagccgcatccgggaggagctggaccgcgagcgggaggaacgaaactacttccagctggagcgggacaagatccacaccttctgggagatcacacggaggcagctggaggagaagaaggctgagctgcggaacaaagaccgggagatggaagaagccgaggagaggcaccaggtggagatcaaggtgagtggggccggcctgcacgtgctaacctggtcaccacagagccccagaggagctggatccagtgagggtgcaggtgggacattttctgttcttggctttgggagtcacagccttaaaggtgttttttataaaagcctgagggagagaccctgcaggtcctgagggtttaaaatgctgcctccacaacatggaaggaatatgggctctgggggcagactggcctgtttgcaactcagctctgccacttaataccccatgagctggggatgcacctcacctcccagccttggtgtcctgctctgtgcctcaagtgtacaggtttgcataggtgaacaggcatgtgtagctgtgtaaaggtgaggcatgcaagtgagcaggtggatgcaagtgagcatgtgtgtgcaggtgaggaggcgtggccaggtgaggaggtatgtgcaggtgaggtgtggggaggtgagcacgtggggcaggtatgtgcaggtgagcaggtaggtgcaagtgaccaggtgtctacaggtatgtacaggtgaggaggtgtagtacaggtgtagtgcaggcgaccaggtgtgtacgggaatttacaggtgaggaggtgtacaggtgaccaggtgtgtacaggtatggacaggtgagaaggtgtggtacaggtgtggtgcaggtgagcaggggggtacaggtatgtacaggtgaggtgtgttacaggtacggtgcaggtgatcaggtgtatacaggaatgtacaagtgaggaggtgtggtacaggtgaccaggtgtgtacaggtatggacaggtgaggaggtgtggtacaggtgtggtgtgggtgagcaggagtgtacaggtatgtacaggtgaggaggtgtggtacaggtgaccaggtgtgtacgggtacggacaggtgaggaggtgtggtacaggtgtggtatgggtgaccaggtgtgtacaggtatggacaggtgaggaggtgtggtacaggtgaccaggtgtgtacgggtacggacaggtgaggaggtgtggtgcaggtgtggtatgggtgaccaggtgtgtacaggtatggatggacaggtaaggaggtgtggtacaggtgaccaggtgtgtacaggtatggacaggtgaggaggtgtggtacaggtgtgctatgggtgaccaggtgtgcacaggtacggaaaggtgaggaggtgtggtgcaggtgagcagatggtactcccattgccctgcaggtgtacaagcagaaagtgaagcacctgctatatgagcaccagaacaacctgacagagatgaaggctgagggcactgtagtcatgaagctggcacagaaagagcaccgcatacaggagagtgtgctgcgcaaggacatgcgggcactgaaggtggagctcaaggagcaggagctggccagtgaggtggtggtgaagaacctgcggctggtaggtgtggcgggggcacctggaggctgacaggttgttgggacggcaagcctagtgctgcatgaactcctgtttattcaacagcaactgggaattcatatttctgcataagactttctgcatttttgcaatttgttgaaaaaaaattttttaaagcatgcatccaaacaaaccccattttgggaccaagtacacaattctgtctcagacctgagcaaaaaattgacgtcaccgaagagaaaaaatccagcttaggatctttcatgtgctgctgacacctgacacccagagacttttcctagggaatagcatcatatgcatttagtagaatgcaaaccaaccattaaaatatccagtgtgttgactcctgggcactgtgacagtttgtcacacaagctggtctgatttttacttttgaggctgggggtttccagggcaccattaaaattcatctgtgcacctggttcagtggctcacacccaaaatcccagcacttgggagggtcaggtgggagaagtggttgaggccaatagtttgagactagcttgggtgaaatagttgaaccccatgtctaaaaaatttaaaagaaaacattagctggtgtagtggcacatgccgatagtttcagctacttgggaggctgaggcgggaggatcccttgagctcaggaagtcaaggctgtggtgagctaggattgtgccactgcattccagcctaggtgacagagtgagacaaaacaaaaaggaaagagatcatttgctgagtgtccattagctgctaggtcctgatctgatctctgacaaaacgcctgcccgactggggctgttggtctagaaaggagagacaacaggtgagttggaagacaaaataaacgtgccagatacaacagagtatctggtggggaagagtgccatagaaggatcgaagtggggagaggtggggtgcggttttgtacaagcagttgaccggctgggagacgggatgggccagtgggaaagctcagagtgaccaggaggagactgtgggagagggtcagagcttgtccgcctcgaaagccgtggtggggactggagacgggtcagagctcgtccgcctcgaaagccgtggtggggactgggactttgaccctggtggagtctgttgccctctgagaacttgggcagaggagagatgtgtctcactaaggttcttcctggctgctgggttgaggagactttctgaacacatttgcctcacgcctggaagcagtccagcctccactgaatctggaagaaacttggtgacgttgctgacttcgcagcaaagcctgagagtgccgaagtcttgagccctccagaattagctggtcttaacccaggtcctggatatgatattgttacataatcagagtttcctgttgggtaaaaatatggctttaggccgggtgcggtggctcacgcctgtaatcccagcactttgggaggccgaggagggtgtatcacgaggtcaggagtttgagaccagcctgaccaacgtggtgaaaccccgtctctactaaaaatacaaaaattagccgggcgtggtggcgcacacctataatcccagctactcgggacgctgaggcagaagaatcacttgaacctgggagacggaggttgcggtgagccgagattgtgccactgcactccagcctgggcgacagtgtgagagtctgtctcaaaaaaaagaaaaattactgctttaaaaataatttatttttttatgcaaattttaaatatataatgtttatttaaatatataataattgttcattaaaactatatatttatttatttttagagatgaggtctcactctgtctcccgggctgcagtgcaatggtacaatcatagctcactgcagcctcgaacttctagtctcaagtgatccttctgccttagcctcccaagtagctggaactatagatatgagccaccacacccacctaatcttttttttttttttttttttttttttttgagatggagttttgctcttgttgcccaggctggagtgcagtggcacaatctcagttcaccacaacctctgcctcccgggttcaagctattctcctgcctcagcctctcgactagctgggattacaggcatgtgccaccatgcccggctaattttgtatttttagtagagacggggtttctccatgttggtcaggctggtcttaaactcccgacctcaggtggtctgtccagctcggcctcccaaagtgctgggattacaggcgtgagccactgtgcccggcaatctttaaattttctgtagaagatcttgctatgttgcttaggctgcccttgaactcttgacctcaagtgatcctcctgccttggcctccagcgtgctgggatgacaggaatgaatccttttaatatgctgcttcaggcagcagtgcagcaggttggaagctacacacggcacctggaaagatcccacagctctgtgtggatgtggctgctgctcttcaggctgtgggatggtttggcgatggaaccaagcgggttcagtgctcacgacgtctgttcatgttctctctcaagcttagaggtgactttagttgagggaggtgagttagggaatatggaggtgaccaaaaccatgaggaacagggtcagcctgaagggagcgggcttccctctgtgtccggctgtgtagtaatggccgcttctccctgtgcagaaacacaccgaggagatcaccaggatgcggaatgattttgagaggcaagttcgaggtcagtttcccgtgtgctcattgtgtaggtgccagagacacccccgccccatcagagaggaatttacctccagagcttgttaactcagggagcaaaaactggattaaaacagccaaggcatgcaagagaaagaacatggaagtttccaaggccagtggacccactcagaatcccagaacaacctatttccatgtgagtttgggaggctgtgattaccacacacattcccactcctagctaaaatcagtagttatcagcaggtggtagctattcagtgccgtgggcagccttcttaaaatagtcttctccatggctcctggtctgagaaggctccaatttcagaagtctctgtgttttactaataaaggctgattgtggctgggtggccacacaggcctcggttactgctcactggggtcagctgacattcagctgttggcacccccagtgcagggagcgattagcaatgcctgtcactggcaaaggcaggccgacagtggtgtgtgtgctgagtgtgagcatcagcagaaaaactcagtctaaacccctttgttcttctcttgcagagcttttgcctgcaaggctgttctgaccacagtgggcgttttgggcccgtttacaggctccatgttctgtagccgtaggggcaccacgtcttcctctgctaagctgctgtttgctgctgcctttcagaaattgaggccaagtatgataagaagatgaagatgctgagggacgaactcgacttgcggagaaagactgagctccacgaagtggaggagaggaagaatggccagatccacacgctgatgcagcgccacgaggaggccttcaccgacattaagaactactacaacgacatcaccctcaacaacctggccctcatcaactccctcaaggtgctgtgcgtgggctgggctggggaggcacactctgcctgtcctagaatgtgggctgcagagtcctggggatccagaccccagctctccaccccaacacacccagtactttttataagattgtttgacaatgcccctctcatatccttaactgaaattcctaaataacgtaacctatctctacctattgttaaaagcagtcaggatattgccctcaccgtagtgcagagggggaagtaatgaagtgtgttctggtttgtaaaagctcagatggaaccgcagtgagggccgtgatgtggctggagtggataggtgtcatagtcactgcctgcgacaggtggataggtgtcatcgtcactgcatgctggcagtgacaggattttctacagtagacaacggcccttggtggaatcttgaacaaagtatagtccttcagtctgcatggaagctgcattcccag

SEQ ID NO: 12105 - DNA, 1394 bp, Homo sapiens
gaaacggcgtggcttccgggggcgggcgccctggtcccggagtcgccgctgggcctgtccgctggcgtcatggcaccgaaaaagaaagggaagaaaggcaaagccaaaggcaccccgattgtcgatgggctcgctccagaggacatgagcaaggagcaggtgaagttgagtcctccctctttcttccttgcctttcgccggccacacgccccgttgccgtgcatgggcccctgctcagtgcctcacctgacccactgcacctggccaggtggaggagcatgtcagccgcatccgggaggagctggaccgcgagcgggaggaacgaaactacttccagctggagcgggacaagatccacaccttctgggagatcacacggaggcagctggaggagaagaaggctgagctgcggaacaaagaccgggagatggaagaagccgaggagaggcaccaggtggagatcaaggtgtacaagcagaaagtgaagcacctgctatatgagcaccagaacaacctgacagagatgaaggctgagggcactgtagtcatgaagctggcacagaaagagcaccgcatacaggagagtgtgctgcgcaaggacatgcgggcactgaaggtggagctcaaggagcaggagctggccagtgaggtggtggtgaagaacctgcggctgaaacacaccgaggagatcaccaggatgcggaatgattttgagaggcaagttcgagaaattgaggccaagtatgataagaagatgaagatgctgagggacgaactcgacttgcggagaaagactgagctccacgaagtggaggagaggaagaatggccagatccacacgctgatgcagcgccacgaggaggccttcaccgacattaagaactactacaacgacatcaccctcaacaacctggccctcatcaactccctcaaggtgctgtgcgtgggctgggctggggaggcacactctgcctgtcctagaatgtgggctgcagagtcctggggatccagaccccagctctccaccccaacacacccagtactttttataagattgtttgacaatgcccctctcatatccttaactgaaattcctaaataacgtaacctatctctacctattgttaaaagcagtcaggatattgccctcaccgtagtgcagagggggaagtaatgaagtgtgttctggtttgtaaaagctcagatggaaccgcagtgagggccgtgatgtggctggagtggataggtgtcatagtcactgcctgcgacaggtggataggtgtcatcgtcactgcatgctggcagtgacaggattttctacagtagacaacggcccttggtggaatcttgaacaaagtatagtccttcagtctgcatggaagctgcattcccag

SEQ ID NO: 12106 - DNA, 11770 bp, Homo sapiens
cctcgcgggccgcgccccgccgcggacaccaccgggacctggctgcgccctcccgaccccggccgggcgtccggggctcctgcgcactcacttggcggccgcgcccgctggcgtcctcttgttctcttccaggtacttgcgtgtggggcgccgactgtgtgcgggcgcccctcggggctggcgaggggcacaggaggggcctgactcgcgctgggtaatgacagactcacagagcgccctggatggcgcgaattaacgcggggggcgggtgggggcgagggcgtgtgcttgggaggctggaaggggcgggatgggggatgggaggtaaggagagggcggcgggcccgggctgcagagagcgccaaggcagtttcgatgaaactgacccccatgtccctatcgcccagattcagcgattgccagctcctggcctgggccactgcttctctgtcctcattcacttccctccactgctgggtcattttgaagcaaattatatacacattagatcattgcatttgtaagtacttcaatatttatctctcaaagaaagtccgtttgcaggagcattgactcatgcctgtaatcccagccctttgggaggctgaggtgggagcacagcttgagctcaggagtccaaggctgccgtgagctatgattgtatgtctcaaaaaaaaaaaagaaaagaaaagaaaagaaaaagtctagtcttcataaacactcttgttaacccagcatccaggccttcactgagttgatgccgtggcctgaggcggtttacctggtggatagtgggtggcaggaagcatcagacatcagacagagggcagtcggtttgtttgtattaacatttgctctgggattttgcaggaaactcagatgccatttatctgggtttctgagctgcacagcttgacactgaatgaaagtatcttaagccacatatgtgaagaaaaggctcttttctaaaaatctgaactcgaattcaatatgaaaagaacaggtcgcagtgggccctgtcgggatcccagggagccgcaattcagggctccctgaatgattcatctctgcagcccacaccgacagaccaggattgctcttagcttgtgaaaaatgagtaccctgtctaggctatcctgagctaaccctcctattcttgccctttttgctgaaaggaattattgttaatacagctatttaattcaggacactcatccagacttctgaagcaaaaagccaatcagcatgaagctgctagcatattggttttgtgaagtaagtgttaaattataataattacccccactgtgctctccagcgtcactgtctgaccaccctgtcccagggggaggaggcccctctcaggccaagggagtctggcacagtgatgctggctcctggttgcccaggcacagtgaccagccagacttcacagaggcctcagggcttactataaataaatcactgctttgtgcaagctgagccaatgcagttcttccaactggctgctcctctccaagaacaatcaggacttaggtgggcaaacaggaagtctctcatcacagtggttctcagattcccaccactgtgtgggtgcctgaggcctgagcaaacccagctcatgtggcaacttcctcccccagctggacaggaagacctaggtccaccaggccttctttcatttctcacactttgcccccagcacaactttctacgagcatggattctgtactcttcatccccagacacatgggagaacaagatctgctacaagaccttttctttttttttttgagacagggtctcaggtctcattctgttacctaggctggagtgaagtggtgtgatcttggctcactgcaacctccacctccagggctcaaacgattctcccacctcaacctcccaagtagatgaccactttttaagaagatgttaaagatgagagcttagggctgggcgtggggctcacgtgctcccagcactttgggaggccgaggcaggaggatcacttgaggccaggagtttgagaccactctgggcaataaagcaagaccccgtctctattaaaaacttaaaaaaaaaagctgggtatggtgtctcacacctgtagtcctggcttctcaggaggctgaggtgggaggattgcttgagcccaggaggtcgaggctgcagtgagttgtgatcacagcctaggcgacagaaggagaccctgtctccaaaaaaaaaaaaaaaaaaaagcacctgtttatgacaaactcagctttctgggtgacatagatggttgtatgtaggtaacagggtggtttcacggatggcagattcattttagaaattgtaaaatggctagcagttttcagaacaagagattagttagaaaaggaaagtggcagctgtttgttttctgcagggcctgtcgggaagcctctggtttcttttcatccgtgaggagtggggaggaggcctcttcaggaagagcagtttatttttgtgaaaggaatacttactgatttcaaacatttggaactaaactggaacgtatttttctttccgatttctgcgtttttgaggtgtgtgtaaacccaccagcgcagcagctgggagggcccttcaaaggtgggcgggtggggtgagtgaggcccaggggatagagtgtttgcccagatttgaatctcatttggggaaagtttcagaggcttgggtggctgattgatcattccttcaatggtccttcatcagcacgtctttactgagcacgtgctgtgtgctgttctaggcgctgaaggatagaagtgaagggttcccccctcgtggagcttaggttccagcaataagcaaaacatgccctgcagcgaaaggcttctgggctgccggcgacattttcccaacgttcacaaccgggttccttccggacgcccgtctctagggacgcactcccgcctttggcagggccgctgcccggcggagtctcgcgaggatcttgtgacttatcgcggcatcgcccagcggttgccgggaaacggcgtggcttccgggggcgggcgccctggtcccggagtcgccgctgggcctgtccgctggcgtcatggtgagcaggggcgggagcggggctggggtcctcggcaggggcccggagacctcggggcagggaggcctcggtacacggagaccctgggaatgggaggcctggagcgctgggtttctggaattgagagctcggtgctcttgtgggggtctccgtggggcaaactcaggatgctcccggccccggggcctggcagcactcgggactgagacctgggctgtccagagccctgtgctcacaggggtggtcatagaacgcccagggcccggggtcggcggcgcacggtccccagaagagtgaacatgcgtcaaggggactctcatcctggaatggcagactcggtctgttggatccctgggacctagggtttcagctcacgaggctttgcagagcaccagggtccccatggaatagagccggaggcaggaattaccctaagacctttggtctcccggatggagagcctggggcacaccagagtggctagagatccctctacaccaaggaggcccggacaggtccagtgcccttggagtgcccagggcacaaccttgggatacaggaaccactgttcccttggaaagcctggcaggagtcaggcccagaccgagaagaggaaggcggagctcgtggcctcatcagctccatgtctgtctttctcttgtaaagggctctccctttgtggtacaggaattgtcagtaactcaatttctgggcaggtgtggcagggtgggtttcagctggtggggggaggaaagctctgggagccccaccaagtccctgcagctggctgtgaaggtcccaaatgctaagtaatgctgaaccttcctccactgccttcagggctttgtgatgaggtagccttcttggagtggagggattaaaaagagagcagtacattacgaattaaatttaagtagatgggttttctgacccaggaagggtcttctgaaaaccgactatgaaagaaactaccaaactaggccaggagtctgggcgcggtggctcacgcctgtaatcccatcactttgggaggccgaggcaggcggatcatgaggtcaggagatccagaccatcctggccaacatggtgaaaatccatatctattaaacatacaaaaattagctgggtgtggtggcgtgtgcctgtagttccagctactcgggaggctgaggcaggagaatcacttggacctgggaggcggaggttgcagcgagccgagatcgcaccaccgcactccagcctggcaacacgtctcttaaaaaaaaaaaaaaaaagcagggtgtagtggctgacgcctgtaaacccagcactttaggagtccaaggtgggtggatcacttgaggccaggagttggagaccagcctggccaacatggtgaaaccctgtctttactaaaaatacacacacacacacactcacacacacacacacacaaaattagccgggtgtggtggtacgcacctatagtcccagctacttgggaggctgaggcaggagaatttcttgaacctggaaggtagaggttgtgtagtgggatttttaaggaattagagagaccgatggggttcaggaggatatttattaattatttaggtgcaccggcccagtcagattaaaatccaaaggactgagccctgaacaaagagttaagttaccttttaagcttttcgtggggcagagggagatctgtgcagggggaagcatgcttcagatgtgagaaataaaggcagttgttcagttgaaacatgcattacatcatttcttactttttaaggaaaaacatgttttgcgacttgagtttatctgcctagtgaccttgcagccgcacagctacagaatcagggtcttcacaatgcctgggaagggaggagagacaaggctcactagccgcagaaaaacaggcagttaatttttaaaggactccagctctttctctttttcagggggagttgggttttcttatatataactgagtttctgcttacacactttttaatttcttttaattcctgttccagttgcagtgagccaggattgcaccactgcactccagcctgggtgacagagcaagactccatctcaaaaaaaacaaaaacaaaaacaaaaaacaaaaaaatgcaacagcaaacacaacagcaaacactaaacacaaccaaactacttctgtttctgttaggttgtgggaatatgggccttggtctgttggatccttggaccaaggaatatgggtgatatttctgttttcttctcatcagtgttttctaaaatttccacataatattttctctctctctttttttttttttttttgaggtagagtcttaccctgtcacccaggctggagtgcagtggcatgatcttggctcactgcaacctctgccacctgggttcaagcgattctcctgcctcggcctcccgagtacctgggactacaggtgcccgccaccacgcctggctaatttttttgtatttttagtagagacagggtttcaccatgttggccaggctggtcttgaactgctgacctcaagtgatccgcccgcctcagcctcccaaagtgctgggatgacaggtgtgagccactgtgcctggctccacctaatgttttcattcaggactaaatgaaacataaatgaagataaatgggccagtcgcggtggctcacgcctgtaatcccagcactttgggaggcttaggtgggcagatcacgggtcaggagttcgagtacagcctggccaacatagtgaaaccccgtctctactaaaaatacaaaaaattagccggacgtggtggtgggcacctgtaatcccagctactcaggaggctgaggcaggagaatggcttgaatccgggaggcggaggttgcagtgagctgagatcgcaccattgcactccagcctgggcaacagagcaagactctgtctcaaaaaaaaaaaaaaaaaaaaaaaagagagttcaagaccagcctggccaacatggtgaaacctcgtctctactaaaatacaaaaaaaaattagccaggcgtggtggcgggcacctgtagtcccagctcctcgtggaggctgaggcaggagaattgtttgaacccaagaggtggaggttgcagtgagccaaggcagcctggatgacgagggagactccatctcaaaaaaaaaaaaaaaaagataaatggatttaggttttaatgtttttaaaaaataaataaaatttccacatgaaatttgtaattttaaaaacgttacatagctgggcacagcagcagtgaactcctgtggtcccagctccttgggaggctgaggtgggagtatcagttgagcccaggaattggagtctgcagtgagctatgtgatcacaccactgcactccagcttgggcgacagagcaagactttgtctttaaaaaaggttaccgagacatgtagacacagaaaagcatgggctgaagactactgggagtagcaaagtcagcaggataggatatggaaatttgttacctgcttgagtgccctgtaaatgggtggccagacagaactgctcctggtgtcatgcgtggtttcagcaacttccacaagggggtggggttagaaggttctctcccatccttgtcaaagttgctaaaaccacgcacgacgccatgtgcagttccgtctggcagcccatttacagggctctcgtggtgggtgctgtctgcccaagctttcttgaccaggcttctctgaaggaagtttctctttgaaagaaaggaaacttgtggttgtcacaaccgatcgtggttatggaggcatttctccctaagcttactgaatggtgtcttgcaggtcttttccatggtggtcaccaatgttgccgccagcatggtaacatttggcagtgtggtattgagggtctttcctctgttttgcatccacagcagaggtctttactttttaccaaggagtgagtgggtttggaatgggttcccccctctcttagtttttggagacggggtctcgttctactgcccaggctggagtgcggtggtgcaccatagctcactgcagccttaaacttctaggctcaagtgattgtcctgccttggcctcccaaagtgctgggatgacacgtgtgagccactgcgcctggtcaccgtataccaaggaatgagtgggtttggaatgagttccctctcttttctttttttttttttttaagttacagtttgctttttgagatggagtctcactttgttgcccaggctggagtgcaatggtgggatcttggctcactgcagcctctgcctcccgggttcaagcgattcttctgcctcagcctcccgagtaactgggactataggcacacaccagcacacctggctaggtttcctctcttttttttttttttgagatggagtctcactctgtcgtcctggctggagtgcagtggtgtgatctcggctcactgcaaactccatgccccaggttcaagccattctcctgcctcagcctcccgagtagctgggactacaggcgcccaccggcacgcccggctaatttttttttgtatttttagtagagatggggtttcactgtgttagccgggatggtcttgatctcctgacctcgtgatccgtccacctcggcctcccaaagtgctgggattacaggcgtgagccaccacgcccggctcctctcttttctagaaggaatgttctccttctcaaaaggaaggtttctcctttgtgcttctccaaatgcaacaacaggatgtgtgtgtggtaaagggtgggaacactcagggcaatgatgtgctccaggtgagcagaagggagagaggttccagaaccttctctgccaaatgttcctgggagcaaatcagagccagccaagaaggggaagctgttagagtctctcttaccccattatttccaccaaaggcaccgaaaaagaaagggaagaaaggcaaagccaaaggcaccccgattgtcgatgggctcgctccagaggacatgagcaaggagcaggtgagcagagcgggctgtggcccagtccccgggtgggcgtgggcgggcaccacgcagggtgcctacgccgagtgtccatcttgccatgtggatccacccttctgtccaagccagaacacgccccccgcgtggcccataattcccatcagcggcaaagctttcggctgcaccatgtcttttcagaaaggtagtgcagcctgtgaaagagctttgtaacagggtggtaggagtgtggaaggacatgcttttctgatctaaaagctgtttttaatttcgtgtattctctttcaatcttaccctttttttgcacctgatgtgtatagacttatcgtagaacacacatgtagcattctcctttattttattcaccattaaacattatgtcaaaaaggaagtttttgaaagaaggatgatttacttcaaatcacatctgaatctgattaatcgttcatttttttttttttttttttttttttttttgagacggagtctcactctgtcgcccaggctggagtgcagtggcgcgatctcggctcactgtgagctccacctcccgggttcacaccattctcctgcctcagcctcccgagtagctgggactacaggcacctgccaccacgcctggctaattttttttttgtatttttagtagagacggggtttcaccgtgttagccaggatggtctcgatctcctgacctcgtgatccactcgcctcggcctcccaaagtgctgggattacaggcatgagccaccacgcctggccagtcattcattgtttttgataaaagtcccaacaaggagtaacagcatcagggctgcctttttcttgttgcttattttggggaggaggtgatgtttttatagtttctttgtaggagttagtttaagtctcttcttcatttggatgtagttaagggctacagaacataattacataattacaattttacctaaaaggctcctggagacggcagtgtgtggcaagcacggtgcaccctctggcctctgccctcatggacgactgcctgtgagcacctgacatgggacatgagggctgtgtcaactctgtgttattgttaataaatcttaccttcttttgatagttgtaagataaaaaatcaatacgaaggagactgaaagagtctcatgacctgaagttggagctaggcagaggtccttgaacaatggtaaagaatggctttattttacatgcaggcaaaccattggcagtttaagccagtggctaagcagagaggtgatggggtcaggtttgtgttctggaaagatgtctggagctgctggatggagaatggattgaacactgcgttgtcccagcatgtgagctgctgcccgtctccctgtccgcttcccattcctgtggagacaggccttgtggggcagtggccatggagcctacggggcagcctacggggcaggctacggggcagcttacggggcaggctatggggcagcctacggggcaggctacggggcaggcccttgcactgcacatcgcacgttgagccacagactcagaaggcttcttcagggtccaggcaggtggggagggatgggggtgacctggagactcctgccccgcagcagaggacagtttcatctgttcactggggagtgccttgtgggcctaggagttcagtgctgtttttttctgattttccaagagaagctggaaatctggatatttataagaaatctgaatattgagtgatggcaaaatctcaacaccatgtgagccaaacagaccagtcaggagccctggttcaggctctgcccaggagcctctaaaggtctgtgacgtgaagacatttgtcgttgtgccgaggcactggttggattcgggggtgcgtgtctccctcatgtctgcccggcatcctcggctcagaacccctcctgctgctccttcttgtttgctcgttgtcttgtcttcttttgaggtgagaaatgtgttttccctgtggggaatgtggtgttgagaaagaaaaaggctcacagtaagtggcctggggctgtgcccgaaaagtaactgattctgacggaatctcgctgtgtggcccaggctggagtgcggtggcgcgacctcggctcactgcaagctccacctcctgggttcacaccatcctgctgcttcaggctgcccagtagctgggactgcaggtgcctgccatcacgcccggctaatttttttgtatttttagtagagacgaggtttcaccgtgttagccaggatggccttgatctcctgacctcatgatctgcctgtctctgcctcccaaagtgctgggattacaggtgtgagccaccgcgcctggcagtaactgattcttaagggaaatgagctcccgagaaagctggaagcctgtcctacatttttttttaacctatttgcagattcgcaattgaaccctcttgagattttagagtctactggttttgtatattttttgcttaacattatatcttcaaaggtgaattttttttcatttagcattatgatatgaatttgtttaaatgctgctacatcatttgcatattttttttgggttaatgtgatatttctcctagttgatatactctaatttttcaaccatttccatatttatttatttattgtttagagacagggtcctgctctgtcacccaggtggagtgcagtggtgtgatcacggctcacggcagccttgacctcccaggtccaaacgatcctcctacctcagtcttctgagtagctgggactataggcatgtgccaccactcctggctaatttttttttttttttttttttgtagagacagggttttgccatgttgcctaggctgttcaactctggggctcaaaagatcctcccaaagtggtgggagccaccatgcctggctgtttgtgtattttttgagacagattctcactctgtcacccaggctggagtgtagtggcatgatcataactaaccgcagcctcaaccccctgagcttgagtgaccctcccacctcagctctcccagtagctgagactataggtgcgtgccatcatgcctagttaatgaaaaaaagtttttgcagagatggggtcttgctatgttgcccaagctggtcttcagctcctgggcgcgagggatccttcaacctcagcctcccagagtgctggggttgcaggcgagagccaccgcgcctcgcttatttccctgtttaaactggtcttaggttatttcctttttgatatttttgctgttgtaataatggtgtgggtaatatctttgagcaagatgctcttatatttcttttgagaaattttttaggcatcaattctcaggaatggatgaaaggatctagttattttatgattattggccaaattgaagagaattctgccacctgctgaatgcattctgtctccggagcttcctagccttatattttaactttttacatttagctgtttatttttaggtgaagttgagtcctccctctttcttccttgcctttcgccggccacacgccccgttgccgtgcatgggcccctgctcagtgcctcacctgacccactgcacctggccaggtggaggagcatgtcagccgcatccgggaggagctggaccgcgagcgggaggaacgaaactacttccagctggagcgggacaagatccacaccttctgggagatcaca

SEQ ID NO: 12107 - DNA, 549 bp, Homo sapiens
cctcgcgggccgcgccccgccgcggacaccaccgggacctggctgcgccctcccgaccccggccgggcgtccggggctcctgcgcactcacttggcggccgcgcccgctggcgtcctcttgttctcttccagattcagcgattgccagctcctggcctgggccactgcttctctgtcctcattcacttccctccactgctgggtcattttgaagcaaattatatacacattagatcattgcatttgcaccgaaaaagaaagggaagaaaggcaaagccaaaggcaccccgattgtcgatgggctcgctccagaggacatgagcaaggagcaggtgaagttgagtcctccctctttcttccttgcctttcgccggccacacgccccgttgccgtgcatgggcccctgctcagtgcctcacctgacccactgcacctggccaggtggaggagcatgtcagccgcatccgggaggagctggaccgcgagcgggaggaacgaaactacttccagctggagcgggacaagatccacaccttctgggagatcaca

SEQ ID NO: 12108 - DNA, 22293 bp, Homo sapiens
ctggtcccggagtcgccgctgggcctgtccgctggcgtcatggtgagcaggggcgggagcggggctggggtcctcggcaggggcccggagacctcggggcagggaggcctcggtacacggagaccctgggaatgggaggcctggagcgctgggtttctggaattgagagctcggtgctcttgtgggggtctccgtggggcaaactcaggatgctcccggccccggggcctggcagcactcgggactgagacctgggctgtccagagccctgtgctcacaggggtggtcatagaacgcccagggcccggggtcggcggcgcacggtccccagaagagtgaacatgcgtcaaggggactctcatcctggaatggcagactcggtctgttggatccctgggacctagggtttcagctcacgaggctttgcagagcaccagggtccccatggaatagagccggaggcaggaattaccctaagacctttggtctcccggatggagagcctggggcacaccagagtggctagagatccctctacaccaaggaggcccggacaggtccagtgcccttggagtgcccagggcacaaccttgggatacaggaaccactgttcccttggaaagcctggcaggagtcaggcccagaccgagaagaggaaggcggagctcgtggcctcatcagctccatgtctgtctttctcttgtaaagggctctccctttgtggtacaggaattgtcagtaactcaatttctgggcaggtgtggcagggtgggtttcagctggtggggggaggaaagctctgggagccccaccaagtccctgcagctggctgtgaaggtcccaaatgctaagtaatgctgaaccttcctccactgccttcagggctttgtgatgaggtagccttcttggagtggagggattaaaaagagagcagtacattacgaattaaatttaagtagatgggttttctgacccaggaagggtcttctgaaaaccgactatgaaagaaactaccaaactaggccaggagtctgggcgcggtggctcacgcctgtaatcccatcactttgggaggccgaggcaggcggatcatgaggtcaggagatccagaccatcctggccaacatggtgaaaatccatatctattaaacatacaaaaattagctgggtgtggtggcgtgtgcctgtagttccagctactcgggaggctgaggcaggagaatcacttggacctgggaggcggaggttgcagcgagccgagatcgcaccaccgcactccagcctggcaacacgtctcttaaaaaaaaaaaaaaaaagcagggtgtagtggctgacgcctgtaaacccagcactttaggagtccaaggtgggtggatcacttgaggccaggagttggagaccagcctggccaacatggtgaaaccctgtctttactaaaaatacacacacacacacactcacacacacacacacacaaaattagccgggtgtggtggtacgcacctatagtcccagctacttgggaggctgaggcaggagaatttcttgaacctggaaggtagaggttgtgtagtgggatttttaaggaattagagagaccgatggggttcaggaggatatttattaattatttaggtgcaccggcccagtcagattaaaatccaaaggactgagccctgaacaaagagttaagttaccttttaagcttttcgtggggcagagggagatctgtgcagggggaagcatgcttcagatgtgagaaataaaggcagttgttcagttgaaacatgcattacatcatttcttactttttaaggaaaaacatgttttgcgacttgagtttatctgcctagtgaccttgcagccgcacagctacagaatcagggtcttcacaatgcctgggaagggaggagagacaaggctcactagccgcagaaaaacaggcagttaatttttaaaggactccagctctttctctttttcagggggagttgggttttcttatatataactgagtttctgcttacacactttttaatttcttttaattcctgttccagttgcagtgagccaggattgcaccactgcactccagcctgggtgacagagcaagactccatctcaaaaaaaacaaaaacaaaaacaaaaaacaaaaaaatgcaacagcaaacacaacagcaaacactaaacacaaccaaactacttctgtttctgttaggttgtgggaatatgggccttggtctgttggatccttggaccaaggaatatgggtgatatttctgttttcttctcatcagtgttttctaaaatttccacataatattttctctctctctttttttttttttttttgaggtagagtcttaccctgtcacccaggctggagtgcagtggcatgatcttggctcactgcaacctctgccacctgggttcaagcgattctcctgcctcggcctcccgagtacctgggactacaggtgcccgccaccacgcctggctaatttttttgtatttttagtagagacagggtttcaccatgttggccaggctggtcttgaactgctgacctcaagtgatccgcccgcctcagcctcccaaagtgctgggatgacaggtgtgagccactgtgcctggctccacctaatgttttcattcaggactaaatgaaacataaatgaagataaatgggccagtcgcggtggctcacgcctgtaatcccagcactttgggaggcttaggtgggcagatcacgggtcaggagttcgagtacagcctggccaacatagtgaaaccccgtctctactaaaaatacaaaaaattagccggacgtggtggtgggcacctgtaatcccagctactcaggaggctgaggcaggagaatggcttgaatccgggaggcggaggttgcagtgagctgagatcgcaccattgcactccagcctgggcaacagagcaagactctgtctcaaaaaaaaaaaaaaaaaaaaaaaagagagttcaagaccagcctggccaacatggtgaaacctcgtctctactaaaatacaaaaaaaaattagccaggcgtggtggcgggcacctgtagtcccagctcctcgtggaggctgaggcaggagaattgtttgaacccaagaggtggaggttgcagtgagccaaggcagcctggatgacgagggagactccatctcaaaaaaaaaaaaaaaaagataaatggatttaggttttaatgtttttaaaaaataaataaaatttccacatgaaatttgtaattttaaaaacgttacatagctgggcacagcagcagtgaactcctgtggtcccagctccttgggaggctgaggtgggagtatcagttgagcccaggaattggagtctgcagtgagctatgtgatcacaccactgcactccagcttgggcgacagagcaagactttgtctttaaaaaaggttaccgagacatgtagacacagaaaagcatgggctgaagactactgggagtagcaaagtcagcaggataggatatggaaatttgttacctgcttgagtgccctgtaaatgggtggccagacagaactgctcctggtgtcatgcgtggtttcagcaacttccacaagggggtggggttagaaggttctctcccatccttgtcaaagttgctaaaaccacgcacgacgccatgtgcagttccgtctggcagcccatttacagggctctcgtggtgggtgctgtctgcccaagctttcttgaccaggcttctctgaaggaagtttctctttgaaagaaaggaaacttgtggttgtcacaaccgatcgtggttatggaggcatttctccctaagcttactgaatggtgtcttgcaggtcttttccatggtggtcaccaatgttgccgccagcatggtaacatttggcagtgtggtattgagggtctttcctctgttttgcatccacagcagaggtctttactttttaccaaggagtgagtgggtttggaatgggttcccccctctcttagtttttggagacggggtctcgttctactgcccaggctggagtgcggtggtgcaccatagctcactgcagccttaaacttctaggctcaagtgattgtcctgccttggcctcccaaagtgctgggatgacacgtgtgagccactgcgcctggtcaccgtataccaaggaatgagtgggtttggaatgagttccctctcttttctttttttttttttttaagttacagtttgctttttgagatggagtctcactttgttgcccaggctggagtgcaatggtgggatcttggctcactgcagcctctgcctcccgggttcaagcgattcttctgcctcagcctcccgagtaactgggactataggcacacaccagcacacctggctaggtttcctctcttttttttttttttgagatggagtctcactctgtcgtcctggctggagtgcagtggtgtgatctcggctcactgcaaactccatgccccaggttcaagccattctcctgcctcagcctcccgagtagctgggactacaggcgcccaccggcacgcccggctaatttttttttgtatttttagtagagatggggtttcactgtgttagccgggatggtcttgatctcctgacctcgtgatccgtccacctcggcctcccaaagtgctgggattacaggcgtgagccaccacgcccggctcctctcttttctagaaggaatgttctccttctcaaaaggaaggtttctcctttgtgcttctccaaatgcaacaacaggatgtgtgtgtggtaaagggtgggaacactcagggcaatgatgtgctccaggtgagcagaagggagagaggttccagaaccttctctgccaaatgttcctgggagcaaatcagagccagccaagaaggggaagctgttagagtctctcttaccccattatttccaccaaaggcaccgaaaaagaaagggaagaaaggcaaagccaaaggcaccccgattgtcgatgggctcgctccagaggacatgagcaaggagcaggtgagcagagcgggctgtggcccagtccccgggtgggcgtgggcgggcaccacgcagggtgcctacgccgagtgtccatcttgccatgtggatccacccttctgtccaagccagaacacgccccccgcgtggcccataattcccatcagcggcaaagctttcggctgcaccatgtcttttcagaaaggtagtgcagcctgtgaaagagctttgtaacagggtggtaggagtgtggaaggacatgcttttctgatctaaaagctgtttttaatttcgtgtattctctttcaatcttaccctttttttgcacctgatgtgtatagacttatcgtagaacacacatgtagcattctcctttattttattcaccattaaacattatgtcaaaaaggaagtttttgaaagaaggatgatttacttcaaatcacatctgaatctgattaatcgttcatttttttttttttttttttttttttttttgagacggagtctcactctgtcgcccaggctggagtgcagtggcgcgatctcggctcactgtgagctccacctcccgggttcacaccattctcctgcctcagcctcccgagtagctgggactacaggcacctgccaccacgcctggctaattttttttttgtatttttagtagagacggggtttcaccgtgttagccaggatggtctcgatctcctgacctcgtgatccactcgcctcggcctcccaaagtgctgggattacaggcatgagccaccacgcctggccagtcattcattgtttttgataaaagtcccaacaaggagtaacagcatcagggctgcctttttcttgttgcttattttggggaggaggtgatgtttttatagtttctttgtaggagttagtttaagtctcttcttcatttggatgtagttaagggctacagaacataattacataattacaattttacctaaaaggctcctggagacggcagtgtgtggcaagcacggtgcaccctctggcctctgccctcatggacgactgcctgtgagcacctgacatgggacatgagggctgtgtcaactctgtgttattgttaataaatcttaccttcttttgatagttgtaagataaaaaatcaatacgaaggagactgaaagagtctcatgacctgaagttggagctaggcagaggtccttgaacaatggtaaagaatggctttattttacatgcaggcaaaccattggcagtttaagccagtggctaagcagagaggtgatggggtcaggtttgtgttctggaaagatgtctggagctgctggatggagaatggattgaacactgcgttgtcccagcatgtgagctgctgcccgtctccctgtccgcttcccattcctgtggagacaggccttgtggggcagtggccatggagcctacggggcagcctacggggcaggctacggggcagcttacggggcaggctatggggcagcctacggggcaggctacggggcaggcccttgcactgcacatcgcacgttgagccacagactcagaaggcttcttcagggtccaggcaggtggggagggatgggggtgacctggagactcctgccccgcagcagaggacagtttcatctgttcactggggagtgccttgtgggcctaggagttcagtgctgtttttttctgattttccaagagaagctggaaatctggatatttataagaaatctgaatattgagtgatggcaaaatctcaacaccatgtgagccaaacagaccagtcaggagccctggttcaggctctgcccaggagcctctaaaggtctgtgacgtgaagacatttgtcgttgtgccgaggcactggttggattcgggggtgcgtgtctccctcatgtctgcccggcatcctcggctcagaacccctcctgctgctccttcttgtttgctcgttgtcttgtcttcttttgaggtgagaaatgtgttttccctgtggggaatgtggtgttgagaaagaaaaaggctcacagtaagtggcctggggctgtgcccgaaaagtaactgattctgacggaatctcgctgtgtggcccaggctggagtgcggtggcgcgacctcggctcactgcaagctccacctcctgggttcacaccatcctgctgcttcaggctgcccagtagctgggactgcaggtgcctgccatcacgcccggctaatttttttgtatttttagtagagacgaggtttcaccgtgttagccaggatggccttgatctcctgacctcatgatctgcctgtctctgcctcccaaagtgctgggattacaggtgtgagccaccgcgcctggcagtaactgattcttaagggaaatgagctcccgagaaagctggaagcctgtcctacatttttttttaacctatttgcagattcgcaattgaaccctcttgagattttagagtctactggttttgtatattttttgcttaacattatatcttcaaaggtgaattttttttcatttagcattatgatatgaatttgtttaaatgctgctacatcatttgcatattttttttgggttaatgtgatatttctcctagttgatatactctaatttttcaaccatttccatatttatttatttattgtttagagacagggtcctgctctgtcacccaggtggagtgcagtggtgtgatcacggctcacggcagccttgacctcccaggtccaaacgatcctcctacctcagtcttctgagtagctgggactataggcatgtgccaccactcctggctaatttttttttttttttttttttgtagagacagggttttgccatgttgcctaggctgttcaactctggggctcaaaagatcctcccaaagtggtgggagccaccatgcctggctgtttgtgtattttttgagacagattctcactctgtcacccaggctggagtgtagtggcatgatcataactaaccgcagcctcaaccccctgagcttgagtgaccctcccacctcagctctcccagtagctgagactataggtgcgtgccatcatgcctagttaatgaaaaaaagtttttgcagagatggggtcttgctatgttgcccaagctggtcttcagctcctgggcgcgagggatccttcaacctcagcctcccagagtgctggggttgcaggcgagagccaccgcgcctcgcttatttccctgtttaaactggtcttaggttatttcctttttgatatttttgctgttgtaataatggtgtgggtaatatctttgagcaagatgctcttatatttcttttgagaaattttttaggcatcaattctcaggaatggatgaaaggatctagttattttatgattattggccaaattgaagagaattctgccacctgctgaatgcattctgtctccggagcttcctagccttatattttaactttttacatttagctgtttatttttaggtgaagttgagtcctccctctttcttccttgcctttcgccggccacacgccccgttgccgtgcatgggcccctgctcagtgcctcacctgacccactgcacctggccaggtggaggagcatgtcagccgcatccgggaggagctggaccgcgagcgggaggaacgaaactacttccagctggagcgggacaagatccacaccttctgggagatcacacggaggcagctggaggagaagaaggctgagctgcggaacaaagaccgggagatggaagaagccgaggagaggcaccaggtggagatcaaggtgagtggggccggcctgcacgtgctaacctggtcaccacagagccccagaggagctggatccagtgagggtgcaggtgggacattttctgttcttggctttgggagtcacagccttaaaggtgttttttataaaagcctgagggagagaccctgcaggtcctgagggtttaaaatgctgcctccacaacatggaaggaatatgggctctgggggcagactggcctgtttgcaactcagctctgccacttaataccccatgagctggggatgcacctcacctcccagccttggtgtcctgctctgtgcctcaagtgtacaggtttgcataggtgaacaggcatgtgtagctgtgtaaaggtgaggcatgcaagtgagcaggtggatgcaagtgagcatgtgtgtgcaggtgaggaggcgtggccaggtgaggaggtatgtgcaggtgaggtgtggggaggtgagcacgtggggcaggtatgtgcaggtgagcaggtaggtgcaagtgaccaggtgtctacaggtatgtacaggtgaggaggtgtagtacaggtgtagtgcaggcgaccaggtgtgtacgggaatttacaggtgaggaggtgtacaggtgaccaggtgtgtacaggtatggacaggtgagaaggtgtggtacaggtgtggtgcaggtgagcaggggggtacaggtatgtacaggtgaggtgtgttacaggtacggtgcaggtgatcaggtgtatacaggaatgtacaagtgaggaggtgtggtacaggtgaccaggtgtgtacaggtatggacaggtgaggaggtgtggtacaggtgtggtgtgggtgagcaggagtgtacaggtatgtacaggtgaggaggtgtggtacaggtgaccaggtgtgtacgggtacggacaggtgaggaggtgtggtacaggtgtggtatgggtgaccaggtgtgtacaggtatggacaggtgaggaggtgtggtacaggtgaccaggtgtgtacgggtacggacaggtgaggaggtgtggtgcaggtgtggtatgggtgaccaggtgtgtacaggtatggatggacaggtaaggaggtgtggtacaggtgaccaggtgtgtacaggtatggacaggtgaggaggtgtggtacaggtgtgctatgggtgaccaggtgtgcacaggtacggaaaggtgaggaggtgtggtgcaggtgagcagatggtactcccattgccctgcaggtgtacaagcagaaagtgaagcacctgctatatgagcaccagaacaacctgacagagatgaaggctgagggcactgtagtcatgaagctggcacagaaagagcaccgcatacaggagagtgtgctgcgcaaggacatgcgggcactgaaggtggagctcaaggagcaggagctggccagtgaggtggtggtgaagaacctgcggctggtaggtgtggcgggggcacctggaggctgacaggttgttgggacggcaagcctagtgctgcatgaactcctgtttattcaacagcaactgggaattcatatttctgcataagactttctgcatttttgcaatttgttgaaaaaaaattttttaaagcatgcatccaaacaaaccccattttgggaccaagtacacaattctgtctcagacctgagcaaaaaattgacgtcaccgaagagaaaaaatccagcttaggatctttcatgtgctgctgacacctgacacccagagacttttcctagggaatagcatcatatgcatttagtagaatgcaaaccaaccattaaaatatccagtgtgttgactcctgggcactgtgacagtttgtcacacaagctggtctgatttttacttttgaggctgggggtttccagggcaccattaaaattcatctgtgcacctggttcagtggctcacacccaaaatcccagcacttgggagggtcaggtgggagaagtggttgaggccaatagtttgagactagcttgggtgaaatagttgaaccccatgtctaaaaaatttaaaagaaaacattagctggtgtagtggcacatgccgatagtttcagctacttgggaggctgaggcgggaggatcccttgagctcaggaagtcaaggctgtggtgagctaggattgtgccactgcattccagcctaggtgacagagtgagacaaaacaaaaaggaaagagatcatttgctgagtgtccattagctgctaggtcctgatctgatctctgacaaaacgcctgcccgactggggctgttggtctagaaaggagagacaacaggtgagttggaagacaaaataaacgtgccagatacaacagagtatctggtggggaagagtgccatagaaggatcgaagtggggagaggtggggtgcggttttgtacaagcagttgaccggctgggagacgggatgggccagtgggaaagctcagagtgaccaggaggagactgtgggagagggtcagagcttgtccgcctcgaaagccgtggtggggactggagacgggtcagagctcgtccgcctcgaaagccgtggtggggactgggactttgaccctggtggagtctgttgccctctgagaacttgggcagaggagagatgtgtctcactaaggttcttcctggctgctgggttgaggagactttctgaacacatttgcctcacgcctggaagcagtccagcctccactgaatctggaagaaacttggtgacgttgctgacttcgcagcaaagcctgagagtgccgaagtcttgagccctccagaattagctggtcttaacccaggtcctggatatgatattgttacataatcagagtttcctgttgggtaaaaatatggctttaggccgggtgcggtggctcacgcctgtaatcccagcactttgggaggccgaggagggtgtatcacgaggtcaggagtttgagaccagcctgaccaacgtggtgaaaccccgtctctactaaaaatacaaaaattagccgggcgtggtggcgcacacctataatcccagctactcgggacgctgaggcagaagaatcacttgaacctgggagacggaggttgcggtgagccgagattgtgccactgcactccagcctgggcgacagtgtgagagtctgtctcaaaaaaaagaaaaattactgctttaaaaataatttatttttttatgcaaattttaaatatataatgtttatttaaatatataataattgttcattaaaactatatatttatttatttttagagatgaggtctcactctgtctcccgggctgcagtgcaatggtacaatcatagctcactgcagcctcgaacttctagtctcaagtgatccttctgccttagcctcccaagtagctggaactatagatatgagccaccacacccacctaatcttttttttttttttttttttttttttttgagatggagttttgctcttgttgcccaggctggagtgcagtggcacaatctcagttcaccacaacctctgcctcccgggttcaagctattctcctgcctcagcctctcgactagctgggattacaggcatgtgccaccatgcccggctaattttgtatttttagtagagacggggtttctccatgttggtcaggctggtcttaaactcccgacctcaggtggtctgtccagctcggcctcccaaagtgctgggattacaggcgtgagccactgtgcccggcaatctttaaattttctgtagaagatcttgctatgttgcttaggctgcccttgaactcttgacctcaagtgatcctcctgccttggcctccagcgtgctgggatgacaggaatgaatccttttaatatgctgcttcaggcagcagtgcagcaggttggaagctacacacggcacctggaaagatcccacagctctgtgtggatgtggctgctgctcttcaggctgtgggatggtttggcgatggaaccaagcgggttcagtgctcacgacgtctgttcatgttctctctcaagcttagaggtgactttagttgagggaggtgagttagggaatatggaggtgaccaaaaccatgaggaacagggtcagcctgaagggagcgggcttccctctgtgtccggctgtgtagtaatggccgcttctccctgtgcagaaacacaccgaggagatcaccaggatgcggaatgattttgagaggcaagttcgaggtcagtttcccgtgtgctcattgtgtaggtgccagagacacccccgccccatcagagaggaatttacctccagagcttgttaactcagggagcaaaaactggattaaaacagccaaggcatgcaagagaaagaacatggaagtttccaaggccagtggacccactcagaatcccagaacaacctatttccatgtgagtttgggaggctgtgattaccacacacattcccactcctagctaaaatcagtagttatcagcaggtggtagctattcagtgccgtgggcagccttcttaaaatagtcttctccatggctcctggtctgagaaggctccaatttcagaagtctctgtgttttactaataaaggctgattgtggctgggtggccacacaggcctcggttactgctcactggggtcagctgacattcagctgttggcacccccagtgcagggagcgattagcaatgcctgtcactggcaaaggcaggccgacagtggtgtgtgtgctgagtgtgagcatcagcagaaaaactcagtctaaacccctttgttcttctcttgcagagcttttgcctgcaaggctgttctgaccacagtgggcgttttgggcccgtttacaggctccatgttctgtagccgtaggggcaccacgtcttcctctgctaagctgctgtttgctgctgcctttcagaaattgaggccaagtatgataagaagatgaagatgctgagggacgaactcgacttgcggagaaagactgagctccacgaagtggaggagaggaagaatggccagatccacacgctgatgcagcgccacgaggaggccttcaccgacattaagaactactacaacgacatcaccctcaacaacctggccctcatcaactccctcaaggtgctgtgcgtgggctgggctggggaggcacactctgcctgtcctagaatgtgggctgcagagtcctggggatccagaccccagctctccaccccaacacacccagtactttttataagattgtttgacaatgcccctctcatatccttaactgaaattcctaaataacgtaacctatctctacctattgttaaaagcagtcaggatattgccctcaccgtagtgcagagggggaagtaatgaagtgtgttctggtttgtaaaagctcagatggaaccgcagtgagggccgtgatgtggctggagtggataggtgtcatagtcactgcctgcgacaggtggataggtgtcatcgtcactgcatgctggcagtgacaggattttctacagtagacaacggcccttggtggaatcttgaacaaagtatagtccttcagtctgcatggaagctgcattcccagaaaactcagaataagttgaagctgcagaaatactgtttatacatagaagacgtctaggtgccagcatgcctgaggctggcagcagctggtgatgggcaggagagcacccagctctcaccatgcaggccacagcccctttggttctgcctgctgagcccctgccgggcctgtgcttgtgcctgcaggagcagatggaggacatgcggaagaaggaggaccacctggagagggagatggcagaggtgtctgggcagaacaagcgcctggcagaccctctccagaaggctcgggaggagatgagcgagatgcagaaacagctcgcaaactacgagagggacaagcagatcctgcttgtgagtttcccgctggattcctctccctccttggcatgagcttgcctaggctcaggagggaggagcatcacagggaggggcttggcccttagggcaggaagggagacggggaggcctgcatttctcctttctctgcctcgtgttctcctggggaaagtaaagtctgggggtgttttggagacaaggccctcatcttcaccacgtgctaccggccggccttggtgagactcagctgcttgtgtcctggaaccaggtctttctggcgattatttttggccttgccatctcccaggagcccgtgttacttggatgactgtgaatcttgaatactttctgtcccctactccctgtttttcctccagtgcacaaaagcccgtttgaaagtcagggagaaagagctgaaagacctgcagtgggagcatgaagtgttagagcagcgattcaccaaggtgagtggcaccacgctggccctgcagttggcggtgggtgttagagcaacggttcaccaagttcaccaaggtgagcgggcactaggctggccctgcagtggggatggcacccctgctagccagggacggggctctccttgtggcccctggaccagcttcagatgccttggccaggtttctgggttctgaagctggaggccctgttccctgtaactcattccgcagcttctaagaggcaaaaacctgtggcctgttctgcatgcatattctgcagaaggcctggggtcttgatggggaacggatcacacatgactttcgtcccctcgagagctcacctctgaaagcacatgagggaggctcttaagtgtaagtgaagatgagtctccggctgctcagtgctggtcctcacactggcgagttttatgggctcccttccaggtttcctgcatgctctcgtgtggatgtgactttgtatgttacgaacacgggatcaggccataagcacaatttgctttttaatctcacagtgtatcaggctgcacataggaagcggtctcatccttttcacagctgcttggtgctgcgttttgtgaacgtttgatcatttagccgactcccgtctgtttctaatgctctgctgctataagcattgctgcctcaatccttttaaatttgtctttgtgcacttgtgtgagattgcttcttaggaaagccagttcctagcagtgggattgttgagtctgagggttctgttctgaggaccctgatcatctgtccagagggctgctctgagtcacacacctgccagggtgcggaggggccgtttccatcctcacctgcaccagatctgacaggtttaaacctttgcagaagtgactgggtggaaaacatctcatttcgtgggcacttccaagattcgcagtgagtggtaggggtgctcggtcctgtctctgtcccttaaagacgctccttgcctctgttcagtttcaaagttctggccaaggaccaatccctgcagcatgggcccctcaaggctttgtctgtggtgtgcggggccagggcatcttatcttgagccgcagttatatgtgctgttttgttctctaacctaattgaaatttttgaacacaaaccgttgtagtgggattcgcttctcagaaatatcccatctgtctgtcagatctagccccaccttcagagacacctcaggtcctgcacgacgtgcattgctaggctgtgccaactcttggcacctaagggaagggcacctgcaaggtagtcagtgagatcctgaggactgctgtgttagacaaggggcccttccttctccctgtgggttttgaggtggacattattgggaagaggacagcagagacgtgcctgggttggagccttgttttctgtcacattttcttccatttgaatgtggttcctgacagtgtccaagctggtgtctcttcctagagaaccgagagctcaaatttatcagcaaaatttagagaccaaggcagttatttatttatttatttatttatttatttatttatttatttttgagatggagtttcgctcttgttgcccaggctggagtacaatggcacgatctcggctcactgcaacctccacctcctgggttcaagtgatactcctgcctcggcctcccgagtagctgggattacaggcgcctgccaccacgcccggctaatgtttggtatttctgatagagacagggtttcactctgttggccaggctggtctcgaactcctgacctcaggcgatccacccacctcaccctcccaaagtgctgggattacaggcgtgagccaccacacgctgctcagggtgttcacttttttatagtcttcaacaaagtctagatttttttagaatgcacaattaataagtagaagaattaggagataaaaaagaacagttttactggctggcaggtagctggctccaaggccgtgctccagatccaccatttgtggggcggacagcacatgtgatgccaggatctggggctggccaagggagcatatcctccaaggggccccacctgcaagctcggcctgctggatgccctggatctcaaatctcacctgagcccacagccctcactcgggcaagactggcctcggccacccatgaagcagctttcagggtggggctgcttcagctcttaccaggacacttatggcttccagagacaccttcctgagagaagggcttatgctgatgtgttcctcctgccttccactgcgtggatggctctacaaagggccagggcgcaggcagtgtggacaacacactgaccccggtgctgtgggagtgggcactgttgggaggcagcgtgttccaggcaggtgcagaggtgggaggcagcatcttcccagcgagatgtccccaggtgaggggcctcatcgcccacccccagcgctgtccctacaggtgcagcaggagcgggacgagctctatcggaagttcaccgcagccatccaggaggtgcagcagaagacagggttcaagaacctcgtgctagaacgcaagctgcaggctctgagcgccgctgtggagaagaaggaggtgcagttcaacgaggtcctggctgcctctaacctggaccctgcagccctgacgctggtgtcccgcaagctggaggtaggccctagacaggctcctgaccccagtgggcggcctcatccctgtggcaagagtcttcagttctgtgctgctcctcggataggcacagagacccctcggtcggccactgaggaggggcattcatgggtttcctgtggccagtttcgggccagttgggaactgtggaagggctgggcaggggaaccagatcagggcccactctgctattgatggggagcacagggctggagggggctggttggggccagcacagaatggggacgggcagagggttggagagccgccaggaggctgagtccacaggtggggctgggaggggccgaggtgacttggtgtttgcacatgggggaacgacgggtcccggcccagtgggcggtggtgcctgtgggaccctggtcatctgggatggcctggctctcagggcctgaggtagtgaggctgtataggaggggcctcacctgggccagaggcactgtggccccgggactgaaaactcatctttgtttgctcagcactgggcccagtgagcacaggcaggtgagggagtgagggtcccactgttgggaggtgggggaggcgtgtttccagctcctggctgagggctgcacccagcctgctgctaagccaccgaaatgagggtgaagagagcagtcgtggcctgtgagggtcattgcagctgcgcccacgcgccagggtgaggatggaggatggagctaaatgtgggtcaacccctcctttcctggtcattgttacctcgacttctaagtgaggaatcttctggggaaatgacagaggcccccgcagggacactgtttgctgctggccaggtgtgagggggctgctgtgtcagtgggcagcagggacggctctaaagccaggctgggcccagcagtgccccacaggcaggagcccaagaagtccctgcctcgccacgtggtgagacccttgcccacatctgggcggggccagcgctgctgaagactacttttttctgttacaaaaaagtgggatagccgggcgcggtggctcacgcctgtaatcccagcactttgggaggctgaggtgggcagatcacgagtttgggagttcaagaccagcctggccaagatggtgaaaccccgtctctactaaaaatacaaaaattagctgggcttggtggcgggtgtaatcccagctatttgggaggctgaggcagagaattcctggcacctgggaggcggaggttgcggtgagcctagatcgcgccactgcactccagcctgggcaacggggcgagactccatctcagaaaaaaaagtgagatagtacattcacaagcctcaagaaatttaagcaatatgtaggtggtgtttagtgaccagtctccacagtgtggctgcacgctgcctgccctcacctcatctgcatttcttgtggtctggactgctctttgagttttttcttgagacggtgtcttgctctgtcacccagactggagtgcagtggctcaatctcggcgcactgcaacctccgtttcccaggttcaagcaattctcatgcctcagcctcctgagtagctgggattacacaggtgtgagccaccgtgcccggctacttttcgtatagtagagacggggtttcgccacgttggccaggctggtctcaaactcctgacctcaagtgatctgccctccttggcctcccacactgctgggatcacaggtgtgagcggcagtgcctggcctggactgttgctggagaggcaggttgtgcaagctcccagttctctgcttcttccttgttttctctccacccttggagacctttttctgctgacaaccctgtgtggatggatgcatccatcaaaccaggctgctattcgctggatctctcagaacgcccactggagtccccaggccgctcccgttgcctcggccaaaagatgagtctcaaactcccatcacctctctctcctcaggatgttcttgagtcgaagaacagcaccatcaaggacctgcagtatgagctggcccaggtctgtaaggtacggctgtgccctgccctccctcaggggcaccccctcggtgcccagactgttctaaatgcagacggtctctgaggaccccacctgtgcccacttcgtacctcgtttgacaaggcagctgtcactgtccccacgtgagggtgcagtcatagccgagagcatctggattctgtgtggtctggggcagtgcactgctgtctaggccatgtctctgctgggatgggtgtagggggggacctggacgcttccctggtcagccccttcccctgggcagggagtcagaaggtgctgtgcccaccggggaaggaaacagacgtcattcaacaggggaagggagggcgtgaagaacctgagtgggaaacacccagccagggcccagagccctcccagaccacagctctgccctgagtgtccctgccctctgcctccgtctcgtcatttgtggaataggaatagtgacagcctctccctgtcgtgctacctgagccaacgcagtgaaggtgcttggagctgtgtcccacacgggaaatgactgataagcctttggctttatccttctgcaccgtgatgctcacgctgcccctccatggagctgcactcagctctggtggtcctgagcgtggggaccctcagctccctgacactgccctgtctccacaggcccataacgacctgctgcgcacgtatgaggcaaagctgctggccttcgggatccctctggacaacgtgggcttcaagcccttggaaacagctgtgatcggacagacactgggccagggccccgcgggactggtgggcaccccgacgtagctgcccccctggggggccacagcccagagaaccagcctaggaacactcgggatgacaccccttatcacaccaaggacagcaagttttttagattttatcatcagcaaatgaaagcttttcacatgttcttgccatcctctttcctggctctgtggaggagaaccacctgcaggaccctcacccatggtgtccctgtcgctcccttccctgggtgccgcacgtccagcctgtgtccaggcctactccctggtctcacctccgaccacagtcggcggcaccttctcagagtgccccgcactcacctgggggttggggcagtgccgcgctgtgctgcctgtcttcgcgccactgttgtcccaccgaatggacagctttgcaggtgctggcactaacttcattgacacctgagtcacagctgcccagtgggattctccagggggccgggacttccctaggaagtggtgagccaatgctccctgatgagcacaaagcccgctctgttgagggctgggtgggtgcagccagcgtgcgggaacgggcaggcagcctcccgctgccagtcttcgctctaactccctcggtaggtgatgtaggaccaggggcacgtggaacttctgggccttgctggtgatggttaaaacaacctgagatggagaggccaggagagagtataaggggatagcagcaaaccacctatctggccccaacacacctgagagaattcagcagcccagactgagggtctgggatggggtgaaccttccgcaccagagggacactccacagaagccacagcccagtaagtcaggcgcttctgcggcggctccagtgtggggtgaggcagtgaggttaggcccagagagctggagttggctcagatgaaaacctctgtcaacaaagaggggatgaatcacccttggcccagcctccccacaaagcctgaccctgggcaggtgagtgacgggtgtgtcctcgtagagtctattgctgcctggacacctttcttttgggagctcaaagcaagtgagctcacctacctgccaccgcccaggaccagtctgcccactgcctaaatgatgcccggccagcaggacctggcctgcagatcccagtgagtcatgagcctcagccccctccagcccactggggctctcacctccacatgtgggtagaagctttcctgccccctcttcctccagtagccctcagtgtcgaaggtgagcttgtaggtgcctgccttcatctggtccaggacagtgaccatctgggtctgtgtagctggggagaggatgaggctgcagagatggggaccagaagccccccaccccagctttcctgggtctgcatcccagtgggcctcagacactgccctgccacctgtcagacttgggtgagcagacacagtgaggctgttaggtcctgcagttccagagcagtctagggacaccactgccctgtctttaggaaatcacaacacagagaagcaaaaagggaaaaagtctcccacaatttatcccatgagcaagaaccactttatagctggcatatatttttccagattttctctatgcataagtatatttgtttaaaaacttataaagtggattatactatttgtattgttttataa

SEQ ID NO: 12109 - DNA, 3174 bp, Homo sapiens
ctggtcccggagtcgccgctgggcctgtccgctggcgtcatggcaccgaaaaagaaagggaagaaaggcaaagccaaaggcaccccgattgtcgatgggctcgctccagaggacatgagcaaggagcagctgtttatttttaggtgaagttgagtcctccctctttcttccttgcctttcgccggccacacgccccgttgccgtgcatgggcccctgctcagtgcctcacctgacccactgcacctggccaggtggaggagcatgtcagccgcatccgggaggagctggaccgcgagcgggaggaacgaaactacttccagctggagcgggacaagatccacaccttctgggagatcacacggaggcagctggaggagaagaaggctgagctgcggaacaaagaccgggagatggaagaagccgaggagaggcaccaggtggagatcaaggtgtacaagcagaaagtgaagcacctgctatatgagcaccagaacaacctgacagagatgaaggctgagggcactgtagtcatgaagctggcacagaaagagcaccgcatacaggagagtgtgctgcgcaaggacatgcgggcactgaaggtggagctcaaggagcaggagctggccagtgaggtggtggtgaagaacctgcggctgaaattgaggccaagtatgataagaagatgaagatgctgagggacgaactcgacttgcggagaaagactgagctccacgaagtggaggagaggaagaatggccagatccacacgctgatgcagcgccacgaggaggccttcaccgacattaagaactactacaacgacatcaccctcaacaacctggccctcatcaactccctcaaggagcagatggaggacatgcggaagaaggaggaccacctggagagggagatggcagaggtgtctgggcagaacaagcgcctggcagaccctctccagaaggctcgggaggagatgagcgagatgcagaaacagctcgcaaactacgagagggacaagcagatcctgctttgcacaaaagcccgtttgaaagtcagggagaaagagctgaaagacctgcagtgggagcatgaagtgttagagcagcgattcaccaaggtgcagcaggagcgggacgagctctatcggaagttcaccgcagccatccaggaggtgcagcagaagacagggttcaagaacctcgtgctagaacgcaagctgcaggctctgagcgccgctgtggagaagaaggaggtgcagttcaacgaggtcctggctgcctctaacctggaccctgcagccctgacgctggtgtcccgcaagctggaggatgttcttgagtcgaagaacagcaccatcaaggacctgcagtatgagctggcccaggtctgtaaggcccataacgacctgctgcgcacgtatgaggcaaagctgctggccttcgggatccctctggacaacgtgggcttcaagcccttggaaacagctgtgatcggacagacactgggccagggccccgcgggactggtgggcaccccgacgtagctgcccccctggggggccacagcccagagaaccagcctaggaacactcgggatgacaccccttatcacaccaaggacagcaagttttttagattttatcatcagcaaatgaaagcttttcacatgttcttgccatcctctttcctggctctgtggaggagaaccacctgcaggaccctcacccatggtgtccctgtcgctcccttccctgggtgccgcacgtccagcctgtgtccaggcctactccctggtctcacctccgaccacagtcggcggcaccttctcagagtgccccgcactcacctgggggttggggcagtgccgcgctgtgctgcctgtcttcgcgccactgttgtcccaccgaatggacagctttgcaggtgctggcactaacttcattgacacctgagtcacagctgcccagtgggattctccagggggccgggacttccctaggaagtggtgagccaatgctccctgatgagcacaaagcccgctctgttgagggctgggtgggtgcagccagcgtgcgggaacgggcaggcagcctcccgctgccagtcttcgctctaactccctcggtaggtgatgtaggaccaggggcacgtggaacttctgggccttgctggtgatggttaaaacaacctgagatggagaggccaggagagagtataaggggatagcagcaaaccacctatctggccccaacacacctgagagaattcagcagcccagactgagggtctgggatggggtgaaccttccgcaccagagggacactccacagaagccacagcccagtaagtcaggcgcttctgcggcggctccagtgtggggtgaggcagtgaggttaggcccagagagctggagttggctcagatgaaaacctctgtcaacaaagaggggatgaatcacccttggcccagcctccccacaaagcctgaccctgggcaggtgagtgacgggtgtgtcctcgtagagtctattgctgcctggacacctttcttttgggagctcaaagcaagtgagctcacctacctgccaccgcccaggaccagtctgcccactgcctaaatgatgcccggccagcaggacctggcctgcagatcccagtgagtcatgagcctcagccccctccagcccactggggctctcacctccacatgtgggtagaagctttcctgccccctcttcctccagtagccctcagtgtcgaaggtgagcttgtaggtgcctgccttcatctggtccaggacagtgaccatctgggtctgtgtagctggggagaggatgaggctgcagagatggggaccagaagccccccaccccagctttcctgggtctgcatcccagtgggcctcagacactgccctgccacctgtcagacttgggtgagcagacacagtgaggctgttaggtcctgcagttccagagcagtctagggacaccactgccctgtctttaggaaatcacaacacagagaagcaaaaagggaaaaagtctcccacaatttatcccatgagcaagaaccactttatagctggcatatatttttccagattttctctatgcataagtatatttgtttaaaaacttataaagtggattatactatttgtattgttttataa

SEQ ID NO: 12110 - DNA, 1096 bp, Homo sapiens
gatctctcagaacgcccactggagtccccaggccgctcccgttgcctcggccaaaagatgagtctcaaactcccatcacctctctctcctcaggatgttcttgagtcgaagaacagcaccatcaaggacctgcagtatgagctggcccaggtctgtaaggtacggctgtgccctgccctccctcaggggcaccccctcggtgcccagactgttctaaatgcagacggtctctgaggaccccacctgtgcccacttcgtacctcgtttgacaaggcagctgtcactgtccccacgtgagggtgcagtcatagccgagagcatctggattctgtgtggtctggggcagtgcactgctgtctaggccatgtctctgctgggatgggtgtagggggggacctggacgcttccctggtcagccccttcccctgggcagggagtcagaaggtgctgtgcccaccggggaaggaaacagacgtcattcaacaggggaagggagggcgtgaagaacctgagtgggaaacacccagccagggcccagagccctcccagaccacagctctgccctgagtgtccctgccctctgcctccgtctcgtcatttgtggaataggaatagtgacagcctctccctgtcgtgctacctgagccaacgcagtgaaggtgcttggagctgtgtcccacacgggaaatgactgataagcctttggctttatccttctgcaccgtgatgctcacgctgcccctccatggagctgcactcagctctggtggtcctgagcgtggggaccctcagctccctgacactgccctgtctccacaggcccataacgacctgctgcgcacgtatgaggcaaagctgctggccttcgggatccctctggacaacgtgggcttcaagcccttggaaacagctgtgatcggacagacactgggccagggccccgcgggactggtgggcaccccgacgtagctgcccccctggggggccacagcccagagaaccagcctaggaacactcgggatgacaccccttatcacaccaaggacagcaagttttttagattttatcatcagcaaatgaaagcttttcacatgtt

SEQ ID NO: 12111 - DNA, 436 bp, Homo sapiens
gatctctcagaacgcccactggagtccccaggccgctcccgttgcctcggccaaaagatgagtctcaaactcccatcacctctctctcctcaggatgttcttgagtcgaagaacagcaccatcaaggacctgcagtatgagctggcccaggtctgtaaggcccataacgacctgctgcgcacgtatgaggcaaagctgctggccttcgggatccctctggacaacgtgggcttcaagcccttggaaacagctgtgatcggacagacactgggccagggccccgcgggactggtgggcaccccgacgtagctgcccccctggggggccacagcccagagaaccagcctaggaacactcgggatgacaccccttatcacaccaaggacagcaagttttttagattttatcatcagcaaatgaaagcttttcacatgtt

SEQ ID NO: 12112 - DNA, 11770 bp, Homo sapiens
ggcggccgcgcccgctggcgtcctcttgttctcttccaggtacttgcgtgtggggcgccgactgtgtgcgggcgcccctcggggctggcgaggggcacaggaggggcctgactcgcgctgggtaatgacagactcacagagcgccctggatggcgcgaattaacgcggggggcgggtgggggcgagggcgtgtgcttgggaggctggaaggggcgggatgggggatgggaggtaaggagagggcggcgggcccgggctgcagagagcgccaaggcagtttcgatgaaactgacccccatgtccctatcgcccagattcagcgattgccagctcctggcctgggccactgcttctctgtcctcattcacttccctccactgctgggtcattttgaagcaaattatatacacattagatcattgcatttgtaagtacttcaatatttatctctcaaagaaagtccgtttgcaggagcattgactcatgcctgtaatcccagccctttgggaggctgaggtgggagcacagcttgagctcaggagtccaaggctgccgtgagctatgattgtatgtctcaaaaaaaaaaaagaaaagaaaagaaaagaaaaagtctagtcttcataaacactcttgttaacccagcatccaggccttcactgagttgatgccgtggcctgaggcggtttacctggtggatagtgggtggcaggaagcatcagacatcagacagagggcagtcggtttgtttgtattaacatttgctctgggattttgcaggaaactcagatgccatttatctgggtttctgagctgcacagcttgacactgaatgaaagtatcttaagccacatatgtgaagaaaaggctcttttctaaaaatctgaactcgaattcaatatgaaaagaacaggtcgcagtgggccctgtcgggatcccagggagccgcaattcagggctccctgaatgattcatctctgcagcccacaccgacagaccaggattgctcttagcttgtgaaaaatgagtaccctgtctaggctatcctgagctaaccctcctattcttgccctttttgctgaaaggaattattgttaatacagctatttaattcaggacactcatccagacttctgaagcaaaaagccaatcagcatgaagctgctagcatattggttttgtgaagtaagtgttaaattataataattacccccactgtgctctccagcgtcactgtctgaccaccctgtcccagggggaggaggcccctctcaggccaagggagtctggcacagtgatgctggctcctggttgcccaggcacagtgaccagccagacttcacagaggcctcagggcttactataaataaatcactgctttgtgcaagctgagccaatgcagttcttccaactggctgctcctctccaagaacaatcaggacttaggtgggcaaacaggaagtctctcatcacagtggttctcagattcccaccactgtgtgggtgcctgaggcctgagcaaacccagctcatgtggcaacttcctcccccagctggacaggaagacctaggtccaccaggccttctttcatttctcacactttgcccccagcacaactttctacgagcatggattctgtactcttcatccccagacacatgggagaacaagatctgctacaagaccttttctttttttttttgagacagggtctcaggtctcattctgttacctaggctggagtgaagtggtgtgatcttggctcactgcaacctccacctccagggctcaaacgattctcccacctcaacctcccaagtagatgaccactttttaagaagatgttaaagatgagagcttagggctgggcgtggggctcacgtgctcccagcactttgggaggccgaggcaggaggatcacttgaggccaggagtttgagaccactctgggcaataaagcaagaccccgtctctattaaaaacttaaaaaaaaaagctgggtatggtgtctcacacctgtagtcctggcttctcaggaggctgaggtgggaggattgcttgagcccaggaggtcgaggctgcagtgagttgtgatcacagcctaggcgacagaaggagaccctgtctccaaaaaaaaaaaaaaaaaaaagcacctgtttatgacaaactcagctttctgggtgacatagatggttgtatgtaggtaacagggtggtttcacggatggcagattcattttagaaattgtaaaatggctagcagttttcagaacaagagattagttagaaaaggaaagtggcagctgtttgttttctgcagggcctgtcgggaagcctctggtttcttttcatccgtgaggagtggggaggaggcctcttcaggaagagcagtttatttttgtgaaaggaatacttactgatttcaaacatttggaactaaactggaacgtatttttctttccgatttctgcgtttttgaggtgtgtgtaaacccaccagcgcagcagctgggagggcccttcaaaggtgggcgggtggggtgagtgaggcccaggggatagagtgtttgcccagatttgaatctcatttggggaaagtttcagaggcttgggtggctgattgatcattccttcaatggtccttcatcagcacgtctttactgagcacgtgctgtgtgctgttctaggcgctgaaggatagaagtgaagggttcccccctcgtggagcttaggttccagcaataagcaaaacatgccctgcagcgaaaggcttctgggctgccggcgacattttcccaacgttcacaaccgggttccttccggacgcccgtctctagggacgcactcccgcctttggcagggccgctgcccggcggagtctcgcgaggatcttgtgacttatcgcggcatcgcccagcggttgccgggaaacggcgtggcttccgggggcgggcgccctggtcccggagtcgccgctgggcctgtccgctggcgtcatggtgagcaggggcgggagcggggctggggtcctcggcaggggcccggagacctcggggcagggaggcctcggtacacggagaccctgggaatgggaggcctggagcgctgggtttctggaattgagagctcggtgctcttgtgggggtctccgtggggcaaactcaggatgctcccggccccggggcctggcagcactcgggactgagacctgggctgtccagagccctgtgctcacaggggtggtcatagaacgcccagggcccggggtcggcggcgcacggtccccagaagagtgaacatgcgtcaaggggactctcatcctggaatggcagactcggtctgttggatccctgggacctagggtttcagctcacgaggctttgcagagcaccagggtccccatggaatagagccggaggcaggaattaccctaagacctttggtctcccggatggagagcctggggcacaccagagtggctagagatccctctacaccaaggaggcccggacaggtccagtgcccttggagtgcccagggcacaaccttgggatacaggaaccactgttcccttggaaagcctggcaggagtcaggcccagaccgagaagaggaaggcggagctcgtggcctcatcagctccatgtctgtctttctcttgtaaagggctctccctttgtggtacaggaattgtcagtaactcaatttctgggcaggtgtggcagggtgggtttcagctggtggggggaggaaagctctgggagccccaccaagtccctgcagctggctgtgaaggtcccaaatgctaagtaatgctgaaccttcctccactgccttcagggctttgtgatgaggtagccttcttggagtggagggattaaaaagagagcagtacattacgaattaaatttaagtagatgggttttctgacccaggaagggtcttctgaaaaccgactatgaaagaaactaccaaactaggccaggagtctgggcgcggtggctcacgcctgtaatcccatcactttgggaggccgaggcaggcggatcatgaggtcaggagatccagaccatcctggccaacatggtgaaaatccatatctattaaacatacaaaaattagctgggtgtggtggcgtgtgcctgtagttccagctactcgggaggctgaggcaggagaatcacttggacctgggaggcggaggttgcagcgagccgagatcgcaccaccgcactccagcctggcaacacgtctcttaaaaaaaaaaaaaaaaagcagggtgtagtggctgacgcctgtaaacccagcactttaggagtccaaggtgggtggatcacttgaggccaggagttggagaccagcctggccaacatggtgaaaccctgtctttactaaaaatacacacacacacacactcacacacacacacacacaaaattagccgggtgtggtggtacgcacctatagtcccagctacttgggaggctgaggcaggagaatttcttgaacctggaaggtagaggttgtgtagtgggatttttaaggaattagagagaccgatggggttcaggaggatatttattaattatttaggtgcaccggcccagtcagattaaaatccaaaggactgagccctgaacaaagagttaagttaccttttaagcttttcgtggggcagagggagatctgtgcagggggaagcatgcttcagatgtgagaaataaaggcagttgttcagttgaaacatgcattacatcatttcttactttttaaggaaaaacatgttttgcgacttgagtttatctgcctagtgaccttgcagccgcacagctacagaatcagggtcttcacaatgcctgggaagggaggagagacaaggctcactagccgcagaaaaacaggcagttaatttttaaaggactccagctctttctctttttcagggggagttgggttttcttatatataactgagtttctgcttacacactttttaatttcttttaattcctgttccagttgcagtgagccaggattgcaccactgcactccagcctgggtgacagagcaagactccatctcaaaaaaaacaaaaacaaaaacaaaaaacaaaaaaatgcaacagcaaacacaacagcaaacactaaacacaaccaaactacttctgtttctgttaggttgtgggaatatgggccttggtctgttggatccttggaccaaggaatatgggtgatatttctgttttcttctcatcagtgttttctaaaatttccacataatattttctctctctctttttttttttttttttgaggtagagtcttaccctgtcacccaggctggagtgcagtggcatgatcttggctcactgcaacctctgccacctgggttcaagcgattctcctgcctcggcctcccgagtacctgggactacaggtgcccgccaccacgcctggctaatttttttgtatttttagtagagacagggtttcaccatgttggccaggctggtcttgaactgctgacctcaagtgatccgcccgcctcagcctcccaaagtgctgggatgacaggtgtgagccactgtgcctggctccacctaatgttttcattcaggactaaatgaaacataaatgaagataaatgggccagtcgcggtggctcacgcctgtaatcccagcactttgggaggcttaggtgggcagatcacgggtcaggagttcgagtacagcctggccaacatagtgaaaccccgtctctactaaaaatacaaaaaattagccggacgtggtggtgggcacctgtaatcccagctactcaggaggctgaggcaggagaatggcttgaatccgggaggcggaggttgcagtgagctgagatcgcaccattgcactccagcctgggcaacagagcaagactctgtctcaaaaaaaaaaaaaaaaaaaaaaaagagagttcaagaccagcctggccaacatggtgaaacctcgtctctactaaaatacaaaaaaaaattagccaggcgtggtggcgggcacctgtagtcccagctcctcgtggaggctgaggcaggagaattgtttgaacccaagaggtggaggttgcagtgagccaaggcagcctggatgacgagggagactccatctcaaaaaaaaaaaaaaaaagataaatggatttaggttttaatgtttttaaaaaataaataaaatttccacatgaaatttgtaattttaaaaacgttacatagctgggcacagcagcagtgaactcctgtggtcccagctccttgggaggctgaggtgggagtatcagttgagcccaggaattggagtctgcagtgagctatgtgatcacaccactgcactccagcttgggcgacagagcaagactttgtctttaaaaaaggttaccgagacatgtagacacagaaaagcatgggctgaagactactgggagtagcaaagtcagcaggataggatatggaaatttgttacctgcttgagtgccctgtaaatgggtggccagacagaactgctcctggtgtcatgcgtggtttcagcaacttccacaagggggtggggttagaaggttctctcccatccttgtcaaagttgctaaaaccacgcacgacgccatgtgcagttccgtctggcagcccatttacagggctctcgtggtgggtgctgtctgcccaagctttcttgaccaggcttctctgaaggaagtttctctttgaaagaaaggaaacttgtggttgtcacaaccgatcgtggttatggaggcatttctccctaagcttactgaatggtgtcttgcaggtcttttccatggtggtcaccaatgttgccgccagcatggtaacatttggcagtgtggtattgagggtctttcctctgttttgcatccacagcagaggtctttactttttaccaaggagtgagtgggtttggaatgggttcccccctctcttagtttttggagacggggtctcgttctactgcccaggctggagtgcggtggtgcaccatagctcactgcagccttaaacttctaggctcaagtgattgtcctgccttggcctcccaaagtgctgggatgacacgtgtgagccactgcgcctggtcaccgtataccaaggaatgagtgggtttggaatgagttccctctcttttctttttttttttttttaagttacagtttgctttttgagatggagtctcactttgttgcccaggctggagtgcaatggtgggatcttggctcactgcagcctctgcctcccgggttcaagcgattcttctgcctcagcctcccgagtaactgggactataggcacacaccagcacacctggctaggtttcctctcttttttttttttttgagatggagtctcactctgtcgtcctggctggagtgcagtggtgtgatctcggctcactgcaaactccatgccccaggttcaagccattctcctgcctcagcctcccgagtagctgggactacaggcgcccaccggcacgcccggctaatttttttttgtatttttagtagagatggggtttcactgtgttagccgggatggtcttgatctcctgacctcgtgatccgtccacctcggcctcccaaagtgctgggattacaggcgtgagccaccacgcccggctcctctcttttctagaaggaatgttctccttctcaaaaggaaggtttctcctttgtgcttctccaaatgcaacaacaggatgtgtgtgtggtaaagggtgggaacactcagggcaatgatgtgctccaggtgagcagaagggagagaggttccagaaccttctctgccaaatgttcctgggagcaaatcagagccagccaagaaggggaagctgttagagtctctcttaccccattatttccaccaaaggcaccgaaaaagaaagggaagaaaggcaaagccaaaggcaccccgattgtcgatgggctcgctccagaggacatgagcaaggagcaggtgagcagagcgggctgtggcccagtccccgggtgggcgtgggcgggcaccacgcagggtgcctacgccgagtgtccatcttgccatgtggatccacccttctgtccaagccagaacacgccccccgcgtggcccataattcccatcagcggcaaagctttcggctgcaccatgtcttttcagaaaggtagtgcagcctgtgaaagagctttgtaacagggtggtaggagtgtggaaggacatgcttttctgatctaaaagctgtttttaatttcgtgtattctctttcaatcttaccctttttttgcacctgatgtgtatagacttatcgtagaacacacatgtagcattctcctttattttattcaccattaaacattatgtcaaaaaggaagtttttgaaagaaggatgatttacttcaaatcacatctgaatctgattaatcgttcatttttttttttttttttttttttttttttgagacggagtctcactctgtcgcccaggctggagtgcagtggcgcgatctcggctcactgtgagctccacctcccgggttcacaccattctcctgcctcagcctcccgagtagctgggactacaggcacctgccaccacgcctggctaattttttttttgtatttttagtagagacggggtttcaccgtgttagccaggatggtctcgatctcctgacctcgtgatccactcgcctcggcctcccaaagtgctgggattacaggcatgagccaccacgcctggccagtcattcattgtttttgataaaagtcccaacaaggagtaacagcatcagggctgcctttttcttgttgcttattttggggaggaggtgatgtttttatagtttctttgtaggagttagtttaagtctcttcttcatttggatgtagttaagggctacagaacataattacataattacaattttacctaaaaggctcctggagacggcagtgtgtggcaagcacggtgcaccctctggcctctgccctcatggacgactgcctgtgagcacctgacatgggacatgagggctgtgtcaactctgtgttattgttaataaatcttaccttcttttgatagttgtaagataaaaaatcaatacgaaggagactgaaagagtctcatgacctgaagttggagctaggcagaggtccttgaacaatggtaaagaatggctttattttacatgcaggcaaaccattggcagtttaagccagtggctaagcagagaggtgatggggtcaggtttgtgttctggaaagatgtctggagctgctggatggagaatggattgaacactgcgttgtcccagcatgtgagctgctgcccgtctccctgtccgcttcccattcctgtggagacaggccttgtggggcagtggccatggagcctacggggcagcctacggggcaggctacggggcagcttacggggcaggctatggggcagcctacggggcaggctacggggcaggcccttgcactgcacatcgcacgttgagccacagactcagaaggcttcttcagggtccaggcaggtggggagggatgggggtgacctggagactcctgccccgcagcagaggacagtttcatctgttcactggggagtgccttgtgggcctaggagttcagtgctgtttttttctgattttccaagagaagctggaaatctggatatttataagaaatctgaatattgagtgatggcaaaatctcaacaccatgtgagccaaacagaccagtcaggagccctggttcaggctctgcccaggagcctctaaaggtctgtgacgtgaagacatttgtcgttgtgccgaggcactggttggattcgggggtgcgtgtctccctcatgtctgcccggcatcctcggctcagaacccctcctgctgctccttcttgtttgctcgttgtcttgtcttcttttgaggtgagaaatgtgttttccctgtggggaatgtggtgttgagaaagaaaaaggctcacagtaagtggcctggggctgtgcccgaaaagtaactgattctgacggaatctcgctgtgtggcccaggctggagtgcggtggcgcgacctcggctcactgcaagctccacctcctgggttcacaccatcctgctgcttcaggctgcccagtagctgggactgcaggtgcctgccatcacgcccggctaatttttttgtatttttagtagagacgaggtttcaccgtgttagccaggatggccttgatctcctgacctcatgatctgcctgtctctgcctcccaaagtgctgggattacaggtgtgagccaccgcgcctggcagtaactgattcttaagggaaatgagctcccgagaaagctggaagcctgtcctacatttttttttaacctatttgcagattcgcaattgaaccctcttgagattttagagtctactggttttgtatattttttgcttaacattatatcttcaaaggtgaattttttttcatttagcattatgatatgaatttgtttaaatgctgctacatcatttgcatattttttttgggttaatgtgatatttctcctagttgatatactctaatttttcaaccatttccatatttatttatttattgtttagagacagggtcctgctctgtcacccaggtggagtgcagtggtgtgatcacggctcacggcagccttgacctcccaggtccaaacgatcctcctacctcagtcttctgagtagctgggactataggcatgtgccaccactcctggctaatttttttttttttttttttttgtagagacagggttttgccatgttgcctaggctgttcaactctggggctcaaaagatcctcccaaagtggtgggagccaccatgcctggctgtttgtgtattttttgagacagattctcactctgtcacccaggctggagtgtagtggcatgatcataactaaccgcagcctcaaccccctgagcttgagtgaccctcccacctcagctctcccagtagctgagactataggtgcgtgccatcatgcctagttaatgaaaaaaagtttttgcagagatggggtcttgctatgttgcccaagctggtcttcagctcctgggcgcgagggatccttcaacctcagcctcccagagtgctggggttgcaggcgagagccaccgcgcctcgcttatttccctgtttaaactggtcttaggttatttcctttttgatatttttgctgttgtaataatggtgtgggtaatatctttgagcaagatgctcttatatttcttttgagaaattttttaggcatcaattctcaggaatggatgaaaggatctagttattttatgattattggccaaattgaagagaattctgccacctgctgaatgcattctgtctccggagcttcctagccttatattttaactttttacatttagctgtttatttttaggtgaagttgagtcctccctctttcttccttgcctttcgccggccacacgccccgttgccgtgcatgggcccctgctcagtgcctcacctgacccactgcacctggccaggtggaggagcatgtcagccgcatccgggaggagctggaccgcgagcgggaggaacgaaactacttccagctggagcgggacaagatccacaccttctgggagatcacacggaggcagctggaggagaagaaggctgagctgcggaacaaagaccgggagatggaagaagccgaggagaggcaccaggtggagatcaaggtg

SEQ ID NO: 12113 - DNA, 341 bp, Homo sapiens
ggcggccgcgcccgctggcgtcctcttgttctcttccaggcaccgaaaaagaaagggaagaaaggcaaagccaaaggcaccccgattgtcgatgggctcgctccagaggacatgagcaaggagcagctgtttatttttaggtggaggagcatgtcagccgcatccgggaggagctggaccgcgagcgggaggaacgaaactacttccagctggagcgggacaagatccacaccttctgggagatcacacggaggcagctggaggagaagaaggctgagctgcggaacaaagaccgggagatggaagaagccgaggagaggcaccaggtggagatcaaggtg

SEQ ID NO: 12114 - DNA, 13200 bp, Homo sapiens
ccccggccgggcgtccggggctcctgcgcactcacttggcggccgcgcccgctggcgtcctcttgttctcttccaggtacttgcgtgtggggcgccgactgtgtgcgggcgcccctcggggctggcgaggggcacaggaggggcctgactcgcgctgggtaatgacagactcacagagcgccctggatggcgcgaattaacgcggggggcgggtgggggcgagggcgtgtgcttgggaggctggaaggggcgggatgggggatgggaggtaaggagagggcggcgggcccgggctgcagagagcgccaaggcagtttcgatgaaactgacccccatgtccctatcgcccagattcagcgattgccagctcctggcctgggccactgcttctctgtcctcattcacttccctccactgctgggtcattttgaagcaaattatatacacattagatcattgcatttgtaagtacttcaatatttatctctcaaagaaagtccgtttgcaggagcattgactcatgcctgtaatcccagccctttgggaggctgaggtgggagcacagcttgagctcaggagtccaaggctgccgtgagctatgattgtatgtctcaaaaaaaaaaaagaaaagaaaagaaaagaaaaagtctagtcttcataaacactcttgttaacccagcatccaggccttcactgagttgatgccgtggcctgaggcggtttacctggtggatagtgggtggcaggaagcatcagacatcagacagagggcagtcggtttgtttgtattaacatttgctctgggattttgcaggaaactcagatgccatttatctgggtttctgagctgcacagcttgacactgaatgaaagtatcttaagccacatatgtgaagaaaaggctcttttctaaaaatctgaactcgaattcaatatgaaaagaacaggtcgcagtgggccctgtcgggatcccagggagccgcaattcagggctccctgaatgattcatctctgcagcccacaccgacagaccaggattgctcttagcttgtgaaaaatgagtaccctgtctaggctatcctgagctaaccctcctattcttgccctttttgctgaaaggaattattgttaatacagctatttaattcaggacactcatccagacttctgaagcaaaaagccaatcagcatgaagctgctagcatattggttttgtgaagtaagtgttaaattataataattacccccactgtgctctccagcgtcactgtctgaccaccctgtcccagggggaggaggcccctctcaggccaagggagtctggcacagtgatgctggctcctggttgcccaggcacagtgaccagccagacttcacagaggcctcagggcttactataaataaatcactgctttgtgcaagctgagccaatgcagttcttccaactggctgctcctctccaagaacaatcaggacttaggtgggcaaacaggaagtctctcatcacagtggttctcagattcccaccactgtgtgggtgcctgaggcctgagcaaacccagctcatgtggcaacttcctcccccagctggacaggaagacctaggtccaccaggccttctttcatttctcacactttgcccccagcacaactttctacgagcatggattctgtactcttcatccccagacacatgggagaacaagatctgctacaagaccttttctttttttttttgagacagggtctcaggtctcattctgttacctaggctggagtgaagtggtgtgatcttggctcactgcaacctccacctccagggctcaaacgattctcccacctcaacctcccaagtagatgaccactttttaagaagatgttaaagatgagagcttagggctgggcgtggggctcacgtgctcccagcactttgggaggccgaggcaggaggatcacttgaggccaggagtttgagaccactctgggcaataaagcaagaccccgtctctattaaaaacttaaaaaaaaaagctgggtatggtgtctcacacctgtagtcctggcttctcaggaggctgaggtgggaggattgcttgagcccaggaggtcgaggctgcagtgagttgtgatcacagcctaggcgacagaaggagaccctgtctccaaaaaaaaaaaaaaaaaaaagcacctgtttatgacaaactcagctttctgggtgacatagatggttgtatgtaggtaacagggtggtttcacggatggcagattcattttagaaattgtaaaatggctagcagttttcagaacaagagattagttagaaaaggaaagtggcagctgtttgttttctgcagggcctgtcgggaagcctctggtttcttttcatccgtgaggagtggggaggaggcctcttcaggaagagcagtttatttttgtgaaaggaatacttactgatttcaaacatttggaactaaactggaacgtatttttctttccgatttctgcgtttttgaggtgtgtgtaaacccaccagcgcagcagctgggagggcccttcaaaggtgggcgggtggggtgagtgaggcccaggggatagagtgtttgcccagatttgaatctcatttggggaaagtttcagaggcttgggtggctgattgatcattccttcaatggtccttcatcagcacgtctttactgagcacgtgctgtgtgctgttctaggcgctgaaggatagaagtgaagggttcccccctcgtggagcttaggttccagcaataagcaaaacatgccctgcagcgaaaggcttctgggctgccggcgacattttcccaacgttcacaaccgggttccttccggacgcccgtctctagggacgcactcccgcctttggcagggccgctgcccggcggagtctcgcgaggatcttgtgacttatcgcggcatcgcccagcggttgccgggaaacggcgtggcttccgggggcgggcgccctggtcccggagtcgccgctgggcctgtccgctggcgtcatggtgagcaggggcgggagcggggctggggtcctcggcaggggcccggagacctcggggcagggaggcctcggtacacggagaccctgggaatgggaggcctggagcgctgggtttctggaattgagagctcggtgctcttgtgggggtctccgtggggcaaactcaggatgctcccggccccggggcctggcagcactcgggactgagacctgggctgtccagagccctgtgctcacaggggtggtcatagaacgcccagggcccggggtcggcggcgcacggtccccagaagagtgaacatgcgtcaaggggactctcatcctggaatggcagactcggtctgttggatccctgggacctagggtttcagctcacgaggctttgcagagcaccagggtccccatggaatagagccggaggcaggaattaccctaagacctttggtctcccggatggagagcctggggcacaccagagtggctagagatccctctacaccaaggaggcccggacaggtccagtgcccttggagtgcccagggcacaaccttgggatacaggaaccactgttcccttggaaagcctggcaggagtcaggcccagaccgagaagaggaaggcggagctcgtggcctcatcagctccatgtctgtctttctcttgtaaagggctctccctttgtggtacaggaattgtcagtaactcaatttctgggcaggtgtggcagggtgggtttcagctggtggggggaggaaagctctgggagccccaccaagtccctgcagctggctgtgaaggtcccaaatgctaagtaatgctgaaccttcctccactgccttcagggctttgtgatgaggtagccttcttggagtggagggattaaaaagagagcagtacattacgaattaaatttaagtagatgggttttctgacccaggaagggtcttctgaaaaccgactatgaaagaaactaccaaactaggccaggagtctgggcgcggtggctcacgcctgtaatcccatcactttgggaggccgaggcaggcggatcatgaggtcaggagatccagaccatcctggccaacatggtgaaaatccatatctattaaacatacaaaaattagctgggtgtggtggcgtgtgcctgtagttccagctactcgggaggctgaggcaggagaatcacttggacctgggaggcggaggttgcagcgagccgagatcgcaccaccgcactccagcctggcaacacgtctcttaaaaaaaaaaaaaaaaagcagggtgtagtggctgacgcctgtaaacccagcactttaggagtccaaggtgggtggatcacttgaggccaggagttggagaccagcctggccaacatggtgaaaccctgtctttactaaaaatacacacacacacacactcacacacacacacacacaaaattagccgggtgtggtggtacgcacctatagtcccagctacttgggaggctgaggcaggagaatttcttgaacctggaaggtagaggttgtgtagtgggatttttaaggaattagagagaccgatggggttcaggaggatatttattaattatttaggtgcaccggcccagtcagattaaaatccaaaggactgagccctgaacaaagagttaagttaccttttaagcttttcgtggggcagagggagatctgtgcagggggaagcatgcttcagatgtgagaaataaaggcagttgttcagttgaaacatgcattacatcatttcttactttttaaggaaaaacatgttttgcgacttgagtttatctgcctagtgaccttgcagccgcacagctacagaatcagggtcttcacaatgcctgggaagggaggagagacaaggctcactagccgcagaaaaacaggcagttaatttttaaaggactccagctctttctctttttcagggggagttgggttttcttatatataactgagtttctgcttacacactttttaatttcttttaattcctgttccagttgcagtgagccaggattgcaccactgcactccagcctgggtgacagagcaagactccatctcaaaaaaaacaaaaacaaaaacaaaaaacaaaaaaatgcaacagcaaacacaacagcaaacactaaacacaaccaaactacttctgtttctgttaggttgtgggaatatgggccttggtctgttggatccttggaccaaggaatatgggtgatatttctgttttcttctcatcagtgttttctaaaatttccacataatattttctctctctctttttttttttttttttgaggtagagtcttaccctgtcacccaggctggagtgcagtggcatgatcttggctcactgcaacctctgccacctgggttcaagcgattctcctgcctcggcctcccgagtacctgggactacaggtgcccgccaccacgcctggctaatttttttgtatttttagtagagacagggtttcaccatgttggccaggctggtcttgaactgctgacctcaagtgatccgcccgcctcagcctcccaaagtgctgggatgacaggtgtgagccactgtgcctggctccacctaatgttttcattcaggactaaatgaaacataaatgaagataaatgggccagtcgcggtggctcacgcctgtaatcccagcactttgggaggcttaggtgggcagatcacgggtcaggagttcgagtacagcctggccaacatagtgaaaccccgtctctactaaaaatacaaaaaattagccggacgtggtggtgggcacctgtaatcccagctactcaggaggctgaggcaggagaatggcttgaatccgggaggcggaggttgcagtgagctgagatcgcaccattgcactccagcctgggcaacagagcaagactctgtctcaaaaaaaaaaaaaaaaaaaaaaaagagagttcaagaccagcctggccaacatggtgaaacctcgtctctactaaaatacaaaaaaaaattagccaggcgtggtggcgggcacctgtagtcccagctcctcgtggaggctgaggcaggagaattgtttgaacccaagaggtggaggttgcagtgagccaaggcagcctggatgacgagggagactccatctcaaaaaaaaaaaaaaaaagataaatggatttaggttttaatgtttttaaaaaataaataaaatttccacatgaaatttgtaattttaaaaacgttacatagctgggcacagcagcagtgaactcctgtggtcccagctccttgggaggctgaggtgggagtatcagttgagcccaggaattggagtctgcagtgagctatgtgatcacaccactgcactccagcttgggcgacagagcaagactttgtctttaaaaaaggttaccgagacatgtagacacagaaaagcatgggctgaagactactgggagtagcaaagtcagcaggataggatatggaaatttgttacctgcttgagtgccctgtaaatgggtggccagacagaactgctcctggtgtcatgcgtggtttcagcaacttccacaagggggtggggttagaaggttctctcccatccttgtcaaagttgctaaaaccacgcacgacgccatgtgcagttccgtctggcagcccatttacagggctctcgtggtgggtgctgtctgcccaagctttcttgaccaggcttctctgaaggaagtttctctttgaaagaaaggaaacttgtggttgtcacaaccgatcgtggttatggaggcatttctccctaagcttactgaatggtgtcttgcaggtcttttccatggtggtcaccaatgttgccgccagcatggtaacatttggcagtgtggtattgagggtctttcctctgttttgcatccacagcagaggtctttactttttaccaaggagtgagtgggtttggaatgggttcccccctctcttagtttttggagacggggtctcgttctactgcccaggctggagtgcggtggtgcaccatagctcactgcagccttaaacttctaggctcaagtgattgtcctgccttggcctcccaaagtgctgggatgacacgtgtgagccactgcgcctggtcaccgtataccaaggaatgagtgggtttggaatgagttccctctcttttctttttttttttttttaagttacagtttgctttttgagatggagtctcactttgttgcccaggctggagtgcaatggtgggatcttggctcactgcagcctctgcctcccgggttcaagcgattcttctgcctcagcctcccgagtaactgggactataggcacacaccagcacacctggctaggtttcctctcttttttttttttttgagatggagtctcactctgtcgtcctggctggagtgcagtggtgtgatctcggctcactgcaaactccatgccccaggttcaagccattctcctgcctcagcctcccgagtagctgggactacaggcgcccaccggcacgcccggctaatttttttttgtatttttagtagagatggggtttcactgtgttagccgggatggtcttgatctcctgacctcgtgatccgtccacctcggcctcccaaagtgctgggattacaggcgtgagccaccacgcccggctcctctcttttctagaaggaatgttctccttctcaaaaggaaggtttctcctttgtgcttctccaaatgcaacaacaggatgtgtgtgtggtaaagggtgggaacactcagggcaatgatgtgctccaggtgagcagaagggagagaggttccagaaccttctctgccaaatgttcctgggagcaaatcagagccagccaagaaggggaagctgttagagtctctcttaccccattatttccaccaaaggcaccgaaaaagaaagggaagaaaggcaaagccaaaggcaccccgattgtcgatgggctcgctccagaggacatgagcaaggagcaggtgagcagagcgggctgtggcccagtccccgggtgggcgtgggcgggcaccacgcagggtgcctacgccgagtgtccatcttgccatgtggatccacccttctgtccaagccagaacacgccccccgcgtggcccataattcccatcagcggcaaagctttcggctgcaccatgtcttttcagaaaggtagtgcagcctgtgaaagagctttgtaacagggtggtaggagtgtggaaggacatgcttttctgatctaaaagctgtttttaatttcgtgtattctctttcaatcttaccctttttttgcacctgatgtgtatagacttatcgtagaacacacatgtagcattctcctttattttattcaccattaaacattatgtcaaaaaggaagtttttgaaagaaggatgatttacttcaaatcacatctgaatctgattaatcgttcatttttttttttttttttttttttttttttgagacggagtctcactctgtcgcccaggctggagtgcagtggcgcgatctcggctcactgtgagctccacctcccgggttcacaccattctcctgcctcagcctcccgagtagctgggactacaggcacctgccaccacgcctggctaattttttttttgtatttttagtagagacggggtttcaccgtgttagccaggatggtctcgatctcctgacctcgtgatccactcgcctcggcctcccaaagtgctgggattacaggcatgagccaccacgcctggccagtcattcattgtttttgataaaagtcccaacaaggagtaacagcatcagggctgcctttttcttgttgcttattttggggaggaggtgatgtttttatagtttctttgtaggagttagtttaagtctcttcttcatttggatgtagttaagggctacagaacataattacataattacaattttacctaaaaggctcctggagacggcagtgtgtggcaagcacggtgcaccctctggcctctgccctcatggacgactgcctgtgagcacctgacatgggacatgagggctgtgtcaactctgtgttattgttaataaatcttaccttcttttgatagttgtaagataaaaaatcaatacgaaggagactgaaagagtctcatgacctgaagttggagctaggcagaggtccttgaacaatggtaaagaatggctttattttacatgcaggcaaaccattggcagtttaagccagtggctaagcagagaggtgatggggtcaggtttgtgttctggaaagatgtctggagctgctggatggagaatggattgaacactgcgttgtcccagcatgtgagctgctgcccgtctccctgtccgcttcccattcctgtggagacaggccttgtggggcagtggccatggagcctacggggcagcctacggggcaggctacggggcagcttacggggcaggctatggggcagcctacggggcaggctacggggcaggcccttgcactgcacatcgcacgttgagccacagactcagaaggcttcttcagggtccaggcaggtggggagggatgggggtgacctggagactcctgccccgcagcagaggacagtttcatctgttcactggggagtgccttgtgggcctaggagttcagtgctgtttttttctgattttccaagagaagctggaaatctggatatttataagaaatctgaatattgagtgatggcaaaatctcaacaccatgtgagccaaacagaccagtcaggagccctggttcaggctctgcccaggagcctctaaaggtctgtgacgtgaagacatttgtcgttgtgccgaggcactggttggattcgggggtgcgtgtctccctcatgtctgcccggcatcctcggctcagaacccctcctgctgctccttcttgtttgctcgttgtcttgtcttcttttgaggtgagaaatgtgttttccctgtggggaatgtggtgttgagaaagaaaaaggctcacagtaagtggcctggggctgtgcccgaaaagtaactgattctgacggaatctcgctgtgtggcccaggctggagtgcggtggcgcgacctcggctcactgcaagctccacctcctgggttcacaccatcctgctgcttcaggctgcccagtagctgggactgcaggtgcctgccatcacgcccggctaatttttttgtatttttagtagagacgaggtttcaccgtgttagccaggatggccttgatctcctgacctcatgatctgcctgtctctgcctcccaaagtgctgggattacaggtgtgagccaccgcgcctggcagtaactgattcttaagggaaatgagctcccgagaaagctggaagcctgtcctacatttttttttaacctatttgcagattcgcaattgaaccctcttgagattttagagtctactggttttgtatattttttgcttaacattatatcttcaaaggtgaattttttttcatttagcattatgatatgaatttgtttaaatgctgctacatcatttgcatattttttttgggttaatgtgatatttctcctagttgatatactctaatttttcaaccatttccatatttatttatttattgtttagagacagggtcctgctctgtcacccaggtggagtgcagtggtgtgatcacggctcacggcagccttgacctcccaggtccaaacgatcctcctacctcagtcttctgagtagctgggactataggcatgtgccaccactcctggctaatttttttttttttttttttttgtagagacagggttttgccatgttgcctaggctgttcaactctggggctcaaaagatcctcccaaagtggtgggagccaccatgcctggctgtttgtgtattttttgagacagattctcactctgtcacccaggctggagtgtagtggcatgatcataactaaccgcagcctcaaccccctgagcttgagtgaccctcccacctcagctctcccagtagctgagactataggtgcgtgccatcatgcctagttaatgaaaaaaagtttttgcagagatggggtcttgctatgttgcccaagctggtcttcagctcctgggcgcgagggatccttcaacctcagcctcccagagtgctggggttgcaggcgagagccaccgcgcctcgcttatttccctgtttaaactggtcttaggttatttcctttttgatatttttgctgttgtaataatggtgtgggtaatatctttgagcaagatgctcttatatttcttttgagaaattttttaggcatcaattctcaggaatggatgaaaggatctagttattttatgattattggccaaattgaagagaattctgccacctgctgaatgcattctgtctccggagcttcctagccttatattttaactttttacatttagctgtttatttttaggtgaagttgagtcctccctctttcttccttgcctttcgccggccacacgccccgttgccgtgcatgggcccctgctcagtgcctcacctgacccactgcacctggccaggtggaggagcatgtcagccgcatccgggaggagctggaccgcgagcgggaggaacgaaactacttccagctggagcgggacaagatccacaccttctgggagatcacacggaggcagctggaggagaagaaggctgagctgcggaacaaagaccgggagatggaagaagccgaggagaggcaccaggtggagatcaaggtgagtggggccggcctgcacgtgctaacctggtcaccacagagccccagaggagctggatccagtgagggtgcaggtgggacattttctgttcttggctttgggagtcacagccttaaaggtgttttttataaaagcctgagggagagaccctgcaggtcctgagggtttaaaatgctgcctccacaacatggaaggaatatgggctctgggggcagactggcctgtttgcaactcagctctgccacttaataccccatgagctggggatgcacctcacctcccagccttggtgtcctgctctgtgcctcaagtgtacaggtttgcataggtgaacaggcatgtgtagctgtgtaaaggtgaggcatgcaagtgagcaggtggatgcaagtgagcatgtgtgtgcaggtgaggaggcgtggccaggtgaggaggtatgtgcaggtgaggtgtggggaggtgagcacgtggggcaggtatgtgcaggtgagcaggtaggtgcaagtgaccaggtgtctacaggtatgtacaggtgaggaggtgtagtacaggtgtagtgcaggcgaccaggtgtgtacgggaatttacaggtgaggaggtgtacaggtgaccaggtgtgtacaggtatggacaggtgagaaggtgtggtacaggtgtggtgcaggtgagcaggggggtacaggtatgtacaggtgaggtgtgttacaggtacggtgcaggtgatcaggtgtatacaggaatgtacaagtgaggaggtgtggtacaggtgaccaggtgtgtacaggtatggacaggtgaggaggtgtggtacaggtgtggtgtgggtgagcaggagtgtacaggtatgtacaggtgaggaggtgtggtacaggtgaccaggtgtgtacgggtacggacaggtgaggaggtgtggtacaggtgtggtatgggtgaccaggtgtgtacaggtatggacaggtgaggaggtgtggtacaggtgaccaggtgtgtacgggtacggacaggtgaggaggtgtggtgcaggtgtggtatgggtgaccaggtgtgtacaggtatggatggacaggtaaggaggtgtggtacaggtgaccaggtgtgtacaggtatggacaggtgaggaggtgtggtacaggtgtgctatgggtgaccaggtgtgcacaggtacggaaaggtgaggaggtgtggtgcaggtgagcagatggtactcccattgccctgcaggtgtacaagcagaaagtgaagcacctgctatatgagcaccagaacaacctgacagagatgaaggctgagggcactgtagtcatgaagctggcacagaaagagcaccgcatacaggagagtgtgctgcgcaaggacatgcgggcactgaaggtggagctcaaggagcaggagctgg

SEQ ID NO: 12115 - DNA, 659 bp, Homo sapiens
ccccggccgggcgtccggggctcctgcgcactcacttggcggccgcgcccgctggcgtcctcttgttctcttccaggcaccgaaaaagaaagggaagaaaggcaaagccaaaggcaccccgattgtcgatgggctcgctccagaggacatgagcaaggagcagctgtttatttttaggtgaagttgagtcctccctctttcttccttgcctttcgccggccacacgccccgttgccgtgcatgggcccctgctcagtgcctcacctgacccactgcacctggccaggtggaggagcatgtcagccgcatccgggaggagctggaccgcgagcgggaggaacgaaactacttccagctggagcgggacaagatccacaccttctgggagatcacacggaggcagctggaggagaagaaggctgagctgcggaacaaagaccgggagatggaagaagccgaggagaggcaccaggtggagatcaaggtgtacaagcagaaagtgaagcacctgctatatgagcaccagaacaacctgacagagatgaaggctgagggcactgtagtcatgaagctggcacagaaagagcaccgcatacaggagagtgtgctgcgcaaggacatgcgggcactgaaggtggagctcaaggagcaggagctgg

SEQ ID NO: 12116 - DNA, 4314 bp, Homo sapiens
ctgagtgtgagcatcagcagaaaaactcagtctaaacccctttgttcttctcttgcagagcttttgcctgcaaggctgttctgaccacagtgggcgttttgggcccgtttacaggctccatgttctgtagccgtaggggcaccacgtcttcctctgctaagctgctgtttgctgctgcctttcagaaattgaggccaagtatgataagaagatgaagatgctgagggacgaactcgacttgcggagaaagactgagctccacgaagtggaggagaggaagaatggccagatccacacgctgatgcagcgccacgaggaggccttcaccgacattaagaactactacaacgacatcaccctcaacaacctggccctcatcaactccctcaaggtgctgtgcgtgggctgggctggggaggcacactctgcctgtcctagaatgtgggctgcagagtcctggggatccagaccccagctctccaccccaacacacccagtactttttataagattgtttgacaatgcccctctcatatccttaactgaaattcctaaataacgtaacctatctctacctattgttaaaagcagtcaggatattgccctcaccgtagtgcagagggggaagtaatgaagtgtgttctggtttgtaaaagctcagatggaaccgcagtgagggccgtgatgtggctggagtggataggtgtcatagtcactgcctgcgacaggtggataggtgtcatcgtcactgcatgctggcagtgacaggattttctacagtagacaacggcccttggtggaatcttgaacaaagtatagtccttcagtctgcatggaagctgcattcccagaaaactcagaataagttgaagctgcagaaatactgtttatacatagaagacgtctaggtgccagcatgcctgaggctggcagcagctggtgatgggcaggagagcacccagctctcaccatgcaggccacagcccctttggttctgcctgctgagcccctgccgggcctgtgcttgtgcctgcaggagcagatggaggacatgcggaagaaggaggaccacctggagagggagatggcagaggtgtctgggcagaacaagcgcctggcagaccctctccagaaggctcgggaggagatgagcgagatgcagaaacagctcgcaaactacgagagggacaagcagatcctgcttgtgagtttcccgctggattcctctccctccttggcatgagcttgcctaggctcaggagggaggagcatcacagggaggggcttggcccttagggcaggaagggagacggggaggcctgcatttctcctttctctgcctcgtgttctcctggggaaagtaaagtctgggggtgttttggagacaaggccctcatcttcaccacgtgctaccggccggccttggtgagactcagctgcttgtgtcctggaaccaggtctttctggcgattatttttggccttgccatctcccaggagcccgtgttacttggatgactgtgaatcttgaatactttctgtcccctactccctgtttttcctccagtgcacaaaagcccgtttgaaagtcagggagaaagagctgaaagacctgcagtgggagcatgaagtgttagagcagcgattcaccaaggtgagtggcaccacgctggccctgcagttggcggtgggtgttagagcaacggttcaccaagttcaccaaggtgagcgggcactaggctggccctgcagtggggatggcacccctgctagccagggacggggctctccttgtggcccctggaccagcttcagatgccttggccaggtttctgggttctgaagctggaggccctgttccctgtaactcattccgcagcttctaagaggcaaaaacctgtggcctgttctgcatgcatattctgcagaaggcctggggtcttgatggggaacggatcacacatgactttcgtcccctcgagagctcacctctgaaagcacatgagggaggctcttaagtgtaagtgaagatgagtctccggctgctcagtgctggtcctcacactggcgagttttatgggctcccttccaggtttcctgcatgctctcgtgtggatgtgactttgtatgttacgaacacgggatcaggccataagcacaatttgctttttaatctcacagtgtatcaggctgcacataggaagcggtctcatccttttcacagctgcttggtgctgcgttttgtgaacgtttgatcatttagccgactcccgtctgtttctaatgctctgctgctataagcattgctgcctcaatccttttaaatttgtctttgtgcacttgtgtgagattgcttcttaggaaagccagttcctagcagtgggattgttgagtctgagggttctgttctgaggaccctgatcatctgtccagagggctgctctgagtcacacacctgccagggtgcggaggggccgtttccatcctcacctgcaccagatctgacaggtttaaacctttgcagaagtgactgggtggaaaacatctcatttcgtgggcacttccaagattcgcagtgagtggtaggggtgctcggtcctgtctctgtcccttaaagacgctccttgcctctgttcagtttcaaagttctggccaaggaccaatccctgcagcatgggcccctcaaggctttgtctgtggtgtgcggggccagggcatcttatcttgagccgcagttatatgtgctgttttgttctctaacctaattgaaatttttgaacacaaaccgttgtagtgggattcgcttctcagaaatatcccatctgtctgtcagatctagccccaccttcagagacacctcaggtcctgcacgacgtgcattgctaggctgtgccaactcttggcacctaagggaagggcacctgcaaggtagtcagtgagatcctgaggactgctgtgttagacaaggggcccttccttctccctgtgggttttgaggtggacattattgggaagaggacagcagagacgtgcctgggttggagccttgttttctgtcacattttcttccatttgaatgtggttcctgacagtgtccaagctggtgtctcttcctagagaaccgagagctcaaatttatcagcaaaatttagagaccaaggcagttatttatttatttatttatttatttatttatttatttatttttgagatggagtttcgctcttgttgcccaggctggagtacaatggcacgatctcggctcactgcaacctccacctcctgggttcaagtgatactcctgcctcggcctcccgagtagctgggattacaggcgcctgccaccacgcccggctaatgtttggtatttctgatagagacagggtttcactctgttggccaggctggtctcgaactcctgacctcaggcgatccacccacctcaccctcccaaagtgctgggattacaggcgtgagccaccacacgctgctcagggtgttcacttttttatagtcttcaacaaagtctagatttttttagaatgcacaattaataagtagaagaattaggagataaaaaagaacagttttactggctggcaggtagctggctccaaggccgtgctccagatccaccatttgtggggcggacagcacatgtgatgccaggatctggggctggccaagggagcatatcctccaaggggccccacctgcaagctcggcctgctggatgccctggatctcaaatctcacctgagcccacagccctcactcgggcaagactggcctcggccacccatgaagcagctttcagggtggggctgcttcagctcttaccaggacacttatggcttccagagacaccttcctgagagaagggcttatgctgatgtgttcctcctgccttccactgcgtggatggctctacaaagggccagggcgcaggcagtgtggacaacacactgaccccggtgctgtgggagtgggcactgttgggaggcagcgtgttccaggcaggtgcagaggtgggaggcagcatcttcccagcgagatgtccccaggtgaggggcctcatcgcccacccccagcgctgtccctacaggtgcagcaggagcgggacgagctctatcggaagttcaccgcagccatccaggaggtgcagcagaagacagggttcaagaacctcgtgctagaacgcaagctgcaggctctgagcgccgctgtggagaagaaggaggtgcagttcaacgaggtcctggctgcctctaacctggaccctgcagccctgacgctggtgtcccgcaagctggag

SEQ ID NO: 12117 - DNA, 856 bp, Homo sapiens
ctgagtgtgagcatcagcagaaaaactcagtctaaacccctttgttcttctcttgcagagcttttgcctgcaaggctgttctgaccacagtgggcgttttgggcccgtttacaggctccatgttctgtagccgtaggggcaccacgtcttcctctgctaagctgctgtttgctgctgcctttcagaaattgaggccaagtatgataagaagatgaagatgctgagggacgaactcgacttgcggagaaagactgagctccacgaagtggaggagaggaagaatggccagatccacacgctgatgcagcgccacgaggaggccttcaccgacattaagaactactacaacgacatcaccctcaacaacctggccctcatcaactccctcaaggagcagatggaggacatgcggaagaaggaggaccacctggagagggagatggcagaggtgtctgggcagaacaagcgcctggcagaccctctccagaaggctcgggaggagatgagcgagatgcagaaacagctcgcaaactacgagagggacaagcagatcctgctttgcacaaaagcccgtttgaaagtcagggagaaagagctgaaagacctgcagtgggagcatgaagtgttagagcagcgattcaccaaggtgcagcaggagcgggacgagctctatcggaagttcaccgcagccatccaggaggtgcagcagaagacagggttcaagaacctcgtgctagaacgcaagctgcaggctctgagcgccgctgtggagaagaaggaggtgcagttcaacgaggtcctggctgcctctaacctggaccctgcagccctgacgctggtgtcccgcaagctggag

SEQ ID NO: 12118 - DNA, 15421 bp, Homo sapiens
cgtgaagacatttgtcgttgtgccgaggcactggttggattcgggggtgcgtgtctccctcatgtctgcccggcatcctcggctcagaacccctcctgctgctccttcttgtttgctcgttgtcttgtcttcttttgaggtgagaaatgtgttttccctgtggggaatgtggtgttgagaaagaaaaaggctcacagtaagtggcctggggctgtgcccgaaaagtaactgattctgacggaatctcgctgtgtggcccaggctggagtgcggtggcgcgacctcggctcactgcaagctccacctcctgggttcacaccatcctgctgcttcaggctgcccagtagctgggactgcaggtgcctgccatcacgcccggctaatttttttgtatttttagtagagacgaggtttcaccgtgttagccaggatggccttgatctcctgacctcatgatctgcctgtctctgcctcccaaagtgctgggattacaggtgtgagccaccgcgcctggcagtaactgattcttaagggaaatgagctcccgagaaagctggaagcctgtcctacatttttttttaacctatttgcagattcgcaattgaaccctcttgagattttagagtctactggttttgtatattttttgcttaacattatatcttcaaaggtgaattttttttcatttagcattatgatatgaatttgtttaaatgctgctacatcatttgcatattttttttgggttaatgtgatatttctcctagttgatatactctaatttttcaaccatttccatatttatttatttattgtttagagacagggtcctgctctgtcacccaggtggagtgcagtggtgtgatcacggctcacggcagccttgacctcccaggtccaaacgatcctcctacctcagtcttctgagtagctgggactataggcatgtgccaccactcctggctaatttttttttttttttttttttgtagagacagggttttgccatgttgcctaggctgttcaactctggggctcaaaagatcctcccaaagtggtgggagccaccatgcctggctgtttgtgtattttttgagacagattctcactctgtcacccaggctggagtgtagtggcatgatcataactaaccgcagcctcaaccccctgagcttgagtgaccctcccacctcagctctcccagtagctgagactataggtgcgtgccatcatgcctagttaatgaaaaaaagtttttgcagagatggggtcttgctatgttgcccaagctggtcttcagctcctgggcgcgagggatccttcaacctcagcctcccagagtgctggggttgcaggcgagagccaccgcgcctcgcttatttccctgtttaaactggtcttaggttatttcctttttgatatttttgctgttgtaataatggtgtgggtaatatctttgagcaagatgctcttatatttcttttgagaaattttttaggcatcaattctcaggaatggatgaaaggatctagttattttatgattattggccaaattgaagagaattctgccacctgctgaatgcattctgtctccggagcttcctagccttatattttaactttttacatttagctgtttatttttaggtgaagttgagtcctccctctttcttccttgcctttcgccggccacacgccccgttgccgtgcatgggcccctgctcagtgcctcacctgacccactgcacctggccaggtggaggagcatgtcagccgcatccgggaggagctggaccgcgagcgggaggaacgaaactacttccagctggagcgggacaagatccacaccttctgggagatcacacggaggcagctggaggagaagaaggctgagctgcggaacaaagaccgggagatggaagaagccgaggagaggcaccaggtggagatcaaggtgagtggggccggcctgcacgtgctaacctggtcaccacagagccccagaggagctggatccagtgagggtgcaggtgggacattttctgttcttggctttgggagtcacagccttaaaggtgttttttataaaagcctgagggagagaccctgcaggtcctgagggtttaaaatgctgcctccacaacatggaaggaatatgggctctgggggcagactggcctgtttgcaactcagctctgccacttaataccccatgagctggggatgcacctcacctcccagccttggtgtcctgctctgtgcctcaagtgtacaggtttgcataggtgaacaggcatgtgtagctgtgtaaaggtgaggcatgcaagtgagcaggtggatgcaagtgagcatgtgtgtgcaggtgaggaggcgtggccaggtgaggaggtatgtgcaggtgaggtgtggggaggtgagcacgtggggcaggtatgtgcaggtgagcaggtaggtgcaagtgaccaggtgtctacaggtatgtacaggtgaggaggtgtagtacaggtgtagtgcaggcgaccaggtgtgtacgggaatttacaggtgaggaggtgtacaggtgaccaggtgtgtacaggtatggacaggtgagaaggtgtggtacaggtgtggtgcaggtgagcaggggggtacaggtatgtacaggtgaggtgtgttacaggtacggtgcaggtgatcaggtgtatacaggaatgtacaagtgaggaggtgtggtacaggtgaccaggtgtgtacaggtatggacaggtgaggaggtgtggtacaggtgtggtgtgggtgagcaggagtgtacaggtatgtacaggtgaggaggtgtggtacaggtgaccaggtgtgtacgggtacggacaggtgaggaggtgtggtacaggtgtggtatgggtgaccaggtgtgtacaggtatggacaggtgaggaggtgtggtacaggtgaccaggtgtgtacgggtacggacaggtgaggaggtgtggtgcaggtgtggtatgggtgaccaggtgtgtacaggtatggatggacaggtaaggaggtgtggtacaggtgaccaggtgtgtacaggtatggacaggtgaggaggtgtggtacaggtgtgctatgggtgaccaggtgtgcacaggtacggaaaggtgaggaggtgtggtgcaggtgagcagatggtactcccattgccctgcaggtgtacaagcagaaagtgaagcacctgctatatgagcaccagaacaacctgacagagatgaaggctgagggcactgtagtcatgaagctggcacagaaagagcaccgcatacaggagagtgtgctgcgcaaggacatgcgggcactgaaggtggagctcaaggagcaggagctggccagtgaggtggtggtgaagaacctgcggctggtaggtgtggcgggggcacctggaggctgacaggttgttgggacggcaagcctagtgctgcatgaactcctgtttattcaacagcaactgggaattcatatttctgcataagactttctgcatttttgcaatttgttgaaaaaaaattttttaaagcatgcatccaaacaaaccccattttgggaccaagtacacaattctgtctcagacctgagcaaaaaattgacgtcaccgaagagaaaaaatccagcttaggatctttcatgtgctgctgacacctgacacccagagacttttcctagggaatagcatcatatgcatttagtagaatgcaaaccaaccattaaaatatccagtgtgttgactcctgggcactgtgacagtttgtcacacaagctggtctgatttttacttttgaggctgggggtttccagggcaccattaaaattcatctgtgcacctggttcagtggctcacacccaaaatcccagcacttgggagggtcaggtgggagaagtggttgaggccaatagtttgagactagcttgggtgaaatagttgaaccccatgtctaaaaaatttaaaagaaaacattagctggtgtagtggcacatgccgatagtttcagctacttgggaggctgaggcgggaggatcccttgagctcaggaagtcaaggctgtggtgagctaggattgtgccactgcattccagcctaggtgacagagtgagacaaaacaaaaaggaaagagatcatttgctgagtgtccattagctgctaggtcctgatctgatctctgacaaaacgcctgcccgactggggctgttggtctagaaaggagagacaacaggtgagttggaagacaaaataaacgtgccagatacaacagagtatctggtggggaagagtgccatagaaggatcgaagtggggagaggtggggtgcggttttgtacaagcagttgaccggctgggagacgggatgggccagtgggaaagctcagagtgaccaggaggagactgtgggagagggtcagagcttgtccgcctcgaaagccgtggtggggactggagacgggtcagagctcgtccgcctcgaaagccgtggtggggactgggactttgaccctggtggagtctgttgccctctgagaacttgggcagaggagagatgtgtctcactaaggttcttcctggctgctgggttgaggagactttctgaacacatttgcctcacgcctggaagcagtccagcctccactgaatctggaagaaacttggtgacgttgctgacttcgcagcaaagcctgagagtgccgaagtcttgagccctccagaattagctggtcttaacccaggtcctggatatgatattgttacataatcagagtttcctgttgggtaaaaatatggctttaggccgggtgcggtggctcacgcctgtaatcccagcactttgggaggccgaggagggtgtatcacgaggtcaggagtttgagaccagcctgaccaacgtggtgaaaccccgtctctactaaaaatacaaaaattagccgggcgtggtggcgcacacctataatcccagctactcgggacgctgaggcagaagaatcacttgaacctgggagacggaggttgcggtgagccgagattgtgccactgcactccagcctgggcgacagtgtgagagtctgtctcaaaaaaaagaaaaattactgctttaaaaataatttatttttttatgcaaattttaaatatataatgtttatttaaatatataataattgttcattaaaactatatatttatttatttttagagatgaggtctcactctgtctcccgggctgcagtgcaatggtacaatcatagctcactgcagcctcgaacttctagtctcaagtgatccttctgccttagcctcccaagtagctggaactatagatatgagccaccacacccacctaatcttttttttttttttttttttttttttttgagatggagttttgctcttgttgcccaggctggagtgcagtggcacaatctcagttcaccacaacctctgcctcccgggttcaagctattctcctgcctcagcctctcgactagctgggattacaggcatgtgccaccatgcccggctaattttgtatttttagtagagacggggtttctccatgttggtcaggctggtcttaaactcccgacctcaggtggtctgtccagctcggcctcccaaagtgctgggattacaggcgtgagccactgtgcccggcaatctttaaattttctgtagaagatcttgctatgttgcttaggctgcccttgaactcttgacctcaagtgatcctcctgccttggcctccagcgtgctgggatgacaggaatgaatccttttaatatgctgcttcaggcagcagtgcagcaggttggaagctacacacggcacctggaaagatcccacagctctgtgtggatgtggctgctgctcttcaggctgtgggatggtttggcgatggaaccaagcgggttcagtgctcacgacgtctgttcatgttctctctcaagcttagaggtgactttagttgagggaggtgagttagggaatatggaggtgaccaaaaccatgaggaacagggtcagcctgaagggagcgggcttccctctgtgtccggctgtgtagtaatggccgcttctccctgtgcagaaacacaccgaggagatcaccaggatgcggaatgattttgagaggcaagttcgaggtcagtttcccgtgtgctcattgtgtaggtgccagagacacccccgccccatcagagaggaatttacctccagagcttgttaactcagggagcaaaaactggattaaaacagccaaggcatgcaagagaaagaacatggaagtttccaaggccagtggacccactcagaatcccagaacaacctatttccatgtgagtttgggaggctgtgattaccacacacattcccactcctagctaaaatcagtagttatcagcaggtggtagctattcagtgccgtgggcagccttcttaaaatagtcttctccatggctcctggtctgagaaggctccaatttcagaagtctctgtgttttactaataaaggctgattgtggctgggtggccacacaggcctcggttactgctcactggggtcagctgacattcagctgttggcacccccagtgcagggagcgattagcaatgcctgtcactggcaaaggcaggccgacagtggtgtgtgtgctgagtgtgagcatcagcagaaaaactcagtctaaacccctttgttcttctcttgcagagcttttgcctgcaaggctgttctgaccacagtgggcgttttgggcccgtttacaggctccatgttctgtagccgtaggggcaccacgtcttcctctgctaagctgctgtttgctgctgcctttcagaaattgaggccaagtatgataagaagatgaagatgctgagggacgaactcgacttgcggagaaagactgagctccacgaagtggaggagaggaagaatggccagatccacacgctgatgcagcgccacgaggaggccttcaccgacattaagaactactacaacgacatcaccctcaacaacctggccctcatcaactccctcaaggtgctgtgcgtgggctgggctggggaggcacactctgcctgtcctagaatgtgggctgcagagtcctggggatccagaccccagctctccaccccaacacacccagtactttttataagattgtttgacaatgcccctctcatatccttaactgaaattcctaaataacgtaacctatctctacctattgttaaaagcagtcaggatattgccctcaccgtagtgcagagggggaagtaatgaagtgtgttctggtttgtaaaagctcagatggaaccgcagtgagggccgtgatgtggctggagtggataggtgtcatagtcactgcctgcgacaggtggataggtgtcatcgtcactgcatgctggcagtgacaggattttctacagtagacaacggcccttggtggaatcttgaacaaagtatagtccttcagtctgcatggaagctgcattcccagaaaactcagaataagttgaagctgcagaaatactgtttatacatagaagacgtctaggtgccagcatgcctgaggctggcagcagctggtgatgggcaggagagcacccagctctcaccatgcaggccacagcccctttggttctgcctgctgagcccctgccgggcctgtgcttgtgcctgcaggagcagatggaggacatgcggaagaaggaggaccacctggagagggagatggcagaggtgtctgggcagaacaagcgcctggcagaccctctccagaaggctcgggaggagatgagcgagatgcagaaacagctcgcaaactacgagagggacaagcagatcctgcttgtgagtttcccgctggattcctctccctccttggcatgagcttgcctaggctcaggagggaggagcatcacagggaggggcttggcccttagggcaggaagggagacggggaggcctgcatttctcctttctctgcctcgtgttctcctggggaaagtaaagtctgggggtgttttggagacaaggccctcatcttcaccacgtgctaccggccggccttggtgagactcagctgcttgtgtcctggaaccaggtctttctggcgattatttttggccttgccatctcccaggagcccgtgttacttggatgactgtgaatcttgaatactttctgtcccctactccctgtttttcctccagtgcacaaaagcccgtttgaaagtcagggagaaagagctgaaagacctgcagtgggagcatgaagtgttagagcagcgattcaccaaggtgagtggcaccacgctggccctgcagttggcggtgggtgttagagcaacggttcaccaagttcaccaaggtgagcgggcactaggctggccctgcagtggggatggcacccctgctagccagggacggggctctccttgtggcccctggaccagcttcagatgccttggccaggtttctgggttctgaagctggaggccctgttccctgtaactcattccgcagcttctaagaggcaaaaacctgtggcctgttctgcatgcatattctgcagaaggcctggggtcttgatggggaacggatcacacatgactttcgtcccctcgagagctcacctctgaaagcacatgagggaggctcttaagtgtaagtgaagatgagtctccggctgctcagtgctggtcctcacactggcgagttttatgggctcccttccaggtttcctgcatgctctcgtgtggatgtgactttgtatgttacgaacacgggatcaggccataagcacaatttgctttttaatctcacagtgtatcaggctgcacataggaagcggtctcatccttttcacagctgcttggtgctgcgttttgtgaacgtttgatcatttagccgactcccgtctgtttctaatgctctgctgctataagcattgctgcctcaatccttttaaatttgtctttgtgcacttgtgtgagattgcttcttaggaaagccagttcctagcagtgggattgttgagtctgagggttctgttctgaggaccctgatcatctgtccagagggctgctctgagtcacacacctgccagggtgcggaggggccgtttccatcctcacctgcaccagatctgacaggtttaaacctttgcagaagtgactgggtggaaaacatctcatttcgtgggcacttccaagattcgcagtgagtggtaggggtgctcggtcctgtctctgtcccttaaagacgctccttgcctctgttcagtttcaaagttctggccaaggaccaatccctgcagcatgggcccctcaaggctttgtctgtggtgtgcggggccagggcatcttatcttgagccgcagttatatgtgctgttttgttctctaacctaattgaaatttttgaacacaaaccgttgtagtgggattcgcttctcagaaatatcccatctgtctgtcagatctagccccaccttcagagacacctcaggtcctgcacgacgtgcattgctaggctgtgccaactcttggcacctaagggaagggcacctgcaaggtagtcagtgagatcctgaggactgctgtgttagacaaggggcccttccttctccctgtgggttttgaggtggacattattgggaagaggacagcagagacgtgcctgggttggagccttgttttctgtcacattttcttccatttgaatgtggttcctgacagtgtccaagctggtgtctcttcctagagaaccgagagctcaaatttatcagcaaaatttagagaccaaggcagttatttatttatttatttatttatttatttatttatttatttttgagatggagtttcgctcttgttgcccaggctggagtacaatggcacgatctcggctcactgcaacctccacctcctgggttcaagtgatactcctgcctcggcctcccgagtagctgggattacaggcgcctgccaccacgcccggctaatgtttggtatttctgatagagacagggtttcactctgttggccaggctggtctcgaactcctgacctcaggcgatccacccacctcaccctcccaaagtgctgggattacaggcgtgagccaccacacgctgctcagggtgttcacttttttatagtcttcaacaaagtctagatttttttagaatgcacaattaataagtagaagaattaggagataaaaaagaacagttttactggctggcaggtagctggctccaaggccgtgctccagatccaccatttgtggggcggacagcacatgtgatgccaggatctggggctggccaagggagcatatcctccaaggggccccacctgcaagctcggcctgctggatgccctggatctcaaatctcacctgagcccacagccctcactcgggcaagactggcctcggccacccatgaagcagctttcagggtggggctgcttcagctcttaccaggacacttatggcttccagagacaccttcctgagagaagggcttatgctgatgtgttcctcctgccttccactgcgtggatggctctacaaagggccagggcgcaggcagtgtggacaacacactgaccccggtgctgtgggagtgggcactgttgggaggcagcgtgttccaggcaggtgcagaggtgggaggcagcatcttcccagcgagatgtccccaggtgaggggcctcatcgcccacccccagcgctgtccctacaggtgcagcaggagcgggacgagctctatcggaagttcaccgcagccatccaggaggtgcagcagaagacagggttcaagaacctcgtgctagaacgcaagctgcaggctctgagcgccgctgtggagaagaaggaggtgcagttcaacgaggtcctggctgcctctaacctggaccctgcagccctgacgctggtgtcccgcaagctggaggtaggccctagacaggctcctgaccccagtgggcggcctcatccctgtggcaagagtcttcagttctgtgctgctcctcggataggcacagagacccctcggtcggccactgaggaggggcattcatgggtttcctgtggccagtttcgggccagttgggaactgtggaagggctgggcaggggaaccagatcagggcccactctgctattgatggggagcacagggctggagggggctggttggggccagcacagaatggggacgggcagagggttggagagccgccaggaggctgagtccacaggtggggctgggaggggccgaggtgacttggtgtttgcacatgggggaacgacgggtcccggcccagtgggcggtggtgcctgtgggaccctggtcatctgggatggcctggctctcagggcctgaggtagtgaggctgtataggaggggcctcacctgggccagaggcactgtggccccgggactgaaaactcatctttgtttgctcagcactgggcccagtgagcacaggcaggtgagggagtgagggtcccactgttgggaggtgggggaggcgtgtttccagctcctggctgagggctgcacccagcctgctgctaagccaccgaaatgagggtgaagagagcagtcgtggcctgtgagggtcattgcagctgcgcccacgcgccagggtgaggatggaggatggagctaaatgtgggtcaacccctcctttcctggtcattgttacctcgacttctaagtgaggaatcttctggggaaatgacagaggcccccgcagggacactgtttgctgctggccaggtgtgagggggctgctgtgtcagtgggcagcagggacggctctaaagccaggctgggcccagcagtgccccacaggcaggagcccaagaagtccctgcctcgccacgtggtgagacccttgcccacatctgggcggggccagcgctgctgaagactacttttttctgttacaaaaaagtgggatagccgggcgcggtggctcacgcctgtaatcccagcactttgggaggctgaggtgggcagatcacgagtttgggagttcaagaccagcctggccaagatggtgaaaccccgtctctactaaaaatacaaaaattagctgggcttggtggcgggtgtaatcccagctatttgggaggctgaggcagagaattcctggcacctgggaggcggaggttgcggtgagcctagatcgcgccactgcactccagcctgggcaacggggcgagactccatctcagaaaaaaaagtgagatagtacattcacaagcctcaagaaatttaagcaatatgtaggtggtgtttagtgaccagtctccacagtgtggctgcacgctgcctgccctcacctcatctgcatttcttgtggtctggactgctctttgagttttttcttgagacggtgtcttgctctgtcacccagactggagtgcagtggctcaatctcggcgcactgcaacctccgtttcccaggttcaagcaattctcatgcctcagcctcctgagtagctgggattacacaggtgtgagccaccgtgcccggctacttttcgtatagtagagacggggtttcgccacgttggccaggctggtctcaaactcctgacctcaagtgatctgccctccttggcctcccacactgctgggatcacaggtgtgagcggcagtgcctggcctggactgttgctggagaggcaggttgtgcaagctcccagttctctgcttcttccttgttttctctccacccttggagacctttttctgctgacaaccctgtgtggatggatgcatccatcaaaccaggctgctattcgctggatctctcagaacgcccactggagtccccaggccgctcccgttgcctcggccaaaagatgagtctcaaactcccatcacctctctctcctcaggatgttcttgagtcgaagaacagcaccatcaaggacctgcagtatgagctggcccaggtctgtaaggtacggctgtgccctgccctccctcaggggcaccccctcggtgcccagactgttctaaatgcagacggtctctgaggaccccacctgtgcccacttcgtacctcgtttgacaaggcagctgtcactgtccccacgtgagggtgcagtcatagccgagagcatctggattctgtgtggtctggggcagtgcactgctgtctaggccatgtctctgctgggatgggtgtagggggggacctggacgcttccctggtcagccccttcccctgggcagggagtcagaaggtgctgtgcccaccggggaaggaaacagacgtcattcaacaggggaagggagggcgtgaagaacctgagtgggaaacacccagccagggcccagagccctcccagaccacagctctgccctgagtgtccctgccctctgcctccgtctcgtcatttgtggaataggaatagtgacagcctctccctgtcgtgctacctgagccaacgcagtgaaggtgcttggagctgtgtcccacacgggaaatgactgataagcctttggctttatccttctgcaccgtgatgctcacgctgcccctccatggagctgcactcagctctggtggtcctgagcgtggggaccctcagctccctgacactgccctgtctccacaggcccataacgacctgctgcgcacgtatgaggcaaagctgctggccttcgggatccctctggacaacgtgggcttcaagcccttggaaacagctgtgatcggacagacactgggccagggccccgcgggactggtgggcaccccgacgtagctgcccccctggggggccacagcccagagaaccagcctaggaacactcgggatgacaccccttatcacaccaaggacagcaagttttttagattttatcatcagcaaatgaaagcttttcacatgttcttgccatcctctttcctggctctgtggaggagaaccacctgcaggaccctcacccatggtgtccctgtcgctcccttccctgggtgccgcacgtccagcctgtgtccaggcctactccctggtctcacctccgaccacagtcggcggcaccttctcagagtgccccgcactcacctgggggttggggcagtgccgcgctgtgctgcctgtcttcgcgccactgttgtcccaccgaatggacagctttgcaggtgctggcactaacttcattgacacctgagtcacagctgcccagtgggattctccagggggccgggacttccctaggaagtggtgagccaatgctccctgatgagcacaaagcccgctctgttgagggctgggtgggtgcagccagcgtgcgggaacgggcaggcagcctcccgctgccagtcttcgctctaactccctcggtaggtgatgtaggaccaggggcacgtggaacttctgggccttgctggtgatggttaaaacaacctgagatggagaggccaggagagagtataaggggatagcagcaaaccacctatctggccccaacacacctgagagaattcagcagcccagactgagggtctgggatggggtgaaccttccgcaccagagggacactccacagaagccacagcccagtaagtcaggcgcttctgcggcggctccagtgtggggtgaggcagtgaggttaggcccagagagctggagttggctcagatgaaaacctctgtcaacaaagaggggatgaatcacccttggcccagcctccccacaaagcctgaccctgggcaggtgagtgacgggtgtgtcctcgtagagtctattgctgcctggacacctttcttttgggagctcaaagcaagtgagctcacctacctgccaccgcccaggaccagtctgcccactgcctaaatgatgcccggccagcaggacctggcctgcagatcccagtgagtcatgagcctcagccccctccagcccactggggctctcacctccacatgtgggtagaagctttcctgccccctcttcctccagtagccctcagtgtcgaaggtgagcttgtaggtgcctgccttcatctggtccaggacagtgaccatctgggtctgtgtagctggggagaggatgaggctgcagagatggggaccagaagccccccaccccagctttcctgggtctgcatcccagtgggcctcagacactgccctgccacctgtcagacttgggtgagcagacacagtgaggctgttaggtcctgcagttccagagcagtctagggacaccactgccctgtctttaggaaatcacaacacagagaagcaaaaagggaaaaagtctcccacaatttatcccatgagcaagaaccactttatagctggcatatatttttccagattttctctatgcataagtatatttgtttaaaaacttataaagtggattatactattt

SEQ ID NO: 12119 - DNA, 3856 bp, Homo sapiens
cgtgaagacatttgtcgttgtgccgaggcactggttggattcgggggtgcgtgtctccctcatgtctgcccggcatcctcggctcagaacccctcctgctgctccttcttgtttgctcgttgtcttgtcttcttttgaggtgaagttgagtcctccctctttcttccttgcctttcgccggccacacgccccgttgccgtgcatgggcccctgctcagtgcctcacctgacccactgcacctggccaggtggaggagcatgtcagccgcatccgggaggagctggaccgcgagcgggaggaacgaaactacttccagctggagcgggacaagatccacaccttctgggagatcacacggaggcagctggaggagaagaaggctgagctgcggaacaaagaccgggagatggaagaagccgaggagaggcaccaggtggagatcaaggtgtacaagcagaaagtgaagcacctgctatatgagcaccagaacaacctgacagagatgaaggctgagggcactgtagtcatgaagctggcacagaaagagcaccgcatacaggagagtgtgctgcgcaaggacatgcgggcactgaaggtggagctcaaggagcaggagctggccagtgaggtggtggtgaagaacctgcggctgaaacacaccgaggagatcaccaggatgcggaatgattttgagaggcaagttcgagaaattgaggccaagtatgataagaagatgaagatgctgagggacgaactcgacttgcggagaaagactgagctccacgaagtggaggagaggaagaatggccagatccacacgctgatgcagcgccacgaggaggccttcaccgacattaagaactactacaacgacatcaccctcaacaacctggccctcatcaactccctcaaggtgctgtgcgtgggctgggctggggaggcacactctgcctgtcctagaatgtgggctgcagagtcctggggatccagaccccagctctccaccccaacacacccagtactttttataagattgtttgacaatgcccctctcatatccttaactgaaattcctaaataacgtaacctatctctacctattgttaaaagcagtcaggatattgccctcaccgtagtgcagagggggaagtaatgaagtgtgttctggtttgtaaaagctcagatggaaccgcagtgagggccgtgatgtggctggagtggataggtgtcatagtcactgcctgcgacaggtggataggtgtcatcgtcactgcatgctggcagtgacaggattttctacagtagacaacggcccttggtggaatcttgaacaaagtatagtccttcagtctgcatggaagctgcattcccagaaaactcagaataagttgaagctgcagaaatactgtttatacatagaagacgtctaggtgccagcatgcctgaggctggcagcagctggtgatgggcaggagagcacccagctctcaccatgcaggccacagcccctttggttctgcctgctgagcccctgccgggcctgtgcttgtgcctgcaggagcagatggaggacatgcggaagaaggaggaccacctggagagggagatggcagaggtgtctgggcagaacaagcgcctggcagaccctctccagaaggctcgggaggagatgagcgagatgcagaaacagctcgcaaactacgagagggacaagcagatcctgctttgcacaaaagcccgtttgaaagtcagggagaaagagctgaaagacctgcagtgggagcatgaagtgttagagcagcgattcaccaaggtgcagcaggagcgggacgagctctatcggaagttcaccgcagccatccaggaggtgcagcagaagacagggttcaagaacctcgtgctagaacgcaagctgcaggctctgagcgccgctgtggagaagaaggaggtgcagttcaacgaggtcctggctgcctctaacctggaccctgcagccctgacgctggtgtcccgcaagctggaggatgttcttgagtcgaagaacagcaccatcaaggacctgcagtatgagctggcccaggtctgtaaggcccataacgacctgctgcgcacgtatgaggcaaagctgctggccttcgggatccctctggacaacgtgggcttcaagcccttggaaacagctgtgatcggacagacactgggccagggccccgcgggactggtgggcaccccgacgtagctgcccccctggggggccacagcccagagaaccagcctaggaacactcgggatgacaccccttatcacaccaaggacagcaagttttttagattttatcatcagcaaatgaaagcttttcacatgttcttgccatcctctttcctggctctgtggaggagaaccacctgcaggaccctcacccatggtgtccctgtcgctcccttccctgggtgccgcacgtccagcctgtgtccaggcctactccctggtctcacctccgaccacagtcggcggcaccttctcagagtgccccgcactcacctgggggttggggcagtgccgcgctgtgctgcctgtcttcgcgccactgttgtcccaccgaatggacagctttgcaggtgctggcactaacttcattgacacctgagtcacagctgcccagtgggattctccagggggccgggacttccctaggaagtggtgagccaatgctccctgatgagcacaaagcccgctctgttgagggctgggtgggtgcagccagcgtgcgggaacgggcaggcagcctcccgctgccagtcttcgctctaactccctcggtaggtgatgtaggaccaggggcacgtggaacttctgggccttgctggtgatggttaaaacaacctgagatggagaggccaggagagagtataaggggatagcagcaaaccacctatctggccccaacacacctgagagaattcagcagcccagactgagggtctgggatggggtgaaccttccgcaccagagggacactccacagaagccacagcccagtaagtcaggcgcttctgcggcggctccagtgtggggtgaggcagtgaggttaggcccagagagctggagttggctcagatgaaaacctctgtcaacaaagaggggatgaatcacccttggcccagcctccccacaaagcctgaccctgggcaggtgagtgacgggtgtgtcctcgtagagtctattgctgcctggacacctttcttttgggagctcaaagcaagtgagctcacctacctgccaccgcccaggaccagtctgcccactgcctaaatgatgcccggccagcaggacctggcctgcagatcccagtgagtcatgagcctcagccccctccagcccactggggctctcacctccacatgtgggtagaagctttcctgccccctcttcctccagtagccctcagtgtcgaaggtgagcttgtaggtgcctgccttcatctggtccaggacagtgaccatctgggtctgtgtagctggggagaggatgaggctgcagagatggggaccagaagccccccaccccagctttcctgggtctgcatcccagtgggcctcagacactgccctgccacctgtcagacttgggtgagcagacacagtgaggctgttaggtcctgcagttccagagcagtctagggacaccactgccctgtctttaggaaatcacaacacagagaagcaaaaagggaaaaagtctcccacaatttatcccatgagcaagaaccactttatagctggcatatatttttccagattttctctatgcataagtatatttgtttaaaaacttataaagtggattatactattt

SEQ ID NO: 12120 - DNA, 22372 bp, Homo sapiens
ggagtctcgcgaggatcttgtgacttatcgcggcatcgcccagcggttgccgggaaacggcgtggcttccgggggcgggcgccctggtcccggagtcgccgctgggcctgtccgctggcgtcatggtgagcaggggcgggagcggggctggggtcctcggcaggggcccggagacctcggggcagggaggcctcggtacacggagaccctgggaatgggaggcctggagcgctgggtttctggaattgagagctcggtgctcttgtgggggtctccgtggggcaaactcaggatgctcccggccccggggcctggcagcactcgggactgagacctgggctgtccagagccctgtgctcacaggggtggtcatagaacgcccagggcccggggtcggcggcgcacggtccccagaagagtgaacatgcgtcaaggggactctcatcctggaatggcagactcggtctgttggatccctgggacctagggtttcagctcacgaggctttgcagagcaccagggtccccatggaatagagccggaggcaggaattaccctaagacctttggtctcccggatggagagcctggggcacaccagagtggctagagatccctctacaccaaggaggcccggacaggtccagtgcccttggagtgcccagggcacaaccttgggatacaggaaccactgttcccttggaaagcctggcaggagtcaggcccagaccgagaagaggaaggcggagctcgtggcctcatcagctccatgtctgtctttctcttgtaaagggctctccctttgtggtacaggaattgtcagtaactcaatttctgggcaggtgtggcagggtgggtttcagctggtggggggaggaaagctctgggagccccaccaagtccctgcagctggctgtgaaggtcccaaatgctaagtaatgctgaaccttcctccactgccttcagggctttgtgatgaggtagccttcttggagtggagggattaaaaagagagcagtacattacgaattaaatttaagtagatgggttttctgacccaggaagggtcttctgaaaaccgactatgaaagaaactaccaaactaggccaggagtctgggcgcggtggctcacgcctgtaatcccatcactttgggaggccgaggcaggcggatcatgaggtcaggagatccagaccatcctggccaacatggtgaaaatccatatctattaaacatacaaaaattagctgggtgtggtggcgtgtgcctgtagttccagctactcgggaggctgaggcaggagaatcacttggacctgggaggcggaggttgcagcgagccgagatcgcaccaccgcactccagcctggcaacacgtctcttaaaaaaaaaaaaaaaaagcagggtgtagtggctgacgcctgtaaacccagcactttaggagtccaaggtgggtggatcacttgaggccaggagttggagaccagcctggccaacatggtgaaaccctgtctttactaaaaatacacacacacacacactcacacacacacacacacaaaattagccgggtgtggtggtacgcacctatagtcccagctacttgggaggctgaggcaggagaatttcttgaacctggaaggtagaggttgtgtagtgggatttttaaggaattagagagaccgatggggttcaggaggatatttattaattatttaggtgcaccggcccagtcagattaaaatccaaaggactgagccctgaacaaagagttaagttaccttttaagcttttcgtggggcagagggagatctgtgcagggggaagcatgcttcagatgtgagaaataaaggcagttgttcagttgaaacatgcattacatcatttcttactttttaaggaaaaacatgttttgcgacttgagtttatctgcctagtgaccttgcagccgcacagctacagaatcagggtcttcacaatgcctgggaagggaggagagacaaggctcactagccgcagaaaaacaggcagttaatttttaaaggactccagctctttctctttttcagggggagttgggttttcttatatataactgagtttctgcttacacactttttaatttcttttaattcctgttccagttgcagtgagccaggattgcaccactgcactccagcctgggtgacagagcaagactccatctcaaaaaaaacaaaaacaaaaacaaaaaacaaaaaaatgcaacagcaaacacaacagcaaacactaaacacaaccaaactacttctgtttctgttaggttgtgggaatatgggccttggtctgttggatccttggaccaaggaatatgggtgatatttctgttttcttctcatcagtgttttctaaaatttccacataatattttctctctctctttttttttttttttttgaggtagagtcttaccctgtcacccaggctggagtgcagtggcatgatcttggctcactgcaacctctgccacctgggttcaagcgattctcctgcctcggcctcccgagtacctgggactacaggtgcccgccaccacgcctggctaatttttttgtatttttagtagagacagggtttcaccatgttggccaggctggtcttgaactgctgacctcaagtgatccgcccgcctcagcctcccaaagtgctgggatgacaggtgtgagccactgtgcctggctccacctaatgttttcattcaggactaaatgaaacataaatgaagataaatgggccagtcgcggtggctcacgcctgtaatcccagcactttgggaggcttaggtgggcagatcacgggtcaggagttcgagtacagcctggccaacatagtgaaaccccgtctctactaaaaatacaaaaaattagccggacgtggtggtgggcacctgtaatcccagctactcaggaggctgaggcaggagaatggcttgaatccgggaggcggaggttgcagtgagctgagatcgcaccattgcactccagcctgggcaacagagcaagactctgtctcaaaaaaaaaaaaaaaaaaaaaaaagagagttcaagaccagcctggccaacatggtgaaacctcgtctctactaaaatacaaaaaaaaattagccaggcgtggtggcgggcacctgtagtcccagctcctcgtggaggctgaggcaggagaattgtttgaacccaagaggtggaggttgcagtgagccaaggcagcctggatgacgagggagactccatctcaaaaaaaaaaaaaaaaagataaatggatttaggttttaatgtttttaaaaaataaataaaatttccacatgaaatttgtaattttaaaaacgttacatagctgggcacagcagcagtgaactcctgtggtcccagctccttgggaggctgaggtgggagtatcagttgagcccaggaattggagtctgcagtgagctatgtgatcacaccactgcactccagcttgggcgacagagcaagactttgtctttaaaaaaggttaccgagacatgtagacacagaaaagcatgggctgaagactactgggagtagcaaagtcagcaggataggatatggaaatttgttacctgcttgagtgccctgtaaatgggtggccagacagaactgctcctggtgtcatgcgtggtttcagcaacttccacaagggggtggggttagaaggttctctcccatccttgtcaaagttgctaaaaccacgcacgacgccatgtgcagttccgtctggcagcccatttacagggctctcgtggtgggtgctgtctgcccaagctttcttgaccaggcttctctgaaggaagtttctctttgaaagaaaggaaacttgtggttgtcacaaccgatcgtggttatggaggcatttctccctaagcttactgaatggtgtcttgcaggtcttttccatggtggtcaccaatgttgccgccagcatggtaacatttggcagtgtggtattgagggtctttcctctgttttgcatccacagcagaggtctttactttttaccaaggagtgagtgggtttggaatgggttcccccctctcttagtttttggagacggggtctcgttctactgcccaggctggagtgcggtggtgcaccatagctcactgcagccttaaacttctaggctcaagtgattgtcctgccttggcctcccaaagtgctgggatgacacgtgtgagccactgcgcctggtcaccgtataccaaggaatgagtgggtttggaatgagttccctctcttttctttttttttttttttaagttacagtttgctttttgagatggagtctcactttgttgcccaggctggagtgcaatggtgggatcttggctcactgcagcctctgcctcccgggttcaagcgattcttctgcctcagcctcccgagtaactgggactataggcacacaccagcacacctggctaggtttcctctcttttttttttttttgagatggagtctcactctgtcgtcctggctggagtgcagtggtgtgatctcggctcactgcaaactccatgccccaggttcaagccattctcctgcctcagcctcccgagtagctgggactacaggcgcccaccggcacgcccggctaatttttttttgtatttttagtagagatggggtttcactgtgttagccgggatggtcttgatctcctgacctcgtgatccgtccacctcggcctcccaaagtgctgggattacaggcgtgagccaccacgcccggctcctctcttttctagaaggaatgttctccttctcaaaaggaaggtttctcctttgtgcttctccaaatgcaacaacaggatgtgtgtgtggtaaagggtgggaacactcagggcaatgatgtgctccaggtgagcagaagggagagaggttccagaaccttctctgccaaatgttcctgggagcaaatcagagccagccaagaaggggaagctgttagagtctctcttaccccattatttccaccaaaggcaccgaaaaagaaagggaagaaaggcaaagccaaaggcaccccgattgtcgatgggctcgctccagaggacatgagcaaggagcaggtgagcagagcgggctgtggcccagtccccgggtgggcgtgggcgggcaccacgcagggtgcctacgccgagtgtccatcttgccatgtggatccacccttctgtccaagccagaacacgccccccgcgtggcccataattcccatcagcggcaaagctttcggctgcaccatgtcttttcagaaaggtagtgcagcctgtgaaagagctttgtaacagggtggtaggagtgtggaaggacatgcttttctgatctaaaagctgtttttaatttcgtgtattctctttcaatcttaccctttttttgcacctgatgtgtatagacttatcgtagaacacacatgtagcattctcctttattttattcaccattaaacattatgtcaaaaaggaagtttttgaaagaaggatgatttacttcaaatcacatctgaatctgattaatcgttcatttttttttttttttttttttttttttttgagacggagtctcactctgtcgcccaggctggagtgcagtggcgcgatctcggctcactgtgagctccacctcccgggttcacaccattctcctgcctcagcctcccgagtagctgggactacaggcacctgccaccacgcctggctaattttttttttgtatttttagtagagacggggtttcaccgtgttagccaggatggtctcgatctcctgacctcgtgatccactcgcctcggcctcccaaagtgctgggattacaggcatgagccaccacgcctggccagtcattcattgtttttgataaaagtcccaacaaggagtaacagcatcagggctgcctttttcttgttgcttattttggggaggaggtgatgtttttatagtttctttgtaggagttagtttaagtctcttcttcatttggatgtagttaagggctacagaacataattacataattacaattttacctaaaaggctcctggagacggcagtgtgtggcaagcacggtgcaccctctggcctctgccctcatggacgactgcctgtgagcacctgacatgggacatgagggctgtgtcaactctgtgttattgttaataaatcttaccttcttttgatagttgtaagataaaaaatcaatacgaaggagactgaaagagtctcatgacctgaagttggagctaggcagaggtccttgaacaatggtaaagaatggctttattttacatgcaggcaaaccattggcagtttaagccagtggctaagcagagaggtgatggggtcaggtttgtgttctggaaagatgtctggagctgctggatggagaatggattgaacactgcgttgtcccagcatgtgagctgctgcccgtctccctgtccgcttcccattcctgtggagacaggccttgtggggcagtggccatggagcctacggggcagcctacggggcaggctacggggcagcttacggggcaggctatggggcagcctacggggcaggctacggggcaggcccttgcactgcacatcgcacgttgagccacagactcagaaggcttcttcagggtccaggcaggtggggagggatgggggtgacctggagactcctgccccgcagcagaggacagtttcatctgttcactggggagtgccttgtgggcctaggagttcagtgctgtttttttctgattttccaagagaagctggaaatctggatatttataagaaatctgaatattgagtgatggcaaaatctcaacaccatgtgagccaaacagaccagtcaggagccctggttcaggctctgcccaggagcctctaaaggtctgtgacgtgaagacatttgtcgttgtgccgaggcactggttggattcgggggtgcgtgtctccctcatgtctgcccggcatcctcggctcagaacccctcctgctgctccttcttgtttgctcgttgtcttgtcttcttttgaggtgagaaatgtgttttccctgtggggaatgtggtgttgagaaagaaaaaggctcacagtaagtggcctggggctgtgcccgaaaagtaactgattctgacggaatctcgctgtgtggcccaggctggagtgcggtggcgcgacctcggctcactgcaagctccacctcctgggttcacaccatcctgctgcttcaggctgcccagtagctgggactgcaggtgcctgccatcacgcccggctaatttttttgtatttttagtagagacgaggtttcaccgtgttagccaggatggccttgatctcctgacctcatgatctgcctgtctctgcctcccaaagtgctgggattacaggtgtgagccaccgcgcctggcagtaactgattcttaagggaaatgagctcccgagaaagctggaagcctgtcctacatttttttttaacctatttgcagattcgcaattgaaccctcttgagattttagagtctactggttttgtatattttttgcttaacattatatcttcaaaggtgaattttttttcatttagcattatgatatgaatttgtttaaatgctgctacatcatttgcatattttttttgggttaatgtgatatttctcctagttgatatactctaatttttcaaccatttccatatttatttatttattgtttagagacagggtcctgctctgtcacccaggtggagtgcagtggtgtgatcacggctcacggcagccttgacctcccaggtccaaacgatcctcctacctcagtcttctgagtagctgggactataggcatgtgccaccactcctggctaatttttttttttttttttttttgtagagacagggttttgccatgttgcctaggctgttcaactctggggctcaaaagatcctcccaaagtggtgggagccaccatgcctggctgtttgtgtattttttgagacagattctcactctgtcacccaggctggagtgtagtggcatgatcataactaaccgcagcctcaaccccctgagcttgagtgaccctcccacctcagctctcccagtagctgagactataggtgcgtgccatcatgcctagttaatgaaaaaaagtttttgcagagatggggtcttgctatgttgcccaagctggtcttcagctcctgggcgcgagggatccttcaacctcagcctcccagagtgctggggttgcaggcgagagccaccgcgcctcgcttatttccctgtttaaactggtcttaggttatttcctttttgatatttttgctgttgtaataatggtgtgggtaatatctttgagcaagatgctcttatatttcttttgagaaattttttaggcatcaattctcaggaatggatgaaaggatctagttattttatgattattggccaaattgaagagaattctgccacctgctgaatgcattctgtctccggagcttcctagccttatattttaactttttacatttagctgtttatttttaggtgaagttgagtcctccctctttcttccttgcctttcgccggccacacgccccgttgccgtgcatgggcccctgctcagtgcctcacctgacccactgcacctggccaggtggaggagcatgtcagccgcatccgggaggagctggaccgcgagcgggaggaacgaaactacttccagctggagcgggacaagatccacaccttctgggagatcacacggaggcagctggaggagaagaaggctgagctgcggaacaaagaccgggagatggaagaagccgaggagaggcaccaggtggagatcaaggtgagtggggccggcctgcacgtgctaacctggtcaccacagagccccagaggagctggatccagtgagggtgcaggtgggacattttctgttcttggctttgggagtcacagccttaaaggtgttttttataaaagcctgagggagagaccctgcaggtcctgagggtttaaaatgctgcctccacaacatggaaggaatatgggctctgggggcagactggcctgtttgcaactcagctctgccacttaataccccatgagctggggatgcacctcacctcccagccttggtgtcctgctctgtgcctcaagtgtacaggtttgcataggtgaacaggcatgtgtagctgtgtaaaggtgaggcatgcaagtgagcaggtggatgcaagtgagcatgtgtgtgcaggtgaggaggcgtggccaggtgaggaggtatgtgcaggtgaggtgtggggaggtgagcacgtggggcaggtatgtgcaggtgagcaggtaggtgcaagtgaccaggtgtctacaggtatgtacaggtgaggaggtgtagtacaggtgtagtgcaggcgaccaggtgtgtacgggaatttacaggtgaggaggtgtacaggtgaccaggtgtgtacaggtatggacaggtgagaaggtgtggtacaggtgtggtgcaggtgagcaggggggtacaggtatgtacaggtgaggtgtgttacaggtacggtgcaggtgatcaggtgtatacaggaatgtacaagtgaggaggtgtggtacaggtgaccaggtgtgtacaggtatggacaggtgaggaggtgtggtacaggtgtggtgtgggtgagcaggagtgtacaggtatgtacaggtgaggaggtgtggtacaggtgaccaggtgtgtacgggtacggacaggtgaggaggtgtggtacaggtgtggtatgggtgaccaggtgtgtacaggtatggacaggtgaggaggtgtggtacaggtgaccaggtgtgtacgggtacggacaggtgaggaggtgtggtgcaggtgtggtatgggtgaccaggtgtgtacaggtatggatggacaggtaaggaggtgtggtacaggtgaccaggtgtgtacaggtatggacaggtgaggaggtgtggtacaggtgtgctatgggtgaccaggtgtgcacaggtacggaaaggtgaggaggtgtggtgcaggtgagcagatggtactcccattgccctgcaggtgtacaagcagaaagtgaagcacctgctatatgagcaccagaacaacctgacagagatgaaggctgagggcactgtagtcatgaagctggcacagaaagagcaccgcatacaggagagtgtgctgcgcaaggacatgcgggcactgaaggtggagctcaaggagcaggagctggccagtgaggtggtggtgaagaacctgcggctggtaggtgtggcgggggcacctggaggctgacaggttgttgggacggcaagcctagtgctgcatgaactcctgtttattcaacagcaactgggaattcatatttctgcataagactttctgcatttttgcaatttgttgaaaaaaaattttttaaagcatgcatccaaacaaaccccattttgggaccaagtacacaattctgtctcagacctgagcaaaaaattgacgtcaccgaagagaaaaaatccagcttaggatctttcatgtgctgctgacacctgacacccagagacttttcctagggaatagcatcatatgcatttagtagaatgcaaaccaaccattaaaatatccagtgtgttgactcctgggcactgtgacagtttgtcacacaagctggtctgatttttacttttgaggctgggggtttccagggcaccattaaaattcatctgtgcacctggttcagtggctcacacccaaaatcccagcacttgggagggtcaggtgggagaagtggttgaggccaatagtttgagactagcttgggtgaaatagttgaaccccatgtctaaaaaatttaaaagaaaacattagctggtgtagtggcacatgccgatagtttcagctacttgggaggctgaggcgggaggatcccttgagctcaggaagtcaaggctgtggtgagctaggattgtgccactgcattccagcctaggtgacagagtgagacaaaacaaaaaggaaagagatcatttgctgagtgtccattagctgctaggtcctgatctgatctctgacaaaacgcctgcccgactggggctgttggtctagaaaggagagacaacaggtgagttggaagacaaaataaacgtgccagatacaacagagtatctggtggggaagagtgccatagaaggatcgaagtggggagaggtggggtgcggttttgtacaagcagttgaccggctgggagacgggatgggccagtgggaaagctcagagtgaccaggaggagactgtgggagagggtcagagcttgtccgcctcgaaagccgtggtggggactggagacgggtcagagctcgtccgcctcgaaagccgtggtggggactgggactttgaccctggtggagtctgttgccctctgagaacttgggcagaggagagatgtgtctcactaaggttcttcctggctgctgggttgaggagactttctgaacacatttgcctcacgcctggaagcagtccagcctccactgaatctggaagaaacttggtgacgttgctgacttcgcagcaaagcctgagagtgccgaagtcttgagccctccagaattagctggtcttaacccaggtcctggatatgatattgttacataatcagagtttcctgttgggtaaaaatatggctttaggccgggtgcggtggctcacgcctgtaatcccagcactttgggaggccgaggagggtgtatcacgaggtcaggagtttgagaccagcctgaccaacgtggtgaaaccccgtctctactaaaaatacaaaaattagccgggcgtggtggcgcacacctataatcccagctactcgggacgctgaggcagaagaatcacttgaacctgggagacggaggttgcggtgagccgagattgtgccactgcactccagcctgggcgacagtgtgagagtctgtctcaaaaaaaagaaaaattactgctttaaaaataatttatttttttatgcaaattttaaatatataatgtttatttaaatatataataattgttcattaaaactatatatttatttatttttagagatgaggtctcactctgtctcccgggctgcagtgcaatggtacaatcatagctcactgcagcctcgaacttctagtctcaagtgatccttctgccttagcctcccaagtagctggaactatagatatgagccaccacacccacctaatcttttttttttttttttttttttttttttgagatggagttttgctcttgttgcccaggctggagtgcagtggcacaatctcagttcaccacaacctctgcctcccgggttcaagctattctcctgcctcagcctctcgactagctgggattacaggcatgtgccaccatgcccggctaattttgtatttttagtagagacggggtttctccatgttggtcaggctggtcttaaactcccgacctcaggtggtctgtccagctcggcctcccaaagtgctgggattacaggcgtgagccactgtgcccggcaatctttaaattttctgtagaagatcttgctatgttgcttaggctgcccttgaactcttgacctcaagtgatcctcctgccttggcctccagcgtgctgggatgacaggaatgaatccttttaatatgctgcttcaggcagcagtgcagcaggttggaagctacacacggcacctggaaagatcccacagctctgtgtggatgtggctgctgctcttcaggctgtgggatggtttggcgatggaaccaagcgggttcagtgctcacgacgtctgttcatgttctctctcaagcttagaggtgactttagttgagggaggtgagttagggaatatggaggtgaccaaaaccatgaggaacagggtcagcctgaagggagcgggcttccctctgtgtccggctgtgtagtaatggccgcttctccctgtgcagaaacacaccgaggagatcaccaggatgcggaatgattttgagaggcaagttcgaggtcagtttcccgtgtgctcattgtgtaggtgccagagacacccccgccccatcagagaggaatttacctccagagcttgttaactcagggagcaaaaactggattaaaacagccaaggcatgcaagagaaagaacatggaagtttccaaggccagtggacccactcagaatcccagaacaacctatttccatgtgagtttgggaggctgtgattaccacacacattcccactcctagctaaaatcagtagttatcagcaggtggtagctattcagtgccgtgggcagccttcttaaaatagtcttctccatggctcctggtctgagaaggctccaatttcagaagtctctgtgttttactaataaaggctgattgtggctgggtggccacacaggcctcggttactgctcactggggtcagctgacattcagctgttggcacccccagtgcagggagcgattagcaatgcctgtcactggcaaaggcaggccgacagtggtgtgtgtgctgagtgtgagcatcagcagaaaaactcagtctaaacccctttgttcttctcttgcagagcttttgcctgcaaggctgttctgaccacagtgggcgttttgggcccgtttacaggctccatgttctgtagccgtaggggcaccacgtcttcctctgctaagctgctgtttgctgctgcctttcagaaattgaggccaagtatgataagaagatgaagatgctgagggacgaactcgacttgcggagaaagactgagctccacgaagtggaggagaggaagaatggccagatccacacgctgatgcagcgccacgaggaggccttcaccgacattaagaactactacaacgacatcaccctcaacaacctggccctcatcaactccctcaaggtgctgtgcgtgggctgggctggggaggcacactctgcctgtcctagaatgtgggctgcagagtcctggggatccagaccccagctctccaccccaacacacccagtactttttataagattgtttgacaatgcccctctcatatccttaactgaaattcctaaataacgtaacctatctctacctattgttaaaagcagtcaggatattgccctcaccgtagtgcagagggggaagtaatgaagtgtgttctggtttgtaaaagctcagatggaaccgcagtgagggccgtgatgtggctggagtggataggtgtcatagtcactgcctgcgacaggtggataggtgtcatcgtcactgcatgctggcagtgacaggattttctacagtagacaacggcccttggtggaatcttgaacaaagtatagtccttcagtctgcatggaagctgcattcccagaaaactcagaataagttgaagctgcagaaatactgtttatacatagaagacgtctaggtgccagcatgcctgaggctggcagcagctggtgatgggcaggagagcacccagctctcaccatgcaggccacagcccctttggttctgcctgctgagcccctgccgggcctgtgcttgtgcctgcaggagcagatggaggacatgcggaagaaggaggaccacctggagagggagatggcagaggtgtctgggcagaacaagcgcctggcagaccctctccagaaggctcgggaggagatgagcgagatgcagaaacagctcgcaaactacgagagggacaagcagatcctgcttgtgagtttcccgctggattcctctccctccttggcatgagcttgcctaggctcaggagggaggagcatcacagggaggggcttggcccttagggcaggaagggagacggggaggcctgcatttctcctttctctgcctcgtgttctcctggggaaagtaaagtctgggggtgttttggagacaaggccctcatcttcaccacgtgctaccggccggccttggtgagactcagctgcttgtgtcctggaaccaggtctttctggcgattatttttggccttgccatctcccaggagcccgtgttacttggatgactgtgaatcttgaatactttctgtcccctactccctgtttttcctccagtgcacaaaagcccgtttgaaagtcagggagaaagagctgaaagacctgcagtgggagcatgaagtgttagagcagcgattcaccaaggtgagtggcaccacgctggccctgcagttggcggtgggtgttagagcaacggttcaccaagttcaccaaggtgagcgggcactaggctggccctgcagtggggatggcacccctgctagccagggacggggctctccttgtggcccctggaccagcttcagatgccttggccaggtttctgggttctgaagctggaggccctgttccctgtaactcattccgcagcttctaagaggcaaaaacctgtggcctgttctgcatgcatattctgcagaaggcctggggtcttgatggggaacggatcacacatgactttcgtcccctcgagagctcacctctgaaagcacatgagggaggctcttaagtgtaagtgaagatgagtctccggctgctcagtgctggtcctcacactggcgagttttatgggctcccttccaggtttcctgcatgctctcgtgtggatgtgactttgtatgttacgaacacgggatcaggccataagcacaatttgctttttaatctcacagtgtatcaggctgcacataggaagcggtctcatccttttcacagctgcttggtgctgcgttttgtgaacgtttgatcatttagccgactcccgtctgtttctaatgctctgctgctataagcattgctgcctcaatccttttaaatttgtctttgtgcacttgtgtgagattgcttcttaggaaagccagttcctagcagtgggattgttgagtctgagggttctgttctgaggaccctgatcatctgtccagagggctgctctgagtcacacacctgccagggtgcggaggggccgtttccatcctcacctgcaccagatctgacaggtttaaacctttgcagaagtgactgggtggaaaacatctcatttcgtgggcacttccaagattcgcagtgagtggtaggggtgctcggtcctgtctctgtcccttaaagacgctccttgcctctgttcagtttcaaagttctggccaaggaccaatccctgcagcatgggcccctcaaggctttgtctgtggtgtgcggggccagggcatcttatcttgagccgcagttatatgtgctgttttgttctctaacctaattgaaatttttgaacacaaaccgttgtagtgggattcgcttctcagaaatatcccatctgtctgtcagatctagccccaccttcagagacacctcaggtcctgcacgacgtgcattgctaggctgtgccaactcttggcacctaagggaagggcacctgcaaggtagtcagtgagatcctgaggactgctgtgttagacaaggggcccttccttctccctgtgggttttgaggtggacattattgggaagaggacagcagagacgtgcctgggttggagccttgttttctgtcacattttcttccatttgaatgtggttcctgacagtgtccaagctggtgtctcttcctagagaaccgagagctcaaatttatcagcaaaatttagagaccaaggcagttatttatttatttatttatttatttatttatttatttatttttgagatggagtttcgctcttgttgcccaggctggagtacaatggcacgatctcggctcactgcaacctccacctcctgggttcaagtgatactcctgcctcggcctcccgagtagctgggattacaggcgcctgccaccacgcccggctaatgtttggtatttctgatagagacagggtttcactctgttggccaggctggtctcgaactcctgacctcaggcgatccacccacctcaccctcccaaagtgctgggattacaggcgtgagccaccacacgctgctcagggtgttcacttttttatagtcttcaacaaagtctagatttttttagaatgcacaattaataagtagaagaattaggagataaaaaagaacagttttactggctggcaggtagctggctccaaggccgtgctccagatccaccatttgtggggcggacagcacatgtgatgccaggatctggggctggccaagggagcatatcctccaaggggccccacctgcaagctcggcctgctggatgccctggatctcaaatctcacctgagcccacagccctcactcgggcaagactggcctcggccacccatgaagcagctttcagggtggggctgcttcagctcttaccaggacacttatggcttccagagacaccttcctgagagaagggcttatgctgatgtgttcctcctgccttccactgcgtggatggctctacaaagggccagggcgcaggcagtgtggacaacacactgaccccggtgctgtgggagtgggcactgttgggaggcagcgtgttccaggcaggtgcagaggtgggaggcagcatcttcccagcgagatgtccccaggtgaggggcctcatcgcccacccccagcgctgtccctacaggtgcagcaggagcgggacgagctctatcggaagttcaccgcagccatccaggaggtgcagcagaagacagggttcaagaacctcgtgctagaacgcaagctgcaggctctgagcgccgctgtggagaagaaggaggtgcagttcaacgaggtcctggctgcctctaacctggaccctgcagccctgacgctggtgtcccgcaagctggaggtaggccctagacaggctcctgaccccagtgggcggcctcatccctgtggcaagagtcttcagttctgtgctgctcctcggataggcacagagacccctcggtcggccactgaggaggggcattcatgggtttcctgtggccagtttcgggccagttgggaactgtggaagggctgggcaggggaaccagatcagggcccactctgctattgatggggagcacagggctggagggggctggttggggccagcacagaatggggacgggcagagggttggagagccgccaggaggctgagtccacaggtggggctgggaggggccgaggtgacttggtgtttgcacatgggggaacgacgggtcccggcccagtgggcggtggtgcctgtgggaccctggtcatctgggatggcctggctctcagggcctgaggtagtgaggctgtataggaggggcctcacctgggccagaggcactgtggccccgggactgaaaactcatctttgtttgctcagcactgggcccagtgagcacaggcaggtgagggagtgagggtcccactgttgggaggtgggggaggcgtgtttccagctcctggctgagggctgcacccagcctgctgctaagccaccgaaatgagggtgaagagagcagtcgtggcctgtgagggtcattgcagctgcgcccacgcgccagggtgaggatggaggatggagctaaatgtgggtcaacccctcctttcctggtcattgttacctcgacttctaagtgaggaatcttctggggaaatgacagaggcccccgcagggacactgtttgctgctggccaggtgtgagggggctgctgtgtcagtgggcagcagggacggctctaaagccaggctgggcccagcagtgccccacaggcaggagcccaagaagtccctgcctcgccacgtggtgagacccttgcccacatctgggcggggccagcgctgctgaagactacttttttctgttacaaaaaagtgggatagccgggcgcggtggctcacgcctgtaatcccagcactttgggaggctgaggtgggcagatcacgagtttgggagttcaagaccagcctggccaagatggtgaaaccccgtctctactaaaaatacaaaaattagctgggcttggtggcgggtgtaatcccagctatttgggaggctgaggcagagaattcctggcacctgggaggcggaggttgcggtgagcctagatcgcgccactgcactccagcctgggcaacggggcgagactccatctcagaaaaaaaagtgagatagtacattcacaagcctcaagaaatttaagcaatatgtaggtggtgtttagtgaccagtctccacagtgtggctgcacgctgcctgccctcacctcatctgcatttcttgtggtctggactgctctttgagttttttcttgagacggtgtcttgctctgtcacccagactggagtgcagtggctcaatctcggcgcactgcaacctccgtttcccaggttcaagcaattctcatgcctcagcctcctgagtagctgggattacacaggtgtgagccaccgtgcccggctacttttcgtatagtagagacggggtttcgccacgttggccaggctggtctcaaactcctgacctcaagtgatctgccctccttggcctcccacactgctgggatcacaggtgtgagcggcagtgcctggcctggactgttgctggagaggcaggttgtgcaagctcccagttctctgcttcttccttgttttctctccacccttggagacctttttctgctgacaaccctgtgtggatggatgcatccatcaaaccaggctgctattcgctggatctctcagaacgcccactggagtccccaggccgctcccgttgcctcggccaaaagatgagtctcaaactcccatcacctctctctcctcaggatgttcttgagtcgaagaacagcaccatcaaggacctgcagtatgagctggcccaggtctgtaaggtacggctgtgccctgccctccctcaggggcaccccctcggtgcccagactgttctaaatgcagacggtctctgaggaccccacctgtgcccacttcgtacctcgtttgacaaggcagctgtcactgtccccacgtgagggtgcagtcatagccgagagcatctggattctgtgtggtctggggcagtgcactgctgtctaggccatgtctctgctgggatgggtgtagggggggacctggacgcttccctggtcagccccttcccctgggcagggagtcagaaggtgctgtgcccaccggggaaggaaacagacgtcattcaacaggggaagggagggcgtgaagaacctgagtgggaaacacccagccagggcccagagccctcccagaccacagctctgccctgagtgtccctgccctctgcctccgtctcgtcatttgtggaataggaatagtgacagcctctccctgtcgtgctacctgagccaacgcagtgaaggtgcttggagctgtgtcccacacgggaaatgactgataagcctttggctttatccttctgcaccgtgatgctcacgctgcccctccatggagctgcactcagctctggtggtcctgagcgtggggaccctcagctccctgacactgccctgtctccacaggcccataacgacctgctgcgcacgtatgaggcaaagctgctggccttcgggatccctctggacaacgtgggcttcaagcccttggaaacagctgtgatcggacagacactgggccagggccccgcgggactggtgggcaccccgacgtagctgcccccctggggggccacagcccagagaaccagcctaggaacactcgggatgacaccccttatcacaccaaggacagcaagttttttagattttatcatcagcaaatgaaagcttttcacatgttcttgccatcctctttcctggctctgtggaggagaaccacctgcaggaccctcacccatggtgtccctgtcgctcccttccctgggtgccgcacgtccagcctgtgtccaggcctactccctggtctcacctccgaccacagtcggcggcaccttctcagagtgccccgcactcacctgggggttggggcagtgccgcgctgtgctgcctgtcttcgcgccactgttgtcccaccgaatggacagctttgcaggtgctggcactaacttcattgacacctgagtcacagctgcccagtgggattctccagggggccgggacttccctaggaagtggtgagccaatgctccctgatgagcacaaagcccgctctgttgagggctgggtgggtgcagccagcgtgcgggaacgggcaggcagcctcccgctgccagtcttcgctctaactccctcggtaggtgatgtaggaccaggggcacgtggaacttctgggccttgctggtgatggttaaaacaacctgagatggagaggccaggagagagtataaggggatagcagcaaaccacctatctggccccaacacacctgagagaattcagcagcccagactgagggtctgggatggggtgaaccttccgcaccagagggacactccacagaagccacagcccagtaagtcaggcgcttctgcggcggctccagtgtggggtgaggcagtgaggttaggcccagagagctggagttggctcagatgaaaacctctgtcaacaaagaggggatgaatcacccttggcccagcctccccacaaagcctgaccctgggcaggtgagtgacgggtgtgtcctcgtagagtctattgctgcctggacacctttcttttgggagctcaaagcaagtgagctcacctacctgccaccgcccaggaccagtctgcccactgcctaaatgatgcccggccagcaggacctggcctgcagatcccagtgagtcatgagcctcagccccctccagcccactggggctctcacctccacatgtgggtagaagctttcctgccccctcttcctccagtagccctcagtgtcgaaggtgagcttgtaggtgcctgccttcatctggtccaggacagtgaccatctgggtctgtgtagctggggagaggatgaggctgcagagatggggaccagaagccccccaccccagctttcctgggtctgcatcccagtgggcctcagacactgccctgccacctgtcagacttgggtgagcagacacagtgaggctgttaggtcctgcagttccagagcagtctagggacaccactgccctgtctttaggaaatcacaacacagagaagcaaaaagggaaaaagtctcccacaatttatcccatgagcaagaaccactttatagctggcatatatttttccagattttctctatgcataagtatatttgtttaaaaacttataaagtggattatactatttgtattgtttt

SEQ ID NO: 12121 - DNA, 3308 bp, Homo sapiens
ggagtctcgcgaggatcttgtgacttatcgcggcatcgcccagcggttgccgggaaacggcgtggcttccgggggcgggcgccctggtcccggagtcgccgctgggcctgtccgctggcgtcatggcaccgaaaaagaaagggaagaaaggcaaagccaaaggcaccccgattgtcgatgggctcgctccagaggacatgagcaaggagcagctgtttatttttaggtgaagttgagtcctccctctttcttccttgcctttcgccggccacacgccccgttgccgtgcatgggcccctgctcagtgcctcacctgacccactgcacctggccaggtggaggagcatgtcagccgcatccgggaggagctggaccgcgagcgggaggaacgaaactacttccagctggagcgggacaagatccacaccttctgggagatcacacggaggcagctggaggagaagaaggctgagctgcggaacaaagaccgggagatggaagaagccgaggagaggcaccaggtggagatcaaggtgtacaagcagaaagtgaagcacctgctatatgagcaccagaacaacctgacagagatgaaggctgagggcactgtagtcatgaagctggcacagaaagagcaccgcatacaggagagtgtgctgcgcaaggacatgcgggcactgaaggtggagctcaaggagcaggagctggccagtgaggtggtggtgaagaacctgcggctgaaacacaccgaggagatcaccaggatgcggaatgattttgagaggcaagttcgagaaattgaggccaagtatgataagaagatgaagatgctgagggacgaactcgacttgcggagaaagactgagctccacgaagtggaggagaggaagaatggccagatccacacgctgatgcagcgccacgaggaggccttcaccgacattaagaactactacaacgacatcaccctcaacaacctggccctcatcaactccctcaaggagcagatggaggacatgcggaagaaggaggaccacctggagagggagatggcagaggtgtctgggcagaacaagcgcctggcagaccctctccagaaggctcgggaggagatgagcgagatgcagaaacagctcgcaaactacgagagggacaagcagatcctgctttgcacaaaagcccgtttgaaagtcagggagaaagagctgaaagacctgcagtgggagcatgaagtgttagagcagcgattcaccaaggtgcagcaggagcgggacgagctctatcggaagttcaccgcagccatccaggaggtgcagcagaagacagggttcaagaacctcgtgctagaacgcaagctgcaggctctgagcgccgctgtggagaagaaggaggtgcagttcaacgaggtcctggctgcctctaacctggaccctgcagccctgacgctggtgtcccgcaagctggaggatgttcttgagtcgaagaacagcaccatcaaggacctgcagtatgagctggcccaggtctgtaaggcccataacgacctgctgcgcacgtatgaggcaaagctgctggccttcgggatccctctggacaacgtgggcttcaagcccttggaaacagctgtgatcggacagacactgggccagggccccgcgggactggtgggcaccccgacgtagctgcccccctggggggccacagcccagagaaccagcctaggaacactcgggatgacaccccttatcacaccaaggacagcaagttttttagattttatcatcagcaaatgaaagcttttcacatgttcttgccatcctctttcctggctctgtggaggagaaccacctgcaggaccctcacccatggtgtccctgtcgctcccttccctgggtgccgcacgtccagcctgtgtccaggcctactccctggtctcacctccgaccacagtcggcggcaccttctcagagtgccccgcactcacctgggggttggggcagtgccgcgctgtgctgcctgtcttcgcgccactgttgtcccaccgaatggacagctttgcaggtgctggcactaacttcattgacacctgagtcacagctgcccagtgggattctccagggggccgggacttccctaggaagtggtgagccaatgctccctgatgagcacaaagcccgctctgttgagggctgggtgggtgcagccagcgtgcgggaacgggcaggcagcctcccgctgccagtcttcgctctaactccctcggtaggtgatgtaggaccaggggcacgtggaacttctgggccttgctggtgatggttaaaacaacctgagatggagaggccaggagagagtataaggggatagcagcaaaccacctatctggccccaacacacctgagagaattcagcagcccagactgagggtctgggatggggtgaaccttccgcaccagagggacactccacagaagccacagcccagtaagtcaggcgcttctgcggcggctccagtgtggggtgaggcagtgaggttaggcccagagagctggagttggctcagatgaaaacctctgtcaacaaagaggggatgaatcacccttggcccagcctccccacaaagcctgaccctgggcaggtgagtgacgggtgtgtcctcgtagagtctattgctgcctggacacctttcttttgggagctcaaagcaagtgagctcacctacctgccaccgcccaggaccagtctgcccactgcctaaatgatgcccggccagcaggacctggcctgcagatcccagtgagtcatgagcctcagccccctccagcccactggggctctcacctccacatgtgggtagaagctttcctgccccctcttcctccagtagccctcagtgtcgaaggtgagcttgtaggtgcctgccttcatctggtccaggacagtgaccatctgggtctgtgtagctggggagaggatgaggctgcagagatggggaccagaagccccccaccccagctttcctgggtctgcatcccagtgggcctcagacactgccctgccacctgtcagacttgggtgagcagacacagtgaggctgttaggtcctgcagttccagagcagtctagggacaccactgccctgtctttaggaaatcacaacacagagaagcaaaaagggaaaaagtctcccacaatttatcccatgagcaagaaccactttatagctggcatatatttttccagattttctctatgcataagtatatttgtttaaaaacttataaagtggattatactatttgtattgtttt

SEQ ID NO: 12122 - DNA, 1870 bp, Homo sapiens
ggcggggtccggacggggatgccaagagcagggatgggagcgagcctgcgtccgggcactggtccccatccgtgagtcccctcggtgctccctgcccgccgtggccatcctctcacatcactcacaaccccaaggcgcggcatggttgacacccccacgttaggacggagaccctgggcttagttagagggggcagtactaaccagtccctggcggaaacgctttggctgggtgaggtgagcgggatcgcccccatttctccagagaggggtcccggctcagcgagggaaagaggccgccgctggggggacggctggccggggcccctccctggagaacgagaggccgccgctggagggggatggactgtcggagcgacactcagcgaccgccctacctcctcccgccccgcagcgacacgggcgaccgcaagcagatctacaacatcctgagcacgctggggctgcgaccctcgaccaccgactgcgacatcgtgcgccgcgcctgcgagagcgtgtctacgcgcgctgcgcacatgtgctcggcggggctggcgggcgtcatcaaccgcatgcgcgagagccgcagcgaggacgtaatgcgcatcactgtgggcgtggatggctccgtgtacaagctgcaccccaggtgagcccgccccgctctctccctggtaaagtggggcccaaaaagcgcgcgctccaaggttccttgcggttcccaagctccaagatttcgtagtcctcttctcgtcccccttggcctagatttgggggaagggtcgactgcgtgcagggcgcccggtaatgaatgtggaggatgaggtgggaggagggacggcagccctgcttctcttctgcccagcttcaaggagcggttccatgccagcgtgcgcaggctgacgcccagctgcgagatcaccttcatcgagtcggaggagggcagtggccggggcgcggccctggtctcggcggtggcctgtaagaaggcctgtatgctgggccagtgagagcagtggccgcaagcgcagggaggatgccacagccccacagcacccaggctccatggggaagtgctccccacacgtgctcgcagcctggcggggcaggaggcctggccttgtcaggacccaggccgcctgccataccgctggggaacagagcgggcctcttccctcagtttttcggtgggacagccccagggccctaacgggggtgcggcaggagcaggaacagagactctggaagccccccacctttctcgctggaatcaatttcccagaagggagttgctcactcaggactttgatgcatttccacactgtcagagctgttggcctcgcctgggcccaggctctgggaaggggtgccctctggatcctgctgtggcctcacttccctgggaactcatcctgtgtggggaggcagctccaacagcttgaccagacctagacctgggccaaaagggcagccaggggctgctcatcacccagtcctggccattttcttgcctgaggctcaagaggcccagggagcaatgggagggggctccatggaggaggtgtcccaagctttgaatacccccagagaccttttctctcccataccatcactgagtggcttgtgattctgggatggaccctcgcagcaggtgcaagagacagagcccccaagcctctgccccaaggggcccacaaaggggagaagggccagccctacatcttcagctcccatagcgctggctcaggaagaaaccccaagcagcattcagcacaccccaagggacaaccccatcatatgacatgccaccctctccatgcccaacctaagattgtgtgggttttttaattaaaaatgttaaaagttttaaa

SEQ ID NO: 12123 - DNA, 1311 bp, Homo sapiens
ggcggggtccggacggggatgccaagagcagggatgggagcgagcctgcgtccgggcactggtccccatcccgacacgggcgaccgcaagcagatctacaacatcctgagcacgctggggctgcgaccctcgaccaccgactgcgacatcgtgcgccgcgcctgcgagagcgtgtctacgcgcgctgcgcacatgtgctcggcggggctggcgggcgtcatcaaccgcatgcgcgagagccgcagcgaggacgtaatgcgcatcactgtgggcgtggatggctccgtgtacaagctgcaccccagcttcaaggagcggttccatgccagcgtgcgcaggctgacgcccagctgcgagatcaccttcatcgagtcggaggagggcagtggccggggcgcggccctggtctcggcggtggcctgtaagaaggcctgtatgctgggccagtgagagcagtggccgcaagcgcagggaggatgccacagccccacagcacccaggctccatggggaagtgctccccacacgtgctcgcagcctggcggggcaggaggcctggccttgtcaggacccaggccgcctgccataccgctggggaacagagcgggcctcttccctcagtttttcggtgggacagccccagggccctaacgggggtgcggcaggagcaggaacagagactctggaagccccccacctttctcgctggaatcaatttcccagaagggagttgctcactcaggactttgatgcatttccacactgtcagagctgttggcctcgcctgggcccaggctctgggaaggggtgccctctggatcctgctgtggcctcacttccctgggaactcatcctgtgtggggaggcagctccaacagcttgaccagacctagacctgggccaaaagggcagccaggggctgctcatcacccagtcctggccattttcttgcctgaggctcaagaggcccagggagcaatgggagggggctccatggaggaggtgtcccaagctttgaatacccccagagaccttttctctcccataccatcactgagtggcttgtgattctgggatggaccctcgcagcaggtgcaagagacagagcccccaagcctctgccccaaggggcccacaaaggggagaagggccagccctacatcttcagctcccatagcgctggctcaggaagaaaccccaagcagcattcagcacaccccaagggacaaccccatcatatgacatgccaccctctccatgcccaacctaagattgtgtgggttttttaattaaaaatgttaaaagttttaaa

SEQ ID NO: 12124 - DNA, 15008 bp, Homo sapiens
agtgcagaagccctgggctgccagcctcaggcagctctccatccaagcagccgttgctgccacaggcgggccttacgctccaaggctacagcatgtgctaggcctcagcaggcaggagcatctctgcctcccaaagcatctacctcttagcccctcggagagatggcgatggatgtcacaaggagccaggcccagacagccttgactctggtaagggtcacaccaaagttagggactttgcactgggagagcagcacccagggcagggcccttggttttgcagattaccaaaactaaggctgggggcagggaaggcgagcaggcttggggcaccttggaaggaggcacatgggccttgggggtcctggctagggcagctgtgcctgccactggccctctgcccaccacccctcctcactgtggctatccagtgtccagcctctcgaggggttctagggtacttattcctggagctaacggtgacccaggacaccagtgtccggggcctggcctggggcttttatggggggagctggctggctgcccagggctgtctggctctctgggggctctgcatggcatttccaggggttggtggatcagggattctgtccctcaggagaatgtgggcactagcccaaggccactcacttctgtgtacatagccacctgagggcccaggaatggagggggccaggctacagctggacatctggcactcggatgggctctggagcccccaggcctgcagcatctgcccagggactgccctggcccttggccatttcctcagggacccacagctccaccagccggcccctcccagtgctggaatagacagttcctcagtccacatctgccaaaggcggcactagaaggcatcctgccttttttactgcgttctggaggtggggtcacaaagcactgctcactgcataaaagggacagcatcctgcccctggcagccctgcctgaccagctccgcctctcccactgctatccaacctgtacaccctggtgaccatgtccaggccagtggccttaaggactgtctctgtactgatggctccacatctacctctccagccagactctcctctgaactcgggcctcacatggccaactgctacttggaacaaatcgccccttggctggcagatgtgttaacatgcccagaccaagatcccaactcccacaacccaactcccaggtcagatggaacctcttcttcccaggcccttctgttcctctcctcagcccctcccacctcccttcagaataagtctagactcttatcgctttcaccaagcctgcgcccagcatccctgcacagggattgttaggacagcctgacgccctgcttccaccctgccccaagatgcccctgctctgcagcccggcgcctccaggcttctcacctcctgctgctcacagctcagcctcactccctccctccccgcctctgctccagcctcagtgcaggtcccctgctcccatcttctggcagcagctgcccgacctggtccctcttcatctgtccccattccttcaccccccagcctgtccccaacttgactgaggttctttcctgcagatccccgcccttgagaggggttggtcccactgtcaactctgcttctgtgccctgtgccgcacctggcattcagtgagcatctgctgaagagatgagggtcagatgccctgcagggagtgtgggggcgtcctcaggcaagaaaagttgtacgtttggctgtgggccctgattatgtgtcctgtgacctcttgggtgaggtcagcaagagaaacctctgcaagctggctggggctgcctcccagaggctgccagggggagggacaggctctgtctgtgctcttcttccgaggctacacctggggcgccaggctctcagggctccccaggtaccaccacatttcctacactgcttgggaaagccctgtaagtttgcacagacacccagcatgaggctcgccagagagatacttgtagctggggtctgggcaccaggaacagcttggtgctgggcctgaagtcgggcaggatgcagcctggccaggtgagaggaaagcttggagccagtgcctgggttcaaactcctctgtggcctatggttctgtgggcttggggaagggtttgtacctctgtgtccagtttcctcacttataaaaaaaggagataataaaagtacccatgtcccagggtggctgtagcaataatagggaggggtgcccagagcaggtctggcacacaggaagtgtgcatcagcctcagtccctgccattgggcttgtcctgggagtctgtgaagccaacctctgctccacaatgtgacccccaggcttgtgagaccaagctgggtcagagcttcctcctctggggttgcaccaggaggggaacttctgcaggcccagatgcaccctgaggaaagggcttgttcccaccaagaacaaggctcacctttggaggatgctccccacatgagaggtgaacccccaggtctactggtgactgcagcctcggaagctgacagcatctatcctccaacccatgcccactgggaagtgtgtgaggggtcctcataggccctgcggtgtggacaatgcagagaccctgtagcatctggctagggcggggcccagataagagccctgtgccaggagagcctggccggttctgccactgtggggagacaggctcccccaccccatgtcccctgcttccctgcagcccacagagaatacagacctacttttacagaaatccagatttttgtgtaaaagtgtctctattttaagtagattttaagtggtggcagcaaatttaagcttttgagaatattatacagaacaaatcagattcacaggccagatgcaactttatttacagaaatgggatcaggtcctacctcaggtcccatctcacgttttcacttatgcctatacgtctccttcacgggaaaggccacaagaggccctgcggtaagtgtcccggtgttgatttaaagtccccaacagtgaatatgagggtcctcactgttgcagcaagaggatacccccctgtgtatcttggaaatgcctgcagccctcttgctgcagaacagattcttaggagagaaactgtcagatcaaagttaaacttagagaaactccaaattgccctctgaacagacggtatcagtttgacatcatccaataccgggattcctcggggagaactttctggcctagaaggcagtagagccaggacttcacccagtcagtggcagggccacacgtgggccttgatacagagggggaagacttgagcctcctcgacaccctacagggcccagcctcccaacatgtgataagagaaacaacagccaacttgtacctagctctccttattctccaagggctgggccagttctccccacagccctgcaagggaggatcactcaagggccccaactgtctgacaatacagccacactctgatcagccacctgggcataggctccatgccattgtcctccgccaagacctcagactgaaatgttggctcctcccatgaagaacctggggccaaaggaccagagtccaggtccgtggctgccaggatgggccacttggagagaggcacaagggtggtgccaggcaggtgtgagggctggacctttgcaagagcagcatcacttttgttgagagcccacaggtatcttataattgggtcctaggacttcctgccagtagccattgtgtgcatggatttgggtgctggcctcaccatggtgtgctggctgcccatgcctgcaataatgacttctgtaagcctttcttcatctgcaagatgggtgctgctggcacctcctccccggtgctgtggtgacagggcatagtgtgtgaggctgctatgtgaagcacctaatgcagggcctggcatatggaggaattcagcaaatgacagatgccttcacagttagttcctggcatcctctacattggtgggtgtaggaaagaaagacagaggaggcaaaagttgtagctgtggggcattgaggacagcctggattgttccacagagccctgaggacatctccaggggtgtgctctgcaggggcagctggattggagggttaggggtcggggagggcgtgcactcccacccatgctcacagcctcggaacagtgcctgctcagccaacatgggtgtttgattctgtgtcttttgtcacagactttatcagccccatccctttctgaccttgcctcagtttaaattttacatgtggggcctcattaagagacatggttcttaactaaagatctgtatccattaggaatgctttgggctgcaggaagacaaacacctgactcactgtggcataagtggtttgcgtctgctcccataagctgcacgtggagggtggatctggcattactctctcttccctacatttgcagtatgctaacagctttaacctccagccttgtttcttcatggttgcagggtggctatcacagcgctggccatcacatccttacacagctgtgtttacaaatttagggggacattgaagctcctcccctgctaaaatcaggcttcccttcacctgtcattggccagaactgggtgaaatgcccaactctagaccgatcatcagtaagaggagtatagaattgctgtgcccaccttagattaatcatggcgcaatgtgctccccataccaacaaaatctgagttctagaaactgaggaagaagaggaaaatggccgtcttgcctcctggctgggattcagagcatctccaaccctctgagcttatgtgtaagactgtgggcaaaagtgtgtgagtttttgtggaatggatccacggcttttatcagagcatctttcctttttctttttgattcaagatgaaaatattcttatgattatttttctcaccactgcccagagataaccagcacattaacatggccttttctccatgaatagcactagggtgcccagtggacagacacatagctgtccacacaccagcttgctggggatgcataggcagagtcacatctgcactcacggcctgtcctcacactgccatgtggagagccagcagccacaccatgggccgtccatgctcacgggagtggcagtatcagatctgagcttcgtgtgcccaggcgtctctcacatcagtgcatagggaccctctttgttctgtggcccagtgtgcccatgccacagatggcttcagtcagcagacacctccttctagacactcacactcactcctggctggcccttagcacacctgtgcagacaggcccatttattttcttgtgtaaatcccaagtaggaggactgggtctctctgacagcaatgccagctgcctggcaccctccagacaggtggctcaagccccacctcgccagctctcccagttagcccctcctttccctggctctgacctgagggacgaagcagggtgctacaggacgctgtgccacagggatatcgtcagggacagaagctactctgccctctgctgctcacccctccaacacgctgtgggctgcatttgttgagtggctggtaccagactctgctcttctgactttccagctggttttacctgtagtaaagtttgagaagatgggtcatcctgaccccggggtcagaagacagaaggaggcccatggcgtgtgggggagatgccccgtgaggccctcggtgtgcagatgcctggtgacagccccaccctgaggtccccagcctaccccctccccagcccgactgctcccatccccctccctgtgcaggtagagcagatcctggcagagttccagctgcaggaggaggacctgaagaaggtgatgagacggatgcagaaggagatggaccgcggcctgaggctggagacccatgaagaggccagtgtgaagatgctgcccacctacgtgcgctccaccccagaaggctcaggtaccacatggtaaccggctcctcatccagaagcagctgtgggctcagccctagctgggagaagcaccccaggcactcccagactcacagccagcccgagacagaatctcctggggagcaatgaagtcctcgacttgggccagttctcacccttggctcctctggtccggccctggggcactcgggctcaccctggagctggcaaacctcaggaaaactggcgttttaaatctcactcctggccaggtgcagtggctcacccctgtaacttcaacactttgggaggccaaagcaggcggatctcttgaggccaggagtttgagaccagcctgcccaacatggtgaaaccccgtctctactaaaaatacaaaaattatccaggcatggtggcacattcctgtagttccagctactcgggaggctgaggcataagaattgcttgaacccgggaggccgaggttgcagtgagccaaaatcgcgccactgcactccagcctggggtgacagggtgagacaccatctcaaaaaaaaaaaaaaaaaaagacctcactgctccccatgggcacttagggaactctcccagcccagttctgcagctgggccattgcactagatcctcagttggtccctgggctctcggtgactgtccagggcaggagtttcccattgacttttccctggttgacctttgaccccttccacagttgacactggtgtccccaggtgtctggtggccccttgtccagctcccttagtcccttgtgccttccctcctcctctttgtaatatccgggctcagtcacctggggcccacccagcccaaggccagcctgtgggtgtccctgaggctgacacacttctctctgtgcctttagaagtcggggacttcctctccctggacctgggtggcactaacttcagggtgatgctggtgaaggtgggagaaggtgaggaggggcagtggagcgtgaagaccaaacaccagatgtactccatccccgaggacgccatgaccggcactgctgagatggtgagcagcgcaggggccggggcagggggccaaggccatgcaggatctcagggcccagctagtcctgacgggaggtgccacctgtctaccaggggtggggagagcgggggctggaggaccacccagcctcagaggcagctggaggcctgggtgaacaggactggccaacatgtccccaagtcccacagtcaccatctggccagcattgagaggggaacgggctgaggaagagttagtggcaagaggaaccccagccagtcacaccttgtccagtttaccagaggaaaaaccaatgtgtaagaacagaaatgtgacccggcagccagtgcactgcccccctctccaaaggccacccctcaccctccaccagcatgcacagaaagtggggtgacagcaatcacaatgtctacccaggcagcaaggacccctgaccatggggaggactggggtgcagggaacatagaagcagaatgaggcctagggggagttgggcaaggccagagccctagctgcagccaagcacatggccaaggccagctcctggaagggcagggctccgaggcaggaggcaggaggctgcccgtggctacccgtcctcacacccctgcagcttgctagtctgtctgtgggctgggtgtgaatcaaggcagtgggatggtgtggggacctccctggccccagcagccagtgaggagcctggtcagtcagcagagcattcagcagtatccagttccatggagaggcccgtgtgaggggagtcggggctggtcttcagtaaggatgggtggccagggcccctagaagtagaaaaggagactccgggtgctggagacagaaatcaaggatgtgcctccatgtggagcctcaggaatagctggccaggcctgaggctgaacctcacaaggttcagctgggagggctaggctgacagagcacagccgggccagggaccagcctgccctgtgttgccttgtcccgagggccactgtcagcaggtctctggcatgggggaggcttagggcctgagcccaacaagcagcagcggaagaggagagggaaactgtggacaggcctggcattcagtggccaggtgttgcagtgtccctgaggaatagcttggcttgaggccgtggggagggctgccggccagcgcacccccccatgccagatggtcaccatggcgtgcatcttccagctcttcgactacatctctgagtgcatctccgacttcctggacaagcatcagatgaaacacaagaagctgcccctgggcttcaccttctcctttcctgtgaggcacgaagacatcgataaggtgggccgggtggaggggcagaaggcagatgaggggaggcacaggcaccccagaggaactctgccttcaaatgtagcccccataccatgtgctcagaagggagatctggattcaaattgtggccatgtcacctgccacctctaatgctgtggaaaagaagcatcacattagctaattctggctgtgcgccttgtgaggcaccagctatgatcaccccactccagtggaaagagcagctggcagtagggtggggctcaaactcaggcagccgggctctgggtcacctgcaggccacggtcatgtcacactgcctctagctgagtcagaaatgtgaaggaactgagattctacccttcctgcaagctagcaaagtggcctgccagttacatctgtgcatgcacacacacacacagttatatatgcacacacataaaacacgagacctttgggtcagggagaaagccagatcctcactcacggcagaagcagcagccaaagcaacatctcatgtggttttccaagccccagtccctacagagacagagagggccaggtggcacctgtgcatgcagcggggtaccttgcaggagggaaatcctgattttacacaaagctgctccccccacgccctgccttgactctgggatgacgtctcagagctgtgcagtacaacattcttaaattggctgggactcagccctgcagaaatatgatatcttcaaggagaatcgttcccaaaacctctcaaagctatggggctgctctgagcctgtttcctcagctgtaaagtagggtgcatacttttatggccctgtgcaggaggtagtgacaggccctagcaccctgcctccagtatatgttagcagccacgaggcctatctctccccacagggcatccttctcaactggaccaagggcttcaaggcctcaggagcagaagggaacaatgtcgtggggcttctgcgagacgctatcaaacggagaggggtgagggggcacctgtacctgccgggggggctgccctgggccacccaccccagcactgcctgcctttctccttggcttccagcactgcagcttctgtgcttcttggcaggactttgaaatggatgtggtggcaatggtgaatgacacggtggccacgatgatctcctgctactacgaagaccatcagtgcgaggtcggcatgatcgtgggtaagggctccttgcacccctgccccttccagactgctgaggctccctgtgtacaacaggcttcaagggccctgtggggtgaggaccaaactacttaacaaccggtgatgtcagagcagagcctggtgctacagcctgggtggtcttggggtatcaagatggaagcaccgtgtacagtaggaagcatttcaacgccatgatgccacattcctgcatcagatggtatgccagctgcatatccacctcacccatcaggattataattaaaacacttatctggtaaattgaccaactggacagattggtccaagtggaagaggataagcaaaagtggtaccatctccacccgaatggtctttccacgggcctgcccctgcccctgcccccacccaaagtgaaggcaggtaccaggaaagggagcagcagtccgcccctcccagcagaggggtcttccacaccaactcggacctttctcagaagttccggaggtcattataaccagccttcactgaggagcaatccaatcagatcagttatctgctgtgcgcacagccgtgtggttctatacttctcttacttccattttcacctttcagaaggaacgttgtctttaaatccagcatctaaacgtgagccccagccatccctggctgtgatccccccagccctttccaccctatcctctggaactgcctggggctccccaagacacttccacatgaattcccaccaagccaagctgcagctgctgggcccaggcataacccctcctggggcagaggtggcaaggagtgacccaccactcacatctgccccacatccactcttgactctgctcagtgtttaaaaacatgtttataacaattaccaagatctgaaaattaggagaattcacatcaaagtctggatttctgtttgttcataaaaaactagaaggcagccaggcaaggtggctcacgccagtaatcccaacactttgggaggctaaggcaggcgggtcacttgaggtcaggatttgaagactagctggccaacaaggtgtaacctcgtctctactaaaaatacaaaaattagctgggtgtgatggcgcatgcctgtaatcccaggtactcaggagactgaggcaggagaattgcttaaaccctggaggcagaggttgcagtgagccaagatcacgccactgcactccagcctgggtgatggagtgagtgagactctgtctccaaataaataaataaataaataaaaactggaagtctaagcatcactgagccctgattcctatgtggcagctcgactgaccagcatttgagttgctgtccctgacagctttgggggtgtgcagcccacacagtcatgctagcttgaggctctgctgtcagcagtttgaaactcttaataacttgtgaacaaaagactccatgttgtcactctgcacaggggccagcaaattacaaaattccatatccggaattgtctacaggagcctctgggctgctcccaagggcccacaccatgccttactcactttgggttgccatccaaacatgtctcatgacaaagaagctcaaacatgtgcatggacagtgccagaaaacaagggtcgtacatagacaaaataaaatgataacgtcccacaaccatttctttgatacacactgtttctctcagtcctcccaaccacctaggtaacaggcagggaaggtgttactgttgcctgttaggaaagaggacagccctgaaagctgtccctggccactgaagcaacccaggtcttccagccccagggagagccgcctttccattgttccagacaaagcagagacaggcatgggggagcgggagagggactcctgtgggcaggaaccaggccctactccggggcagtgcagctctcgctgacagtccccccgacctccaccccaggcacgggctgcaatgcctgctacatggaggagatgcagaatgtggagctggtggagggggacgagggccgcatgtgcgtcaataccgagtggggcgccttcggggactccggcgagctggacgagttcctgctggagtatgaccgcctggtggacgagagctctgcaaaccccggtcagcagctgtaaggatgcccccctcccccacaacccaggccctgggccgctctggtgcagcggcagatgggagccgggccattgcagataatgggcttgtttttaaacaactctggggaaaagcaaactgacaatccgttcgtaagctccatcccttctgctcagtcatgacctgcccctgtgagagatgaagggttagtcccagttgtgatgtgataagcccagacctctttccttccgacaggtgatcgtgcatgcagaggaggctctgagacgcccccagcaaggttcctgggtttaacccaacattccccaaagtatgtatttggccacattcacagaaagaatattagtcttttgtggaatgctgcgggttgacagtcacagcttggaaaccaacccacagagagctcatcattaatcatggctatcacttgtttaccacctactgtgccaggcctatgctaattactttattagcgtcctctctgccgctcgcaggcctctattattataggtcagtagtattcgatttatttaaattaaatacggaaggtcatagattaagcaagaaagtgccagcaacatggtgcgtgcctctgactgggcactaaccctccaagtcttagttttcccaaccataactggccaatgaacagcagctctggatgcagctaaaggaagactgaagctgtaggtcccgtgctcggcgcagggccccctgcaaggaaggtttcggagggactggatggggtctttgaactatctgtctttccctttactgcagtgggcccaggggcaggccaaagttgctcccgtgattgacttgaacgtgcacgttcctaatccctgacatttctaaagctctggctcattaacgagggaaagacgtgaaccagctgggggagtggggatcgcagtgccccacgtggccgcctcgtgacctcagtggggagcagtggggccggctcccggcttccacctgcatgaggggccctccctcgtgcctgctgatgtaatggacctgccctatgtccaggtatgagaagctcataggtggcaagtacatgggcgagctggtgcggcttgtgctgctcaggctcgtggacgaaaacctgctcttccacggggaggcctccgagcagctgcgcacacgcggagccttcgagacgcgcttcgtgtcgcaggtggagaggtgtgcggaggaggagggtgggtgcaaagggcaggggctggggacgcccgggcactgcagacttggtctcagggcgacgctgagtcccaggcccggggcgcagggatgggaaactagggcctggggcgggattccgggcgtgggcggggcccggggcggggcacagggggcgggggagtgggcggggcccgaggccgggcgctggaggcgagggcggggcagggacgggtccaagggcaggaggctgggacaggacggggatgcaaagggaggggcggggcccgagacggggaggagggggagggcccaaggggaggaggcggggtccggacggggatgccaagagcagggatgggagcgagcctgcgtccgggcactggtccccatccgtgagtcccctcggtgctccctgcccgccgtggccatcctctcacatcactcacaaccccaaggcgcggcatggttgacacccccacgttaggacggagaccctgggcttagttagagggggcagtactaaccagtccctggcggaaacgctttggctgggtgaggtgagcgggatcgcccccatttctccagagaggggtcccggctcagcgagggaaagaggccgccgctggggggacggctggccggggcccctccctggagaacgagaggccgccgctggagggggatggactgtcggagcgacactcagcgaccgccctacctcctcccgccccgcagcgacacgggcgaccgcaagcagatctacaacatcctgagcacgctggggctgcgaccctcgaccaccgactgcgacatcgtgcgccgcgcctgcgagagcgtgtctacgcgcgctgcgcacatgtgctcggcggggctggcgggcgtcatcaaccgcatgcgcgagagccgcagcgaggacgtaatgcgcatcactgtgggcgtggatggctccgtgtacaagctgcaccccaggtgagcccgccccgctctctccctggtaaagtggggcccaaaaagcgcgcgctccaaggttccttgcggttcccaagctccaagatttcgtagtcctcttctcgtcccccttggcctagatttgggggaagggtcgactgcgtgcagggcgcccggtaatgaatgtggaggatgaggtgggaggagggacggcagccctgcttctcttctgcccagcttcaaggagcggttccatgccagcgtgcgcaggctgacgcccagctgcgagatcaccttcatcgagtcggaggagggcagtggccggggcgcggccctggtctcggcggtggcctgtaagaaggcctgtatgctgggccagtgagagcagtggccgcaagcgcagggaggatgccacagccccacagcacccaggctccatggggaagtgctccccacacgtgctcgcagcctggcggggcaggaggcctggccttgtcaggacccaggccgcctgccataccgctggggaacagagcgggcctcttccctcagtttttcggtgggacagccccagggccctaacgggggtgcggcaggagcaggaacagagactctggaagccccccacctttctcgctggaatcaatttcccagaagggagttgctcactcaggactttgatgcatttccacactgtcagagctgttggcctcgcctgggcccaggctctgggaaggggtgccctctggatcctgctgtggcctcacttccctgggaactcatcctgtgtggggaggcagctccaacagcttgaccagacctagacctgggccaaaagggcagccaggggctgctcatcacccagtcctggccattttcttgcctgaggctcaagaggcccagggagcaatgggagggggctccatggaggaggtgtcccaagctttgaatacccccagagaccttttctctcccataccatcactgagtggcttgtgattctgggatggaccctcgcagcaggtgcaagagacagagcccccaagcctctgccccaaggggcccacaaaggggagaagggccagccctacatcttcagctcccatagcgctggctcaggaagaaaccccaagcagcattcagcacaccccaagggacaaccccatcatatgacatgccaccctctccatgcccaacctaagattgtgtgggttttttaattaaaaatgttaaaagttttaaa

SEQ ID NO: 12125 - DNA, 2424 bp, Homo sapiens
agtgcagaagccctgggctgccagcctcaggcagctctccatccaagcagccgttgctgccacaggcgggccttacgctccaaggctacagcatgtgctaggcctcagcaggcaggagcatctctgcctcccaaagcatctacctcttagcccctcggagagatggcgatggatgtcacaaggagccaggcccagacagccttgactctggtagagcagatcctggcagagttccagctgcaggaggaggacctgaagaaggtgatgagacggatgcagaaggagatggaccgcggcctgaggctggagacccatgaagaggccagtgtgaagatgctgcccacctacgtgcgctccaccccagaaggctcagaagtcggggacttcctctccctggacctgggtggcactaacttcagggtgatgctggtgaaggtgggagaaggtgaggaggggcagtggagcgtgaagaccaaacaccagatgtactccatccccgaggacgccatgaccggcactgctgagatgctcttcgactacatctctgagtgcatctccgacttcctggacaagcatcagatgaaacacaagaagctgcccctgggcttcaccttctcctttcctgtgaggcacgaagacatcgataagggcatccttctcaactggaccaagggcttcaaggcctcaggagcagaagggaacaatgtcgtggggcttctgcgagacgctatcaaacggagaggggactttgaaatggatgtggtggcaatggtgaatgacacggtggccacgatgatctcctgctactacgaagaccatcagtgcgaggtcggcatgatcgtgggcacgggctgcaatgcctgctacatggaggagatgcagaatgtggagctggtggagggggacgagggccgcatgtgcgtcaataccgagtggggcgccttcggggactccggcgagctggacgagttcctgctggagtatgaccgcctggtggacgagagctctgcaaaccccggtcagcagctgtatgagaagctcataggtggcaagtacatgggcgagctggtgcggcttgtgctgctcaggctcgtggacgaaaacctgctcttccacggggaggcctccgagcagctgcgcacacgcggagccttcgagacgcgcttcgtgtcgcaggtggagagcgacacgggcgaccgcaagcagatctacaacatcctgagcacgctggggctgcgaccctcgaccaccgactgcgacatcgtgcgccgcgcctgcgagagcgtgtctacgcgcgctgcgcacatgtgctcggcggggctggcgggcgtcatcaaccgcatgcgcgagagccgcagcgaggacgtaatgcgcatcactgtgggcgtggatggctccgtgtacaagctgcaccccagcttcaaggagcggttccatgccagcgtgcgcaggctgacgcccagctgcgagatcaccttcatcgagtcggaggagggcagtggccggggcgcggccctggtctcggcggtggcctgtaagaaggcctgtatgctgggccagtgagagcagtggccgcaagcgcagggaggatgccacagccccacagcacccaggctccatggggaagtgctccccacacgtgctcgcagcctggcggggcaggaggcctggccttgtcaggacccaggccgcctgccataccgctggggaacagagcgggcctcttccctcagtttttcggtgggacagccccagggccctaacgggggtgcggcaggagcaggaacagagactctggaagccccccacctttctcgctggaatcaatttcccagaagggagttgctcactcaggactttgatgcatttccacactgtcagagctgttggcctcgcctgggcccaggctctgggaaggggtgccctctggatcctgctgtggcctcacttccctgggaactcatcctgtgtggggaggcagctccaacagcttgaccagacctagacctgggccaaaagggcagccaggggctgctcatcacccagtcctggccattttcttgcctgaggctcaagaggcccagggagcaatgggagggggctccatggaggaggtgtcccaagctttgaatacccccagagaccttttctctcccataccatcactgagtggcttgtgattctgggatggaccctcgcagcaggtgcaagagacagagcccccaagcctctgccccaaggggcccacaaaggggagaagggccagccctacatcttcagctcccatagcgctggctcaggaagaaaccccaagcagcattcagcacaccccaagggacaaccccatcatatgacatgccaccctctccatgcccaacctaagattgtgtgggttttttaattaaaaatgttaaaagttttaaa

SEQ ID NO: 12126 - DNA, 14999 bp, Homo sapiens
aagccctgggctgccagcctcaggcagctctccatccaagcagccgttgctgccacaggcgggccttacgctccaaggctacagcatgtgctaggcctcagcaggcaggagcatctctgcctcccaaagcatctacctcttagcccctcggagagatggcgatggatgtcacaaggagccaggcccagacagccttgactctggtaagggtcacaccaaagttagggactttgcactgggagagcagcacccagggcagggcccttggttttgcagattaccaaaactaaggctgggggcagggaaggcgagcaggcttggggcaccttggaaggaggcacatgggccttgggggtcctggctagggcagctgtgcctgccactggccctctgcccaccacccctcctcactgtggctatccagtgtccagcctctcgaggggttctagggtacttattcctggagctaacggtgacccaggacaccagtgtccggggcctggcctggggcttttatggggggagctggctggctgcccagggctgtctggctctctgggggctctgcatggcatttccaggggttggtggatcagggattctgtccctcaggagaatgtgggcactagcccaaggccactcacttctgtgtacatagccacctgagggcccaggaatggagggggccaggctacagctggacatctggcactcggatgggctctggagcccccaggcctgcagcatctgcccagggactgccctggcccttggccatttcctcagggacccacagctccaccagccggcccctcccagtgctggaatagacagttcctcagtccacatctgccaaaggcggcactagaaggcatcctgccttttttactgcgttctggaggtggggtcacaaagcactgctcactgcataaaagggacagcatcctgcccctggcagccctgcctgaccagctccgcctctcccactgctatccaacctgtacaccctggtgaccatgtccaggccagtggccttaaggactgtctctgtactgatggctccacatctacctctccagccagactctcctctgaactcgggcctcacatggccaactgctacttggaacaaatcgccccttggctggcagatgtgttaacatgcccagaccaagatcccaactcccacaacccaactcccaggtcagatggaacctcttcttcccaggcccttctgttcctctcctcagcccctcccacctcccttcagaataagtctagactcttatcgctttcaccaagcctgcgcccagcatccctgcacagggattgttaggacagcctgacgccctgcttccaccctgccccaagatgcccctgctctgcagcccggcgcctccaggcttctcacctcctgctgctcacagctcagcctcactccctccctccccgcctctgctccagcctcagtgcaggtcccctgctcccatcttctggcagcagctgcccgacctggtccctcttcatctgtccccattccttcaccccccagcctgtccccaacttgactgaggttctttcctgcagatccccgcccttgagaggggttggtcccactgtcaactctgcttctgtgccctgtgccgcacctggcattcagtgagcatctgctgaagagatgagggtcagatgccctgcagggagtgtgggggcgtcctcaggcaagaaaagttgtacgtttggctgtgggccctgattatgtgtcctgtgacctcttgggtgaggtcagcaagagaaacctctgcaagctggctggggctgcctcccagaggctgccagggggagggacaggctctgtctgtgctcttcttccgaggctacacctggggcgccaggctctcagggctccccaggtaccaccacatttcctacactgcttgggaaagccctgtaagtttgcacagacacccagcatgaggctcgccagagagatacttgtagctggggtctgggcaccaggaacagcttggtgctgggcctgaagtcgggcaggatgcagcctggccaggtgagaggaaagcttggagccagtgcctgggttcaaactcctctgtggcctatggttctgtgggcttggggaagggtttgtacctctgtgtccagtttcctcacttataaaaaaaggagataataaaagtacccatgtcccagggtggctgtagcaataatagggaggggtgcccagagcaggtctggcacacaggaagtgtgcatcagcctcagtccctgccattgggcttgtcctgggagtctgtgaagccaacctctgctccacaatgtgacccccaggcttgtgagaccaagctgggtcagagcttcctcctctggggttgcaccaggaggggaacttctgcaggcccagatgcaccctgaggaaagggcttgttcccaccaagaacaaggctcacctttggaggatgctccccacatgagaggtgaacccccaggtctactggtgactgcagcctcggaagctgacagcatctatcctccaacccatgcccactgggaagtgtgtgaggggtcctcataggccctgcggtgtggacaatgcagagaccctgtagcatctggctagggcggggcccagataagagccctgtgccaggagagcctggccggttctgccactgtggggagacaggctcccccaccccatgtcccctgcttccctgcagcccacagagaatacagacctacttttacagaaatccagatttttgtgtaaaagtgtctctattttaagtagattttaagtggtggcagcaaatttaagcttttgagaatattatacagaacaaatcagattcacaggccagatgcaactttatttacagaaatgggatcaggtcctacctcaggtcccatctcacgttttcacttatgcctatacgtctccttcacgggaaaggccacaagaggccctgcggtaagtgtcccggtgttgatttaaagtccccaacagtgaatatgagggtcctcactgttgcagcaagaggatacccccctgtgtatcttggaaatgcctgcagccctcttgctgcagaacagattcttaggagagaaactgtcagatcaaagttaaacttagagaaactccaaattgccctctgaacagacggtatcagtttgacatcatccaataccgggattcctcggggagaactttctggcctagaaggcagtagagccaggacttcacccagtcagtggcagggccacacgtgggccttgatacagagggggaagacttgagcctcctcgacaccctacagggcccagcctcccaacatgtgataagagaaacaacagccaacttgtacctagctctccttattctccaagggctgggccagttctccccacagccctgcaagggaggatcactcaagggccccaactgtctgacaatacagccacactctgatcagccacctgggcataggctccatgccattgtcctccgccaagacctcagactgaaatgttggctcctcccatgaagaacctggggccaaaggaccagagtccaggtccgtggctgccaggatgggccacttggagagaggcacaagggtggtgccaggcaggtgtgagggctggacctttgcaagagcagcatcacttttgttgagagcccacaggtatcttataattgggtcctaggacttcctgccagtagccattgtgtgcatggatttgggtgctggcctcaccatggtgtgctggctgcccatgcctgcaataatgacttctgtaagcctttcttcatctgcaagatgggtgctgctggcacctcctccccggtgctgtggtgacagggcatagtgtgtgaggctgctatgtgaagcacctaatgcagggcctggcatatggaggaattcagcaaatgacagatgccttcacagttagttcctggcatcctctacattggtgggtgtaggaaagaaagacagaggaggcaaaagttgtagctgtggggcattgaggacagcctggattgttccacagagccctgaggacatctccaggggtgtgctctgcaggggcagctggattggagggttaggggtcggggagggcgtgcactcccacccatgctcacagcctcggaacagtgcctgctcagccaacatgggtgtttgattctgtgtcttttgtcacagactttatcagccccatccctttctgaccttgcctcagtttaaattttacatgtggggcctcattaagagacatggttcttaactaaagatctgtatccattaggaatgctttgggctgcaggaagacaaacacctgactcactgtggcataagtggtttgcgtctgctcccataagctgcacgtggagggtggatctggcattactctctcttccctacatttgcagtatgctaacagctttaacctccagccttgtttcttcatggttgcagggtggctatcacagcgctggccatcacatccttacacagctgtgtttacaaatttagggggacattgaagctcctcccctgctaaaatcaggcttcccttcacctgtcattggccagaactgggtgaaatgcccaactctagaccgatcatcagtaagaggagtatagaattgctgtgcccaccttagattaatcatggcgcaatgtgctccccataccaacaaaatctgagttctagaaactgaggaagaagaggaaaatggccgtcttgcctcctggctgggattcagagcatctccaaccctctgagcttatgtgtaagactgtgggcaaaagtgtgtgagtttttgtggaatggatccacggcttttatcagagcatctttcctttttctttttgattcaagatgaaaatattcttatgattatttttctcaccactgcccagagataaccagcacattaacatggccttttctccatgaatagcactagggtgcccagtggacagacacatagctgtccacacaccagcttgctggggatgcataggcagagtcacatctgcactcacggcctgtcctcacactgccatgtggagagccagcagccacaccatgggccgtccatgctcacgggagtggcagtatcagatctgagcttcgtgtgcccaggcgtctctcacatcagtgcatagggaccctctttgttctgtggcccagtgtgcccatgccacagatggcttcagtcagcagacacctccttctagacactcacactcactcctggctggcccttagcacacctgtgcagacaggcccatttattttcttgtgtaaatcccaagtaggaggactgggtctctctgacagcaatgccagctgcctggcaccctccagacaggtggctcaagccccacctcgccagctctcccagttagcccctcctttccctggctctgacctgagggacgaagcagggtgctacaggacgctgtgccacagggatatcgtcagggacagaagctactctgccctctgctgctcacccctccaacacgctgtgggctgcatttgttgagtggctggtaccagactctgctcttctgactttccagctggttttacctgtagtaaagtttgagaagatgggtcatcctgaccccggggtcagaagacagaaggaggcccatggcgtgtgggggagatgccccgtgaggccctcggtgtgcagatgcctggtgacagccccaccctgaggtccccagcctaccccctccccagcccgactgctcccatccccctccctgtgcaggtagagcagatcctggcagagttccagctgcaggaggaggacctgaagaaggtgatgagacggatgcagaaggagatggaccgcggcctgaggctggagacccatgaagaggccagtgtgaagatgctgcccacctacgtgcgctccaccccagaaggctcaggtaccacatggtaaccggctcctcatccagaagcagctgtgggctcagccctagctgggagaagcaccccaggcactcccagactcacagccagcccgagacagaatctcctggggagcaatgaagtcctcgacttgggccagttctcacccttggctcctctggtccggccctggggcactcgggctcaccctggagctggcaaacctcaggaaaactggcgttttaaatctcactcctggccaggtgcagtggctcacccctgtaacttcaacactttgggaggccaaagcaggcggatctcttgaggccaggagtttgagaccagcctgcccaacatggtgaaaccccgtctctactaaaaatacaaaaattatccaggcatggtggcacattcctgtagttccagctactcgggaggctgaggcataagaattgcttgaacccgggaggccgaggttgcagtgagccaaaatcgcgccactgcactccagcctggggtgacagggtgagacaccatctcaaaaaaaaaaaaaaaaaaagacctcactgctccccatgggcacttagggaactctcccagcccagttctgcagctgggccattgcactagatcctcagttggtccctgggctctcggtgactgtccagggcaggagtttcccattgacttttccctggttgacctttgaccccttccacagttgacactggtgtccccaggtgtctggtggccccttgtccagctcccttagtcccttgtgccttccctcctcctctttgtaatatccgggctcagtcacctggggcccacccagcccaaggccagcctgtgggtgtccctgaggctgacacacttctctctgtgcctttagaagtcggggacttcctctccctggacctgggtggcactaacttcagggtgatgctggtgaaggtgggagaaggtgaggaggggcagtggagcgtgaagaccaaacaccagatgtactccatccccgaggacgccatgaccggcactgctgagatggtgagcagcgcaggggccggggcagggggccaaggccatgcaggatctcagggcccagctagtcctgacgggaggtgccacctgtctaccaggggtggggagagcgggggctggaggaccacccagcctcagaggcagctggaggcctgggtgaacaggactggccaacatgtccccaagtcccacagtcaccatctggccagcattgagaggggaacgggctgaggaagagttagtggcaagaggaaccccagccagtcacaccttgtccagtttaccagaggaaaaaccaatgtgtaagaacagaaatgtgacccggcagccagtgcactgcccccctctccaaaggccacccctcaccctccaccagcatgcacagaaagtggggtgacagcaatcacaatgtctacccaggcagcaaggacccctgaccatggggaggactggggtgcagggaacatagaagcagaatgaggcctagggggagttgggcaaggccagagccctagctgcagccaagcacatggccaaggccagctcctggaagggcagggctccgaggcaggaggcaggaggctgcccgtggctacccgtcctcacacccctgcagcttgctagtctgtctgtgggctgggtgtgaatcaaggcagtgggatggtgtggggacctccctggccccagcagccagtgaggagcctggtcagtcagcagagcattcagcagtatccagttccatggagaggcccgtgtgaggggagtcggggctggtcttcagtaaggatgggtggccagggcccctagaagtagaaaaggagactccgggtgctggagacagaaatcaaggatgtgcctccatgtggagcctcaggaatagctggccaggcctgaggctgaacctcacaaggttcagctgggagggctaggctgacagagcacagccgggccagggaccagcctgccctgtgttgccttgtcccgagggccactgtcagcaggtctctggcatgggggaggcttagggcctgagcccaacaagcagcagcggaagaggagagggaaactgtggacaggcctggcattcagtggccaggtgttgcagtgtccctgaggaatagcttggcttgaggccgtggggagggctgccggccagcgcacccccccatgccagatggtcaccatggcgtgcatcttccagctcttcgactacatctctgagtgcatctccgacttcctggacaagcatcagatgaaacacaagaagctgcccctgggcttcaccttctcctttcctgtgaggcacgaagacatcgataaggtgggccgggtggaggggcagaaggcagatgaggggaggcacaggcaccccagaggaactctgccttcaaatgtagcccccataccatgtgctcagaagggagatctggattcaaattgtggccatgtcacctgccacctctaatgctgtggaaaagaagcatcacattagctaattctggctgtgcgccttgtgaggcaccagctatgatcaccccactccagtggaaagagcagctggcagtagggtggggctcaaactcaggcagccgggctctgggtcacctgcaggccacggtcatgtcacactgcctctagctgagtcagaaatgtgaaggaactgagattctacccttcctgcaagctagcaaagtggcctgccagttacatctgtgcatgcacacacacacacagttatatatgcacacacataaaacacgagacctttgggtcagggagaaagccagatcctcactcacggcagaagcagcagccaaagcaacatctcatgtggttttccaagccccagtccctacagagacagagagggccaggtggcacctgtgcatgcagcggggtaccttgcaggagggaaatcctgattttacacaaagctgctccccccacgccctgccttgactctgggatgacgtctcagagctgtgcagtacaacattcttaaattggctgggactcagccctgcagaaatatgatatcttcaaggagaatcgttcccaaaacctctcaaagctatggggctgctctgagcctgtttcctcagctgtaaagtagggtgcatacttttatggccctgtgcaggaggtagtgacaggccctagcaccctgcctccagtatatgttagcagccacgaggcctatctctccccacagggcatccttctcaactggaccaagggcttcaaggcctcaggagcagaagggaacaatgtcgtggggcttctgcgagacgctatcaaacggagaggggtgagggggcacctgtacctgccgggggggctgccctgggccacccaccccagcactgcctgcctttctccttggcttccagcactgcagcttctgtgcttcttggcaggactttgaaatggatgtggtggcaatggtgaatgacacggtggccacgatgatctcctgctactacgaagaccatcagtgcgaggtcggcatgatcgtgggtaagggctccttgcacccctgccccttccagactgctgaggctccctgtgtacaacaggcttcaagggccctgtggggtgaggaccaaactacttaacaaccggtgatgtcagagcagagcctggtgctacagcctgggtggtcttggggtatcaagatggaagcaccgtgtacagtaggaagcatttcaacgccatgatgccacattcctgcatcagatggtatgccagctgcatatccacctcacccatcaggattataattaaaacacttatctggtaaattgaccaactggacagattggtccaagtggaagaggataagcaaaagtggtaccatctccacccgaatggtctttccacgggcctgcccctgcccctgcccccacccaaagtgaaggcaggtaccaggaaagggagcagcagtccgcccctcccagcagaggggtcttccacaccaactcggacctttctcagaagttccggaggtcattataaccagccttcactgaggagcaatccaatcagatcagttatctgctgtgcgcacagccgtgtggttctatacttctcttacttccattttcacctttcagaaggaacgttgtctttaaatccagcatctaaacgtgagccccagccatccctggctgtgatccccccagccctttccaccctatcctctggaactgcctggggctccccaagacacttccacatgaattcccaccaagccaagctgcagctgctgggcccaggcataacccctcctggggcagaggtggcaaggagtgacccaccactcacatctgccccacatccactcttgactctgctcagtgtttaaaaacatgtttataacaattaccaagatctgaaaattaggagaattcacatcaaagtctggatttctgtttgttcataaaaaactagaaggcagccaggcaaggtggctcacgccagtaatcccaacactttgggaggctaaggcaggcgggtcacttgaggtcaggatttgaagactagctggccaacaaggtgtaacctcgtctctactaaaaatacaaaaattagctgggtgtgatggcgcatgcctgtaatcccaggtactcaggagactgaggcaggagaattgcttaaaccctggaggcagaggttgcagtgagccaagatcacgccactgcactccagcctgggtgatggagtgagtgagactctgtctccaaataaataaataaataaataaaaactggaagtctaagcatcactgagccctgattcctatgtggcagctcgactgaccagcatttgagttgctgtccctgacagctttgggggtgtgcagcccacacagtcatgctagcttgaggctctgctgtcagcagtttgaaactcttaataacttgtgaacaaaagactccatgttgtcactctgcacaggggccagcaaattacaaaattccatatccggaattgtctacaggagcctctgggctgctcccaagggcccacaccatgccttactcactttgggttgccatccaaacatgtctcatgacaaagaagctcaaacatgtgcatggacagtgccagaaaacaagggtcgtacatagacaaaataaaatgataacgtcccacaaccatttctttgatacacactgtttctctcagtcctcccaaccacctaggtaacaggcagggaaggtgttactgttgcctgttaggaaagaggacagccctgaaagctgtccctggccactgaagcaacccaggtcttccagccccagggagagccgcctttccattgttccagacaaagcagagacaggcatgggggagcgggagagggactcctgtgggcaggaaccaggccctactccggggcagtgcagctctcgctgacagtccccccgacctccaccccaggcacgggctgcaatgcctgctacatggaggagatgcagaatgtggagctggtggagggggacgagggccgcatgtgcgtcaataccgagtggggcgccttcggggactccggcgagctggacgagttcctgctggagtatgaccgcctggtggacgagagctctgcaaaccccggtcagcagctgtaaggatgcccccctcccccacaacccaggccctgggccgctctggtgcagcggcagatgggagccgggccattgcagataatgggcttgtttttaaacaactctggggaaaagcaaactgacaatccgttcgtaagctccatcccttctgctcagtcatgacctgcccctgtgagagatgaagggttagtcccagttgtgatgtgataagcccagacctctttccttccgacaggtgatcgtgcatgcagaggaggctctgagacgcccccagcaaggttcctgggtttaacccaacattccccaaagtatgtatttggccacattcacagaaagaatattagtcttttgtggaatgctgcgggttgacagtcacagcttggaaaccaacccacagagagctcatcattaatcatggctatcacttgtttaccacctactgtgccaggcctatgctaattactttattagcgtcctctctgccgctcgcaggcctctattattataggtcagtagtattcgatttatttaaattaaatacggaaggtcatagattaagcaagaaagtgccagcaacatggtgcgtgcctctgactgggcactaaccctccaagtcttagttttcccaaccataactggccaatgaacagcagctctggatgcagctaaaggaagactgaagctgtaggtcccgtgctcggcgcagggccccctgcaaggaaggtttcggagggactggatggggtctttgaactatctgtctttccctttactgcagtgggcccaggggcaggccaaagttgctcccgtgattgacttgaacgtgcacgttcctaatccctgacatttctaaagctctggctcattaacgagggaaagacgtgaaccagctgggggagtggggatcgcagtgccccacgtggccgcctcgtgacctcagtggggagcagtggggccggctcccggcttccacctgcatgaggggccctccctcgtgcctgctgatgtaatggacctgccctatgtccaggtatgagaagctcataggtggcaagtacatgggcgagctggtgcggcttgtgctgctcaggctcgtggacgaaaacctgctcttccacggggaggcctccgagcagctgcgcacacgcggagccttcgagacgcgcttcgtgtcgcaggtggagaggtgtgcggaggaggagggtgggtgcaaagggcaggggctggggacgcccgggcactgcagacttggtctcagggcgacgctgagtcccaggcccggggcgcagggatgggaaactagggcctggggcgggattccgggcgtgggcggggcccggggcggggcacagggggcgggggagtgggcggggcccgaggccgggcgctggaggcgagggcggggcagggacgggtccaagggcaggaggctgggacaggacggggatgcaaagggaggggcggggcccgagacggggaggagggggagggcccaaggggaggaggcggggtccggacggggatgccaagagcagggatgggagcgagcctgcgtccgggcactggtccccatccgtgagtcccctcggtgctccctgcccgccgtggccatcctctcacatcactcacaaccccaaggcgcggcatggttgacacccccacgttaggacggagaccctgggcttagttagagggggcagtactaaccagtccctggcggaaacgctttggctgggtgaggtgagcgggatcgcccccatttctccagagaggggtcccggctcagcgagggaaagaggccgccgctggggggacggctggccggggcccctccctggagaacgagaggccgccgctggagggggatggactgtcggagcgacactcagcgaccgccctacctcctcccgccccgcagcgacacgggcgaccgcaagcagatctacaacatcctgagcacgctggggctgcgaccctcgaccaccgactgcgacatcgtgcgccgcgcctgcgagagcgtgtctacgcgcgctgcgcacatgtgctcggcggggctggcgggcgtcatcaaccgcatgcgcgagagccgcagcgaggacgtaatgcgcatcactgtgggcgtggatggctccgtgtacaagctgcaccccaggtgagcccgccccgctctctccctggtaaagtggggcccaaaaagcgcgcgctccaaggttccttgcggttcccaagctccaagatttcgtagtcctcttctcgtcccccttggcctagatttgggggaagggtcgactgcgtgcagggcgcccggtaatgaatgtggaggatgaggtgggaggagggacggcagccctgcttctcttctgcccagcttcaaggagcggttccatgccagcgtgcgcaggctgacgcccagctgcgagatcaccttcatcgagtcggaggagggcagtggccggggcgcggccctggtctcggcggtggcctgtaagaaggcctgtatgctgggccagtgagagcagtggccgcaagcgcagggaggatgccacagccccacagcacccaggctccatggggaagtgctccccacacgtgctcgcagcctggcggggcaggaggcctggccttgtcaggacccaggccgcctgccataccgctggggaacagagcgggcctcttccctcagtttttcggtgggacagccccagggccctaacgggggtgcggcaggagcaggaacagagactctggaagccccccacctttctcgctggaatcaatttcccagaagggagttgctcactcaggactttgatgcatttccacactgtcagagctgttggcctcgcctgggcccaggctctgggaaggggtgccctctggatcctgctgtggcctcacttccctgggaactcatcctgtgtggggaggcagctccaacagcttgaccagacctagacctgggccaaaagggcagccaggggctgctcatcacccagtcctggccattttcttgcctgaggctcaagaggcccagggagcaatgggagggggctccatggaggaggtgtcccaagctttgaatacccccagagaccttttctctcccataccatcactgagtggcttgtgattctgggatggaccctcgcagcaggtgcaagagacagagcccccaagcctctgccccaaggggcccacaaaggggagaagggccagccctacatcttcagctcccatagcgctggctcaggaagaaaccccaagcagcattcagcacaccccaagggacaaccccatcatatgacatgccaccctctccatgcccaacctaagattgtgtgggttttttaattaaaaatgttaaaagtttta

SEQ ID NO: 12127 - DNA, 2539 bp, Homo sapiens
aagccctgggctgccagcctcaggcagctctccatccaagcagccgttgctgccacaggcgggccttacgctccaaggctacagcatgtgctaggcctcagcaggcaggagcatctctgcctcccaaagcatctacctcttagcccctcggagagatggcgatggatgtcacaaggagccaggcccagacagccttgactctgccagactctcctctgaactcgggcctcacatggccaactgctacttggaacaaatcgccccttggctggcagatgtgttaacatgcccagaccaagatcccaactcccacaacccaactcccaggtagagcagatcctggcagagttccagctgcaggaggaggacctgaagaaggtgatgagacggatgcagaaggagatggaccgcggcctgaggctggagacccatgaagaggccagtgtgaagatgctgcccacctacgtgcgctccaccccagaaggctcagaagtcggggacttcctctccctggacctgggtggcactaacttcagggtgatgctggtgaaggtgggagaaggtgaggaggggcagtggagcgtgaagaccaaacaccagatgtactccatccccgaggacgccatgaccggcactgctgagatgctcttcgactacatctctgagtgcatctccgacttcctggacaagcatcagatgaaacacaagaagctgcccctgggcttcaccttctcctttcctgtgaggcacgaagacatcgataagggcatccttctcaactggaccaagggcttcaaggcctcaggagcagaagggaacaatgtcgtggggcttctgcgagacgctatcaaacggagaggggactttgaaatggatgtggtggcaatggtgaatgacacggtggccacgatgatctcctgctactacgaagaccatcagtgcgaggtcggcatgatcgtgggcacgggctgcaatgcctgctacatggaggagatgcagaatgtggagctggtggagggggacgagggccgcatgtgcgtcaataccgagtggggcgccttcggggactccggcgagctggacgagttcctgctggagtatgaccgcctggtggacgagagctctgcaaaccccggtcagcagctgtatgagaagctcataggtggcaagtacatgggcgagctggtgcggcttgtgctgctcaggctcgtggacgaaaacctgctcttccacggggaggcctccgagcagctgcgcacacgcggagccttcgagacgcgcttcgtgtcgcaggtggagagcgacacgggcgaccgcaagcagatctacaacatcctgagcacgctggggctgcgaccctcgaccaccgactgcgacatcgtgcgccgcgcctgcgagagcgtgtctacgcgcgctgcgcacatgtgctcggcggggctggcgggcgtcatcaaccgcatgcgcgagagccgcagcgaggacgtaatgcgcatcactgtgggcgtggatggctccgtgtacaagctgcaccccagcttcaaggagcggttccatgccagcgtgcgcaggctgacgcccagctgcgagatcaccttcatcgagtcggaggagggcagtggccggggcgcggccctggtctcggcggtggcctgtaagaaggcctgtatgctgggccagtgagagcagtggccgcaagcgcagggaggatgccacagccccacagcacccaggctccatggggaagtgctccccacacgtgctcgcagcctggcggggcaggaggcctggccttgtcaggacccaggccgcctgccataccgctggggaacagagcgggcctcttccctcagtttttcggtgggacagccccagggccctaacgggggtgcggcaggagcaggaacagagactctggaagccccccacctttctcgctggaatcaatttcccagaagggagttgctcactcaggactttgatgcatttccacactgtcagagctgttggcctcgcctgggcccaggctctgggaaggggtgccctctggatcctgctgtggcctcacttccctgggaactcatcctgtgtggggaggcagctccaacagcttgaccagacctagacctgggccaaaagggcagccaggggctgctcatcacccagtcctggccattttcttgcctgaggctcaagaggcccagggagcaatgggagggggctccatggaggaggtgtcccaagctttgaatacccccagagaccttttctctcccataccatcactgagtggcttgtgattctgggatggaccctcgcagcaggtgcaagagacagagcccccaagcctctgccccaaggggcccacaaaggggagaagggccagccctacatcttcagctcccatagcgctggctcaggaagaaaccccaagcagcattcagcacaccccaagggacaaccccatcatatgacatgccaccctctccatgcccaacctaagattgtgtgggttttttaattaaaaatgttaaaagtttta

SEQ ID NO: 12128 - DNA, 2745 bp, Homo sapiens
actccacacctggctggagcaggaaatgccgagcggcgcctgagccccagggaagcaggctaggatgtgagagacacagtcacctgcagcctaattactcaaaagctgtccccaggtcacagaagggagaggacatttcccactgaatctgtctgaaggacactaagccccacagctcaacacaaccaggagagaaagcgctgaggacgccacccaagcgcccagcaatggccctgcctggagaacatccaggctcagtgaggaagggtccagaagggaatgcttgccgactcgttggagaacaatgaaaaggaggaaactgtgactgaacctcaaaccccaaaccagcccgaggagaaccacattctcccagggacccagggcgggccgtgacccctgcggcggagaagccttggatatttccacttcagaagcctactggggaaggctgaggggtcccagctccccacgctggctgctgtgcagatgctggacgacagagccaggatggaggccgccaagaaggagaaggtagagcagatcctggcagagttccagctgcaggaggaggacctgaagaaggtgatgagacggatgcagaaggagatggaccgcggcctgaggctggagacccatgaagaggccagtgtgaagatgctgcccacctacgtgcgctccaccccagaaggctcagaagtcggggacttcctctccctggacctgggtggcactaacttcagggtgatgctggtgaaggtgggagaaggtgaggaggggcagtggagcgtgaagaccaaacaccagatgtactccatccccgaggacgccatgaccggcactgctgagatgctcttcgactacatctctgagtgcatctccgacttcctggacaagcatcagatgaaacacaagaagctgcccctgggcttcaccttctcctttcctgtgaggcacgaagacatcgataagggcatccttctcaactggaccaagggcttcaaggcctcaggagcagaagggaacaatgtcgtggggcttctgcgagacgctatcaaacggagaggggactttgaaatggatgtggtggcaatggtgaatgacacggtggccacgatgatctcctgctactacgaagaccatcagtgcgaggtcggcatgatcgtgggcacgggctgcaatgcctgctacatggaggagatgcagaatgtggagctggtggagggggacgagggccgcatgtgcgtcaataccgagtggggcgccttcggggactccggcgagctggacgagttcctgctggagtatgaccgcctggtggacgagagctctgcaaaccccggtcagcagctgtatgagaagctcataggtggcaagtacatgggcgagctggtgcggcttgtgctgctcaggctcgtggacgaaaacctgctcttccacggggaggcctccgagcagctgcgcacacgcggagccttcgagacgcgcttcgtgtcgcaggtggagagcgacacgggcgaccgcaagcagatctacaacatcctgagcacgctggggctgcgaccctcgaccaccgactgcgacatcgtgcgccgcgcctgcgagagcgtgtctacgcgcgctgcgcacatgtgctcggcggggctggcgggcgtcatcaaccgcatgcgcgagagccgcagcgaggacgtaatgcgcatcactgtgggcgtggatggctccgtgtacaagctgcaccccagcttcaaggagcggttccatgccagcgtgcgcaggctgacgcccagctgcgagatcaccttcatcgagtcggaggagggcagtggccggggcgcggccctggtctcggcggtggcctgtaagaaggcctgtatgctgggccagtgagagcagtggccgcaagcgcagggaggatgccacagccccacagcacccaggctccatggggaagtgctccccacacgtgctcgcagcctggcggggcaggaggcctggccttgtcaggacccaggccgcctgccataccgctggggaacagagcgggcctcttccctcagtttttcggtgggacagccccagggccctaacgggggtgcggcaggagcaggaacagagactctggaagccccccacctttctcgctggaatcaatttcccagaagggagttgctcactcaggactttgatgcatttccacactgtcagagctgttggcctcgcctgggcccaggctctgggaaggggtgccctctggatcctgctgtggcctcacttccctgggaactcatcctgtgtggggaggcagctccaacagcttgaccagacctagacctgggccaaaagggcagccaggggctgctcatcacccagtcctggccattttcttgcctgaggctcaagaggcccagggagcaatgggagggggctccatggaggaggtgtcccaagctttgaatacccccagagaccttttctctcccataccatcactgagtggcttgtgattctgggatggaccctcgcagcaggtgcaagagacagagcccccaagcctctgccccaaggggcccacaaaggggagaagggccagccctacatcttcagctcccatagcgctggctcaggaagaaaccccaagcagcattcagcacaccccaagggacaaccccatcatatgacatgccaccctctccatgcccaacctaagattgtgtgggttttttaattaaaaatgttaaaagttttaaa

SEQ ID NO: 12129 - DNA, 1385 bp, Homo sapiens
ggggtcccagctccccacgctggctgctgtgcagatgctggacgacagagccaggatggaggccgccaagaaggagaaggtagagcagatcctggcagagttccagctgcaggaggaggacctgaagaaggtgatgagacggatgcagaaggagatggaccgcggcctgaggctggagacccatgaagaggccagtgtgaagatgctgcccacctacgtgcgctccaccccagaaggctcagaagtcggggacttcctctccctggacctgggtggcactaacttcagggtgatgctggtgaaggtgggagaaggtgaggaggggcagtggagcgtgaagaccaaacaccagatgtactccatccccgaggacgccatgaccggcactgctgagatgatgaaacacaagaagctgcccctgggcttcaccttctcctttcctgtgaggcacgaagacatcgataagggcatccttctcaactggaccaagggcttcaaggcctcaggagcagaagggaacaatgtcgtggggcttctgcgagacgctatcaaacggagaggggactttgaaatggatgtggtggcaatggtgaatgacacggtggccacgatgatctcctgctactacgaagaccatcagtgcgaggtcggcatgatcgtgggcacgggctgcaatgcctgctacatggaggagatgcagaatgtggagctggtggagggggacgagggccgcatgtgcgtcaataccgagtggggcgccttcggggactccggcgagctggacgagttcctgctggagtatgaccgcctggtggacgagagctctgcaaaccccggtcagcagctgtatgagaagctcataggtggcaagtacatgggcgagctggtgcggcttgtgctgctcaggctcgtggacgaaaacctgctcttccacggggaggcctccgagcagctgcgcacacgcggagccttcgagacgcgcttcgtgtcgcaggtggagagcgacacgggcgaccgcaagcagatctacaacatcctgagcacgctggggctgcgaccctcgaccaccgactgcgacatcgtgcgccgcgcctgcgagagcgtgtctacgcgcgctgcgcacatgtgctcggcggggctggcgggcgtcatcaaccgcatgcgcgagagccgcagcgaggacgtaatgcgcatcactgtgggcgtggatggctccgtgtacaagctgcaccccagcttcaaggagcggttccatgccagcgtgcgcaggctgacgcccagctgcgagatcaccttcatcgagtcggaggagggcagtggccggggcgcggccctggtctcggcggtggcctgtaagaaggcctgtatgctgggccagtgagagc

SEQ ID NO: 12130 - DNA, 1857 bp, Homo sapiens
gggatgccaagagcagggatgggagcgagcctgcgtccgggcactggtccccatccgtgagtcccctcggtgctccctgcccgccgtggccatcctctcacatcactcacaaccccaaggcgcggcatggttgacacccccacgttaggacggagaccctgggcttagttagagggggcagtactaaccagtccctggcggaaacgctttggctgggtgaggtgagcgggatcgcccccatttctccagagaggggtcccggctcagcgagggaaagaggccgccgctggggggacggctggccggggcccctccctggagaacgagaggccgccgctggagggggatggactgtcggagcgacactcagcgaccgccctacctcctcccgccccgcagcgacacgggcgaccgcaagcagatctacaacatcctgagcacgctggggctgcgaccctcgaccaccgactgcgacatcgtgcgccgcgcctgcgagagcgtgtctacgcgcgctgcgcacatgtgctcggcggggctggcgggcgtcatcaaccgcatgcgcgagagccgcagcgaggacgtaatgcgcatcactgtgggcgtggatggctccgtgtacaagctgcaccccaggtgagcccgccccgctctctccctggtaaagtggggcccaaaaagcgcgcgctccaaggttccttgcggttcccaagctccaagatttcgtagtcctcttctcgtcccccttggcctagatttgggggaagggtcgactgcgtgcagggcgcccggtaatgaatgtggaggatgaggtgggaggagggacggcagccctgcttctcttctgcccagcttcaaggagcggttccatgccagcgtgcgcaggctgacgcccagctgcgagatcaccttcatcgagtcggaggagggcagtggccggggcgcggccctggtctcggcggtggcctgtaagaaggcctgtatgctgggccagtgagagcagtggccgcaagcgcagggaggatgccacagccccacagcacccaggctccatggggaagtgctccccacacgtgctcgcagcctggcggggcaggaggcctggccttgtcaggacccaggccgcctgccataccgctggggaacagagcgggcctcttccctcagtttttcggtgggacagccccagggccctaacgggggtgcggcaggagcaggaacagagactctggaagccccccacctttctcgctggaatcaatttcccagaagggagttgctcactcaggactttgatgcatttccacactgtcagagctgttggcctcgcctgggcccaggctctgggaaggggtgccctctggatcctgctgtggcctcacttccctgggaactcatcctgtgtggggaggcagctccaacagcttgaccagacctagacctgggccaaaagggcagccaggggctgctcatcacccagtcctggccattttcttgcctgaggctcaagaggcccagggagcaatgggagggggctccatggaggaggtgtcccaagctttgaatacccccagagaccttttctctcccataccatcactgagtggcttgtgattctgggatggaccctcgcagcaggtgcaagagacagagcccccaagcctctgccccaaggggcccacaaaggggagaagggccagccctacatcttcagctcccatagcgctggctcaggaagaaaccccaagcagcattcagcacaccccaagggacaaccccatcatatgacatgccaccctctccatgcccaacctaagattgtgtgggttttttaattaaaaatgttaaaagttttaaaca

SEQ ID NO: 12131 - DNA, 1641 bp, Homo sapiens
gggatgccaagagcagggatgggagcgagcctgcgtccgggcactggtccccatccgtgagtcccctcggtgctccctgcccgccgtggccatcctctcacatcactcacaaccccaaggcgcggcatggttgacacccccacgttaggacggagaccctgggcttagttagagggggcagtactaaccagtccctggcggaaacgctttggctgggtgaggtgagcgggatcgcccccatttctccagagaggggtcccggctcagcgagggaaagaggccgccgctggggggacggctggccggggcccctccctggagaacgagaggccgccgctggagggggatggactgtcggagcgacactcagcgaccgccctacctcctcccgccccgcagcgacacgggcgaccgcaagcagatctacaacatcctgagcacgctggggctgcgaccctcgaccaccgactgcgacatcgtgcgccgcgcctgcgagagcgtgtctacgcgcgctgcgcacatgtgctcggcggggctggcgggcgtcatcaaccgcatgcgcgagagccgcagcgaggacgtaatgcgcatcactgtgggcgtggatggctccgtgtacaagctgcaccccagcttcaaggagcggttccatgccagcgtgcgcaggctgacgcccagctgcgagatcaccttcatcgagtcggaggagggcagtggccggggcgcggccctggtctcggcggtggcctgtaagaaggcctgtatgctgggccagtgagagcagtggccgcaagcgcagggaggatgccacagccccacagcacccaggctccatggggaagtgctccccacacgtgctcgcagcctggcggggcaggaggcctggccttgtcaggacccaggccgcctgccataccgctggggaacagagcgggcctcttccctcagtttttcggtgggacagccccagggccctaacgggggtgcggcaggagcaggaacagagactctggaagccccccacctttctcgctggaatcaatttcccagaagggagttgctcactcaggactttgatgcatttccacactgtcagagctgttggcctcgcctgggcccaggctctgggaaggggtgccctctggatcctgctgtggcctcacttccctgggaactcatcctgtgtggggaggcagctccaacagcttgaccagacctagacctgggccaaaagggcagccaggggctgctcatcacccagtcctggccattttcttgcctgaggctcaagaggcccagggagcaatgggagggggctccatggaggaggtgtcccaagctttgaatacccccagagaccttttctctcccataccatcactgagtggcttgtgattctgggatggaccctcgcagcaggtgcaagagacagagcccccaagcctctgccccaaggggcccacaaaggggagaagggccagccctacatcttcagctcccatagcgctggctcaggaagaaaccccaagcagcattcagcacaccccaagggacaaccccatcatatgacatgccaccctctccatgcccaacctaagattgtgtgggttttttaattaaaaatgttaaaagttttaaaca

SEQ ID NO: 12132 - DNA, 1482 bp, Homo sapiens
tttatttaaattaaatacggaaggtcatagattaagcaagaaagtgccagcaacatggtgcgtgcctctgactgggcactaaccctccaagtcttagttttcccaaccataactggccaatgaacagcagctctggatgcagctaaaggaagactgaagctgtaggtcccgtgctcggcgcagggccccctgcaaggaaggtttcggagggactggatggggtctttgaactatctgtctttccctttactgcagtgggcccaggggcaggccaaagttgctcccgtgattgacttgaacgtgcacgttcctaatccctgacatttctaaagctctggctcattaacgagggaaagacgtgaaccagctgggggagtggggatcgcagtgccccacgtggccgcctcgtgacctcagtggggagcagtggggccggctcccggcttccacctgcatgaggggccctccctcgtgcctgctgatgtaatggacctgccctatgtccaggtatgagaagctcataggtggcaagtacatgggcgagctggtgcggcttgtgctgctcaggctcgtggacgaaaacctgctcttccacggggaggcctccgagcagctgcgcacacgcggagccttcgagacgcgcttcgtgtcgcaggtggagaggtgtgcggaggaggagggtgggtgcaaagggcaggggctggggacgcccgggcactgcagacttggtctcagggcgacgctgagtcccaggcccggggcgcagggatgggaaactagggcctggggcgggattccgggcgtgggcggggcccggggcggggcacagggggcgggggagtgggcggggcccgaggccgggcgctggaggcgagggcggggcagggacgggtccaagggcaggaggctgggacaggacggggatgcaaagggaggggcggggcccgagacggggaggagggggagggcccaaggggaggaggcggggtccggacggggatgccaagagcagggatgggagcgagcctgcgtccgggcactggtccccatccgtgagtcccctcggtgctccctgcccgccgtggccatcctctcacatcactcacaaccccaaggcgcggcatggttgacacccccacgttaggacggagaccctgggcttagttagagggggcagtactaaccagtccctggcggaaacgctttggctgggtgaggtgagcgggatcgcccccatttctccagagaggggtcccggctcagcgagggaaagaggccgccgctggggggacggctggccggggcccctccctggagaacgagaggccgccgctggagggggatggactgtcggagcgacactcagcgaccgccctacctcctcccgccccgcagcgacacgggcgaccgcaagcagatctacaacatcctgagcacgctggggctgcgaccctcgaccaccgactgcgacatcgtgcgccg

SEQ ID NO: 12133 - DNA, 404 bp, Homo sapiens
tttatttaaattaaatacggaaggtcatagattaagcaagaaagtgccagcaacatggtgcgtgcctctgactgggcactaaccctccaagtcttagttttcccaaccataactggccaatgaacagcagctctggatgcagctaaaggaagactgaagctgtatgagaagctcataggtggcaagtacatgggcgagctggtgcggcttgtgctgctcaggctcgtggacgaaaacctgctcttccacggggaggcctccgagcagctgcgcacacgcggagccttcgagacgcgcttcgtgtcgcaggtggagagcgacacgggcgaccgcaagcagatctacaacatcctgagcacgctggggctgcgaccctcgaccaccgactgcgacatcgtgcgccg

SEQ ID NO: 12134 - DNA, 553 bp, Homo sapiens
tgaacccttctttttgcttgcgttgttgaaagaaggcaagtctatggataggaatgagtgaggcacagctccctgaggatgccatatcttgcccgtttcttgtgtattaagtgacatcacgtgttaccaaactaaaccggctgcatttgcctgcgcacaacataaaaccaaacacccaagcattggatttttgtagcaagaaagatgtattgccaagcagccttgcaaggggacagaagacgggctcaaatctgtctcccaatacttgcttcgcagcagtagatttaagggagagattttggaagtggagtttcgggctggacggtgattggctgaaacgaagaagtgtttagaaaatctcttggtcatgagctgttgcttcttcatgctgcttcaagggtcacatgcagattcaggaggtggtataaaacaagctgtgggaatttgggctgtgacatcaaagggccgctcctcgggctagtagagcagatcctggcagagttccagctgcaggaggaggacctgaagaaggtgatgagacggatgcagaagg

SEQ ID NO: 12135 - DNA, 13844 bp, Homo sapiens
atgcccagaccaagatcccaactcccacaacccaactcccaggtcagatggaacctcttcttcccaggcccttctgttcctctcctcagcccctcccacctcccttcagaataagtctagactcttatcgctttcaccaagcctgcgcccagcatccctgcacagggattgttaggacagcctgacgccctgcttccaccctgccccaagatgcccctgctctgcagcccggcgcctccaggcttctcacctcctgctgctcacagctcagcctcactccctccctccccgcctctgctccagcctcagtgcaggtcccctgctcccatcttctggcagcagctgcccgacctggtccctcttcatctgtccccattccttcaccccccagcctgtccccaacttgactgaggttctttcctgcagatccccgcccttgagaggggttggtcccactgtcaactctgcttctgtgccctgtgccgcacctggcattcagtgagcatctgctgaagagatgagggtcagatgccctgcagggagtgtgggggcgtcctcaggcaagaaaagttgtacgtttggctgtgggccctgattatgtgtcctgtgacctcttgggtgaggtcagcaagagaaacctctgcaagctggctggggctgcctcccagaggctgccagggggagggacaggctctgtctgtgctcttcttccgaggctacacctggggcgccaggctctcagggctccccaggtaccaccacatttcctacactgcttgggaaagccctgtaagtttgcacagacacccagcatgaggctcgccagagagatacttgtagctggggtctgggcaccaggaacagcttggtgctgggcctgaagtcgggcaggatgcagcctggccaggtgagaggaaagcttggagccagtgcctgggttcaaactcctctgtggcctatggttctgtgggcttggggaagggtttgtacctctgtgtccagtttcctcacttataaaaaaaggagataataaaagtacccatgtcccagggtggctgtagcaataatagggaggggtgcccagagcaggtctggcacacaggaagtgtgcatcagcctcagtccctgccattgggcttgtcctgggagtctgtgaagccaacctctgctccacaatgtgacccccaggcttgtgagaccaagctgggtcagagcttcctcctctggggttgcaccaggaggggaacttctgcaggcccagatgcaccctgaggaaagggcttgttcccaccaagaacaaggctcacctttggaggatgctccccacatgagaggtgaacccccaggtctactggtgactgcagcctcggaagctgacagcatctatcctccaacccatgcccactgggaagtgtgtgaggggtcctcataggccctgcggtgtggacaatgcagagaccctgtagcatctggctagggcggggcccagataagagccctgtgccaggagagcctggccggttctgccactgtggggagacaggctcccccaccccatgtcccctgcttccctgcagcccacagagaatacagacctacttttacagaaatccagatttttgtgtaaaagtgtctctattttaagtagattttaagtggtggcagcaaatttaagcttttgagaatattatacagaacaaatcagattcacaggccagatgcaactttatttacagaaatgggatcaggtcctacctcaggtcccatctcacgttttcacttatgcctatacgtctccttcacgggaaaggccacaagaggccctgcggtaagtgtcccggtgttgatttaaagtccccaacagtgaatatgagggtcctcactgttgcagcaagaggatacccccctgtgtatcttggaaatgcctgcagccctcttgctgcagaacagattcttaggagagaaactgtcagatcaaagttaaacttagagaaactccaaattgccctctgaacagacggtatcagtttgacatcatccaataccgggattcctcggggagaactttctggcctagaaggcagtagagccaggacttcacccagtcagtggcagggccacacgtgggccttgatacagagggggaagacttgagcctcctcgacaccctacagggcccagcctcccaacatgtgataagagaaacaacagccaacttgtacctagctctccttattctccaagggctgggccagttctccccacagccctgcaagggaggatcactcaagggccccaactgtctgacaatacagccacactctgatcagccacctgggcataggctccatgccattgtcctccgccaagacctcagactgaaatgttggctcctcccatgaagaacctggggccaaaggaccagagtccaggtccgtggctgccaggatgggccacttggagagaggcacaagggtggtgccaggcaggtgtgagggctggacctttgcaagagcagcatcacttttgttgagagcccacaggtatcttataattgggtcctaggacttcctgccagtagccattgtgtgcatggatttgggtgctggcctcaccatggtgtgctggctgcccatgcctgcaataatgacttctgtaagcctttcttcatctgcaagatgggtgctgctggcacctcctccccggtgctgtggtgacagggcatagtgtgtgaggctgctatgtgaagcacctaatgcagggcctggcatatggaggaattcagcaaatgacagatgccttcacagttagttcctggcatcctctacattggtgggtgtaggaaagaaagacagaggaggcaaaagttgtagctgtggggcattgaggacagcctggattgttccacagagccctgaggacatctccaggggtgtgctctgcaggggcagctggattggagggttaggggtcggggagggcgtgcactcccacccatgctcacagcctcggaacagtgcctgctcagccaacatgggtgtttgattctgtgtcttttgtcacagactttatcagccccatccctttctgaccttgcctcagtttaaattttacatgtggggcctcattaagagacatggttcttaactaaagatctgtatccattaggaatgctttgggctgcaggaagacaaacacctgactcactgtggcataagtggtttgcgtctgctcccataagctgcacgtggagggtggatctggcattactctctcttccctacatttgcagtatgctaacagctttaacctccagccttgtttcttcatggttgcagggtggctatcacagcgctggccatcacatccttacacagctgtgtttacaaatttagggggacattgaagctcctcccctgctaaaatcaggcttcccttcacctgtcattggccagaactgggtgaaatgcccaactctagaccgatcatcagtaagaggagtatagaattgctgtgcccaccttagattaatcatggcgcaatgtgctccccataccaacaaaatctgagttctagaaactgaggaagaagaggaaaatggccgtcttgcctcctggctgggattcagagcatctccaaccctctgagcttatgtgtaagactgtgggcaaaagtgtgtgagtttttgtggaatggatccacggcttttatcagagcatctttcctttttctttttgattcaagatgaaaatattcttatgattatttttctcaccactgcccagagataaccagcacattaacatggccttttctccatgaatagcactagggtgcccagtggacagacacatagctgtccacacaccagcttgctggggatgcataggcagagtcacatctgcactcacggcctgtcctcacactgccatgtggagagccagcagccacaccatgggccgtccatgctcacgggagtggcagtatcagatctgagcttcgtgtgcccaggcgtctctcacatcagtgcatagggaccctctttgttctgtggcccagtgtgcccatgccacagatggcttcagtcagcagacacctccttctagacactcacactcactcctggctggcccttagcacacctgtgcagacaggcccatttattttcttgtgtaaatcccaagtaggaggactgggtctctctgacagcaatgccagctgcctggcaccctccagacaggtggctcaagccccacctcgccagctctcccagttagcccctcctttccctggctctgacctgagggacgaagcagggtgctacaggacgctgtgccacagggatatcgtcagggacagaagctactctgccctctgctgctcacccctccaacacgctgtgggctgcatttgttgagtggctggtaccagactctgctcttctgactttccagctggttttacctgtagtaaagtttgagaagatgggtcatcctgaccccggggtcagaagacagaaggaggcccatggcgtgtgggggagatgccccgtgaggccctcggtgtgcagatgcctggtgacagccccaccctgaggtccccagcctaccccctccccagcccgactgctcccatccccctccctgtgcaggtagagcagatcctggcagagttccagctgcaggaggaggacctgaagaaggtgatgagacggatgcagaaggagatggaccgcggcctgaggctggagacccatgaagaggccagtgtgaagatgctgcccacctacgtgcgctccaccccagaaggctcaggtaccacatggtaaccggctcctcatccagaagcagctgtgggctcagccctagctgggagaagcaccccaggcactcccagactcacagccagcccgagacagaatctcctggggagcaatgaagtcctcgacttgggccagttctcacccttggctcctctggtccggccctggggcactcgggctcaccctggagctggcaaacctcaggaaaactggcgttttaaatctcactcctggccaggtgcagtggctcacccctgtaacttcaacactttgggaggccaaagcaggcggatctcttgaggccaggagtttgagaccagcctgcccaacatggtgaaaccccgtctctactaaaaatacaaaaattatccaggcatggtggcacattcctgtagttccagctactcgggaggctgaggcataagaattgcttgaacccgggaggccgaggttgcagtgagccaaaatcgcgccactgcactccagcctggggtgacagggtgagacaccatctcaaaaaaaaaaaaaaaaaaagacctcactgctccccatgggcacttagggaactctcccagcccagttctgcagctgggccattgcactagatcctcagttggtccctgggctctcggtgactgtccagggcaggagtttcccattgacttttccctggttgacctttgaccccttccacagttgacactggtgtccccaggtgtctggtggccccttgtccagctcccttagtcccttgtgccttccctcctcctctttgtaatatccgggctcagtcacctggggcccacccagcccaaggccagcctgtgggtgtccctgaggctgacacacttctctctgtgcctttagaagtcggggacttcctctccctggacctgggtggcactaacttcagggtgatgctggtgaaggtgggagaaggtgaggaggggcagtggagcgtgaagaccaaacaccagatgtactccatccccgaggacgccatgaccggcactgctgagatggtgagcagcgcaggggccggggcagggggccaaggccatgcaggatctcagggcccagctagtcctgacgggaggtgccacctgtctaccaggggtggggagagcgggggctggaggaccacccagcctcagaggcagctggaggcctgggtgaacaggactggccaacatgtccccaagtcccacagtcaccatctggccagcattgagaggggaacgggctgaggaagagttagtggcaagaggaaccccagccagtcacaccttgtccagtttaccagaggaaaaaccaatgtgtaagaacagaaatgtgacccggcagccagtgcactgcccccctctccaaaggccacccctcaccctccaccagcatgcacagaaagtggggtgacagcaatcacaatgtctacccaggcagcaaggacccctgaccatggggaggactggggtgcagggaacatagaagcagaatgaggcctagggggagttgggcaaggccagagccctagctgcagccaagcacatggccaaggccagctcctggaagggcagggctccgaggcaggaggcaggaggctgcccgtggctacccgtcctcacacccctgcagcttgctagtctgtctgtgggctgggtgtgaatcaaggcagtgggatggtgtggggacctccctggccccagcagccagtgaggagcctggtcagtcagcagagcattcagcagtatccagttccatggagaggcccgtgtgaggggagtcggggctggtcttcagtaaggatgggtggccagggcccctagaagtagaaaaggagactccgggtgctggagacagaaatcaaggatgtgcctccatgtggagcctcaggaatagctggccaggcctgaggctgaacctcacaaggttcagctgggagggctaggctgacagagcacagccgggccagggaccagcctgccctgtgttgccttgtcccgagggccactgtcagcaggtctctggcatgggggaggcttagggcctgagcccaacaagcagcagcggaagaggagagggaaactgtggacaggcctggcattcagtggccaggtgttgcagtgtccctgaggaatagcttggcttgaggccgtggggagggctgccggccagcgcacccccccatgccagatggtcaccatggcgtgcatcttccagctcttcgactacatctctgagtgcatctccgacttcctggacaagcatcagatgaaacacaagaagctgcccctgggcttcaccttctcctttcctgtgaggcacgaagacatcgataaggtgggccgggtggaggggcagaaggcagatgaggggaggcacaggcaccccagaggaactctgccttcaaatgtagcccccataccatgtgctcagaagggagatctggattcaaattgtggccatgtcacctgccacctctaatgctgtggaaaagaagcatcacattagctaattctggctgtgcgccttgtgaggcaccagctatgatcaccccactccagtggaaagagcagctggcagtagggtggggctcaaactcaggcagccgggctctgggtcacctgcaggccacggtcatgtcacactgcctctagctgagtcagaaatgtgaaggaactgagattctacccttcctgcaagctagcaaagtggcctgccagttacatctgtgcatgcacacacacacacagttatatatgcacacacataaaacacgagacctttgggtcagggagaaagccagatcctcactcacggcagaagcagcagccaaagcaacatctcatgtggttttccaagccccagtccctacagagacagagagggccaggtggcacctgtgcatgcagcggggtaccttgcaggagggaaatcctgattttacacaaagctgctccccccacgccctgccttgactctgggatgacgtctcagagctgtgcagtacaacattcttaaattggctgggactcagccctgcagaaatatgatatcttcaaggagaatcgttcccaaaacctctcaaagctatggggctgctctgagcctgtttcctcagctgtaaagtagggtgcatacttttatggccctgtgcaggaggtagtgacaggccctagcaccctgcctccagtatatgttagcagccacgaggcctatctctccccacagggcatccttctcaactggaccaagggcttcaaggcctcaggagcagaagggaacaatgtcgtggggcttctgcgagacgctatcaaacggagaggggtgagggggcacctgtacctgccgggggggctgccctgggccacccaccccagcactgcctgcctttctccttggcttccagcactgcagcttctgtgcttcttggcaggactttgaaatggatgtggtggcaatggtgaatgacacggtggccacgatgatctcctgctactacgaagaccatcagtgcgaggtcggcatgatcgtgggtaagggctccttgcacccctgccccttccagactgctgaggctccctgtgtacaacaggcttcaagggccctgtggggtgaggaccaaactacttaacaaccggtgatgtcagagcagagcctggtgctacagcctgggtggtcttggggtatcaagatggaagcaccgtgtacagtaggaagcatttcaacgccatgatgccacattcctgcatcagatggtatgccagctgcatatccacctcacccatcaggattataattaaaacacttatctggtaaattgaccaactggacagattggtccaagtggaagaggataagcaaaagtggtaccatctccacccgaatggtctttccacgggcctgcccctgcccctgcccccacccaaagtgaaggcaggtaccaggaaagggagcagcagtccgcccctcccagcagaggggtcttccacaccaactcggacctttctcagaagttccggaggtcattataaccagccttcactgaggagcaatccaatcagatcagttatctgctgtgcgcacagccgtgtggttctatacttctcttacttccattttcacctttcagaaggaacgttgtctttaaatccagcatctaaacgtgagccccagccatccctggctgtgatccccccagccctttccaccctatcctctggaactgcctggggctccccaagacacttccacatgaattcccaccaagccaagctgcagctgctgggcccaggcataacccctcctggggcagaggtggcaaggagtgacccaccactcacatctgccccacatccactcttgactctgctcagtgtttaaaaacatgtttataacaattaccaagatctgaaaattaggagaattcacatcaaagtctggatttctgtttgttcataaaaaactagaaggcagccaggcaaggtggctcacgccagtaatcccaacactttgggaggctaaggcaggcgggtcacttgaggtcaggatttgaagactagctggccaacaaggtgtaacctcgtctctactaaaaatacaaaaattagctgggtgtgatggcgcatgcctgtaatcccaggtactcaggagactgaggcaggagaattgcttaaaccctggaggcagaggttgcagtgagccaagatcacgccactgcactccagcctgggtgatggagtgagtgagactctgtctccaaataaataaataaataaataaaaactggaagtctaagcatcactgagccctgattcctatgtggcagctcgactgaccagcatttgagttgctgtccctgacagctttgggggtgtgcagcccacacagtcatgctagcttgaggctctgctgtcagcagtttgaaactcttaataacttgtgaacaaaagactccatgttgtcactctgcacaggggccagcaaattacaaaattccatatccggaattgtctacaggagcctctgggctgctcccaagggcccacaccatgccttactcactttgggttgccatccaaacatgtctcatgacaaagaagctcaaacatgtgcatggacagtgccagaaaacaagggtcgtacatagacaaaataaaatgataacgtcccacaaccatttctttgatacacactgtttctctcagtcctcccaaccacctaggtaacaggcagggaaggtgttactgttgcctgttaggaaagaggacagccctgaaagctgtccctggccactgaagcaacccaggtcttccagccccagggagagccgcctttccattgttccagacaaagcagagacaggcatgggggagcgggagagggactcctgtgggcaggaaccaggccctactccggggcagtgcagctctcgctgacagtccccccgacctccaccccaggcacgggctgcaatgcctgctacatggaggagatgcagaatgtggagctggtggagggggacgagggccgcatgtgcgtcaataccgagtggggcgccttcggggactccggcgagctggacgagttcctgctggagtatgaccgcctggtggacgagagctctgcaaaccccggtcagcagctgtaaggatgcccccctcccccacaacccaggccctgggccgctctggtgcagcggcagatgggagccgggccattgcagataatgggcttgtttttaaacaactctggggaaaagcaaactgacaatccgttcgtaagctccatcccttctgctcagtcatgacctgcccctgtgagagatgaagggttagtcccagttgtgatgtgataagcccagacctctttccttccgacaggtgatcgtgcatgcagaggaggctctgagacgcccccagcaaggttcctgggtttaacccaacattccccaaagtatgtatttggccacattcacagaaagaatattagtcttttgtggaatgctgcgggttgacagtcacagcttggaaaccaacccacagagagctcatcattaatcatggctatcacttgtttaccacctactgtgccaggcctatgctaattactttattagcgtcctctctgccgctcgcaggcctctattattataggtcagtagtattcgatttatttaaattaaatacggaaggtcatagattaagcaagaaagtgccagcaacatggtgcgtgcctctgactgggcactaaccctccaagtcttagttttcccaaccataactggccaatgaacagcagctctggatgcagctaaaggaagactgaagctgtaggtcccgtgctcggcgcagggccccctgcaaggaaggtttcggagggactggatggggtctttgaactatctgtctttccctttactgcagtgggcccaggggcaggccaaagttgctcccgtgattgacttgaacgtgcacgttcctaatccctgacatttctaaagctctggctcattaacgagggaaagacgtgaaccagctgggggagtggggatcgcagtgccccacgtggccgcctcgtgacctcagtggggagcagtggggccggctcccggcttccacctgcatgaggggccctccctcgtgcctgctgatgtaatggacctgccctatgtccaggtatgagaagctcataggtggcaagtacatgggcgagctggtgcggcttgtgctgctcaggctcgtggacgaaaacctgctcttccacggggaggcctccgagcagctgcgcacacgcggagccttcgagacgcgcttcgtgtcgcaggtggagaggtgtgcggaggaggagggtgggtgcaaagggcaggggctggggacgcccgggcactgcagacttggtctcagggcgacgctgagtcccaggcccggggcgcagggatgggaaactagggcctggggcgggattccgggcgtgggcggggcccggggcggggcacagggggcgggggagtgggcggggcccgaggccgggcgctggaggcgagggcggggcagggacgggtccaagggcaggaggctgggacaggacggggatgcaaagggaggggcggggcccgagacggggaggagggggagggcccaaggggaggaggcggggtccggacggggatgccaagagcagggatgggagcgagcctgcgtccgggcactggtccccatccgtgagtcccctcggtgctccctgcccgccgtggccatcctctcacatcactcacaaccccaaggcgcggcatggttgacacccccacgttaggacggagaccctgggcttagttagagggggcagtactaaccagtccctggcggaaacgctttggctgggtgaggtgagcgggatcgcccccatttctccagagaggggtcccggctcagcgagggaaagaggccgccgctggggggacggctggccggggcccctccctggagaacgagaggccgccgctggagggggatggactgtcggagcgacactcagcgaccgccctacctcctcccgccccgcagcgacacgggcgaccgcaagcagatctacaacatcctgagcacgctggggctgcgaccctcgaccaccgactgcgacatcgtgcgccgcgcctgcgagagcgtgtctacgcgcgctgcgcacatgtgctcggcggggctggcgggcgtcatcaaccgcatgcgcgagagccgcagcgaggacgtaatgcgcatcactgtgggcgtggatggctccgtgtacaagctgcaccccaggtgagcccgccccgctctctccctggtaaagtggggcccaaaaagcgcgcgctccaaggttccttgcggttcccaagctccaagatttcgtagtcctcttctcgtcccccttggcctagatttgggggaagggtcgactgcgtgcagggcgcccggtaatgaatgtggaggatgaggtgggaggagggacggcagccctgcttctcttctgcccagcttcaaggagcggttccatgccagcgtgcgcaggctgacgcccagctgcgagatcaccttcatcgagtcggaggagggcagtggccggggcgcggccctggtctcggcggtggcctgtaagaaggcctgtatgctgggccagtgagagcagtggccgcaagcgcagggaggatgccacagccccacagcacccaggctccatggggaagtgctccccacacgtgctcgcagcctggcggggcaggaggcctggccttgtcaggacccaggccgcctgccataccgctggggaacagagcgggcctcttccctcagtttttcggtgggacagccccagggccctaacgggggtgcggcaggagcaggaacagagactctggaagccccccacctttctcgctggaatcaatttcccagaagggagttgctcactcaggactttgatgcatttccacactgtcagagctgttggcctcgcctgggcccaggctctgggaaggggtgccctctggatcctgctgtggcctcacttccctgggaactcatcctgtgtggggaggcagctccaacagcttgaccagacctagacctgggccaaaagggcagccaggggctgctcatcacccagtcctggccattttcttgcctgaggctcaagaggcccagggagcaatgggagggggctccatggaggaggtgtcccaagctttgaatacccccagagaccttttctctcccataccatcactgagtggcttgtgattctgggatggaccctcgcagcaggtgcaagagacagagcccccaagcctctgccccaaggggcccacaaaggggagaagggccagccctacatcttcagctcccatagcgctggctcaggaagaaaccccaagcagcattcagcacaccccaagggacaaccccatcatatgacatgccaccctctccatgcccaacctaagattgtgtgggttttttaattaaaaatgttaaaagttttaaacatg

SEQ ID NO: 12136 - DNA, 2260 bp, Homo sapiens
atgcccagaccaagatcccaactcccacaacccaactcccaggtagagcagatcctggcagagttccagctgcaggaggaggacctgaagaaggtgatgagacggatgcagaaggagatggaccgcggcctgaggctggagacccatgaagaggccagtgtgaagatgctgcccacctacgtgcgctccaccccagaaggctcagaagtcggggacttcctctccctggacctgggtggcactaacttcagggtgatgctggtgaaggtgggagaaggtgaggaggggcagtggagcgtgaagaccaaacaccagatgtactccatccccgaggacgccatgaccggcactgctgagatgctcttcgactacatctctgagtgcatctccgacttcctggacaagcatcagatgaaacacaagaagctgcccctgggcttcaccttctcctttcctgtgaggcacgaagacatcgataagggcatccttctcaactggaccaagggcttcaaggcctcaggagcagaagggaacaatgtcgtggggcttctgcgagacgctatcaaacggagaggggactttgaaatggatgtggtggcaatggtgaatgacacggtggccacgatgatctcctgctactacgaagaccatcagtgcgaggtcggcatgatcgtgggcacgggctgcaatgcctgctacatggaggagatgcagaatgtggagctggtggagggggacgagggccgcatgtgcgtcaataccgagtggggcgccttcggggactccggcgagctggacgagttcctgctggagtatgaccgcctggtggacgagagctctgcaaaccccggtcagcagctgtatgagaagctcataggtggcaagtacatgggcgagctggtgcggcttgtgctgctcaggctcgtggacgaaaacctgctcttccacggggaggcctccgagcagctgcgcacacgcggagccttcgagacgcgcttcgtgtcgcaggtggagagcgacacgggcgaccgcaagcagatctacaacatcctgagcacgctggggctgcgaccctcgaccaccgactgcgacatcgtgcgccgcgcctgcgagagcgtgtctacgcgcgctgcgcacatgtgctcggcggggctggcgggcgtcatcaaccgcatgcgcgagagccgcagcgaggacgtaatgcgcatcactgtgggcgtggatggctccgtgtacaagctgcaccccagcttcaaggagcggttccatgccagcgtgcgcaggctgacgcccagctgcgagatcaccttcatcgagtcggaggagggcagtggccggggcgcggccctggtctcggcggtggcctgtaagaaggcctgtatgctgggccagtgagagcagtggccgcaagcgcagggaggatgccacagccccacagcacccaggctccatggggaagtgctccccacacgtgctcgcagcctggcggggcaggaggcctggccttgtcaggacccaggccgcctgccataccgctggggaacagagcgggcctcttccctcagtttttcggtgggacagccccagggccctaacgggggtgcggcaggagcaggaacagagactctggaagccccccacctttctcgctggaatcaatttcccagaagggagttgctcactcaggactttgatgcatttccacactgtcagagctgttggcctcgcctgggcccaggctctgggaaggggtgccctctggatcctgctgtggcctcacttccctgggaactcatcctgtgtggggaggcagctccaacagcttgaccagacctagacctgggccaaaagggcagccaggggctgctcatcacccagtcctggccattttcttgcctgaggctcaagaggcccagggagcaatgggagggggctccatggaggaggtgtcccaagctttgaatacccccagagaccttttctctcccataccatcactgagtggcttgtgattctgggatggaccctcgcagcaggtgcaagagacagagcccccaagcctctgccccaaggggcccacaaaggggagaagggccagccctacatcttcagctcccatagcgctggctcaggaagaaaccccaagcagcattcagcacaccccaagggacaaccccatcatatgacatgccaccctctccatgcccaacctaagattgtgtgggttttttaattaaaaatgttaaaagttttaaacatg

SEQ ID NO: 12137 - DNA, 2749 bp, Homo sapiens
actccacacctggctggagcaggaaatgccgagcggcgcctgagccccagggaagcaggctaggatgtgagagacacagtcacctgcagcctaattactcaaaagctgtccccaggtcacagaagggagaggacatttcccactgaatctgtctgaaggacactaagccccacagctcaacacaaccaggagagaaagcgctgaggacgccacccaagcgcccagcaatggccctgcctggagaacatccaggctcagtgaggaagggtccagaagggaatgcttgccgactcgttggagaacaatgaaaaggaggaaactgtgactgaacctcaaaccccaaaccagcccgaggagaaccacattctcccagggacccagggcgggccgtgacccctgcggcggagaagccttggatatttccacttcagaagcctactggggaaggctgaggggtcccagctccccacgctggctgctgtgcagatgctggacgacagagccaggatggaggccgccaagaaggagaaggtagagcagatcctggcagagttccagctgcaggaggaggacctgaagaaggtgatgagacggatgcagaaggagatggaccgcggcctgaggctggagacccatgaagaggccagtgtgaagatgctgcccacctacgtgcgctccaccccagaaggctcagaagtcggggacttcctctccctggacctgggtggcactaacttcagggtgatgctggtgaaggtgggagaaggtgaggaggggcagtggagcgtgaagaccaaacaccagatgtactccatccccgaggacgccatgaccggcactgctgagatgctcttcgactacatctctgagtgcatctccgacttcctggacaagcatcagatgaaacacaagaagctgcccctgggcttcaccttctcctttcctgtgaggcacgaagacatcgataagggcatccttctcaactggaccaagggcttcaaggcctcaggagcagaagggaacaatgtcgtggggcttctgcgagacgctatcaaacggagaggggactttgaaatggatgtggtggcaatggtgaatgacacggtggccacgatgatctcctgctactacgaagaccatcagtgcgaggtcggcatgatcgtgggcacgggctgcaatgcctgctacatggaggagatgcagaatgtggagctggtggagggggacgagggccgcatgtgcgtcaataccgagtggggcgccttcggggactccggcgagctggacgagttcctgctggagtatgaccgcctggtggacgagagctctgcaaaccccggtgatcgtgcatgcagaggaggctctgagacgcccccagcaaggttcctgggtttaacccaacattccccaaagtatgagaagctcataggtggcaagtacatgggcgagctggtgcggcttgtgctgctcaggctcgtggacgaaaacctgctcttccacggggaggcctccgagcagctgcgcacacgcggagccttcgagacgcgcttcgtgtcgcaggtggagagcgacacgggcgaccgcaagcagatctacaacatcctgagcacgctggggctgcgaccctcgaccaccgactgcgacatcgtgcgccgcgcctgcgagagcgtgtctacgcgcgctgcgcacatgtgctcggcggggctggcgggcgtcatcaaccgcatgcgcgagagccgcagcgaggacgtaatgcgcatcactgtgggcgtggatggctccgtgtacaagctgcaccccagcttcaaggagcggttccatgccagcgtgcgcaggctgacgcccagctgcgagatcaccttcatcgagtcggaggagggcagtggccggggcgcggccctggtctcggcggtggcctgtaagaaggcctgtatgctgggccagtgagagcagtggccgcaagcgcagggaggatgccacagccccacagcacccaggctccatggggaagtgctccccacacgtgctcgcagcctggcggggcaggaggcctggccttgtcaggacccaggccgcctgccataccgctggggaacagagcgggcctcttccctcagtttttcggtgggacagccccagggccctaacgggggtgcggcaggagcaggaacagagactctggaagccccccacctttctcgctggaatcaatttcccagaagggagttgctcactcaggactttgatgcatttccacactgtcagagctgttggcctcgcctgggcccaggctctgggaaggggtgccctctggatcctgctgtggcctcacttccctgggaactcatcctgtgtggggaggcagctccaacagcttgaccagacctagacctgggccaaaagggcagccaggggctgctcatcacccagtcctggccattttcttgcctgaggctcaagaggcccagggagcaatgggagggggctccatggaggaggtgtcccaagctttgaatacccccagagaccttttctctcccataccatcactgagtggcttgtgattctgggatggaccctcgcagcaggtgcaagagacagagcccccaagcctctgccccaaggggcccacaaaggggagaagggccagccctacatcttcagctcccatagcgctggctcaggaagaaaccccaagcagcattcagcacaccccaagggacaaccccatcatatgacatgccaccct

SEQ ID NO: 12138 - DNA, 2168 bp, Homo sapiens
gtccctggcggaaacgctttggctgggtgaggtgagcgggatcgcccccatttctccagagaggggtcccggctcagcgagggaaagaggccgccgctggggggacggctggccggggcccctccctggagaacgagaggccgccgctggagggggatggactgtcggagcgacactcagcgaccgccctacctcctcccgccccgcagcgacacgggcgaccgcaagcagatctacaacatcctgagcacgctggggctgcgaccctcgaccaccgactgcgacatcgtgcgccgcgcctgcgagagcgtgtctacgcgcgctgcgcacatgtgctcggcggggctggcgggcgtcatcaaccgcatgcgcgagagccgcagcgaggacgtaatgcgcatcactgtgggcgtggatggctccgtgtacaagctgcaccccaggtgagcccgccccgctctctccctggtaaagtggggcccaaaaagcgcgcgctccaaggttccttgcggttcccaagctccaagatttcgtagtcctcttctcgtcccccttggcctagatttgggggaagggtcgactgcgtgcagggcgcccggtaatgaatgtggaggatgaggtgggaggagggacggcagccctgcttctcttctgcccagcttcaaggagcggttccatgccagcgtgcgcaggctgacgcccagctgcgagatcaccttcatcgagtcggaggagggcagtggccggggcgcggccctggtctcggcggtggcctgtaagaaggcctgtatgctgggccagtgagagcagtggccgcaagcgcagggaggatgccacagccccacagcacccaggctccatggggaagtgctccccacacgtgctcgcagcctggcggggcaggaggcctggccttgtcaggacccaggccgcctgccataccgctggggaacagagcgggcctcttccctcagtttttcggtgggacagccccagggccctaacgggggtgcggcaggagcaggaacagagactctggaagccccccacctttctcgctggaatcaatttcccagaagggagttgctcactcaggactttgatgcatttccacactgtcagagctgttggcctcgcctgggcccaggctctgggaaggggtgccctctggatcctgctgtggcctcacttccctgggaactcatcctgtgtggggaggcagctccaacagcttgaccagacctagacctgggccaaaagggcagccaggggctgctcatcacccagtcctggccattttcttgcctgaggctcaagaggcccagggagcaatgggagggggctccatggaggaggtgtcccaagctttgaatacccccagagaccttttctctcccataccatcactgagtggcttgtgattctgggatggaccctcgcagcaggtgcaagagacagagcccccaagcctctgccccaaggggcccacaaaggggagaagggccagccctacatcttcagctcccatagcgctggctcaggaagaaaccccaagcagcattcagcacaccccaagggacaaccccatcatatgacatgccaccctctccatgcccaacctaagattgtgtgggttttttaattaaaaatgttaaaagttttaaacatggcctgtccactgttctttgacttctgtgcattaggactgtggggacaatctataaagagtctgcgtcacatgcatgaagacacttcagtatctcggcaatgccctccagacagctcctccagccatctgtgccaaggggagtgtgaggagtgacagaccaggctgtaggaacaggaatggggtgtcatgggggatggcagagcagtggacagtacactgcctggcccgggcccctgcttgcctgcccatggaatgtgtgcagagggagtgccaggccaggtgctgctctggagaagtgggggaatgaggctggtcctgctgcaggtcagtctcagcaccgtcctgtccagtcagagtcacttaggtttgccagtgagtaggggcccagatacatgttggatttctaaggtccctccagatgctcctgtcagtggaacgcctatttagagttagccaagcgtaggcataatgccatctttctgcagcataaaatacagtg

SEQ ID NO: 12139 - DNA, 846 bp, Homo sapiens
gtccctggcggaaacgctttggctgggtgagcgacacgggcgaccgcaagcagatctacaacatcctgagcacgctggggctgcgaccctcgaccaccgactgcgacatcgtgcgccgcgcctgcgagagcgtgtctacgcgcgctgcgcacatgtgctcggcggggctggcgggcgtcatcaaccgcatgcgcgagagccgcagcgaggacgtaatgcgcatcactgtgggcgtggatggctccgtgtacaagctgcaccccagcttcaaggagcggttccatgccagcgtgcgcaggctgacgcccagctgcgagatcaccttcatcgagtcggaggagggcagtggccggggcgcggccctggtctcggcggtggcctgactgtggggacaatctataaagagtctgcgtcacatgcatgaagacacttcagtatctcggcaatgccctccagacagctcctccagccatctgtgccaaggggagtgtgaggagtgacagaccaggctgtaggaacaggaatggggtgtcatgggggatggcagagcagtggacagtacactgcctggcccgggcccctgcttgcctgcccatggaatgtgtgcagagggagtgccaggccaggtgctgctctggagaagtgggggaatgaggctggtcctgctgcaggtcagtctcagcaccgtcctgtccagtcagagtcacttaggtttgccagtgagtaggggcccagatacatgttggatttctaaggtccctccagatgctcctgtcagtggaacgcctatttagagttagccaagcgtaggcataatgccatctttctgcagcataaaatacagtg

SEQ ID NO: 12140 - DNA, 2879 bp, Homo sapiens
actccacacctggctggagcaggaaatgccgagcggcgcctgagccccagggaagcaggctaggatgtgagagacacagtcacctgcagcctaattactcaaaagctgtccccaggtcacagaagggagaggacatttcccactgaatctgtctgaaggacactaagccccacagctcaacacaaccaggagagaaagcgctgaggacgccacccaagcgcccagcaatggccctgcctggagaacatccaggctcagtgaggaagggtccagaagggaatgcttgccgactcgttggagaacaatgaaaaggaggaaactgtgactgaacctcaaaccccaaaccagcccgaggagaaccacattctcccagggacccagggcgggccgtgacccctgcggcggagaagccttggatatttccacttcagaagcctactggggaaggctgaggggtcccagctccccacgctggctgctgtgcagatgctggacgacagagccaggatggaggccgccaagaaggagaaggtagagcagatcctggcagagttccagctgcaggaggaggacctgaagaaggtgatgagacggatgcagaaggagatggaccgcggcctgaggctggagacccatgaagaggccagtgtgaagatgctgcccacctacgtgcgctccaccccagaaggctcagaagtcggggacttcctctccctggacctgggtggcactaacttcagggtgatgctggtgaaggtgggagaaggtgaggaggggcagtggagcgtgaagaccaaacaccagatgtactccatccccgaggacgccatgaccggcactgctgagatgctcttcgactacatctctgagtgcatctccgacttcctggacaagcatcagatgaaacacaagaagctgcccctgggcttcaccttctcctttcctgtgaggcacgaagacatcgataagggcatccttctcaactggaccaagggcttcaaggcctcaggagcagaagggaacaatgtcgtggggcttctgcgagacgctatcaaacggagaggggactttgaaatggatgtggtggcaatggtgaatgacacggtggccacgatgatctcctgctactacgaagaccatcagtgcgaggtcggcatgatcgtgggcacgggctgcaatgcctgctacatggaggagatgcagaatgtggagctggtggagggggacgagggccgcatgtgcgtcaataccgagtggggcgccttcggggactccggcgagctggacgagttcctgctggagtatgaccgcctggtggacgagagctctgcaaaccccggtcagcagctgtatgagaagctcataggtggcaagtacatgggcgagctggtgcggcttgtgctgctcaggctcgtggacgaaaacctgctcttccacggggaggcctccgagcagctgcgcacacgcggagccttcgagacgcgcttcgtgtcgcaggtggagagcgacacgggcgaccgcaagcagatctacaacatcctgagcacgctggggctgcgaccctcgaccaccgactgcgacatcgtgcgccgcgcctgcgagagcgtgtctacgcgcgctgcgcacatgtgctcggcggggctggcgggcgtcatcaaccgcatgcgcgagagccgcagcgaggacgtaatgcgcatcactgtgggcgtggatggctccgtgtacaagctgcaccccagcttcaaggagcggttccatgccagcgtgcgcaggctgacgcccagctgcgagatcaccttcatcgagtcggaggagggcagtggccggggcgcggccctggtctcggcggtggcctgactgtggggacaatctataaagagtctgcgtcacatgcatgaagacacttcagtatctcggcaatgccctccagacagctcctccagccatctgtgccaaggggagtgtgaggagtgacagaccaggctgtaggaacaggaatggggtgtcatgggggatggcagagcagtggacagtacactgcctggcccgggcccctgcttgcctgcccatggaatgtgtgcagagggagtgccaggccaggtgctgctctggagaagtgggggaatgaggctggtcctgctgcaggtcagtctcagcaccgtcctgtccagtcagagtcacttaggtttgccagtgagtaggggcccagatacatgttggatttctaaggtccctccagatgctcctgtcagtggaacgcctatttagagttagccaagcgtaggcataatgccatctttctgcagcataaaatacagtgacatagaaacatatttgtgtgattttcatgcattccttttttgatgagagatattacccagctaattaggaacaactgttttgtttccttcagatcataacccaaagttgtgattttgaaaagtcatgtcccccttcagatttcttgttttctgctacttctcatgtggaattgctttggctcttcttagttctcttgagtctaaattattccttataagttggtgcaagcatctgattattttgttatcattactgttatgctcaagcattcacagagtggaacacattttaatatcaattgctttctatttctcctttatattacagttcaggacattgtattaattattaaaattctattcgtaggtaggttatatgactgaattgaaatagataaaatgaatttcttttctagataacaaaggaggtgtcataaaacacttgttatgggccagtgtgatggctcatgcctataatctcagtgctttgagaggctgaggtggaggattgcttgaggccaggaatttgagaccagcctggggcaacatagcaagacc

SEQ ID NO: 12141 - DNA, 24720 bp, Homo sapiens
tgggggccggtggcggatggagcccgcgatggagccggagactctggaggcgcgaatcagtgagtgtccgggaggggcgcgggccggaccggaaccggaaccgggggcacgaggcgggccccttcccggcgggggcggggtacgggtcgccccctcctcacgccccgcccccggcccgggaggggcggtgtcctcagtcggcccctcagaccctggagcgatggaggaccccggccccggcgcggtccagcggtgggagcgggcgccgcccacctgtcggatccctgggccatgacccctgggacggcgagtgagctgcgccgggaacccccgggacggagagagcagcctccaacccccaaggctcacattgcttcacggagtagcggcccggggaaggagcacgcgagcggttccccggggttgcatctcacacccgggagggagggaccctactattttcaggccccgaatcctccactctctggccctgcatggcgttcctggagcccgcaagtagtcacatttgctcattaccccgtcctggaagggaggacccactgccccatttgattcctcccgccgctcctagtctctagccacatagtgagaaacccccgcaccctacaggcttgggagagtcttagactccagaagtattaataattccaagctccctgtcactcccttcagcctaacccctcagtctccaagatgcctttcccagctcttgctgaacttccttcaaaggcttctacacccctttttttcttgtttctcctcagacgtagcttcctattgcttaggcttcctagcccgcaaaccctccacctgagctccttaacccacagccctgatgatcccctgctctcacagccccgctcctggactctgcctctgaaagccgtggctggcttctccctggtctagtgagggttctctcccaaggctttaactgctgttgggaccccgtcgttgccagggcctcagggaaccctcttggacccgggcacaccggcaactgtctagcgtggtttggggtcatggccggccccttttaagccaggcttgagcagagttgaaccatgaggttggccccagaaccaaacctctagggatgtttcagagtcatcctagccaccagaggggcagggggtggaaaaggggcactcagcagcccttgaccgttgtgaacgccggaagtgtccgcctgggtctcagcagcaactgggctggggggatgggtgggcccctggctaactgatctcagacacaggtcttgagctgtgggtcatacaaaacattctcaggtttagaaacagtgggggttttctgagagtccagagagtctaaaaccaggcagaagttagagatacctgggtttggctgggccctgacacactggggctgggattttctcctttccttccccctttgtgtcctagcagaattgtaagatctttcctcttcccttgtggaggctggaggtaaaggatagcttcttctttttttttttgagacgggttttcactcttgtcacccaggctggagtgcagtggcacaatctcagctctctgcaacctccacctcccgggttcaagtgattctcctgtctcagcctcccgagtagctggaattacaggtgcgccaccacgcccagctatttttgtatttttagtacaggtgggctttcaccatgttggccaggctgatctcgaactcctgacctcaggtgatccgcctatataggcctctcaaagtgttgggattacaggcgttagccactcatccgcccacgtcggcctctcaaagtgttgggattacaggcgtgagccaccgcgcccggcctagtgaggtaaatgatgttattgtcagcactatagagtggcagggtggagtcttaccctgttgtgaaacacctccctccctctctaggtgttctccccaactgcctgctagggagggtactcccctcaggtagaattaagagggctgagggtcaggggccatgggccaaggaggtcagtcagatctccttggatctggaggccctggctttcagccagaggcagggggagaaagatgatgtctcatgatgccagcgcttcctcttcactggcgtctgacccaggagcagtccagaatcagcttctctgacctcactccaactcacgtgtctttgacactttaagggacttcctgttttagggtcttctggctgggtgtcattgaatgggcagtgattctctaactttagactgatgttccccagcctttgtttggggactcggaggcagagtagacagttacccttacccctgggttggggagggtcatattcctggtatccccaggaggtcaacaggggcttcatttttctgagggactagagggtcttgtggagctcctgggacagagatctagatccagagagaacattcgtccttccgatctcagctcagctctgagagccctcccagagagcagctcccgagggctccagagccctccgaaagccctcccagagagcagcccccacctcccaggctgtctgcacttctccttgctatgctttgctctgtaacattttgcaacagtctgcagtacacggggtttgttaatctgagtattcattgtttctcttgctgggcagtgaacttgaggagggcagggattttgtctgttcactgctggagccccagcacccagaatacttaaatctgagttggatgaatggcggccagccactgggattccagggctttgggccccctgccataacatatggcccagggcaggcgccacatgctgggtcagtccccagcctcctgtccacagatccttctctgttctacctcctgggctgtgtccttccacaccctcagctcggtgctcaggcgtgggcagaactggctgggaaggggtggtccttagaggtgggctgtggagaaatgaagatcgagctctggctgccgccatggccttcccatgcaaaaagtattttgtcatccaaaatcaatattttggtcaggcacagtggctcatgcctgtaatcccagcactttgggtggccgaggtgggtggatcatttgaggtcaggagtttgagaccagcctgaccaacatggtgaaattccatctctaccaaaaatacaaaaaaattagctgggcatggtggtggacgcctgtgatcccagctactctcaggaggctgaagcaggagaatcgtttgaacccaggaagctgagattgcagtgagccgagatctcgccactgcactccagcctgggcaacaaagcaagactctttctcaaaaaaaaataaaaataaaaaaatacaggccggacgcagtggctcacacctgtaattccagtactttgggaggccgaggcaggtggatcacgaggttaggagatcaagaccatcctggctaacacagtgaaaccccgtctctactaaaaatacaaaaaaaaaaaaaattagccgggcgtggtggcgggcacctgtagtcccagctactcgggaggctgaggcaggagaatggcgtgaacctgggaggcagagtttgcagtcagccgagatcacaccactgcactccagcctgggcgatagagcgagactccgtctcaaaaaaaaaaaaaaatacagccgggcacggtggctcacacctgtaatcccagcactttgggaggccaaggtgggcggatcacaaggtcaggagattgagaccatcctggctaacatggtgaaaccctgtctctactaaaaatacaaaaaaaaattagccgggcgtggtggcgggtgcctgtagtcccagctactcgggaggctgaggaaggagaatggcatgaacctgggaggcggagcttgcagtgagccgagatcgtgccactgcactccagcctgggcaacagcgtgagactcgtctcaaaaaaaaaaaaaaatccatatttcattccagctttacaagatggggaaatggaggttcagggaagcatgtaagctagattgttgtttaaccagtattgggggttaaaggggtagctgtctggtcgtgtttacaccacttcatgtagacctgttggccctctttccttgccactatccatttctggattcagtcttccccagaacctcaccctttgcctgccctcagctgactgctcattcatttgccaaggggagacaggtgtggacatgagtggctgggatgcagtgccgtagcaggctgggggacacaaaagagaactgacccagcactgctaccctgggcaggagtagaggattagagaaggggacaccggagccactcccaagggaatgaaggctttctgaacctggtgtgatggtaagactcacactccttactgaggcccctcattctctgcctcgtgtggttacccgcatctttcctgcccatacagccatgcgtgggtcagaggtgtaccagctccagcctgggtgactcctcctggtccctgcttgtgtgttgcctcttccaggcagcctcctcagccccaaactgaactgagtcccctcctctgtgtttcttttttgtttgtttgagacggagtcacccagagtcccagctctgtcacccaggctggagggcagtggcgagacctcggctcactccaagctccgcctcccgggttcacgccattctcctgcctcagcctcccaagtagctgggactacaggcacccaccaccaagcccggctaatttttgtatttttagtagagatggggtttcatcgtgttagctaggatggtcttgatctcctgacctcgtgatccacccacctcagcctcccaaagtgctgggattacaggcatgagccaccgtgcctggcccctcctctgtgtttctacagctccttggcttccctctgtcacacgttattgagaacctagcttcccttggcccacttcccggctacacagctccttgagggcgggactatgatttttttctcccttacttctggatctcctctgagcataaatttcatgagaattatggagacactgttctcagcagaatcagaggaggtggggctggcgtgatgggtccagctgcaggggtgggaggagtggggaggaggggaagggccctgaccatagtctctaaaagtggggccctttggagggcagctgtgctcatctgtctgtctacacccacaatcaggtcttgaggctgtctgggcaggaaggcagggggagagctttcccacgtgctcagtcacactcctctcccactcctgaccacacctttgccagggtcaggagtggaagagcaggaatcccactgccgggccacaatgaccccagctctcctcttccagatagagccacgaaccccctgaacaaggagctcgactgggccagcatcaacggcttctgcgagcagctcaacgaggactttgaggggtaggtggccgtccccacttgtttgcactgccctgcactctccagaacccagtctcgggtacaatggcctgggtgggtggagacccggttttcattctgaacgtattcacaaagtgatgaggatggggcacttggcactgaatgctgtttgggtgtcactctctggggtgggccttgctggaaccatttaacaggtaaagaaatcaaggctcagaggactcagatctgcccccacatctcacagggagaaaatgctagtcctgagcttggtaagacccaggcctgctggacctgcagccagtgctttgtggggaaaggccccccagagggagaactgcatgttccccaattgggaggaggccagtaggccctttgctcaaggacgaaccagaactacctgtgttagaatcacctagaatgttggccaggcacagtggctcatgcctgtaatcccagcactttggaaggccgaagtgggtggattacctgaggtcaggagtttgagaccagcgtggccaacatggtgacaccccgtctctactaaaaatgcaaaaattagctgggcgtggtggcacgtgcctgtaatcccagctactcaggaggctgaggcaggagaattgcttgaacccaagagacagagattgtaatgagccgagattgcgccactgccctgcagcctgggcagcagagtgagactctgtctcgaaaaacaaaacaaagaattacctagaatgcttgtcagaaatgtacattcttagccaggcatggtggtgcacacctgtaatctcagttactggggaggccaaggcgggaggatcccttgaggctagcctgggcaacatagcggggcaacatagcgagacatcatctcttaaaaaataaaaaaataggccaggcatggtggctcacgcctgtaatcccagcactttgggaggccaaggcaggtggatcacctgaggttgggagttcaagaccagccttaccaacatagagaaatcccatctctactaaaaatacaaaaaaaattagccgggcatggtggtgcatgcctgtaatcccagctactcgggaggctgaggcaggagaattgcttgaacccaggaggtagaagttgcagtgagccaagatcgtgccattgcactccagcctgggcgacggagtgaaactccgtctcaaaaaataagtaaataaataaataataaaaaataaggccgggtgtggtggcttacgtctataatcccagcactctgggaggctgaggcaggtggatcacgaggccaacagattgagaccatcctggccaacatggtgaaaccccatctctactaaaaatgcaaaaattagcaaggagcggtggtgtgcgcctgtagtcccagctactcgggaggctgaggcaggagaatcgcttgaacccgggaggctgaggttgcagtgagccaagattgcattactgcactccagcatggtgacggtgagactccatctcaaaaaaataaataaagtaaatgcaccttcttgggctgcccccagactcgactgtccagtggggggttgggagtggacattctttttatttttttttttgagatggagtctcgctctgtcgcccaggctggagtgcattggcacgatctcggctcactgcaagctccgcctcccaggttcacgcggttctcctgcctcagcctccccagcagctgggactacaggcgcctgccaccacacccggctaatttttttgtattttttagtagagacagggtttcaccgtgttagccaggatggtctcgatctcctgacctcatgatccacctgcctcggcctcccaaagtgctgggattacaggcatgagccaccgtgcccagctgggagtggacattcttagtgggctccccaggcgatactaaagtttcgggaccacaaacagcggtgtgtgtgctttggagtcgtgctgcttgggtacgagtcctgtcccctctcttagctgagtaaccttgggtgagtggttgcctctgagtgtcagtttcttcacagttgaaggaacttcccacggtgaggcgggaatgaccgtgctgcctgccttatgcagcttaggcaggaaagtgcatgtgagcctcctcacacatgaccagttcagcacatgtgagctcttaccgtcactggtgacgggtcttttacagtctgttagatgatgtcaccacctccaccatgaagctgctctgatttgccacagcagaacgtcctttgccaccttgagttcccagggaactgtgtctgcccgtctctcatggcatattgtaattgtctctatggcaagccaagccaaggacgtgacacatcagagttcttaggccagcccaggagctgagctcataccttttgaaggtccctgcctgcagtctctgtctggccctgccctgccacaatctcaggccataactgatctggagagggagctgggcctttgcatatgcctgcagaaaccttagagggctgaagtctcggcggcgggctggggtggtgaccctcccctagggcgaccagggccccttggaggagggctgcagtcccagcggcctggggtcgtggccctagggtgaccgggactccgtggcgactctggctctgtgttgttcctcccacccaggcctccactcgccacccggctgctggcccacaagatccagtccccacaggagtgggaggcgatccaggccttgacggtgagaaggggagaggccaccatccgtcccccgccatgtgacgacaccaagggaggccaagactgaggttcttggggtccataaggctcttcagagcccaagagagttgtgctaagatggcccaggatggaggtccgggcctgccccaagggtcccaccacagccagcgggctggcctcccaccccagcatccatacacgtaggcctgttgctgagggaaggccctctagggtcatctggtccaggggttctttgcttcagctgcacatcggctgcctctccaggaagcgtgttcaacacatggaatcagggctccacccagacctgccgaggccacactcctggagtatctgcatccagagatctgcacgtttgtaaagctaaggggtggtgcttgggctcaggcctgaggttttgcatctgttcaatagcagaggagagaggggtgtactgtctgtggcccccagcatgggccacataccaacccaccatggagcaaagctgattttaagtggtggtagagatacagtttctcttttaatacttacgtgtttagttgggtgcagtggcttatacctgtaatttcagcacttggggaggccaaggcaggaggcttgcttgaggcaaggagttcaaggctacagtgagctatgattgtgccactgtactccagactggacaacagagtgagaccccatctctaaataataatcattattgttacatatttgttttaacatttttttctcaagtataactagtcctatgatttcatagatgtagcttaggataaggccaaggtaggtgttgcctatataaggtttttttaaaaaaggaaaaataggccgggctggtggctcacgcctgtaatcccagcactttggcaggctgaggcgggcagatcacctgagatcaggagttcaagatcagcctgaccaacatggagaagccccatgtctactaaaaataaaaaattagcgaggcgtggtgggcgggcgcctgtaatcccagctacttgggaggctgaggcagaagaatcatttgaacccaggaggcagaggttacagtgagccgagatcgtgctactgcattccaacctgggcaacaagagtgaaactctgtctcaaaaaaaaaaaaaaaaaggaaaaatagtaagaaaataatgtacagttggtactcagatgtggggcctaagctatgaatgggactagagcattgctacaggttgggcattgctgggcactgtatgtaggtcgcctgaccctatctcccatgggagtgatgaccagtcccagaggcctgtgtgactctgaatcttccaacctcacaggccattccctcccttctgaaagcccacccatgggcttctggcccctgtccaaggcgtgggagggaggccacggcctctgatgcacctgggcgtcccctcccatcccccctccctgcacaggtgctggaaacatgcatgaagagctgcggcaagcggttccacgacgaagtgggcaagttccgctttctcaacgagctcatcaaggtcgtgtctcccaaggttggtgcccccagcccaagctcagacctgccctgtcggatgtggggagaggaaagaggaccttcagattgtggagcgacttttccagggagcctcccactggggtgtcacctcagccccccattagaactcagacctaggaaaaacacagatctcttctcacagtcctctcatacctgattctgggacagcctggggtctcggaggagtgtttccaggctggccaggggcggggcagccatggagctgcccggtgcttaggaagaaatgattccagggaatacataagctgacagatggctgtatgtgtcagccatctctggcctgaaatcactccctgtggacctggccacagaaccctacctggtctctggcaggtttccctgtccccaccacacaagagcaacctccctggacctcagcatccaaggccacagacctgagtgatggagcctgctggctccagacgggccatccccggctcagcccaaggagtcttcccacagaccatgaacgtttctttttctttatttttttgagatggagtcttgctctgtcacccaggctggagtgcaatggcatgatctctacgctccacaacctccacctcctgggttcaagcaattctcctgcctcaacctcccaagtagctgggattgcaggtgcacgccaccatgcccggctaattttttgtatttttagtagagatggggtttcaccatgttggccaggctggtcttgaactcctgacctcatgatctgcctgtcgtggactcccaaagtgccgggattacaggcgtgagccaccatgcccggcctacctaccgtgaacattttttttttttttttgacaaggagtttcactcttgtcacccaagctggagtgcaatggcgcgatctcagctcactgcaccctccacctcccaggtttgagcaattctcctgcctcatcctccagagtagctgcaattataggtgcccaccaccaagcctggctaattttttatttttagtagagacagggtttcaccatattggtcaggctggtcttgaactcctgacctcatgatccacctgcattggcctcccaaagtgctgggattacaggcgtgagccatggcctccggcctactgtgaacatttcttaagctgtttgagtgacagcccacccccttggcccttccttgctcagacccatcctttgaccagagctactgaataatccatatggcctcccattctcctcccaacaggggactctgctgtgagagccactttccccagcccagtttgctgctaggagacggagagtaggcccagggcctcccagttccaccctcacccctccctgggcagcctggagacctctggctcctctttcctgggatgtcaaggctaagtccccagagccgactatgagcaggcctgtccctcatgtcagttctgcatcctcaccatggtgccatctagcaggtggggaaacagacactgagggctgacccagctaataagtggcaggggtagtaggtgaactcagtctaccccaggctggttgggcggggctatgaggaccctgtaggctagagggcttcccggggagtcctggggaggcagtagggtgtggacagggcttgagactgaagtgagtggggctgggcagtatcaaaggcctccccactgtgtccctgaagtatctgggctctcggacatcggagaaggtgaagaacaagatcttggagctcctctacagctggacagtgggcctgcccgaggaggtgaaaatcgcagaggcctaccagatgctaaagaagcagggtgaggcacacagagggtggggggcgaccagggcctgccttcccctcccccaccatgagctggggctccagcggcttcaggggcttctgagccagcaaggtcatgggtctgtcctttaacttctggagaaagtacatacagctagtgcggccttctgtgctctgcctgaggctagcttgggtggaaagaaggtgagttcgaatcaagcttcccctcaaagagtggtctccagggagtggcctcaaaatatgggtccccaaaccatctcccccaggcaattttgatggagtaggtaggagtaggcccaggccactaagagtccagagccagcgtgctggcaaaagactgacctccctcttctgtcctacccttgcctgcccccatccccatgtcacccctacccctgggcctgggacatattgacagcctttctgacactcatctaatccagggattgtaaagtccgaccccaagcttccagatgacactacctttccccttcctcctccacggccgaagaatgtgatctttgaagatgaggagaaatccaaggtgagactccaaggaggcacatatggggactctgagcccaggtgggggtccgtgggttctgacctctagctgccctggcatcagccgttggaacagaggcacacactgagcccaggcatcgttgtagatgatgggcgctgtttactgggcatttaatatgtgctgagtatgtcccatacagcatccccacatttaataaacaggagtgtgtctggtgtccctggagtttgtttgagggtattttgaccttttctataagaatttcactaattttttgttaaaagttaataaaattaaaacttgtgggtgaaaagttaaacagcccaggaggaggtaagattaaaataaagaggttaaagtaaaaggtcccctctccccagtcttagccccagccctggagagtgtctactgttaaggttcttgtacattgtcccagaaaggttctcagccatggggatataaggagcaccatttgttgattacttatttctgctaggcgctgtggtgtgcactttacatgcagtgtctccgctggcctgtggccaccctatcaggcatcagtaaattctcaccatttcacagagagcttaagtaacttactcaggtcccacaggcaggaagcggggagccatcatgtgactccagtcttctgacccctggcccaggtgctgccctcacggtcacacccctctgtctctgcagatgctggcccgcctgctgaagagctcccatcccgaagacctccgcgcagccaataagctcatcaaagagatggtgcaggaggtagcggccgagcccagagcacagggaggaggcgggatgggggtattgagctgggccactgagatggggctgtatgcatcttcacatggaaggagccctgcagtgacccgggctggcacagcagagaagctgatgctgggggaccagggtgtgcagggaagaattcccggcagcctgggtgacttgctctggatgggcctttgggaggctggctacctcttcgtcaaaagttagaaatgaattaggccttagtatatttttaaaaatactaagtatttttaaaattactttttagtatttaaaaatactaagtatttttaaaattattttttagtatttaaaaatactaatgaatatatgtaagtatgtatacgtgtatgtatatgaggagactttttttgagacaaggactcactctctagcccaagcaggagtacagtggcatgatcatggctcattgcagcctcaacctcccgggctcaagcagtcctcccacctcaacctcccaggccgctggcactaaatacgtgtgccaccacaccggtatagtttttgtattttttttgtggagaaggggtttcgccacattgcccaggctggtctggaactcctgggctcaagcaatctgcctgcctcggcgtcccaaagtgctgggattacaggcatgagccactgcctggccaaatgtttaatttttaagtaaatatacatatgttgcctgggtgcctgctgaaactttttttttttaattgagacaagatctcatcctggagtgcagtggcacgatcatggctcactgcagcctcgacctcctgggctcaagcgatcctcccacctcaacctcccaagtagctgggaccaaaggcacacgctacagcgcccggctaattttattttttgtagagacagcatctccctttgttgcccaaactagtctgtaactcctgggctcaatgaccctcccatctcggcctcccaaagtgctgaaaaaaaagtttcaaagctggatgtggtggctcatgcctgtaatcccagcactttggaggccaaggtgggaggactgtgtgaggccacttttcactctgcaaaggaggggcacgcacagtaagcggaggggcaggggaaagccgggctgctcccaaaagcagcctttgaaggcacgggctcccccatctgccaggcaccgacagacactggaagggtcttcctgctcgtttccaggctgtacctggtgaccacagaggtccccttgcactatgaagtacaggaacctcctttgaaagggcaaacacaaggagggcaagagtcactgagaaccacagtggaggtctagggccctgggccttcagaagcacctggtgaggggtttggaaacccaggttcctgggccatctctgaagatcctgatgagcttgtgcagaggcctgggcactgggggcttcttggaccagcgtgcccttcctaggcatgaggggctcctggcagggcctgctggagccccacccagagtgtgatcccacagtcacccagctgtcaacccagatcccagcacacattctctcaagtggcagggggcagtgcctcgtccaggccaaaggttctcaggggcccttggccaatgtgtccccaggaccagaagcggatggagaagatctcgaagagggtgaatgccatcgaggaggtgaacaacaatgtgaaactgctcacggagatggtgatgagccacagccagggcggcgcagcagctggcagcagcgaggacctcatgaaggtgcacctgcctccctgcctaccccactccctgcccactccacagcccacgcggaccctgacccgcccatcctgctgccctcaggaactgtaccagcgctgtgagcggatgcggcccacgctcttccgactggcgagtgacacagaggacaatgatgaggccttaggtgagcccagggcaggtgctgaggtcaggtccccccctctccctccacctcctgcccccacctcccccaggccctgctaagtatctgcagttggaaggagccaccaccagggggcccccttctccagcaccgaccttgggtttctcctctctgaggacacagagcaggggccgcccccctgttgagaggccctgtgggccagcccccttaacaggcatcttatttactacccgcagctgcacaggaggcagacccatccccttttcacaactggggctaagggaggaaaatgacttgcccagatcacagagcagaacagtggcagagccaggggagacggagggccatctgcccccagaccttcctccctaatgagggtgaatggaagctaagagtgcatcccacagcccaggcagttccagacctgagcctgacggcttctgccagggccacataccaggttcttttccttgatctctgcccacgtgtcagcctgggccacttgggctgcggtctgggtaccatccactccctcattaagcaggagccccacccacaaggctcactgcccagattgccccacaccctggcacctggggaaggcagtgttgccgagggcctgattggtgccaggcactgttctaggccctcagggatctggcactgatcaaagtttgcaaaacgccgggtgcagtggttcacacctgtaatcccagcattttgggaggccaaggtgggaggattgctttagtccaggagttcaagaccagcctgggtaacatagagagacccagtctctatttcaaatatatttatattaaaaaaaaaaaaaaaaggttgacaaaaacttcctcatggtagtttagtgagaggagacagacaataaccaagtccatgagcaccgacagttcgtcacggtggtgagtggcatggaggaagagaagcagggaagggatgaggtggtgcaggagggatttaggacaggcctccctgaggtgagccttgggtgaagacctgaaggcagtaagggatgaagccatgcagagatctggggcagccagagagcagagctggagtggaggcctggaggcgggagcgggcccagtgtgttgagacagcccaggcagtatggcagggagtgaatgagggaagggtgggaggtgagaccagggaggtggcggagggccagagtctcagcagacgagatgggctgtttccctgcccctttcccttcccctcacacacaggctgtgatggatgtggggtcctcgtcccctgccgcccagaggcccccacagtccttcagcctggcctctcccctcctgcctgttccagcggagatcctgcaggccaatgacaacctcacccaggtgatcaacctgtataagcagctggtgcggggtgaggaggtcaacggtgatgccacagccggctccatccctggtgaggaggtggcaggagagctgggagggcacccatcaggctggaggggcacagagagtgcagggtggtgtgctggtctcagagcggctggaatgactgccagggtgaccctggccccttaagatggggaaggccccagggagggagctgggggtgaagtctgtgccaagcctgcagctgtgggggaagaagtctggtgggggagctgagggtttggtgaggacaggcagaagaaggaaggcattctttcatttgacaaatctggcacctgttgtatagggctagatgacaccccagaggctttatgtatcagaaaatgcgaggggggttagaaaagtaaacattacagactcaggtctaataagggtaagatggcagccttggggggtcacaaaaggggttagaattggttctgttagggagaagtggagatggaggcgctgcacggaagcagccaagtttcagcagggccttaaggatgggtagcagtttgcccagtagagctaagaaggaaatacattccggacagaagtaccatcatatgccaaagagaggtcctgttgagcagtttccaggcaggggctggtgtggccaaggaaggggaggcaggagaccagtggtaaagcatcgggggttaggtgttgctcccccgcaacccctgtggactctgagagacacgtgtacacccaggacttgccagcctcttctttcccaccccagggagcacctcggccctgctggatctctcaggcctggatctcccgcctgcgggcaccacctacccagctatgcccacccgccctggcgagcaggccagccctgagcagcccagtgcctcagtttccctgcttgacgacgagctcatgtctctgggtgaggaaggggccaggcctggaggagggcgggctcagcagcagatggggcatgatcccagggcccactcacagctagcggaaccacgtaccccaggtgtggatcctgtggggcacgtggatgagcattaggcccacttcacaactgaggaaactgaggctcggggaagttaggagcttgtgcgaggccacacggccagagggtgaggctggcaacctctaagccggcctcggataagctaaccagcattcaggctctggcagcctggggggaaaccaggggatttccccgcaacaggttagagcctggaattgagaactgtctgggcaaaagttcagcagtttcttcatccaccaagaggagagggagggctctgggctccagagcacccagaggctccagagaagccgaggccagagcgcgagggactcggtgatccaagctggtccagggccaggcctgctgttactcccgggcaggctccggctccagagcccagcaggggccaggcttccccggggggaagcagcaaagcgttcccagctgcccaaaccatttttgggtttccaactgctctcagggcagcagccccatccgagagctgagatcagaacagcctcctcctgagagccactgaagggatgaagagcagatacgttagggccacatcaaaggaatcctcagggatatgttggaagccaagattcagactgtggtttcctgagccagttctgaagcaaaaaccagacccgaaggccttgaagaagtgatggggacccggggcgccctgggcggggtctgcctgggttccaggagtgcttcctttggtggtgcccactactgcactctgtcctgtcttaggtgaccctcacggtctctgcaggcaggtgccgttaatagccccactgcacaatgaggaaacggcagcacagaaaggcgcggtggctcacgcctggaatcccagcactttgggaggccaaggcagagggattacttgaggtcaggagtttgaaactagcctggccaacatggcgaaaccccatgtctattaaaaatacaaaattagctgggcgtggtggcacatgcctgtagtcccagctactggggaggctgatgcaggaaaattgcttgaactggggaagcagaggttgcggtgagccgagatggcaccactgcactccagcctggttgacagagcaaggctccgtctcacaaaaaaaagaaaaagaaaaggaaaaagaaaggctgggtgacttgtgcagaaagggctctaggacttgagctgggctctgatcctgaagccacactctgagcagctgggctgctctgactcgttgttcataagcaaggaaaaggaaatgaggacccggagtgtggagggagagctgaaggggaaggagagctgaggggaaaggaggcccagttgtgagctccctttgtgaacccagcagccagcaccctccctgaagctgcttacgagccccatgcagccgccccctcttcattcagagccaagggtgaccgcagggagaggacctttaccccattctacagagaagtaaaggacggtcaagggacaggaacgttcatacaaggtttatcttcccctgtggagccagccctgggtggcagctacctgaggggcagtgggtggggaagtactgcagggccaccagcccccagccagcagctgcagcaccacctccacaagagaagcgagatgcagccgcacttcctgtccccgcactgcactggcatagttctgagccaccagcttccttctgttttcctctcagaggcaaagcatgggggcacaggagccggaagtgccagggcagcctgcagcctgggcctggggaatggaggaggccctggggccacacagggggctggtcctcactcttcacggcaggggtgggagacaggttcctgtccctcaaggagggtgttcaggcagccttaacctcccccgtctcaagtgatcctcccatctcaggctcctgagtagttgggactacaggtgtgtgccaccacacccggttaattagtttatttttagtagacacacggtttcacctgtgttggccaggccggtattgaactcctggcctcaagtgatccacccaccccagcttcctaaaatgctgggatgacaggcatgagccactgcgcccacctctttttggttttgagatgggggtctcactatattgctcaggctggtctcaaacttctggcttcaactaatcctcccatctcagcctcccaagtagatgggaccacaggcattggctaattttttttccttttattctttaggggtagagtctctatgctgccagggcttatctcaaaccccagcttcagcctcccaaatagctgggattacagacattagccactgcacctggctggtgtctccattttacagatgaggctgtcaccccccaatatcacacagccaagtggcagagttgtgttcaaatgctggcagtcaggccatgctctgtctgagtccagactctgccactttctagctgtgtgttctcgggcaggttatttaccaactttgagtccattttcttatccctaaaagagggctgagaagctcacccctacctttgaaggttgtttgaggattaagcaagaccagcatctgaagggcctgaagcatctagggcatcatcagtgcactttatctctggcctctaagaagtgcatctagaagggacccactgtcacagcttcctggtacccttgcctttgcctgtcaggtagcacttcggtttggacctcactttttcaggatttgttggaaacaagatcccttatcttctctaggtcagatttggggtgaacttggctgacagtattccagggcaggcagaggtcaggctggctggtgacctgctgcctccttcccatcggcagctagttctagggccatccacagggatccccagccctccatagtaccagtgagcctcactggcatgtgccagggccaagagggccttcagcgtcgcctccagtccagccctgtcctcgtattcttggggacactgtggctcagccagcacagtgcctagcccacagtcacccagcaggcgtccctcgagtgggccagtggcaggcacagagctgctctccccttgcctggatgcgtgaggaaaggaacctcttctccctgcagcccagccctgcaggctctctgctgccagatgacgagtgaagatgaaagtcctgatgtctattgtctgtgtgcacagagctttggagtggcctggccaggaagaggggaagcgtgtgtggggtcagcacaaggggttgccgggatcttggttactggttctgctctgctgctggttccctctgaaaatgtgggtttctcccctccgtgctgagcctcagaaaggggtagggagccccatgccagcacacatggcccctcggctctctggcctctgcagggtcagcccagctccttcacctctctcctgctttcccctcaggcctcagtgaccccacacccccttcaggcccaagcctggatggtaccggatggaacagcttccaggtaggaggggaccacaaactagtctggcctgtcccagtcccagggtcagggcagctgggacaagtggcctggagaaactaaaaggatggatgggctctactcaagagcccagggccagggggtggcccaggggcctggagacacccacccagggtacagggcctccccttacctccagctgtatcttccccaagtctcagccttggggctgcagcccagcctttgggattgggattgagatgggcaatccctcttcctttcccttgagggtgacagaggtccctggattgtagaacccccaaccagacccagccaccctgcatcatggacatgggtggtctggggtccccacctctgtggctgctttcccagatgtcatttgcaaggaggacactgagcctcagggcaggatcaggtgatgctgacacctctctagacagccccaccccacctgcatccttttccccacagtcgtcggatgccactgagcccccagcccctgctctggcccaggcccccagtatggaaagccgacccccagcgcagacatccctgccagcaagcagcggtctggacgacctagacctcctggggaagaccctcctgcagcagtcgctgcccccggaatcccagcaagtgcggtggtgagggcccaccatggctggcatggggtggggagcactccctgttcccacaaaccagcaacttctcctgggcttgtccaggcccagcagggagaggctcgttgctgtcttgttttgtaagcagcagatgccaagcagtgcacctgcctctggaaacacaacagtgcccaaggcagacctgggcccactggcctggcctccccccaggtgttcccagctcccttgagaaaggtccagagggccggcagaggggaggacactgggctggagtgaataggtggggtgcagggtggagggagaacacgagctgctccttctaaaggtaagacccaaggccagagagatagccacacgtgccagcctttcctgtgcccctgatctctccatcaccaaagaatcactttttctttttttgagagggagtctcaccctgtcacccaggctggagtacagtggcatgatctcggctcactgcaacctccatctcccaaactcaagcgattctcctacgtcaggctcctgagtagctgggaccacaggtgtgcgctaccacgcccagctagttttttgtattttttatacagaccgggtttcgccatgttgcccaggctggtctcaaactcctgagctcaagcgatctgcccgcctcagcctcccaaagtgttggaattacaggggtgagctaccacgctggccaagaatcacttcttaatgcactgtcccccgattaagggagaagcagcagccaaccccccggctcacactccgggacctgcagaataagagcagcagctgcagctcccccagctccagcgccaccagccttctccacaccgtgtccccagagccccccaggcctccgcagcagcccgtaccaaccgagctctcactggccagcatcactgtgcccctggagtccatcaaacccagtgagtagggctggggcaggtgcaggctgggttgggtcagcttgctgccctgtcaggagctctgtctggggaagctagtgggaaagcagggctcccctggctctgccactggccaaccagaggggagctctgaacaaggccctccccttcccaggagtcagtttccttatctgccccagagcaatcagaggactgctgtacaaactccaggcttatataagcaagaagacctctagggagtaggctctgggccccttccatccccaggaaggcagggcccaggacacagagaggtttggggtctcccccagattacagaactgaaccatgataaagacccagatccaaggctgggtttttccagcccaggagcagtaaggggaccatggcccagccccgggccccaagcagacacatgaggcctggtggtcctcagcattgccctctatgagctccctgtgaccaaagacactacccccacagtgtctcccagcagtgggcagagctgcccctctcaccagtaggagaaccctgagctcagagaaggggagtgactgccgcaaggtcacacagcgtgagactcaccctcaccaagtccctcaccccagcactccaggcagcagccacacagcatcgggggaagctgggctgtgactcggctctggggtgggtgtcctgcctccactatcagactgggggttcacctgccctctctgggcaccgctctgtgcccctgcctgcactgccacccagggtccaggtaaggccccaaaggaggactttgctcttgttgccagtacagcagccagctcctgaggccagccgggtgggggctgggggctgagcggatgtgctgcagctcagctgtcccatcgccctcccaccttctcccacaggcaacatcctgcccgtgactgtgtatgaccagcacggcttccgcatcctcttccattttgcccgggacccactgccagggcgctccgacgtgctggtggtggtggtttccatgctgagcaccgccccccagcccatccgcaacatcgtgttccagtcagctgtccccaaggtgacaagccagtcggacagggcatgcctccctcctctcaaggcagggtgacatggagctgggtggggagccacctgtcagggggcaggtctccctcccttgctgggtggttggtgtagaagggaccagaaggactgagccccaggatccccggaggggagctggcaggctgggcctggttcctcagagcaggacaagcagccagggctagctgtgcccatcctgccatctgcccacaggttatgaaggtgaagctgcagccaccctcgggcacggagctgccagcttttaaccccatcgtccacccctcagcaatcacccaggtcctgctgcttgccaacccccagaaggtaaggggcccccaggcagtgctgcagggtggggacggccacttctcctcctctgacccctctgcctttgccatctcttccccaggagaaggttcgcctccgctacaagctcaccttcaccatgggtgaccagacctacaacgagatgggggatgtggaccagttccccccacctgaaacctggggtagcctctagaacagaggggctggggagaggaaggggcagagggaccggtcactgtccagcctggagggaggcattggtggccaaggacaccctttgttgcccatggccattcacccccaggcctggtgcttctccccacacccctgtaggcctcaagtgactcttccccctcctgctccggccccgcccctgctgagccaaacccagtaggaggctgggcctgggtttgtgccgctggggtctccatcaccgggacctggagagggaggggctgtgtagccttggaagaacttgggtcatggggaggaagcacagctgttggggaagggccaggacctcaggcccagccccaaccccagctggggtggggtcttccccacctgtctcttatgccttatgggaaggcccagccataactcgggggccatgctggagctggggaccagcttaggcctcctccataggaacccagtgactggggggtgacgcctacacccccagctatttgcactctggtgtgtggtttgactctgcttttcttccggattggccctgtggtcacagcctcagggggccaggctgggggaacctcacctggcccgtactcctgggggtttccctttgccattgggccccctgagggactgtgggggctcaagggtaatgccagaggcccatggccccagcgaggggctgtggggcacctagagttctcggtgtgtctccttcattcattggcctctgctggggcctcctatgggtgtcttacgtctgtccatccatctgtccgtggtcagaagtggggtcagtgtgtgagtgagagcaggagtatttatgaaaataaaacgtcgtttttcctgga

SEQ ID NO: 12142 - DNA, 2528 bp, Homo sapiens
tgggggccggtggcggatggagcccgcgatggagccggagactctggaggcgcgaatcaatagagccacgaaccccctgaacaaggagctcgactgggccagcatcaacggcttctgcgagcagctcaacgaggactttgaggggcctccactcgccacccggctgctggcccacaagatccagtccccacaggagtgggaggcgatccaggccttgacggtgctggaaacatgcatgaagagctgcggcaagcggttccacgacgaagtgggcaagttccgctttctcaacgagctcatcaaggtcgtgtctcccaagtatctgggctctcggacatcggagaaggtgaagaacaagatcttggagctcctctacagctggacagtgggcctgcccgaggaggtgaaaatcgcagaggcctaccagatgctaaagaagcaggggattgtaaagtccgaccccaagcttccagatgacactacctttccccttcctcctccacggccgaagaatgtgatctttgaagatgaggagaaatccaagatgctggcccgcctgctgaagagctcccatcccgaagacctccgcgcagccaataagctcatcaaagagatggtgcaggaggaccagaagcggatggagaagatctcgaagagggtgaatgccatcgaggaggtgaacaacaatgtgaaactgctcacggagatggtgatgagccacagccagggcggcgcagcagctggcagcagcgaggacctcatgaaggaactgtaccagcgctgtgagcggatgcggcccacgctcttccgactggcgagtgacacagaggacaatgatgaggccttaggcctcagtgaccccacacccccttcaggcccaagcctggatggtaccggatggaacagcttccagtcgtcggatgccactgagcccccagcccctgctctggcccaggcccccagtatggaaagccgacccccagcgcagacatccctgccagcaagcagcggtctggacgacctagacctcctggggaagaccctcctgcagcagtcgctgcccccggaatcccagcaagtgcggtgggagaagcagcagccaaccccccggctcacactccgggacctgcagaataagagcagcagctgcagctcccccagctccagcgccaccagccttctccacaccgtgtccccagagccccccaggcctccgcagcagcccgtaccaaccgagctctcactggccagcatcactgtgcccctggagtccatcaaacccagcaacatcctgcccgtgactgtgtatgaccagcacggcttccgcatcctcttccattttgcccgggacccactgccagggcgctccgacgtgctggtggtggtggtttccatgctgagcaccgccccccagcccatccgcaacatcgtgttccagtcagctgtccccaaggttatgaaggtgaagctgcagccaccctcgggcacggagctgccagcttttaaccccatcgtccacccctcagcaatcacccaggtcctgctgcttgccaacccccagaaggagaaggttcgcctccgctacaagctcaccttcaccatgggtgaccagacctacaacgagatgggggatgtggaccagttccccccacctgaaacctggggtagcctctagaacagaggggctggggagaggaaggggcagagggaccggtcactgtccagcctggagggaggcattggtggccaaggacaccctttgttgcccatggccattcacccccaggcctggtgcttctccccacacccctgtaggcctcaagtgactcttccccctcctgctccggccccgcccctgctgagccaaacccagtaggaggctgggcctgggtttgtgccgctggggtctccatcaccgggacctggagagggaggggctgtgtagccttggaagaacttgggtcatggggaggaagcacagctgttggggaagggccaggacctcaggcccagccccaaccccagctggggtggggtcttccccacctgtctcttatgccttatgggaaggcccagccataactcgggggccatgctggagctggggaccagcttaggcctcctccataggaacccagtgactggggggtgacgcctacacccccagctatttgcactctggtgtgtggtttgactctgcttttcttccggattggccctgtggtcacagcctcagggggccaggctgggggaacctcacctggcccgtactcctgggggtttccctttgccattgggccccctgagggactgtgggggctcaagggtaatgccagaggcccatggccccagcgaggggctgtggggcacctagagttctcggtgtgtctccttcattcattggcctctgctggggcctcctatgggtgtcttacgtctgtccatccatctgtccgtggtcagaagtggggtcagtgtgtgagtgagagcaggagtatttatgaaaataaaacgtcgtttttcctgga

SEQ ID NO: 12143 - DNA, 7732 bp, Homo sapiens
ccaaggtgggcggatcacaaggtcaggagattgagaccatcctggctaacatggtgaaaccctgtctctactaaaaatacaaaaaaaaattagccgggcgtggtggcgggtgcctgtagtcccagctactcgggaggctgaggaaggagaatggcatgaacctgggaggcggagcttgcagtgagccgagatcgtgccactgcactccagcctgggcaacagcgtgagactcgtctcaaaaaaaaaaaaaaatccatatttcattccagctttacaagatggggaaatggaggttcagggaagcatgtaagctagattgttgtttaaccagtattgggggttaaaggggtagctgtctggtcgtgtttacaccacttcatgtagacctgttggccctctttccttgccactatccatttctggattcagtcttccccagaacctcaccctttgcctgccctcagctgactgctcattcatttgccaaggggagacaggtgtggacatgagtggctgggatgcagtgccgtagcaggctgggggacacaaaagagaactgacccagcactgctaccctgggcaggagtagaggattagagaaggggacaccggagccactcccaagggaatgaaggctttctgaacctggtgtgatggtaagactcacactccttactgaggcccctcattctctgcctcgtgtggttacccgcatctttcctgcccatacagccatgcgtgggtcagaggtgtaccagctccagcctgggtgactcctcctggtccctgcttgtgtgttgcctcttccaggcagcctcctcagccccaaactgaactgagtcccctcctctgtgtttcttttttgtttgtttgagacggagtcacccagagtcccagctctgtcacccaggctggagggcagtggcgagacctcggctcactccaagctccgcctcccgggttcacgccattctcctgcctcagcctcccaagtagctgggactacaggcacccaccaccaagcccggctaatttttgtatttttagtagagatggggtttcatcgtgttagctaggatggtcttgatctcctgacctcgtgatccacccacctcagcctcccaaagtgctgggattacaggcatgagccaccgtgcctggcccctcctctgtgtttctacagctccttggcttccctctgtcacacgttattgagaacctagcttcccttggcccacttcccggctacacagctccttgagggcgggactatgatttttttctcccttacttctggatctcctctgagcataaatttcatgagaattatggagacactgttctcagcagaatcagaggaggtggggctggcgtgatgggtccagctgcaggggtgggaggagtggggaggaggggaagggccctgaccatagtctctaaaagtggggccctttggagggcagctgtgctcatctgtctgtctacacccacaatcaggtcttgaggctgtctgggcaggaaggcagggggagagctttcccacgtgctcagtcacactcctctcccactcctgaccacacctttgccagggtcaggagtggaagagcaggaatcccactgccgggccacaatgaccccagctctcctcttccagatagagccacgaaccccctgaacaaggagctcgactgggccagcatcaacggcttctgcgagcagctcaacgaggactttgaggggtaggtggccgtccccacttgtttgcactgccctgcactctccagaacccagtctcgggtacaatggcctgggtgggtggagacccggttttcattctgaacgtattcacaaagtgatgaggatggggcacttggcactgaatgctgtttgggtgtcactctctggggtgggccttgctggaaccatttaacaggtaaagaaatcaaggctcagaggactcagatctgcccccacatctcacagggagaaaatgctagtcctgagcttggtaagacccaggcctgctggacctgcagccagtgctttgtggggaaaggccccccagagggagaactgcatgttccccaattgggaggaggccagtaggccctttgctcaaggacgaaccagaactacctgtgttagaatcacctagaatgttggccaggcacagtggctcatgcctgtaatcccagcactttggaaggccgaagtgggtggattacctgaggtcaggagtttgagaccagcgtggccaacatggtgacaccccgtctctactaaaaatgcaaaaattagctgggcgtggtggcacgtgcctgtaatcccagctactcaggaggctgaggcaggagaattgcttgaacccaagagacagagattgtaatgagccgagattgcgccactgccctgcagcctgggcagcagagtgagactctgtctcgaaaaacaaaacaaagaattacctagaatgcttgtcagaaatgtacattcttagccaggcatggtggtgcacacctgtaatctcagttactggggaggccaaggcgggaggatcccttgaggctagcctgggcaacatagcggggcaacatagcgagacatcatctcttaaaaaataaaaaaataggccaggcatggtggctcacgcctgtaatcccagcactttgggaggccaaggcaggtggatcacctgaggttgggagttcaagaccagccttaccaacatagagaaatcccatctctactaaaaatacaaaaaaaattagccgggcatggtggtgcatgcctgtaatcccagctactcgggaggctgaggcaggagaattgcttgaacccaggaggtagaagttgcagtgagccaagatcgtgccattgcactccagcctgggcgacggagtgaaactccgtctcaaaaaataagtaaataaataaataataaaaaataaggccgggtgtggtggcttacgtctataatcccagcactctgggaggctgaggcaggtggatcacgaggccaacagattgagaccatcctggccaacatggtgaaaccccatctctactaaaaatgcaaaaattagcaaggagcggtggtgtgcgcctgtagtcccagctactcgggaggctgaggcaggagaatcgcttgaacccgggaggctgaggttgcagtgagccaagattgcattactgcactccagcatggtgacggtgagactccatctcaaaaaaataaataaagtaaatgcaccttcttgggctgcccccagactcgactgtccagtggggggttgggagtggacattctttttatttttttttttgagatggagtctcgctctgtcgcccaggctggagtgcattggcacgatctcggctcactgcaagctccgcctcccaggttcacgcggttctcctgcctcagcctccccagcagctgggactacaggcgcctgccaccacacccggctaatttttttgtattttttagtagagacagggtttcaccgtgttagccaggatggtctcgatctcctgacctcatgatccacctgcctcggcctcccaaagtgctgggattacaggcatgagccaccgtgcccagctgggagtggacattcttagtgggctccccaggcgatactaaagtttcgggaccacaaacagcggtgtgtgtgctttggagtcgtgctgcttgggtacgagtcctgtcccctctcttagctgagtaaccttgggtgagtggttgcctctgagtgtcagtttcttcacagttgaaggaacttcccacggtgaggcgggaatgaccgtgctgcctgccttatgcagcttaggcaggaaagtgcatgtgagcctcctcacacatgaccagttcagcacatgtgagctcttaccgtcactggtgacgggtcttttacagtctgttagatgatgtcaccacctccaccatgaagctgctctgatttgccacagcagaacgtcctttgccaccttgagttcccagggaactgtgtctgcccgtctctcatggcatattgtaattgtctctatggcaagccaagccaaggacgtgacacatcagagttcttaggccagcccaggagctgagctcataccttttgaaggtccctgcctgcagtctctgtctggccctgccctgccacaatctcaggccataactgatctggagagggagctgggcctttgcatatgcctgcagaaaccttagagggctgaagtctcggcggcgggctggggtggtgaccctcccctagggcgaccagggccccttggaggagggctgcagtcccagcggcctggggtcgtggccctagggtgaccgggactccgtggcgactctggctctgtgttgttcctcccacccaggcctccactcgccacccggctgctggcccacaagatccagtccccacaggagtgggaggcgatccaggccttgacggtgagaaggggagaggccaccatccgtcccccgccatgtgacgacaccaagggaggccaagactgaggttcttggggtccataaggctcttcagagcccaagagagttgtgctaagatggcccaggatggaggtccgggcctgccccaagggtcccaccacagccagcgggctggcctcccaccccagcatccatacacgtaggcctgttgctgagggaaggccctctagggtcatctggtccaggggttctttgcttcagctgcacatcggctgcctctccaggaagcgtgttcaacacatggaatcagggctccacccagacctgccgaggccacactcctggagtatctgcatccagagatctgcacgtttgtaaagctaaggggtggtgcttgggctcaggcctgaggttttgcatctgttcaatagcagaggagagaggggtgtactgtctgtggcccccagcatgggccacataccaacccaccatggagcaaagctgattttaagtggtggtagagatacagtttctcttttaatacttacgtgtttagttgggtgcagtggcttatacctgtaatttcagcacttggggaggccaaggcaggaggcttgcttgaggcaaggagttcaaggctacagtgagctatgattgtgccactgtactccagactggacaacagagtgagaccccatctctaaataataatcattattgttacatatttgttttaacatttttttctcaagtataactagtcctatgatttcatagatgtagcttaggataaggccaaggtaggtgttgcctatataaggtttttttaaaaaaggaaaaataggccgggctggtggctcacgcctgtaatcccagcactttggcaggctgaggcgggcagatcacctgagatcaggagttcaagatcagcctgaccaacatggagaagccccatgtctactaaaaataaaaaattagcgaggcgtggtgggcgggcgcctgtaatcccagctacttgggaggctgaggcagaagaatcatttgaacccaggaggcagaggttacagtgagccgagatcgtgctactgcattccaacctgggcaacaagagtgaaactctgtctcaaaaaaaaaaaaaaaaaggaaaaatagtaagaaaataatgtacagttggtactcagatgtggggcctaagctatgaatgggactagagcattgctacaggttgggcattgctgggcactgtatgtaggtcgcctgaccctatctcccatgggagtgatgaccagtcccagaggcctgtgtgactctgaatcttccaacctcacaggccattccctcccttctgaaagcccacccatgggcttctggcccctgtccaaggcgtgggagggaggccacggcctctgatgcacctgggcgtcccctcccatcccccctccctgcacaggtgctggaaacatgcatgaagagctgcggcaagcggttccacgacgaagtgggcaagttccgctttctcaacgagctcatcaaggtcgtgtctcccaaggttggtgcccccagcccaagctcagacctgccctgtcggatgtggggagaggaaagaggaccttcagattgtggagcgacttttccagggagcctcccactggggtgtcacctcagccccccattagaactcagacctaggaaaaacacagatctcttctcacagtcctctcatacctgattctgggacagcctggggtctcggaggagtgtttccaggctggccaggggcggggcagccatggagctgcccggtgcttaggaagaaatgattccagggaatacataagctgacagatggctgtatgtgtcagccatctctggcctgaaatcactccctgtggacctggccacagaaccctacctggtctctggcaggtttccctgtccccaccacacaagagcaacctccctggacctcagcatccaaggccacagacctgagtgatggagcctgctggctccagacgggccatccccggctcagcccaaggagtcttcccacagaccatgaacgtttctttttctttatttttttgagatggagtcttgctctgtcacccaggctggagtgcaatggcatgatctctacgctccacaacctccacctcctgggttcaagcaattctcctgcctcaacctcccaagtagctgggattgcaggtgcacgccaccatgcccggctaattttttgtatttttagtagagatggggtttcaccatgttggccaggctggtcttgaactcctgacctcatgatctgcctgtcgtggactcccaaagtgccgggattacaggcgtgagccaccatgcccggcctacctaccgtgaacattttttttttttttttgacaaggagtttcactcttgtcacccaagctggagtgcaatggcgcgatctcagctcactgcaccctccacctcccaggtttgagcaattctcctgcctcatcctccagagtagctgcaattataggtgcccaccaccaagcctggctaattttttatttttagtagagacagggtttcaccatattggtcaggctggtcttgaactcctgacctcatgatccacctgcattggcctcccaaagtgctgggattacaggcgtgagccatggcctccggcctactgtgaacatttcttaagctgtttgagtgacagcccacccccttggcccttccttgctcagacccatcctttgaccagagctactgaataatccatatggcctcccattctcctcccaacaggggactctgctgtgagagccactttccccagcccagtttgctgctaggagacggagagtaggcccagggcctcccagttccaccctcacccctccctgggcagcctggagacctctggctcctctttcctgggatgtcaaggctaagtccccagagccgactatgagcaggcctgtccctcatgtcagttctgcatcctcaccatggtgccatctagcaggtggggaaacagacactgagggctgacccagctaataagtggcaggggtagtaggtgaactcagtctaccccaggctggttgggcggggctatgaggaccctgtaggctagagggcttcccggggagtcctggggaggcagtagggtgtggacagggcttgagactgaagtgagtggggctgggcagtatcaaaggcctccccactgtgtccctgaagtatctgggctctcggacatcggagaaggtg

SEQ ID NO: 12144 - DNA, 946 bp, Homo sapiens
ccaaggtgggcggatcacaaggtcaggagattgagaccatcctggctaacatggtgaaaccctgtctctactaaaaatacaaaaaaaaattagccgggcgtggtggcgggtgcctgtagtcccagctactcgggaggctgaggaaggagaatggcatgaacctgggaggcggagcttgcagtgagccgagatcgtgccactgcactccagcctgggcaacagcgtgagactcgtctcaaaaaaaaaaaaaaatccatatttcattccagctttacaagatggggaaatggaggttcagggaagcatgtaagctagattgttgtttaaccagtattgggggttaaaggggtagctgtctggtcgtgtttacaccacttcatgtagacctgttggccctctttccttgccactatccatttctggattcagtcttccccagaacctcaccctttgcctgccctcagctgactgctcattcatttgccaaggggagacaggtgtggacatgagtggctgggatgcagtgccgtagcaggctgggggacacaaaagagaactgacccagcactgctaccctgggcaggagtagaggattagagaaggggacaccggagccactcccaagggaatgaaggctttctgaacctggtgtgatgatagagccacgaaccccctgaacaaggagctcgactgggccagcatcaacggcttctgcgagcagctcaacgaggactttgaggggcctccactcgccacccggctgctggcccacaagatccagtccccacaggagtgggaggcgatccaggccttgacggtgctggaaacatgcatgaagagctgcggcaagcggttccacgacgaagtgggcaagttccgctttctcaacgagctcatcaaggtcgtgtctcccaagtatctgggctctcggacatcggagaaggtg

SEQ ID NO: 12145 - DNA, 24731 bp, Homo sapiens
ggtgccgaggctgggggccggtggcggatggagcccgcgatggagccggagactctggaggcgcgaatcagtgagtgtccgggaggggcgcgggccggaccggaaccggaaccgggggcacgaggcgggccccttcccggcgggggcggggtacgggtcgccccctcctcacgccccgcccccggcccgggaggggcggtgtcctcagtcggcccctcagaccctggagcgatggaggaccccggccccggcgcggtccagcggtgggagcgggcgccgcccacctgtcggatccctgggccatgacccctgggacggcgagtgagctgcgccgggaacccccgggacggagagagcagcctccaacccccaaggctcacattgcttcacggagtagcggcccggggaaggagcacgcgagcggttccccggggttgcatctcacacccgggagggagggaccctactattttcaggccccgaatcctccactctctggccctgcatggcgttcctggagcccgcaagtagtcacatttgctcattaccccgtcctggaagggaggacccactgccccatttgattcctcccgccgctcctagtctctagccacatagtgagaaacccccgcaccctacaggcttgggagagtcttagactccagaagtattaataattccaagctccctgtcactcccttcagcctaacccctcagtctccaagatgcctttcccagctcttgctgaacttccttcaaaggcttctacacccctttttttcttgtttctcctcagacgtagcttcctattgcttaggcttcctagcccgcaaaccctccacctgagctccttaacccacagccctgatgatcccctgctctcacagccccgctcctggactctgcctctgaaagccgtggctggcttctccctggtctagtgagggttctctcccaaggctttaactgctgttgggaccccgtcgttgccagggcctcagggaaccctcttggacccgggcacaccggcaactgtctagcgtggtttggggtcatggccggccccttttaagccaggcttgagcagagttgaaccatgaggttggccccagaaccaaacctctagggatgtttcagagtcatcctagccaccagaggggcagggggtggaaaaggggcactcagcagcccttgaccgttgtgaacgccggaagtgtccgcctgggtctcagcagcaactgggctggggggatgggtgggcccctggctaactgatctcagacacaggtcttgagctgtgggtcatacaaaacattctcaggtttagaaacagtgggggttttctgagagtccagagagtctaaaaccaggcagaagttagagatacctgggtttggctgggccctgacacactggggctgggattttctcctttccttccccctttgtgtcctagcagaattgtaagatctttcctcttcccttgtggaggctggaggtaaaggatagcttcttctttttttttttgagacgggttttcactcttgtcacccaggctggagtgcagtggcacaatctcagctctctgcaacctccacctcccgggttcaagtgattctcctgtctcagcctcccgagtagctggaattacaggtgcgccaccacgcccagctatttttgtatttttagtacaggtgggctttcaccatgttggccaggctgatctcgaactcctgacctcaggtgatccgcctatataggcctctcaaagtgttgggattacaggcgttagccactcatccgcccacgtcggcctctcaaagtgttgggattacaggcgtgagccaccgcgcccggcctagtgaggtaaatgatgttattgtcagcactatagagtggcagggtggagtcttaccctgttgtgaaacacctccctccctctctaggtgttctccccaactgcctgctagggagggtactcccctcaggtagaattaagagggctgagggtcaggggccatgggccaaggaggtcagtcagatctccttggatctggaggccctggctttcagccagaggcagggggagaaagatgatgtctcatgatgccagcgcttcctcttcactggcgtctgacccaggagcagtccagaatcagcttctctgacctcactccaactcacgtgtctttgacactttaagggacttcctgttttagggtcttctggctgggtgtcattgaatgggcagtgattctctaactttagactgatgttccccagcctttgtttggggactcggaggcagagtagacagttacccttacccctgggttggggagggtcatattcctggtatccccaggaggtcaacaggggcttcatttttctgagggactagagggtcttgtggagctcctgggacagagatctagatccagagagaacattcgtccttccgatctcagctcagctctgagagccctcccagagagcagctcccgagggctccagagccctccgaaagccctcccagagagcagcccccacctcccaggctgtctgcacttctccttgctatgctttgctctgtaacattttgcaacagtctgcagtacacggggtttgttaatctgagtattcattgtttctcttgctgggcagtgaacttgaggagggcagggattttgtctgttcactgctggagccccagcacccagaatacttaaatctgagttggatgaatggcggccagccactgggattccagggctttgggccccctgccataacatatggcccagggcaggcgccacatgctgggtcagtccccagcctcctgtccacagatccttctctgttctacctcctgggctgtgtccttccacaccctcagctcggtgctcaggcgtgggcagaactggctgggaaggggtggtccttagaggtgggctgtggagaaatgaagatcgagctctggctgccgccatggccttcccatgcaaaaagtattttgtcatccaaaatcaatattttggtcaggcacagtggctcatgcctgtaatcccagcactttgggtggccgaggtgggtggatcatttgaggtcaggagtttgagaccagcctgaccaacatggtgaaattccatctctaccaaaaatacaaaaaaattagctgggcatggtggtggacgcctgtgatcccagctactctcaggaggctgaagcaggagaatcgtttgaacccaggaagctgagattgcagtgagccgagatctcgccactgcactccagcctgggcaacaaagcaagactctttctcaaaaaaaaataaaaataaaaaaatacaggccggacgcagtggctcacacctgtaattccagtactttgggaggccgaggcaggtggatcacgaggttaggagatcaagaccatcctggctaacacagtgaaaccccgtctctactaaaaatacaaaaaaaaaaaaaattagccgggcgtggtggcgggcacctgtagtcccagctactcgggaggctgaggcaggagaatggcgtgaacctgggaggcagagtttgcagtcagccgagatcacaccactgcactccagcctgggcgatagagcgagactccgtctcaaaaaaaaaaaaaaatacagccgggcacggtggctcacacctgtaatcccagcactttgggaggccaaggtgggcggatcacaaggtcaggagattgagaccatcctggctaacatggtgaaaccctgtctctactaaaaatacaaaaaaaaattagccgggcgtggtggcgggtgcctgtagtcccagctactcgggaggctgaggaaggagaatggcatgaacctgggaggcggagcttgcagtgagccgagatcgtgccactgcactccagcctgggcaacagcgtgagactcgtctcaaaaaaaaaaaaaaatccatatttcattccagctttacaagatggggaaatggaggttcagggaagcatgtaagctagattgttgtttaaccagtattgggggttaaaggggtagctgtctggtcgtgtttacaccacttcatgtagacctgttggccctctttccttgccactatccatttctggattcagtcttccccagaacctcaccctttgcctgccctcagctgactgctcattcatttgccaaggggagacaggtgtggacatgagtggctgggatgcagtgccgtagcaggctgggggacacaaaagagaactgacccagcactgctaccctgggcaggagtagaggattagagaaggggacaccggagccactcccaagggaatgaaggctttctgaacctggtgtgatggtaagactcacactccttactgaggcccctcattctctgcctcgtgtggttacccgcatctttcctgcccatacagccatgcgtgggtcagaggtgtaccagctccagcctgggtgactcctcctggtccctgcttgtgtgttgcctcttccaggcagcctcctcagccccaaactgaactgagtcccctcctctgtgtttcttttttgtttgtttgagacggagtcacccagagtcccagctctgtcacccaggctggagggcagtggcgagacctcggctcactccaagctccgcctcccgggttcacgccattctcctgcctcagcctcccaagtagctgggactacaggcacccaccaccaagcccggctaatttttgtatttttagtagagatggggtttcatcgtgttagctaggatggtcttgatctcctgacctcgtgatccacccacctcagcctcccaaagtgctgggattacaggcatgagccaccgtgcctggcccctcctctgtgtttctacagctccttggcttccctctgtcacacgttattgagaacctagcttcccttggcccacttcccggctacacagctccttgagggcgggactatgatttttttctcccttacttctggatctcctctgagcataaatttcatgagaattatggagacactgttctcagcagaatcagaggaggtggggctggcgtgatgggtccagctgcaggggtgggaggagtggggaggaggggaagggccctgaccatagtctctaaaagtggggccctttggagggcagctgtgctcatctgtctgtctacacccacaatcaggtcttgaggctgtctgggcaggaaggcagggggagagctttcccacgtgctcagtcacactcctctcccactcctgaccacacctttgccagggtcaggagtggaagagcaggaatcccactgccgggccacaatgaccccagctctcctcttccagatagagccacgaaccccctgaacaaggagctcgactgggccagcatcaacggcttctgcgagcagctcaacgaggactttgaggggtaggtggccgtccccacttgtttgcactgccctgcactctccagaacccagtctcgggtacaatggcctgggtgggtggagacccggttttcattctgaacgtattcacaaagtgatgaggatggggcacttggcactgaatgctgtttgggtgtcactctctggggtgggccttgctggaaccatttaacaggtaaagaaatcaaggctcagaggactcagatctgcccccacatctcacagggagaaaatgctagtcctgagcttggtaagacccaggcctgctggacctgcagccagtgctttgtggggaaaggccccccagagggagaactgcatgttccccaattgggaggaggccagtaggccctttgctcaaggacgaaccagaactacctgtgttagaatcacctagaatgttggccaggcacagtggctcatgcctgtaatcccagcactttggaaggccgaagtgggtggattacctgaggtcaggagtttgagaccagcgtggccaacatggtgacaccccgtctctactaaaaatgcaaaaattagctgggcgtggtggcacgtgcctgtaatcccagctactcaggaggctgaggcaggagaattgcttgaacccaagagacagagattgtaatgagccgagattgcgccactgccctgcagcctgggcagcagagtgagactctgtctcgaaaaacaaaacaaagaattacctagaatgcttgtcagaaatgtacattcttagccaggcatggtggtgcacacctgtaatctcagttactggggaggccaaggcgggaggatcccttgaggctagcctgggcaacatagcggggcaacatagcgagacatcatctcttaaaaaataaaaaaataggccaggcatggtggctcacgcctgtaatcccagcactttgggaggccaaggcaggtggatcacctgaggttgggagttcaagaccagccttaccaacatagagaaatcccatctctactaaaaatacaaaaaaaattagccgggcatggtggtgcatgcctgtaatcccagctactcgggaggctgaggcaggagaattgcttgaacccaggaggtagaagttgcagtgagccaagatcgtgccattgcactccagcctgggcgacggagtgaaactccgtctcaaaaaataagtaaataaataaataataaaaaataaggccgggtgtggtggcttacgtctataatcccagcactctgggaggctgaggcaggtggatcacgaggccaacagattgagaccatcctggccaacatggtgaaaccccatctctactaaaaatgcaaaaattagcaaggagcggtggtgtgcgcctgtagtcccagctactcgggaggctgaggcaggagaatcgcttgaacccgggaggctgaggttgcagtgagccaagattgcattactgcactccagcatggtgacggtgagactccatctcaaaaaaataaataaagtaaatgcaccttcttgggctgcccccagactcgactgtccagtggggggttgggagtggacattctttttatttttttttttgagatggagtctcgctctgtcgcccaggctggagtgcattggcacgatctcggctcactgcaagctccgcctcccaggttcacgcggttctcctgcctcagcctccccagcagctgggactacaggcgcctgccaccacacccggctaatttttttgtattttttagtagagacagggtttcaccgtgttagccaggatggtctcgatctcctgacctcatgatccacctgcctcggcctcccaaagtgctgggattacaggcatgagccaccgtgcccagctgggagtggacattcttagtgggctccccaggcgatactaaagtttcgggaccacaaacagcggtgtgtgtgctttggagtcgtgctgcttgggtacgagtcctgtcccctctcttagctgagtaaccttgggtgagtggttgcctctgagtgtcagtttcttcacagttgaaggaacttcccacggtgaggcgggaatgaccgtgctgcctgccttatgcagcttaggcaggaaagtgcatgtgagcctcctcacacatgaccagttcagcacatgtgagctcttaccgtcactggtgacgggtcttttacagtctgttagatgatgtcaccacctccaccatgaagctgctctgatttgccacagcagaacgtcctttgccaccttgagttcccagggaactgtgtctgcccgtctctcatggcatattgtaattgtctctatggcaagccaagccaaggacgtgacacatcagagttcttaggccagcccaggagctgagctcataccttttgaaggtccctgcctgcagtctctgtctggccctgccctgccacaatctcaggccataactgatctggagagggagctgggcctttgcatatgcctgcagaaaccttagagggctgaagtctcggcggcgggctggggtggtgaccctcccctagggcgaccagggccccttggaggagggctgcagtcccagcggcctggggtcgtggccctagggtgaccgggactccgtggcgactctggctctgtgttgttcctcccacccaggcctccactcgccacccggctgctggcccacaagatccagtccccacaggagtgggaggcgatccaggccttgacggtgagaaggggagaggccaccatccgtcccccgccatgtgacgacaccaagggaggccaagactgaggttcttggggtccataaggctcttcagagcccaagagagttgtgctaagatggcccaggatggaggtccgggcctgccccaagggtcccaccacagccagcgggctggcctcccaccccagcatccatacacgtaggcctgttgctgagggaaggccctctagggtcatctggtccaggggttctttgcttcagctgcacatcggctgcctctccaggaagcgtgttcaacacatggaatcagggctccacccagacctgccgaggccacactcctggagtatctgcatccagagatctgcacgtttgtaaagctaaggggtggtgcttgggctcaggcctgaggttttgcatctgttcaatagcagaggagagaggggtgtactgtctgtggcccccagcatgggccacataccaacccaccatggagcaaagctgattttaagtggtggtagagatacagtttctcttttaatacttacgtgtttagttgggtgcagtggcttatacctgtaatttcagcacttggggaggccaaggcaggaggcttgcttgaggcaaggagttcaaggctacagtgagctatgattgtgccactgtactccagactggacaacagagtgagaccccatctctaaataataatcattattgttacatatttgttttaacatttttttctcaagtataactagtcctatgatttcatagatgtagcttaggataaggccaaggtaggtgttgcctatataaggtttttttaaaaaaggaaaaataggccgggctggtggctcacgcctgtaatcccagcactttggcaggctgaggcgggcagatcacctgagatcaggagttcaagatcagcctgaccaacatggagaagccccatgtctactaaaaataaaaaattagcgaggcgtggtgggcgggcgcctgtaatcccagctacttgggaggctgaggcagaagaatcatttgaacccaggaggcagaggttacagtgagccgagatcgtgctactgcattccaacctgggcaacaagagtgaaactctgtctcaaaaaaaaaaaaaaaaaggaaaaatagtaagaaaataatgtacagttggtactcagatgtggggcctaagctatgaatgggactagagcattgctacaggttgggcattgctgggcactgtatgtaggtcgcctgaccctatctcccatgggagtgatgaccagtcccagaggcctgtgtgactctgaatcttccaacctcacaggccattccctcccttctgaaagcccacccatgggcttctggcccctgtccaaggcgtgggagggaggccacggcctctgatgcacctgggcgtcccctcccatcccccctccctgcacaggtgctggaaacatgcatgaagagctgcggcaagcggttccacgacgaagtgggcaagttccgctttctcaacgagctcatcaaggtcgtgtctcccaaggttggtgcccccagcccaagctcagacctgccctgtcggatgtggggagaggaaagaggaccttcagattgtggagcgacttttccagggagcctcccactggggtgtcacctcagccccccattagaactcagacctaggaaaaacacagatctcttctcacagtcctctcatacctgattctgggacagcctggggtctcggaggagtgtttccaggctggccaggggcggggcagccatggagctgcccggtgcttaggaagaaatgattccagggaatacataagctgacagatggctgtatgtgtcagccatctctggcctgaaatcactccctgtggacctggccacagaaccctacctggtctctggcaggtttccctgtccccaccacacaagagcaacctccctggacctcagcatccaaggccacagacctgagtgatggagcctgctggctccagacgggccatccccggctcagcccaaggagtcttcccacagaccatgaacgtttctttttctttatttttttgagatggagtcttgctctgtcacccaggctggagtgcaatggcatgatctctacgctccacaacctccacctcctgggttcaagcaattctcctgcctcaacctcccaagtagctgggattgcaggtgcacgccaccatgcccggctaattttttgtatttttagtagagatggggtttcaccatgttggccaggctggtcttgaactcctgacctcatgatctgcctgtcgtggactcccaaagtgccgggattacaggcgtgagccaccatgcccggcctacctaccgtgaacattttttttttttttttgacaaggagtttcactcttgtcacccaagctggagtgcaatggcgcgatctcagctcactgcaccctccacctcccaggtttgagcaattctcctgcctcatcctccagagtagctgcaattataggtgcccaccaccaagcctggctaattttttatttttagtagagacagggtttcaccatattggtcaggctggtcttgaactcctgacctcatgatccacctgcattggcctcccaaagtgctgggattacaggcgtgagccatggcctccggcctactgtgaacatttcttaagctgtttgagtgacagcccacccccttggcccttccttgctcagacccatcctttgaccagagctactgaataatccatatggcctcccattctcctcccaacaggggactctgctgtgagagccactttccccagcccagtttgctgctaggagacggagagtaggcccagggcctcccagttccaccctcacccctccctgggcagcctggagacctctggctcctctttcctgggatgtcaaggctaagtccccagagccgactatgagcaggcctgtccctcatgtcagttctgcatcctcaccatggtgccatctagcaggtggggaaacagacactgagggctgacccagctaataagtggcaggggtagtaggtgaactcagtctaccccaggctggttgggcggggctatgaggaccctgtaggctagagggcttcccggggagtcctggggaggcagtagggtgtggacagggcttgagactgaagtgagtggggctgggcagtatcaaaggcctccccactgtgtccctgaagtatctgggctctcggacatcggagaaggtgaagaacaagatcttggagctcctctacagctggacagtgggcctgcccgaggaggtgaaaatcgcagaggcctaccagatgctaaagaagcagggtgaggcacacagagggtggggggcgaccagggcctgccttcccctcccccaccatgagctggggctccagcggcttcaggggcttctgagccagcaaggtcatgggtctgtcctttaacttctggagaaagtacatacagctagtgcggccttctgtgctctgcctgaggctagcttgggtggaaagaaggtgagttcgaatcaagcttcccctcaaagagtggtctccagggagtggcctcaaaatatgggtccccaaaccatctcccccaggcaattttgatggagtaggtaggagtaggcccaggccactaagagtccagagccagcgtgctggcaaaagactgacctccctcttctgtcctacccttgcctgcccccatccccatgtcacccctacccctgggcctgggacatattgacagcctttctgacactcatctaatccagggattgtaaagtccgaccccaagcttccagatgacactacctttccccttcctcctccacggccgaagaatgtgatctttgaagatgaggagaaatccaaggtgagactccaaggaggcacatatggggactctgagcccaggtgggggtccgtgggttctgacctctagctgccctggcatcagccgttggaacagaggcacacactgagcccaggcatcgttgtagatgatgggcgctgtttactgggcatttaatatgtgctgagtatgtcccatacagcatccccacatttaataaacaggagtgtgtctggtgtccctggagtttgtttgagggtattttgaccttttctataagaatttcactaattttttgttaaaagttaataaaattaaaacttgtgggtgaaaagttaaacagcccaggaggaggtaagattaaaataaagaggttaaagtaaaaggtcccctctccccagtcttagccccagccctggagagtgtctactgttaaggttcttgtacattgtcccagaaaggttctcagccatggggatataaggagcaccatttgttgattacttatttctgctaggcgctgtggtgtgcactttacatgcagtgtctccgctggcctgtggccaccctatcaggcatcagtaaattctcaccatttcacagagagcttaagtaacttactcaggtcccacaggcaggaagcggggagccatcatgtgactccagtcttctgacccctggcccaggtgctgccctcacggtcacacccctctgtctctgcagatgctggcccgcctgctgaagagctcccatcccgaagacctccgcgcagccaataagctcatcaaagagatggtgcaggaggtagcggccgagcccagagcacagggaggaggcgggatgggggtattgagctgggccactgagatggggctgtatgcatcttcacatggaaggagccctgcagtgacccgggctggcacagcagagaagctgatgctgggggaccagggtgtgcagggaagaattcccggcagcctgggtgacttgctctggatgggcctttgggaggctggctacctcttcgtcaaaagttagaaatgaattaggccttagtatatttttaaaaatactaagtatttttaaaattactttttagtatttaaaaatactaagtatttttaaaattattttttagtatttaaaaatactaatgaatatatgtaagtatgtatacgtgtatgtatatgaggagactttttttgagacaaggactcactctctagcccaagcaggagtacagtggcatgatcatggctcattgcagcctcaacctcccgggctcaagcagtcctcccacctcaacctcccaggccgctggcactaaatacgtgtgccaccacaccggtatagtttttgtattttttttgtggagaaggggtttcgccacattgcccaggctggtctggaactcctgggctcaagcaatctgcctgcctcggcgtcccaaagtgctgggattacaggcatgagccactgcctggccaaatgtttaatttttaagtaaatatacatatgttgcctgggtgcctgctgaaactttttttttttaattgagacaagatctcatcctggagtgcagtggcacgatcatggctcactgcagcctcgacctcctgggctcaagcgatcctcccacctcaacctcccaagtagctgggaccaaaggcacacgctacagcgcccggctaattttattttttgtagagacagcatctccctttgttgcccaaactagtctgtaactcctgggctcaatgaccctcccatctcggcctcccaaagtgctgaaaaaaaagtttcaaagctggatgtggtggctcatgcctgtaatcccagcactttggaggccaaggtgggaggactgtgtgaggccacttttcactctgcaaaggaggggcacgcacagtaagcggaggggcaggggaaagccgggctgctcccaaaagcagcctttgaaggcacgggctcccccatctgccaggcaccgacagacactggaagggtcttcctgctcgtttccaggctgtacctggtgaccacagaggtccccttgcactatgaagtacaggaacctcctttgaaagggcaaacacaaggagggcaagagtcactgagaaccacagtggaggtctagggccctgggccttcagaagcacctggtgaggggtttggaaacccaggttcctgggccatctctgaagatcctgatgagcttgtgcagaggcctgggcactgggggcttcttggaccagcgtgcccttcctaggcatgaggggctcctggcagggcctgctggagccccacccagagtgtgatcccacagtcacccagctgtcaacccagatcccagcacacattctctcaagtggcagggggcagtgcctcgtccaggccaaaggttctcaggggcccttggccaatgtgtccccaggaccagaagcggatggagaagatctcgaagagggtgaatgccatcgaggaggtgaacaacaatgtgaaactgctcacggagatggtgatgagccacagccagggcggcgcagcagctggcagcagcgaggacctcatgaaggtgcacctgcctccctgcctaccccactccctgcccactccacagcccacgcggaccctgacccgcccatcctgctgccctcaggaactgtaccagcgctgtgagcggatgcggcccacgctcttccgactggcgagtgacacagaggacaatgatgaggccttaggtgagcccagggcaggtgctgaggtcaggtccccccctctccctccacctcctgcccccacctcccccaggccctgctaagtatctgcagttggaaggagccaccaccagggggcccccttctccagcaccgaccttgggtttctcctctctgaggacacagagcaggggccgcccccctgttgagaggccctgtgggccagcccccttaacaggcatcttatttactacccgcagctgcacaggaggcagacccatccccttttcacaactggggctaagggaggaaaatgacttgcccagatcacagagcagaacagtggcagagccaggggagacggagggccatctgcccccagaccttcctccctaatgagggtgaatggaagctaagagtgcatcccacagcccaggcagttccagacctgagcctgacggcttctgccagggccacataccaggttcttttccttgatctctgcccacgtgtcagcctgggccacttgggctgcggtctgggtaccatccactccctcattaagcaggagccccacccacaaggctcactgcccagattgccccacaccctggcacctggggaaggcagtgttgccgagggcctgattggtgccaggcactgttctaggccctcagggatctggcactgatcaaagtttgcaaaacgccgggtgcagtggttcacacctgtaatcccagcattttgggaggccaaggtgggaggattgctttagtccaggagttcaagaccagcctgggtaacatagagagacccagtctctatttcaaatatatttatattaaaaaaaaaaaaaaaaggttgacaaaaacttcctcatggtagtttagtgagaggagacagacaataaccaagtccatgagcaccgacagttcgtcacggtggtgagtggcatggaggaagagaagcagggaagggatgaggtggtgcaggagggatttaggacaggcctccctgaggtgagccttgggtgaagacctgaaggcagtaagggatgaagccatgcagagatctggggcagccagagagcagagctggagtggaggcctggaggcgggagcgggcccagtgtgttgagacagcccaggcagtatggcagggagtgaatgagggaagggtgggaggtgagaccagggaggtggcggagggccagagtctcagcagacgagatgggctgtttccctgcccctttcccttcccctcacacacaggctgtgatggatgtggggtcctcgtcccctgccgcccagaggcccccacagtccttcagcctggcctctcccctcctgcctgttccagcggagatcctgcaggccaatgacaacctcacccaggtgatcaacctgtataagcagctggtgcggggtgaggaggtcaacggtgatgccacagccggctccatccctggtgaggaggtggcaggagagctgggagggcacccatcaggctggaggggcacagagagtgcagggtggtgtgctggtctcagagcggctggaatgactgccagggtgaccctggccccttaagatggggaaggccccagggagggagctgggggtgaagtctgtgccaagcctgcagctgtgggggaagaagtctggtgggggagctgagggtttggtgaggacaggcagaagaaggaaggcattctttcatttgacaaatctggcacctgttgtatagggctagatgacaccccagaggctttatgtatcagaaaatgcgaggggggttagaaaagtaaacattacagactcaggtctaataagggtaagatggcagccttggggggtcacaaaaggggttagaattggttctgttagggagaagtggagatggaggcgctgcacggaagcagccaagtttcagcagggccttaaggatgggtagcagtttgcccagtagagctaagaaggaaatacattccggacagaagtaccatcatatgccaaagagaggtcctgttgagcagtttccaggcaggggctggtgtggccaaggaaggggaggcaggagaccagtggtaaagcatcgggggttaggtgttgctcccccgcaacccctgtggactctgagagacacgtgtacacccaggacttgccagcctcttctttcccaccccagggagcacctcggccctgctggatctctcaggcctggatctcccgcctgcgggcaccacctacccagctatgcccacccgccctggcgagcaggccagccctgagcagcccagtgcctcagtttccctgcttgacgacgagctcatgtctctgggtgaggaaggggccaggcctggaggagggcgggctcagcagcagatggggcatgatcccagggcccactcacagctagcggaaccacgtaccccaggtgtggatcctgtggggcacgtggatgagcattaggcccacttcacaactgaggaaactgaggctcggggaagttaggagcttgtgcgaggccacacggccagagggtgaggctggcaacctctaagccggcctcggataagctaaccagcattcaggctctggcagcctggggggaaaccaggggatttccccgcaacaggttagagcctggaattgagaactgtctgggcaaaagttcagcagtttcttcatccaccaagaggagagggagggctctgggctccagagcacccagaggctccagagaagccgaggccagagcgcgagggactcggtgatccaagctggtccagggccaggcctgctgttactcccgggcaggctccggctccagagcccagcaggggccaggcttccccggggggaagcagcaaagcgttcccagctgcccaaaccatttttgggtttccaactgctctcagggcagcagccccatccgagagctgagatcagaacagcctcctcctgagagccactgaagggatgaagagcagatacgttagggccacatcaaaggaatcctcagggatatgttggaagccaagattcagactgtggtttcctgagccagttctgaagcaaaaaccagacccgaaggccttgaagaagtgatggggacccggggcgccctgggcggggtctgcctgggttccaggagtgcttcctttggtggtgcccactactgcactctgtcctgtcttaggtgaccctcacggtctctgcaggcaggtgccgttaatagccccactgcacaatgaggaaacggcagcacagaaaggcgcggtggctcacgcctggaatcccagcactttgggaggccaaggcagagggattacttgaggtcaggagtttgaaactagcctggccaacatggcgaaaccccatgtctattaaaaatacaaaattagctgggcgtggtggcacatgcctgtagtcccagctactggggaggctgatgcaggaaaattgcttgaactggggaagcagaggttgcggtgagccgagatggcaccactgcactccagcctggttgacagagcaaggctccgtctcacaaaaaaaagaaaaagaaaaggaaaaagaaaggctgggtgacttgtgcagaaagggctctaggacttgagctgggctctgatcctgaagccacactctgagcagctgggctgctctgactcgttgttcataagcaaggaaaaggaaatgaggacccggagtgtggagggagagctgaaggggaaggagagctgaggggaaaggaggcccagttgtgagctccctttgtgaacccagcagccagcaccctccctgaagctgcttacgagccccatgcagccgccccctcttcattcagagccaagggtgaccgcagggagaggacctttaccccattctacagagaagtaaaggacggtcaagggacaggaacgttcatacaaggtttatcttcccctgtggagccagccctgggtggcagctacctgaggggcagtgggtggggaagtactgcagggccaccagcccccagccagcagctgcagcaccacctccacaagagaagcgagatgcagccgcacttcctgtccccgcactgcactggcatagttctgagccaccagcttccttctgttttcctctcagaggcaaagcatgggggcacaggagccggaagtgccagggcagcctgcagcctgggcctggggaatggaggaggccctggggccacacagggggctggtcctcactcttcacggcaggggtgggagacaggttcctgtccctcaaggagggtgttcaggcagccttaacctcccccgtctcaagtgatcctcccatctcaggctcctgagtagttgggactacaggtgtgtgccaccacacccggttaattagtttatttttagtagacacacggtttcacctgtgttggccaggccggtattgaactcctggcctcaagtgatccacccaccccagcttcctaaaatgctgggatgacaggcatgagccactgcgcccacctctttttggttttgagatgggggtctcactatattgctcaggctggtctcaaacttctggcttcaactaatcctcccatctcagcctcccaagtagatgggaccacaggcattggctaattttttttccttttattctttaggggtagagtctctatgctgccagggcttatctcaaaccccagcttcagcctcccaaatagctgggattacagacattagccactgcacctggctggtgtctccattttacagatgaggctgtcaccccccaatatcacacagccaagtggcagagttgtgttcaaatgctggcagtcaggccatgctctgtctgagtccagactctgccactttctagctgtgtgttctcgggcaggttatttaccaactttgagtccattttcttatccctaaaagagggctgagaagctcacccctacctttgaaggttgtttgaggattaagcaagaccagcatctgaagggcctgaagcatctagggcatcatcagtgcactttatctctggcctctaagaagtgcatctagaagggacccactgtcacagcttcctggtacccttgcctttgcctgtcaggtagcacttcggtttggacctcactttttcaggatttgttggaaacaagatcccttatcttctctaggtcagatttggggtgaacttggctgacagtattccagggcaggcagaggtcaggctggctggtgacctgctgcctccttcccatcggcagctagttctagggccatccacagggatccccagccctccatagtaccagtgagcctcactggcatgtgccagggccaagagggccttcagcgtcgcctccagtccagccctgtcctcgtattcttggggacactgtggctcagccagcacagtgcctagcccacagtcacccagcaggcgtccctcgagtgggccagtggcaggcacagagctgctctccccttgcctggatgcgtgaggaaaggaacctcttctccctgcagcccagccctgcaggctctctgctgccagatgacgagtgaagatgaaagtcctgatgtctattgtctgtgtgcacagagctttggagtggcctggccaggaagaggggaagcgtgtgtggggtcagcacaaggggttgccgggatcttggttactggttctgctctgctgctggttccctctgaaaatgtgggtttctcccctccgtgctgagcctcagaaaggggtagggagccccatgccagcacacatggcccctcggctctctggcctctgcagggtcagcccagctccttcacctctctcctgctttcccctcaggcctcagtgaccccacacccccttcaggcccaagcctggatggtaccggatggaacagcttccaggtaggaggggaccacaaactagtctggcctgtcccagtcccagggtcagggcagctgggacaagtggcctggagaaactaaaaggatggatgggctctactcaagagcccagggccagggggtggcccaggggcctggagacacccacccagggtacagggcctccccttacctccagctgtatcttccccaagtctcagccttggggctgcagcccagcctttgggattgggattgagatgggcaatccctcttcctttcccttgagggtgacagaggtccctggattgtagaacccccaaccagacccagccaccctgcatcatggacatgggtggtctggggtccccacctctgtggctgctttcccagatgtcatttgcaaggaggacactgagcctcagggcaggatcaggtgatgctgacacctctctagacagccccaccccacctgcatccttttccccacagtcgtcggatgccactgagcccccagcccctgctctggcccaggcccccagtatggaaagccgacccccagcgcagacatccctgccagcaagcagcggtctggacgacctagacctcctggggaagaccctcctgcagcagtcgctgcccccggaatcccagcaagtgcggtggtgagggcccaccatggctggcatggggtggggagcactccctgttcccacaaaccagcaacttctcctgggcttgtccaggcccagcagggagaggctcgttgctgtcttgttttgtaagcagcagatgccaagcagtgcacctgcctctggaaacacaacagtgcccaaggcagacctgggcccactggcctggcctccccccaggtgttcccagctcccttgagaaaggtccagagggccggcagaggggaggacactgggctggagtgaataggtggggtgcagggtggagggagaacacgagctgctccttctaaaggtaagacccaaggccagagagatagccacacgtgccagcctttcctgtgcccctgatctctccatcaccaaagaatcactttttctttttttgagagggagtctcaccctgtcacccaggctggagtacagtggcatgatctcggctcactgcaacctccatctcccaaactcaagcgattctcctacgtcaggctcctgagtagctgggaccacaggtgtgcgctaccacgcccagctagttttttgtattttttatacagaccgggtttcgccatgttgcccaggctggtctcaaactcctgagctcaagcgatctgcccgcctcagcctcccaaagtgttggaattacaggggtgagctaccacgctggccaagaatcacttcttaatgcactgtcccccgattaagggagaagcagcagccaaccccccggctcacactccgggacctgcagaataagagcagcagctgcagctcccccagctccagcgccaccagccttctccacaccgtgtccccagagccccccaggcctccgcagcagcccgtaccaaccgagctctcactggccagcatcactgtgcccctggagtccatcaaacccagtgagtagggctggggcaggtgcaggctgggttgggtcagcttgctgccctgtcaggagctctgtctggggaagctagtgggaaagcagggctcccctggctctgccactggccaaccagaggggagctctgaacaaggccctccccttcccaggagtcagtttccttatctgccccagagcaatcagaggactgctgtacaaactccaggcttatataagcaagaagacctctagggagtaggctctgggccccttccatccccaggaaggcagggcccaggacacagagaggtttggggtctcccccagattacagaactgaaccatgataaagacccagatccaaggctgggtttttccagcccaggagcagtaaggggaccatggcccagccccgggccccaagcagacacatgaggcctggtggtcctcagcattgccctctatgagctccctgtgaccaaagacactacccccacagtgtctcccagcagtgggcagagctgcccctctcaccagtaggagaaccctgagctcagagaaggggagtgactgccgcaaggtcacacagcgtgagactcaccctcaccaagtccctcaccccagcactccaggcagcagccacacagcatcgggggaagctgggctgtgactcggctctggggtgggtgtcctgcctccactatcagactgggggttcacctgccctctctgggcaccgctctgtgcccctgcctgcactgccacccagggtccaggtaaggccccaaaggaggactttgctcttgttgccagtacagcagccagctcctgaggccagccgggtgggggctgggggctgagcggatgtgctgcagctcagctgtcccatcgccctcccaccttctcccacaggcaacatcctgcccgtgactgtgtatgaccagcacggcttccgcatcctcttccattttgcccgggacccactgccagggcgctccgacgtgctggtggtggtggtttccatgctgagcaccgccccccagcccatccgcaacatcgtgttccagtcagctgtccccaaggtgacaagccagtcggacagggcatgcctccctcctctcaaggcagggtgacatggagctgggtggggagccacctgtcagggggcaggtctccctcccttgctgggtggttggtgtagaagggaccagaaggactgagccccaggatccccggaggggagctggcaggctgggcctggttcctcagagcaggacaagcagccagggctagctgtgcccatcctgccatctgcccacaggttatgaaggtgaagctgcagccaccctcgggcacggagctgccagcttttaaccccatcgtccacccctcagcaatcacccaggtcctgctgcttgccaacccccagaaggtaaggggcccccaggcagtgctgcagggtggggacggccacttctcctcctctgacccctctgcctttgccatctcttccccaggagaaggttcgcctccgctacaagctcaccttcaccatgggtgaccagacctacaacgagatgggggatgtggaccagttccccccacctgaaacctggggtagcctctagaacagaggggctggggagaggaaggggcagagggaccggtcactgtccagcctggagggaggcattggtggccaaggacaccctttgttgcccatggccattcacccccaggcctggtgcttctccccacacccctgtaggcctcaagtgactcttccccctcctgctccggccccgcccctgctgagccaaacccagtaggaggctgggcctgggtttgtgccgctggggtctccatcaccgggacctggagagggaggggctgtgtagccttggaagaacttgggtcatggggaggaagcacagctgttggggaagggccaggacctcaggcccagccccaaccccagctggggtggggtcttccccacctgtctcttatgccttatgggaaggcccagccataactcgggggccatgctggagctggggaccagcttaggcctcctccataggaacccagtgactggggggtgacgcctacacccccagctatttgcactctggtgtgtggtttgactctgcttttcttccggattggccctgtggtcacagcctcagggggccaggctgggggaacctcacctggcccgtactcctgggggtttccctttgccattgggccccctgagggactgtgggggctcaagggtaatgccagaggcccatggccccagcgaggggctgtggggcacctagagttctcggtgtgtctccttcattcattggcctctgctggggcctcctatgggtgtcttacgtctgtccatccatctgtccgtggtcagaagtggggtcagtgtgtgagtgagagcaggagtatttatgaaaataaaacgtcgtttttcctgga

SEQ ID NO: 12146 - DNA, 2800 bp, Homo sapiens
ggtgccgaggctgggggccggtggcggatggagcccgcgatggagccggagactctggaggcgcgaatcaatagagccacgaaccccctgaacaaggagctcgactgggccagcatcaacggcttctgcgagcagctcaacgaggactttgaggggcctccactcgccacccggctgctggcccacaagatccagtccccacaggagtgggaggcgatccaggccttgacggtgctggaaacatgcatgaagagctgcggcaagcggttccacgacgaagtgggcaagttccgctttctcaacgagctcatcaaggtcgtgtctcccaagtatctgggctctcggacatcggagaaggtgaagaacaagatcttggagctcctctacagctggacagtgggcctgcccgaggaggtgaaaatcgcagaggcctaccagatgctaaagaagcaggggattgtaaagtccgaccccaagcttccagatgacactacctttccccttcctcctccacggccgaagaatgtgatctttgaagatgaggagaaatccaagatgctggcccgcctgctgaagagctcccatcccgaagacctccgcgcagccaataagctcatcaaagagatggtgcaggaggaccagaagcggatggagaagatctcgaagagggtgaatgccatcgaggaggtgaacaacaatgtgaaactgctcacggagatggtgatgagccacagccagggcggcgcagcagctggcagcagcgaggacctcatgaaggaactgtaccagcgctgtgagcggatgcggcccacgctcttccgactggcgagtgacacagaggacaatgatgaggccttagcggagatcctgcaggccaatgacaacctcacccaggtgatcaacctgtataagcagctggtgcggggtgaggaggtcaacggtgatgccacagccggctccatccctgggagcacctcggccctgctggatctctcaggcctggatctcccgcctgcgggcaccacctacccagctatgcccacccgccctggcgagcaggccagccctgagcagcccagtgcctcagtttccctgcttgacgacgagctcatgtctctgggcctcagtgaccccacacccccttcaggcccaagcctggatggtaccggatggaacagcttccagtcgtcggatgccactgagcccccagcccctgctctggcccaggcccccagtatggaaagccgacccccagcgcagacatccctgccagcaagcagcggtctggacgacctagacctcctggggaagaccctcctgcagcagtcgctgcccccggaatcccagcaagtgcggtgggagaagcagcagccaaccccccggctcacactccgggacctgcagaataagagcagcagctgcagctcccccagctccagcgccaccagccttctccacaccgtgtccccagagccccccaggcctccgcagcagcccgtaccaaccgagctctcactggccagcatcactgtgcccctggagtccatcaaacccagcaacatcctgcccgtgactgtgtatgaccagcacggcttccgcatcctcttccattttgcccgggacccactgccagggcgctccgacgtgctggtggtggtggtttccatgctgagcaccgccccccagcccatccgcaacatcgtgttccagtcagctgtccccaaggttatgaaggtgaagctgcagccaccctcgggcacggagctgccagcttttaaccccatcgtccacccctcagcaatcacccaggtcctgctgcttgccaacccccagaaggagaaggttcgcctccgctacaagctcaccttcaccatgggtgaccagacctacaacgagatgggggatgtggaccagttccccccacctgaaacctggggtagcctctagaacagaggggctggggagaggaaggggcagagggaccggtcactgtccagcctggagggaggcattggtggccaaggacaccctttgttgcccatggccattcacccccaggcctggtgcttctccccacacccctgtaggcctcaagtgactcttccccctcctgctccggccccgcccctgctgagccaaacccagtaggaggctgggcctgggtttgtgccgctggggtctccatcaccgggacctggagagggaggggctgtgtagccttggaagaacttgggtcatggggaggaagcacagctgttggggaagggccaggacctcaggcccagccccaaccccagctggggtggggtcttccccacctgtctcttatgccttatgggaaggcccagccataactcgggggccatgctggagctggggaccagcttaggcctcctccataggaacccagtgactggggggtgacgcctacacccccagctatttgcactctggtgtgtggtttgactctgcttttcttccggattggccctgtggtcacagcctcagggggccaggctgggggaacctcacctggcccgtactcctgggggtttccctttgccattgggccccctgagggactgtgggggctcaagggtaatgccagaggcccatggccccagcgaggggctgtggggcacctagagttctcggtgtgtctccttcattcattggcctctgctggggcctcctatgggtgtcttacgtctgtccatccatctgtccgtggtcagaagtggggtcagtgtgtgagtgagagcaggagtatttatgaaaataaaacgtcgtttttcctgga

SEQ ID NO: 12147 - DNA, 23987 bp, Homo sapiens
ctcgttggcctctctatggtgccgagcgcgcccgttcggacgttgcccctttaatcggcagagggcggtgcccaggaggtcccgcgagagctgcggggggcgggggggcggtgccgaggctgggggccggtggcggatggagcccgcgatggagccggagactctggaggcgcgaatcagtgagtgtccgggaggggcgcgggccggaccggaaccggaaccgggggcacgaggcgggccccttcccggcgggggcggggtacgggtcgccccctcctcacgccccgcccccggcccgggaggggcggtgtcctcagtcggcccctcagaccctggagcgatggaggaccccggccccggcgcggtccagcggtgggagcgggcgccgcccacctgtcggatccctgggccatgacccctgggacggcgagtgagctgcgccgggaacccccgggacggagagagcagcctccaacccccaaggctcacattgcttcacggagtagcggcccggggaaggagcacgcgagcggttccccggggttgcatctcacacccgggagggagggaccctactattttcaggccccgaatcctccactctctggccctgcatggcgttcctggagcccgcaagtagtcacatttgctcattaccccgtcctggaagggaggacccactgccccatttgattcctcccgccgctcctagtctctagccacatagtgagaaacccccgcaccctacaggcttgggagagtcttagactccagaagtattaataattccaagctccctgtcactcccttcagcctaacccctcagtctccaagatgcctttcccagctcttgctgaacttccttcaaaggcttctacacccctttttttcttgtttctcctcagacgtagcttcctattgcttaggcttcctagcccgcaaaccctccacctgagctccttaacccacagccctgatgatcccctgctctcacagccccgctcctggactctgcctctgaaagccgtggctggcttctccctggtctagtgagggttctctcccaaggctttaactgctgttgggaccccgtcgttgccagggcctcagggaaccctcttggacccgggcacaccggcaactgtctagcgtggtttggggtcatggccggccccttttaagccaggcttgagcagagttgaaccatgaggttggccccagaaccaaacctctagggatgtttcagagtcatcctagccaccagaggggcagggggtggaaaaggggcactcagcagcccttgaccgttgtgaacgccggaagtgtccgcctgggtctcagcagcaactgggctggggggatgggtgggcccctggctaactgatctcagacacaggtcttgagctgtgggtcatacaaaacattctcaggtttagaaacagtgggggttttctgagagtccagagagtctaaaaccaggcagaagttagagatacctgggtttggctgggccctgacacactggggctgggattttctcctttccttccccctttgtgtcctagcagaattgtaagatctttcctcttcccttgtggaggctggaggtaaaggatagcttcttctttttttttttgagacgggttttcactcttgtcacccaggctggagtgcagtggcacaatctcagctctctgcaacctccacctcccgggttcaagtgattctcctgtctcagcctcccgagtagctggaattacaggtgcgccaccacgcccagctatttttgtatttttagtacaggtgggctttcaccatgttggccaggctgatctcgaactcctgacctcaggtgatccgcctatataggcctctcaaagtgttgggattacaggcgttagccactcatccgcccacgtcggcctctcaaagtgttgggattacaggcgtgagccaccgcgcccggcctagtgaggtaaatgatgttattgtcagcactatagagtggcagggtggagtcttaccctgttgtgaaacacctccctccctctctaggtgttctccccaactgcctgctagggagggtactcccctcaggtagaattaagagggctgagggtcaggggccatgggccaaggaggtcagtcagatctccttggatctggaggccctggctttcagccagaggcagggggagaaagatgatgtctcatgatgccagcgcttcctcttcactggcgtctgacccaggagcagtccagaatcagcttctctgacctcactccaactcacgtgtctttgacactttaagggacttcctgttttagggtcttctggctgggtgtcattgaatgggcagtgattctctaactttagactgatgttccccagcctttgtttggggactcggaggcagagtagacagttacccttacccctgggttggggagggtcatattcctggtatccccaggaggtcaacaggggcttcatttttctgagggactagagggtcttgtggagctcctgggacagagatctagatccagagagaacattcgtccttccgatctcagctcagctctgagagccctcccagagagcagctcccgagggctccagagccctccgaaagccctcccagagagcagcccccacctcccaggctgtctgcacttctccttgctatgctttgctctgtaacattttgcaacagtctgcagtacacggggtttgttaatctgagtattcattgtttctcttgctgggcagtgaacttgaggagggcagggattttgtctgttcactgctggagccccagcacccagaatacttaaatctgagttggatgaatggcggccagccactgggattccagggctttgggccccctgccataacatatggcccagggcaggcgccacatgctgggtcagtccccagcctcctgtccacagatccttctctgttctacctcctgggctgtgtccttccacaccctcagctcggtgctcaggcgtgggcagaactggctgggaaggggtggtccttagaggtgggctgtggagaaatgaagatcgagctctggctgccgccatggccttcccatgcaaaaagtattttgtcatccaaaatcaatattttggtcaggcacagtggctcatgcctgtaatcccagcactttgggtggccgaggtgggtggatcatttgaggtcaggagtttgagaccagcctgaccaacatggtgaaattccatctctaccaaaaatacaaaaaaattagctgggcatggtggtggacgcctgtgatcccagctactctcaggaggctgaagcaggagaatcgtttgaacccaggaagctgagattgcagtgagccgagatctcgccactgcactccagcctgggcaacaaagcaagactctttctcaaaaaaaaataaaaataaaaaaatacaggccggacgcagtggctcacacctgtaattccagtactttgggaggccgaggcaggtggatcacgaggttaggagatcaagaccatcctggctaacacagtgaaaccccgtctctactaaaaatacaaaaaaaaaaaaaattagccgggcgtggtggcgggcacctgtagtcccagctactcgggaggctgaggcaggagaatggcgtgaacctgggaggcagagtttgcagtcagccgagatcacaccactgcactccagcctgggcgatagagcgagactccgtctcaaaaaaaaaaaaaaatacagccgggcacggtggctcacacctgtaatcccagcactttgggaggccaaggtgggcggatcacaaggtcaggagattgagaccatcctggctaacatggtgaaaccctgtctctactaaaaatacaaaaaaaaattagccgggcgtggtggcgggtgcctgtagtcccagctactcgggaggctgaggaaggagaatggcatgaacctgggaggcggagcttgcagtgagccgagatcgtgccactgcactccagcctgggcaacagcgtgagactcgtctcaaaaaaaaaaaaaaatccatatttcattccagctttacaagatggggaaatggaggttcagggaagcatgtaagctagattgttgtttaaccagtattgggggttaaaggggtagctgtctggtcgtgtttacaccacttcatgtagacctgttggccctctttccttgccactatccatttctggattcagtcttccccagaacctcaccctttgcctgccctcagctgactgctcattcatttgccaaggggagacaggtgtggacatgagtggctgggatgcagtgccgtagcaggctgggggacacaaaagagaactgacccagcactgctaccctgggcaggagtagaggattagagaaggggacaccggagccactcccaagggaatgaaggctttctgaacctggtgtgatggtaagactcacactccttactgaggcccctcattctctgcctcgtgtggttacccgcatctttcctgcccatacagccatgcgtgggtcagaggtgtaccagctccagcctgggtgactcctcctggtccctgcttgtgtgttgcctcttccaggcagcctcctcagccccaaactgaactgagtcccctcctctgtgtttcttttttgtttgtttgagacggagtcacccagagtcccagctctgtcacccaggctggagggcagtggcgagacctcggctcactccaagctccgcctcccgggttcacgccattctcctgcctcagcctcccaagtagctgggactacaggcacccaccaccaagcccggctaatttttgtatttttagtagagatggggtttcatcgtgttagctaggatggtcttgatctcctgacctcgtgatccacccacctcagcctcccaaagtgctgggattacaggcatgagccaccgtgcctggcccctcctctgtgtttctacagctccttggcttccctctgtcacacgttattgagaacctagcttcccttggcccacttcccggctacacagctccttgagggcgggactatgatttttttctcccttacttctggatctcctctgagcataaatttcatgagaattatggagacactgttctcagcagaatcagaggaggtggggctggcgtgatgggtccagctgcaggggtgggaggagtggggaggaggggaagggccctgaccatagtctctaaaagtggggccctttggagggcagctgtgctcatctgtctgtctacacccacaatcaggtcttgaggctgtctgggcaggaaggcagggggagagctttcccacgtgctcagtcacactcctctcccactcctgaccacacctttgccagggtcaggagtggaagagcaggaatcccactgccgggccacaatgaccccagctctcctcttccagatagagccacgaaccccctgaacaaggagctcgactgggccagcatcaacggcttctgcgagcagctcaacgaggactttgaggggtaggtggccgtccccacttgtttgcactgccctgcactctccagaacccagtctcgggtacaatggcctgggtgggtggagacccggttttcattctgaacgtattcacaaagtgatgaggatggggcacttggcactgaatgctgtttgggtgtcactctctggggtgggccttgctggaaccatttaacaggtaaagaaatcaaggctcagaggactcagatctgcccccacatctcacagggagaaaatgctagtcctgagcttggtaagacccaggcctgctggacctgcagccagtgctttgtggggaaaggccccccagagggagaactgcatgttccccaattgggaggaggccagtaggccctttgctcaaggacgaaccagaactacctgtgttagaatcacctagaatgttggccaggcacagtggctcatgcctgtaatcccagcactttggaaggccgaagtgggtggattacctgaggtcaggagtttgagaccagcgtggccaacatggtgacaccccgtctctactaaaaatgcaaaaattagctgggcgtggtggcacgtgcctgtaatcccagctactcaggaggctgaggcaggagaattgcttgaacccaagagacagagattgtaatgagccgagattgcgccactgccctgcagcctgggcagcagagtgagactctgtctcgaaaaacaaaacaaagaattacctagaatgcttgtcagaaatgtacattcttagccaggcatggtggtgcacacctgtaatctcagttactggggaggccaaggcgggaggatcccttgaggctagcctgggcaacatagcggggcaacatagcgagacatcatctcttaaaaaataaaaaaataggccaggcatggtggctcacgcctgtaatcccagcactttgggaggccaaggcaggtggatcacctgaggttgggagttcaagaccagccttaccaacatagagaaatcccatctctactaaaaatacaaaaaaaattagccgggcatggtggtgcatgcctgtaatcccagctactcgggaggctgaggcaggagaattgcttgaacccaggaggtagaagttgcagtgagccaagatcgtgccattgcactccagcctgggcgacggagtgaaactccgtctcaaaaaataagtaaataaataaataataaaaaataaggccgggtgtggtggcttacgtctataatcccagcactctgggaggctgaggcaggtggatcacgaggccaacagattgagaccatcctggccaacatggtgaaaccccatctctactaaaaatgcaaaaattagcaaggagcggtggtgtgcgcctgtagtcccagctactcgggaggctgaggcaggagaatcgcttgaacccgggaggctgaggttgcagtgagccaagattgcattactgcactccagcatggtgacggtgagactccatctcaaaaaaataaataaagtaaatgcaccttcttgggctgcccccagactcgactgtccagtggggggttgggagtggacattctttttatttttttttttgagatggagtctcgctctgtcgcccaggctggagtgcattggcacgatctcggctcactgcaagctccgcctcccaggttcacgcggttctcctgcctcagcctccccagcagctgggactacaggcgcctgccaccacacccggctaatttttttgtattttttagtagagacagggtttcaccgtgttagccaggatggtctcgatctcctgacctcatgatccacctgcctcggcctcccaaagtgctgggattacaggcatgagccaccgtgcccagctgggagtggacattcttagtgggctccccaggcgatactaaagtttcgggaccacaaacagcggtgtgtgtgctttggagtcgtgctgcttgggtacgagtcctgtcccctctcttagctgagtaaccttgggtgagtggttgcctctgagtgtcagtttcttcacagttgaaggaacttcccacggtgaggcgggaatgaccgtgctgcctgccttatgcagcttaggcaggaaagtgcatgtgagcctcctcacacatgaccagttcagcacatgtgagctcttaccgtcactggtgacgggtcttttacagtctgttagatgatgtcaccacctccaccatgaagctgctctgatttgccacagcagaacgtcctttgccaccttgagttcccagggaactgtgtctgcccgtctctcatggcatattgtaattgtctctatggcaagccaagccaaggacgtgacacatcagagttcttaggccagcccaggagctgagctcataccttttgaaggtccctgcctgcagtctctgtctggccctgccctgccacaatctcaggccataactgatctggagagggagctgggcctttgcatatgcctgcagaaaccttagagggctgaagtctcggcggcgggctggggtggtgaccctcccctagggcgaccagggccccttggaggagggctgcagtcccagcggcctggggtcgtggccctagggtgaccgggactccgtggcgactctggctctgtgttgttcctcccacccaggcctccactcgccacccggctgctggcccacaagatccagtccccacaggagtgggaggcgatccaggccttgacggtgagaaggggagaggccaccatccgtcccccgccatgtgacgacaccaagggaggccaagactgaggttcttggggtccataaggctcttcagagcccaagagagttgtgctaagatggcccaggatggaggtccgggcctgccccaagggtcccaccacagccagcgggctggcctcccaccccagcatccatacacgtaggcctgttgctgagggaaggccctctagggtcatctggtccaggggttctttgcttcagctgcacatcggctgcctctccaggaagcgtgttcaacacatggaatcagggctccacccagacctgccgaggccacactcctggagtatctgcatccagagatctgcacgtttgtaaagctaaggggtggtgcttgggctcaggcctgaggttttgcatctgttcaatagcagaggagagaggggtgtactgtctgtggcccccagcatgggccacataccaacccaccatggagcaaagctgattttaagtggtggtagagatacagtttctcttttaatacttacgtgtttagttgggtgcagtggcttatacctgtaatttcagcacttggggaggccaaggcaggaggcttgcttgaggcaaggagttcaaggctacagtgagctatgattgtgccactgtactccagactggacaacagagtgagaccccatctctaaataataatcattattgttacatatttgttttaacatttttttctcaagtataactagtcctatgatttcatagatgtagcttaggataaggccaaggtaggtgttgcctatataaggtttttttaaaaaaggaaaaataggccgggctggtggctcacgcctgtaatcccagcactttggcaggctgaggcgggcagatcacctgagatcaggagttcaagatcagcctgaccaacatggagaagccccatgtctactaaaaataaaaaattagcgaggcgtggtgggcgggcgcctgtaatcccagctacttgggaggctgaggcagaagaatcatttgaacccaggaggcagaggttacagtgagccgagatcgtgctactgcattccaacctgggcaacaagagtgaaactctgtctcaaaaaaaaaaaaaaaaaggaaaaatagtaagaaaataatgtacagttggtactcagatgtggggcctaagctatgaatgggactagagcattgctacaggttgggcattgctgggcactgtatgtaggtcgcctgaccctatctcccatgggagtgatgaccagtcccagaggcctgtgtgactctgaatcttccaacctcacaggccattccctcccttctgaaagcccacccatgggcttctggcccctgtccaaggcgtgggagggaggccacggcctctgatgcacctgggcgtcccctcccatcccccctccctgcacaggtgctggaaacatgcatgaagagctgcggcaagcggttccacgacgaagtgggcaagttccgctttctcaacgagctcatcaaggtcgtgtctcccaaggttggtgcccccagcccaagctcagacctgccctgtcggatgtggggagaggaaagaggaccttcagattgtggagcgacttttccagggagcctcccactggggtgtcacctcagccccccattagaactcagacctaggaaaaacacagatctcttctcacagtcctctcatacctgattctgggacagcctggggtctcggaggagtgtttccaggctggccaggggcggggcagccatggagctgcccggtgcttaggaagaaatgattccagggaatacataagctgacagatggctgtatgtgtcagccatctctggcctgaaatcactccctgtggacctggccacagaaccctacctggtctctggcaggtttccctgtccccaccacacaagagcaacctccctggacctcagcatccaaggccacagacctgagtgatggagcctgctggctccagacgggccatccccggctcagcccaaggagtcttcccacagaccatgaacgtttctttttctttatttttttgagatggagtcttgctctgtcacccaggctggagtgcaatggcatgatctctacgctccacaacctccacctcctgggttcaagcaattctcctgcctcaacctcccaagtagctgggattgcaggtgcacgccaccatgcccggctaattttttgtatttttagtagagatggggtttcaccatgttggccaggctggtcttgaactcctgacctcatgatctgcctgtcgtggactcccaaagtgccgggattacaggcgtgagccaccatgcccggcctacctaccgtgaacattttttttttttttttgacaaggagtttcactcttgtcacccaagctggagtgcaatggcgcgatctcagctcactgcaccctccacctcccaggtttgagcaattctcctgcctcatcctccagagtagctgcaattataggtgcccaccaccaagcctggctaattttttatttttagtagagacagggtttcaccatattggtcaggctggtcttgaactcctgacctcatgatccacctgcattggcctcccaaagtgctgggattacaggcgtgagccatggcctccggcctactgtgaacatttcttaagctgtttgagtgacagcccacccccttggcccttccttgctcagacccatcctttgaccagagctactgaataatccatatggcctcccattctcctcccaacaggggactctgctgtgagagccactttccccagcccagtttgctgctaggagacggagagtaggcccagggcctcccagttccaccctcacccctccctgggcagcctggagacctctggctcctctttcctgggatgtcaaggctaagtccccagagccgactatgagcaggcctgtccctcatgtcagttctgcatcctcaccatggtgccatctagcaggtggggaaacagacactgagggctgacccagctaataagtggcaggggtagtaggtgaactcagtctaccccaggctggttgggcggggctatgaggaccctgtaggctagagggcttcccggggagtcctggggaggcagtagggtgtggacagggcttgagactgaagtgagtggggctgggcagtatcaaaggcctccccactgtgtccctgaagtatctgggctctcggacatcggagaaggtgaagaacaagatcttggagctcctctacagctggacagtgggcctgcccgaggaggtgaaaatcgcagaggcctaccagatgctaaagaagcagggtgaggcacacagagggtggggggcgaccagggcctgccttcccctcccccaccatgagctggggctccagcggcttcaggggcttctgagccagcaaggtcatgggtctgtcctttaacttctggagaaagtacatacagctagtgcggccttctgtgctctgcctgaggctagcttgggtggaaagaaggtgagttcgaatcaagcttcccctcaaagagtggtctccagggagtggcctcaaaatatgggtccccaaaccatctcccccaggcaattttgatggagtaggtaggagtaggcccaggccactaagagtccagagccagcgtgctggcaaaagactgacctccctcttctgtcctacccttgcctgcccccatccccatgtcacccctacccctgggcctgggacatattgacagcctttctgacactcatctaatccagggattgtaaagtccgaccccaagcttccagatgacactacctttccccttcctcctccacggccgaagaatgtgatctttgaagatgaggagaaatccaaggtgagactccaaggaggcacatatggggactctgagcccaggtgggggtccgtgggttctgacctctagctgccctggcatcagccgttggaacagaggcacacactgagcccaggcatcgttgtagatgatgggcgctgtttactgggcatttaatatgtgctgagtatgtcccatacagcatccccacatttaataaacaggagtgtgtctggtgtccctggagtttgtttgagggtattttgaccttttctataagaatttcactaattttttgttaaaagttaataaaattaaaacttgtgggtgaaaagttaaacagcccaggaggaggtaagattaaaataaagaggttaaagtaaaaggtcccctctccccagtcttagccccagccctggagagtgtctactgttaaggttcttgtacattgtcccagaaaggttctcagccatggggatataaggagcaccatttgttgattacttatttctgctaggcgctgtggtgtgcactttacatgcagtgtctccgctggcctgtggccaccctatcaggcatcagtaaattctcaccatttcacagagagcttaagtaacttactcaggtcccacaggcaggaagcggggagccatcatgtgactccagtcttctgacccctggcccaggtgctgccctcacggtcacacccctctgtctctgcagatgctggcccgcctgctgaagagctcccatcccgaagacctccgcgcagccaataagctcatcaaagagatggtgcaggaggtagcggccgagcccagagcacagggaggaggcgggatgggggtattgagctgggccactgagatggggctgtatgcatcttcacatggaaggagccctgcagtgacccgggctggcacagcagagaagctgatgctgggggaccagggtgtgcagggaagaattcccggcagcctgggtgacttgctctggatgggcctttgggaggctggctacctcttcgtcaaaagttagaaatgaattaggccttagtatatttttaaaaatactaagtatttttaaaattactttttagtatttaaaaatactaagtatttttaaaattattttttagtatttaaaaatactaatgaatatatgtaagtatgtatacgtgtatgtatatgaggagactttttttgagacaaggactcactctctagcccaagcaggagtacagtggcatgatcatggctcattgcagcctcaacctcccgggctcaagcagtcctcccacctcaacctcccaggccgctggcactaaatacgtgtgccaccacaccggtatagtttttgtattttttttgtggagaaggggtttcgccacattgcccaggctggtctggaactcctgggctcaagcaatctgcctgcctcggcgtcccaaagtgctgggattacaggcatgagccactgcctggccaaatgtttaatttttaagtaaatatacatatgttgcctgggtgcctgctgaaactttttttttttaattgagacaagatctcatcctggagtgcagtggcacgatcatggctcactgcagcctcgacctcctgggctcaagcgatcctcccacctcaacctcccaagtagctgggaccaaaggcacacgctacagcgcccggctaattttattttttgtagagacagcatctccctttgttgcccaaactagtctgtaactcctgggctcaatgaccctcccatctcggcctcccaaagtgctgaaaaaaaagtttcaaagctggatgtggtggctcatgcctgtaatcccagcactttggaggccaaggtgggaggactgtgtgaggccacttttcactctgcaaaggaggggcacgcacagtaagcggaggggcaggggaaagccgggctgctcccaaaagcagcctttgaaggcacgggctcccccatctgccaggcaccgacagacactggaagggtcttcctgctcgtttccaggctgtacctggtgaccacagaggtccccttgcactatgaagtacaggaacctcctttgaaagggcaaacacaaggagggcaagagtcactgagaaccacagtggaggtctagggccctgggccttcagaagcacctggtgaggggtttggaaacccaggttcctgggccatctctgaagatcctgatgagcttgtgcagaggcctgggcactgggggcttcttggaccagcgtgcccttcctaggcatgaggggctcctggcagggcctgctggagccccacccagagtgtgatcccacagtcacccagctgtcaacccagatcccagcacacattctctcaagtggcagggggcagtgcctcgtccaggccaaaggttctcaggggcccttggccaatgtgtccccaggaccagaagcggatggagaagatctcgaagagggtgaatgccatcgaggaggtgaacaacaatgtgaaactgctcacggagatggtgatgagccacagccagggcggcgcagcagctggcagcagcgaggacctcatgaaggtgcacctgcctccctgcctaccccactccctgcccactccacagcccacgcggaccctgacccgcccatcctgctgccctcaggaactgtaccagcgctgtgagcggatgcggcccacgctcttccgactggcgagtgacacagaggacaatgatgaggccttaggtgagcccagggcaggtgctgaggtcaggtccccccctctccctccacctcctgcccccacctcccccaggccctgctaagtatctgcagttggaaggagccaccaccagggggcccccttctccagcaccgaccttgggtttctcctctctgaggacacagagcaggggccgcccccctgttgagaggccctgtgggccagcccccttaacaggcatcttatttactacccgcagctgcacaggaggcagacccatccccttttcacaactggggctaagggaggaaaatgacttgcccagatcacagagcagaacagtggcagagccaggggagacggagggccatctgcccccagaccttcctccctaatgagggtgaatggaagctaagagtgcatcccacagcccaggcagttccagacctgagcctgacggcttctgccagggccacataccaggttcttttccttgatctctgcccacgtgtcagcctgggccacttgggctgcggtctgggtaccatccactccctcattaagcaggagccccacccacaaggctcactgcccagattgccccacaccctggcacctggggaaggcagtgttgccgagggcctgattggtgccaggcactgttctaggccctcagggatctggcactgatcaaagtttgcaaaacgccgggtgcagtggttcacacctgtaatcccagcattttgggaggccaaggtgggaggattgctttagtccaggagttcaagaccagcctgggtaacatagagagacccagtctctatttcaaatatatttatattaaaaaaaaaaaaaaaaggttgacaaaaacttcctcatggtagtttagtgagaggagacagacaataaccaagtccatgagcaccgacagttcgtcacggtggtgagtggcatggaggaagagaagcagggaagggatgaggtggtgcaggagggatttaggacaggcctccctgaggtgagccttgggtgaagacctgaaggcagtaagggatgaagccatgcagagatctggggcagccagagagcagagctggagtggaggcctggaggcgggagcgggcccagtgtgttgagacagcccaggcagtatggcagggagtgaatgagggaagggtgggaggtgagaccagggaggtggcggagggccagagtctcagcagacgagatgggctgtttccctgcccctttcccttcccctcacacacaggctgtgatggatgtggggtcctcgtcccctgccgcccagaggcccccacagtccttcagcctggcctctcccctcctgcctgttccagcggagatcctgcaggccaatgacaacctcacccaggtgatcaacctgtataagcagctggtgcggggtgaggaggtcaacggtgatgccacagccggctccatccctggtgaggaggtggcaggagagctgggagggcacccatcaggctggaggggcacagagagtgcagggtggtgtgctggtctcagagcggctggaatgactgccagggtgaccctggccccttaagatggggaaggccccagggagggagctgggggtgaagtctgtgccaagcctgcagctgtgggggaagaagtctggtgggggagctgagggtttggtgaggacaggcagaagaaggaaggcattctttcatttgacaaatctggcacctgttgtatagggctagatgacaccccagaggctttatgtatcagaaaatgcgaggggggttagaaaagtaaacattacagactcaggtctaataagggtaagatggcagccttggggggtcacaaaaggggttagaattggttctgttagggagaagtggagatggaggcgctgcacggaagcagccaagtttcagcagggccttaaggatgggtagcagtttgcccagtagagctaagaaggaaatacattccggacagaagtaccatcatatgccaaagagaggtcctgttgagcagtttccaggcaggggctggtgtggccaaggaaggggaggcaggagaccagtggtaaagcatcgggggttaggtgttgctcccccgcaacccctgtggactctgagagacacgtgtacacccaggacttgccagcctcttctttcccaccccagggagcacctcggccctgctggatctctcaggcctggatctcccgcctgcgggcaccacctacccagctatgcccacccgccctggcgagcaggccagccctgagcagcccagtgcctcagtttccctgcttgacgacgagctcatgtctctgggtgaggaaggggccaggcctggaggagggcgggctcagcagcagatggggcatgatcccagggcccactcacagctagcggaaccacgtaccccaggtgtggatcctgtggggcacgtggatgagcattaggcccacttcacaactgaggaaactgaggctcggggaagttaggagcttgtgcgaggccacacggccagagggtgaggctggcaacctctaagccggcctcggataagctaaccagcattcaggctctggcagcctggggggaaaccaggggatttccccgcaacaggttagagcctggaattgagaactgtctgggcaaaagttcagcagtttcttcatccaccaagaggagagggagggctctgggctccagagcacccagaggctccagagaagccgaggccagagcgcgagggactcggtgatccaagctggtccagggccaggcctgctgttactcccgggcaggctccggctccagagcccagcaggggccaggcttccccggggggaagcagcaaagcgttcccagctgcccaaaccatttttgggtttccaactgctctcagggcagcagccccatccgagagctgagatcagaacagcctcctcctgagagccactgaagggatgaagagcagatacgttagggccacatcaaaggaatcctcagggatatgttggaagccaagattcagactgtggtttcctgagccagttctgaagcaaaaaccagacccgaaggccttgaagaagtgatggggacccggggcgccctgggcggggtctgcctgggttccaggagtgcttcctttggtggtgcccactactgcactctgtcctgtcttaggtgaccctcacggtctctgcaggcaggtgccgttaatagccccactgcacaatgaggaaacggcagcacagaaaggcgcggtggctcacgcctggaatcccagcactttgggaggccaaggcagagggattacttgaggtcaggagtttgaaactagcctggccaacatggcgaaaccccatgtctattaaaaatacaaaattagctgggcgtggtggcacatgcctgtagtcccagctactggggaggctgatgcaggaaaattgcttgaactggggaagcagaggttgcggtgagccgagatggcaccactgcactccagcctggttgacagagcaaggctccgtctcacaaaaaaaagaaaaagaaaaggaaaaagaaaggctgggtgacttgtgcagaaagggctctaggacttgagctgggctctgatcctgaagccacactctgagcagctgggctgctctgactcgttgttcataagcaaggaaaaggaaatgaggacccggagtgtggagggagagctgaaggggaaggagagctgaggggaaaggaggcccagttgtgagctccctttgtgaacccagcagccagcaccctccctgaagctgcttacgagccccatgcagccgccccctcttcattcagagccaagggtgaccgcagggagaggacctttaccccattctacagagaagtaaaggacggtcaagggacaggaacgttcatacaaggtttatcttcccctgtggagccagccctgggtggcagctacctgaggggcagtgggtggggaagtactgcagggccaccagcccccagccagcagctgcagcaccacctccacaagagaagcgagatgcagccgcacttcctgtccccgcactgcactggcatagttctgagccaccagcttccttctgttttcctctcagaggcaaagcatgggggcacaggagccggaagtgccagggcagcctgcagcctgggcctggggaatggaggaggccctggggccacacagggggctggtcctcactcttcacggcaggggtgggagacaggttcctgtccctcaaggagggtgttcaggcagccttaacctcccccgtctcaagtgatcctcccatctcaggctcctgagtagttgggactacaggtgtgtgccaccacacccggttaattagtttatttttagtagacacacggtttcacctgtgttggccaggccggtattgaactcctggcctcaagtgatccacccaccccagcttcctaaaatgctgggatgacaggcatgagccactgcgcccacctctttttggttttgagatgggggtctcactatattgctcaggctggtctcaaacttctggcttcaactaatcctcccatctcagcctcccaagtagatgggaccacaggcattggctaattttttttccttttattctttaggggtagagtctctatgctgccagggcttatctcaaaccccagcttcagcctcccaaatagctgggattacagacattagccactgcacctggctggtgtctccattttacagatgaggctgtcaccccccaatatcacacagccaagtggcagagttgtgttcaaatgctggcagtcaggccatgctctgtctgagtccagactctgccactttctagctgtgtgttctcgggcaggttatttaccaactttgagtccattttcttatccctaaaagagggctgagaagctcacccctacctttgaaggttgtttgaggattaagcaagaccagcatctgaagggcctgaagcatctagggcatcatcagtgcactttatctctggcctctaagaagtgcatctagaagggacccactgtcacagcttcctggtacccttgcctttgcctgtcaggtagcacttcggtttggacctcactttttcaggatttgttggaaacaagatcccttatcttctctaggtcagatttggggtgaacttggctgacagtattccagggcaggcagaggtcaggctggctggtgacctgctgcctccttcccatcggcagctagttctagggccatccacagggatccccagccctccatagtaccagtgagcctcactggcatgtgccagggccaagagggccttcagcgtcgcctccagtccagccctgtcctcgtattcttggggacactgtggctcagccagcacagtgcctagcccacagtcacccagcaggcgtccctcgagtgggccagtggcaggcacagagctgctctccccttgcctggatgcgtgaggaaaggaacctcttctccctgcagcccagccctgcaggctctctgctgccagatgacgagtgaagatgaaagtcctgatgtctattgtctgtgtgcacagagctttggagtggcctggccaggaagaggggaagcgtgtgtggggtcagcacaaggggttgccgggatcttggttactggttctgctctgctgctggttccctctgaaaatgtgggtttctcccctccgtgctgagcctcagaaaggggtagggagccccatgccagcacacatggcccctcggctctctggcctctgcagggtcagcccagctccttcacctctctcctgctttcccctcaggcctcagtgaccccacacccccttcaggcccaagcctggatggtaccggatggaacagcttccaggtaggaggggaccacaaactagtctggcctgtcccagtcccagggtcagggcagctgggacaagtggcctggagaaactaaaaggatggatgggctctactcaagagcccagggccagggggtggcccaggggcctggagacacccacccagggtacagggcctccccttacctccagctgtatcttccccaagtctcagccttggggctgcagcccagcctttgggattgggattgagatgggcaatccctcttcctttcccttgagggtgacagaggtccctggattgtagaacccccaaccagacccagccaccctgcatcatggacatgggtggtctggggtccccacctctgtggctgctttcccagatgtcatttgcaaggaggacactgagcctcagggcaggatcaggtgatgctgacacctctctagacagccccaccccacctgcatccttttccccacagtcgtcggatgccactgagcccccagcccctgctctggcccaggcccccagtatggaaagccgacccccagcgcagacatccctgccagcaagcagcggtctggacgacctagacctcctggggaagaccctcctgcagcagtcgctgcccccggaatcccagcaagtgcggtggtgagggcccaccatggctggcatggggtggggagcactccctgttcccacaaaccagcaacttctcctgggcttgtccaggcccagcagggagaggctcgttgctgtcttgttttgtaagcagcagatgccaagcagtgcacctgcctctggaaacacaacagtgcccaaggcagacctgggcccactggcctggcctccccccaggtgttcccagctcccttgagaaaggtccagagggccggcagaggggaggacactgggctggagtgaataggtggggtgcagggtggagggagaacacgagctgctccttctaaaggtaagacccaaggccagagagatagccacacgtgccagcctttcctgtgcccctgatctctccatcaccaaagaatcactttttctttttttgagagggagtctcaccctgtcacccaggctggagtacagtggcatgatctcggctcactgcaacctccatctcccaaactcaagcgattctcctacgtcaggctcctgagtagctgggaccacaggtgtgcgctaccacgcccagctagttttttgtattttttatacagaccgggtttcgccatgttgcccaggctggtctcaaactcctgagctcaagcgatctgcccgcctcagcctcccaaagtgttggaattacaggggtgagctaccacgctggccaagaatcacttcttaatgcactgtcccccgattaagggagaagcagcagccaaccccccggctcacactccgggacctgcagaataagagcagcagctgcagctcccccagctccagcgccaccagccttctccacaccgtgtccccagagccccccaggcctccgcagcagcccgtaccaaccgagctctcactggccagcatcactgtgcccctggagtccatcaaacccagtgagtagggctggggcaggtgcaggctgggttgggtcagcttgctgccctgtcaggagctctgtctggggaagctagtgggaaagcagggctcccctggctctgccactggccaaccagaggggagctctgaacaaggccctccccttcccaggagtcagtttccttatctgccccagagcaatcagaggactgctgtacaaactccaggcttatataagcaagaagacctctagggagtaggctctgggccccttccatccccaggaaggcagggcccaggacacagagaggtttggggtctcccccagattacagaactgaaccatgataaagacccagatccaaggctgggtttttccagcccaggagcagtaaggggaccatggcccagccccgggccccaagcagacacatgaggcctggtggtcctcagcattgccctctatgagctccctgtgaccaaagacactacccccacagtgtctcccagcagtgggcagagctgcccctctcaccagtaggagaaccctgagctcagagaaggggagtgactgccgcaaggtcacacagcgtgagactcaccctcaccaagtccctcaccccagcactccaggcagcagccacacagcatcgggggaagctgggctgtgactcggctctggggtgggtgtcctgcctccactatcagactgggggttcacctgccctctctgggcaccgctctgtgcccctgcctgcactgccacccagggtccaggtaaggccccaaaggaggactttgctcttgttgccagtacagcagccagctcctgaggccagccgggtgggggctgggggctgagcggatgtgctgcagctcagctgtcccatcgccctcccaccttctcccacaggcaacatcctgcccgtgactgtgtatgaccagcacggcttccgcatcctcttccattttgcccgggacccactgccagggcgctccgacgtgctggtggtggtggtttccatgctgagcaccgccccccagcccatccgcaacatcgtgttccagtcagctgtccccaaggtgacaagccagtcggacagggcatgcctccctcctctcaaggcagggtgacatggagctgggtggggagccacctgtcagggggcaggtctccctcccttgctgggtggttggtgtagaagggaccagaaggactgagccccaggatccccggaggggagctggcaggctgggcctggttcctcagagcaggacaagcagccagggctagctgtgcccatcctgccatctgcccacaggttatgaaggtgaagctgcagccaccctcgggcacggagctgccagcttttaaccccatcgtccacccctcagcaatcacccaggtcctgctgcttgccaacccccagaaggtaaggggcccccaggcagtgctgcagggtggggacggccacttctcctcctctgacccctctgcctttgccatctcttccccaggagaaggttcgcctccgctacaagctcaccttcaccatgggtgaccagacctacaacgagatgggggatgtggaccagttccccccacctgaaacctggggtagcctctag

SEQ ID NO: 12148 - DNA, 2107 bp, Homo sapiens
ctcgttggcctctctatggtgccgagcgcgcccgttcggacgttgcccctttaatcggcagagggcggtgcccaggaggtcccgcgagagctgcggggggcgggggggcggtgccgaggctgggggccggtggcggatggagcccgcgatggagccggagactctggaggcgcgaatcaatagagccacgaaccccctgaacaaggagctcgactgggccagcatcaacggcttctgcgagcagctcaacgaggactttgaggggcctccactcgccacccggctgctggcccacaagatccagtccccacaggagtgggaggcgatccaggccttgacggtgagaaggggagaggccaccatccgtcccccgccatgtgacgacaccaaggtgctggaaacatgcatgaagagctgcggcaagcggttccacgacgaagtgggcaagttccgctttctcaacgagctcatcaaggtcgtgtctcccaagtatctgggctctcggacatcggagaaggtgaagaacaagatcttggagctcctctacagctggacagtgggcctgcccgaggaggtgaaaatcgcagaggcctaccagatgctaaagaagcaggggattgtaaagtccgaccccaagcttccagatgacactacctttccccttcctcctccacggccgaagaatgtgatctttgaagatgaggagaaatccaagatgctggcccgcctgctgaagagctcccatcccgaagacctccgcgcagccaataagctcatcaaagagatggtgcaggaggaccagaagcggatggagaagatctcgaagagggtgaatgccatcgaggaggtgaacaacaatgtgaaactgctcacggagatggtgatgagccacagccagggcggcgcagcagctggcagcagcgaggacctcatgaaggaactgtaccagcgctgtgagcggatgcggcccacgctcttccgactggcgagtgacacagaggacaatgatgaggccttagcggagatcctgcaggccaatgacaacctcacccaggtgatcaacctgtataagcagctggtgcggggtgaggaggtcaacggtgatgccacagccggctccatccctgggagcacctcggccctgctggatctctcaggcctggatctcccgcctgcgggcaccacctacccagctatgcccacccgccctggcgagcaggccagccctgagcagcccagtgcctcagtttccctgcttgacgacgagctcatgtctctgggcctcagtgaccccacacccccttcaggcccaagcctggatggtaccggatggaacagcttccagtcgtcggatgccactgagcccccagcccctgctctggcccaggcccccagtatggaaagccgacccccagcgcagacatccctgccagcaagcagcggtctggacgacctagacctcctggggaagaccctcctgcagcagtcgctgcccccggaatcccagcaagtgcggtgggagaagcagcagccaaccccccggctcacactccgggacctgcagaataagagcagcagctgcagctcccccagctccagcgccaccagccttctccacaccgtgtccccagagccccccaggcctccgcagcagcccgtaccaaccgagctctcactggccagcatcactgtgcccctggagtccatcaaacccagcaacatcctgcccgtgactgtgtatgaccagcacggcttccgcatcctcttccattttgcccgggacccactgccagggcgctccgacgtgctggtggtggtggtttccatgctgagcaccgccccccagcccatccgcaacatcgtgttccagtcagctgtccccaaggttatgaaggtgaagctgcagccaccctcgggcacggagctgccagcttttaaccccatcgtccacccctcagcaatcacccaggtcctgctgcttgccaacccccagaaggagaaggttcgcctccgctacaagctcaccttcaccatgggtgaccagacctacaacgagatgggggatgtggaccagttccccccacctgaaacctggggtagcctctag

SEQ ID NO: 12149 - DNA, 11211 bp, Homo sapiens
ggtgccgaggctgggggccggtggcggatggagcccgcgatggagccggagactctggaggcgcgaatcagtgagtgtccgggaggggcgcgggccggaccggaaccggaaccgggggcacgaggcgggccccttcccggcgggggcggggtacgggtcgccccctcctcacgccccgcccccggcccgggaggggcggtgtcctcagtcggcccctcagaccctggagcgatggaggaccccggccccggcgcggtccagcggtgggagcgggcgccgcccacctgtcggatccctgggccatgacccctgggacggcgagtgagctgcgccgggaacccccgggacggagagagcagcctccaacccccaaggctcacattgcttcacggagtagcggcccggggaaggagcacgcgagcggttccccggggttgcatctcacacccgggagggagggaccctactattttcaggccccgaatcctccactctctggccctgcatggcgttcctggagcccgcaagtagtcacatttgctcattaccccgtcctggaagggaggacccactgccccatttgattcctcccgccgctcctagtctctagccacatagtgagaaacccccgcaccctacaggcttgggagagtcttagactccagaagtattaataattccaagctccctgtcactcccttcagcctaacccctcagtctccaagatgcctttcccagctcttgctgaacttccttcaaaggcttctacacccctttttttcttgtttctcctcagacgtagcttcctattgcttaggcttcctagcccgcaaaccctccacctgagctccttaacccacagccctgatgatcccctgctctcacagccccgctcctggactctgcctctgaaagccgtggctggcttctccctggtctagtgagggttctctcccaaggctttaactgctgttgggaccccgtcgttgccagggcctcagggaaccctcttggacccgggcacaccggcaactgtctagcgtggtttggggtcatggccggccccttttaagccaggcttgagcagagttgaaccatgaggttggccccagaaccaaacctctagggatgtttcagagtcatcctagccaccagaggggcagggggtggaaaaggggcactcagcagcccttgaccgttgtgaacgccggaagtgtccgcctgggtctcagcagcaactgggctggggggatgggtgggcccctggctaactgatctcagacacaggtcttgagctgtgggtcatacaaaacattctcaggtttagaaacagtgggggttttctgagagtccagagagtctaaaaccaggcagaagttagagatacctgggtttggctgggccctgacacactggggctgggattttctcctttccttccccctttgtgtcctagcagaattgtaagatctttcctcttcccttgtggaggctggaggtaaaggatagcttcttctttttttttttgagacgggttttcactcttgtcacccaggctggagtgcagtggcacaatctcagctctctgcaacctccacctcccgggttcaagtgattctcctgtctcagcctcccgagtagctggaattacaggtgcgccaccacgcccagctatttttgtatttttagtacaggtgggctttcaccatgttggccaggctgatctcgaactcctgacctcaggtgatccgcctatataggcctctcaaagtgttgggattacaggcgttagccactcatccgcccacgtcggcctctcaaagtgttgggattacaggcgtgagccaccgcgcccggcctagtgaggtaaatgatgttattgtcagcactatagagtggcagggtggagtcttaccctgttgtgaaacacctccctccctctctaggtgttctccccaactgcctgctagggagggtactcccctcaggtagaattaagagggctgagggtcaggggccatgggccaaggaggtcagtcagatctccttggatctggaggccctggctttcagccagaggcagggggagaaagatgatgtctcatgatgccagcgcttcctcttcactggcgtctgacccaggagcagtccagaatcagcttctctgacctcactccaactcacgtgtctttgacactttaagggacttcctgttttagggtcttctggctgggtgtcattgaatgggcagtgattctctaactttagactgatgttccccagcctttgtttggggactcggaggcagagtagacagttacccttacccctgggttggggagggtcatattcctggtatccccaggaggtcaacaggggcttcatttttctgagggactagagggtcttgtggagctcctgggacagagatctagatccagagagaacattcgtccttccgatctcagctcagctctgagagccctcccagagagcagctcccgagggctccagagccctccgaaagccctcccagagagcagcccccacctcccaggctgtctgcacttctccttgctatgctttgctctgtaacattttgcaacagtctgcagtacacggggtttgttaatctgagtattcattgtttctcttgctgggcagtgaacttgaggagggcagggattttgtctgttcactgctggagccccagcacccagaatacttaaatctgagttggatgaatggcggccagccactgggattccagggctttgggccccctgccataacatatggcccagggcaggcgccacatgctgggtcagtccccagcctcctgtccacagatccttctctgttctacctcctgggctgtgtccttccacaccctcagctcggtgctcaggcgtgggcagaactggctgggaaggggtggtccttagaggtgggctgtggagaaatgaagatcgagctctggctgccgccatggccttcccatgcaaaaagtattttgtcatccaaaatcaatattttggtcaggcacagtggctcatgcctgtaatcccagcactttgggtggccgaggtgggtggatcatttgaggtcaggagtttgagaccagcctgaccaacatggtgaaattccatctctaccaaaaatacaaaaaaattagctgggcatggtggtggacgcctgtgatcccagctactctcaggaggctgaagcaggagaatcgtttgaacccaggaagctgagattgcagtgagccgagatctcgccactgcactccagcctgggcaacaaagcaagactctttctcaaaaaaaaataaaaataaaaaaatacaggccggacgcagtggctcacacctgtaattccagtactttgggaggccgaggcaggtggatcacgaggttaggagatcaagaccatcctggctaacacagtgaaaccccgtctctactaaaaatacaaaaaaaaaaaaaattagccgggcgtggtggcgggcacctgtagtcccagctactcgggaggctgaggcaggagaatggcgtgaacctgggaggcagagtttgcagtcagccgagatcacaccactgcactccagcctgggcgatagagcgagactccgtctcaaaaaaaaaaaaaaatacagccgggcacggtggctcacacctgtaatcccagcactttgggaggccaaggtgggcggatcacaaggtcaggagattgagaccatcctggctaacatggtgaaaccctgtctctactaaaaatacaaaaaaaaattagccgggcgtggtggcgggtgcctgtagtcccagctactcgggaggctgaggaaggagaatggcatgaacctgggaggcggagcttgcagtgagccgagatcgtgccactgcactccagcctgggcaacagcgtgagactcgtctcaaaaaaaaaaaaaaatccatatttcattccagctttacaagatggggaaatggaggttcagggaagcatgtaagctagattgttgtttaaccagtattgggggttaaaggggtagctgtctggtcgtgtttacaccacttcatgtagacctgttggccctctttccttgccactatccatttctggattcagtcttccccagaacctcaccctttgcctgccctcagctgactgctcattcatttgccaaggggagacaggtgtggacatgagtggctgggatgcagtgccgtagcaggctgggggacacaaaagagaactgacccagcactgctaccctgggcaggagtagaggattagagaaggggacaccggagccactcccaagggaatgaaggctttctgaacctggtgtgatggtaagactcacactccttactgaggcccctcattctctgcctcgtgtggttacccgcatctttcctgcccatacagccatgcgtgggtcagaggtgtaccagctccagcctgggtgactcctcctggtccctgcttgtgtgttgcctcttccaggcagcctcctcagccccaaactgaactgagtcccctcctctgtgtttcttttttgtttgtttgagacggagtcacccagagtcccagctctgtcacccaggctggagggcagtggcgagacctcggctcactccaagctccgcctcccgggttcacgccattctcctgcctcagcctcccaagtagctgggactacaggcacccaccaccaagcccggctaatttttgtatttttagtagagatggggtttcatcgtgttagctaggatggtcttgatctcctgacctcgtgatccacccacctcagcctcccaaagtgctgggattacaggcatgagccaccgtgcctggcccctcctctgtgtttctacagctccttggcttccctctgtcacacgttattgagaacctagcttcccttggcccacttcccggctacacagctccttgagggcgggactatgatttttttctcccttacttctggatctcctctgagcataaatttcatgagaattatggagacactgttctcagcagaatcagaggaggtggggctggcgtgatgggtccagctgcaggggtgggaggagtggggaggaggggaagggccctgaccatagtctctaaaagtggggccctttggagggcagctgtgctcatctgtctgtctacacccacaatcaggtcttgaggctgtctgggcaggaaggcagggggagagctttcccacgtgctcagtcacactcctctcccactcctgaccacacctttgccagggtcaggagtggaagagcaggaatcccactgccgggccacaatgaccccagctctcctcttccagatagagccacgaaccccctgaacaaggagctcgactgggccagcatcaacggcttctgcgagcagctcaacgaggactttgaggggtaggtggccgtccccacttgtttgcactgccctgcactctccagaacccagtctcgggtacaatggcctgggtgggtggagacccggttttcattctgaacgtattcacaaagtgatgaggatggggcacttggcactgaatgctgtttgggtgtcactctctggggtgggccttgctggaaccatttaacaggtaaagaaatcaaggctcagaggactcagatctgcccccacatctcacagggagaaaatgctagtcctgagcttggtaagacccaggcctgctggacctgcagccagtgctttgtggggaaaggccccccagagggagaactgcatgttccccaattgggaggaggccagtaggccctttgctcaaggacgaaccagaactacctgtgttagaatcacctagaatgttggccaggcacagtggctcatgcctgtaatcccagcactttggaaggccgaagtgggtggattacctgaggtcaggagtttgagaccagcgtggccaacatggtgacaccccgtctctactaaaaatgcaaaaattagctgggcgtggtggcacgtgcctgtaatcccagctactcaggaggctgaggcaggagaattgcttgaacccaagagacagagattgtaatgagccgagattgcgccactgccctgcagcctgggcagcagagtgagactctgtctcgaaaaacaaaacaaagaattacctagaatgcttgtcagaaatgtacattcttagccaggcatggtggtgcacacctgtaatctcagttactggggaggccaaggcgggaggatcccttgaggctagcctgggcaacatagcggggcaacatagcgagacatcatctcttaaaaaataaaaaaataggccaggcatggtggctcacgcctgtaatcccagcactttgggaggccaaggcaggtggatcacctgaggttgggagttcaagaccagccttaccaacatagagaaatcccatctctactaaaaatacaaaaaaaattagccgggcatggtggtgcatgcctgtaatcccagctactcgggaggctgaggcaggagaattgcttgaacccaggaggtagaagttgcagtgagccaagatcgtgccattgcactccagcctgggcgacggagtgaaactccgtctcaaaaaataagtaaataaataaataataaaaaataaggccgggtgtggtggcttacgtctataatcccagcactctgggaggctgaggcaggtggatcacgaggccaacagattgagaccatcctggccaacatggtgaaaccccatctctactaaaaatgcaaaaattagcaaggagcggtggtgtgcgcctgtagtcccagctactcgggaggctgaggcaggagaatcgcttgaacccgggaggctgaggttgcagtgagccaagattgcattactgcactccagcatggtgacggtgagactccatctcaaaaaaataaataaagtaaatgcaccttcttgggctgcccccagactcgactgtccagtggggggttgggagtggacattctttttatttttttttttgagatggagtctcgctctgtcgcccaggctggagtgcattggcacgatctcggctcactgcaagctccgcctcccaggttcacgcggttctcctgcctcagcctccccagcagctgggactacaggcgcctgccaccacacccggctaatttttttgtattttttagtagagacagggtttcaccgtgttagccaggatggtctcgatctcctgacctcatgatccacctgcctcggcctcccaaagtgctgggattacaggcatgagccaccgtgcccagctgggagtggacattcttagtgggctccccaggcgatactaaagtttcgggaccacaaacagcggtgtgtgtgctttggagtcgtgctgcttgggtacgagtcctgtcccctctcttagctgagtaaccttgggtgagtggttgcctctgagtgtcagtttcttcacagttgaaggaacttcccacggtgaggcgggaatgaccgtgctgcctgccttatgcagcttaggcaggaaagtgcatgtgagcctcctcacacatgaccagttcagcacatgtgagctcttaccgtcactggtgacgggtcttttacagtctgttagatgatgtcaccacctccaccatgaagctgctctgatttgccacagcagaacgtcctttgccaccttgagttcccagggaactgtgtctgcccgtctctcatggcatattgtaattgtctctatggcaagccaagccaaggacgtgacacatcagagttcttaggccagcccaggagctgagctcataccttttgaaggtccctgcctgcagtctctgtctggccctgccctgccacaatctcaggccataactgatctggagagggagctgggcctttgcatatgcctgcagaaaccttagagggctgaagtctcggcggcgggctggggtggtgaccctcccctagggcgaccagggccccttggaggagggctgcagtcccagcggcctggggtcgtggccctagggtgaccgggactccgtggcgactctggctctgtgttgttcctcccacccaggcctccactcgccacccggctgctggcccacaagatccagtccccacaggagtgggaggcgatccaggccttgacggtgagaaggggagaggccaccatccgtcccccgccatgtgacgacaccaagggaggccaagactgaggttcttggggtccataaggctcttcagagcccaagagagttgtgctaagatggcccaggatggaggtccgggcctgccccaagggtcccaccacagccagcgggctggcctcccaccccagcatccatacacgtaggcctgttgctgagggaaggccctctagggtcatctggtccaggggttctttgcttcagctgcacatcggctgcctctccaggaagcgtgttcaacacatggaatcagggctccacccagacctgccgaggccacactcctggagtatctgcatccagagatctgcacgtttgtaaagctaaggggtggtgcttgggctcaggcctgaggttttgcatctgttcaatagcagaggagagaggggtgtactgtctgtggcccccagcatgggccacataccaacccaccatggagcaaagctgattttaagtggtggtagagatacagtttctcttttaatacttacgtgtttagttgggtgcagtggcttatacctgtaatttcagcacttggggaggccaaggcaggaggcttgcttgaggcaaggagttcaaggctacagtgagctatgattgtgccactgtactccagactggacaacagagtgagaccccatctctaaataataatcattattgttacatatttgttttaacatttttttctcaagtataactagtcctatgatttcatagatgtagcttaggataaggccaaggtaggtgttgcctatataaggtttttttaaaaaaggaaaaataggccgggctggtggctcacgcctgtaatcccagcactttggcaggctgaggcgggcagatcacctgagatcaggagttcaagatcagcctgaccaacatggagaagccccatgtctactaaaaataaaaaattagcgaggcgtggtgggcgggcgcctgtaatcccagctacttgggaggctgaggcagaagaatcatttgaacccaggaggcagaggttacagtgagccgagatcgtgctactgcattccaacctgggcaacaagagtgaaactctgtctcaaaaaaaaaaaaaaaaaggaaaaatagtaagaaaataatgtacagttggtactcagatgtggggcctaagctatgaatgggactagagcattgctacaggttgggcattgctgggcactgtatgtaggtcgcctgaccctatctcccatgggagtgatgaccagtcccagaggcctgtgtgactctgaatcttccaacctcacaggccattccctcccttctgaaagcccacccatgggcttctggcccctgtccaaggcgtgggagggaggccacggcctctgatgcacctgggcgtcccctcccatcccccctccctgcacaggtgctggaaacatgcatgaagagctgcggcaagcggttccacgacgaagtgggcaagttccgctttctcaacgagctcatcaaggtcgtgtctcccaaggttggtgcccccagcccaagctcagacctgccctgtcggatgtggggagaggaaagaggaccttcagattgtggagcgacttttccagggagcctcccactggggtgtcacctcagccccccattagaactcagacctaggaaaaacacagatctcttctcacagtcctctcatacctgattctgggacagcctggggtctcggaggagtgtttccaggctggccaggggcggggcagccatggagctgcccggtgcttaggaagaaatgattccagggaatacataagctgacagatggctgtatgtgtcagccatctctggcctgaaatcactccctgtggacctggccacagaaccctacctggtctctggcaggtttccctgtccccaccacacaagagcaacctccctggacctcagcatccaaggccacagacctgagtgatggagcctgctggctccagacgggccatccccggctcagcccaaggagtcttcccacagaccatgaacgtttctttttctttatttttttgagatggagtcttgctctgtcacccaggctggagtgcaatggcatgatctctacgctccacaacctccacctcctgggttcaagcaattctcctgcctcaacctcccaagtagctgggattgcaggtgcacgccaccatgcccggctaattttttgtatttttagtagagatggggtttcaccatgttggccaggctggtcttgaactcctgacctcatgatctgcctgtcgtggactcccaaagtgccgggattacaggcgtgagccaccatgcccggcctacctaccgtgaacattttttttttttttttgacaaggagtttcactcttgtcacccaagctggagtgcaatggcgcgatctcagctcactgcaccctccacctcccaggtttgagcaattctcctgcctcatcctccagagtagctgcaattataggtgcccaccaccaagcctggctaattttttatttttagtagagacagggtttcaccatattggtcaggctggtcttgaactcctgacctcatgatccacctgcattggcctcccaaagtgctgggattacaggcgtgagccatggcctccggcctactgtgaacatttcttaagctgtttgagtgacagcccacccccttggcccttccttgctcagacccatcctttgaccagagctactgaataatccatatggcctcccattctcctcccaacaggggactctgctgtgagagccactttccccagcccagtttgctgctaggagacggagagtaggcccagggcctcccagttccaccctcacccctccctgggcagcctggagacctctggctcctctttcctgggatgtcaaggctaagtccccagagccgactatgagcaggcctgtccctcatgtcagttctgcatcctcaccatggtgccatctagcaggtggggaaacagacactgagggctg

SEQ ID NO: 12150 - DNA, 575 bp, Homo sapiens
ggtgccgaggctgggggccggtggcggatggagcccgcgatggagccggagactctggaggcgcgaatcaatagagccacgaaccccctgaacaaggagctcgactgggccagcatcaacggcttctgcgagcagctcaacgaggactttgaggggcctccactcgccacccggctgctggcccacaagatccagtccccacaggagtgggaggcgatccaggccttgacggtgctggaaacatgcatgaagagctgcggcaagcggttccacgacgaagtgggcaagttccgctttctcaacgagctcatcaaggtcgtgtctcccaaggggactctgctgtgagagccactttccccagcccagtttgctgctaggagacggagagtaggcccagggcctcccagttccaccctcacccctccctgggcagcctggagacctctggctcctctttcctgggatgtcaaggctaagtccccagagccgactatgagcaggcctgtccctcatgtcagttctgcatcctcaccatggtgccatctagcaggtggggaaacagacactgagggctg

SEQ ID NO: 12151 - DNA, 24524 bp, Homo sapiens
agtcggcccctcagaccctggagcgatggaggaccccggccccggcgcggtccagcggtgggagcgggcgccgcccacctgtcggatccctgggccatgacccctgggacggcgagtgagctgcgccgggaacccccgggacggagagagcagcctccaacccccaaggctcacattgcttcacggagtagcggcccggggaaggagcacgcgagcggttccccggggttgcatctcacacccgggagggagggaccctactattttcaggccccgaatcctccactctctggccctgcatggcgttcctggagcccgcaagtagtcacatttgctcattaccccgtcctggaagggaggacccactgccccatttgattcctcccgccgctcctagtctctagccacatagtgagaaacccccgcaccctacaggcttgggagagtcttagactccagaagtattaataattccaagctccctgtcactcccttcagcctaacccctcagtctccaagatgcctttcccagctcttgctgaacttccttcaaaggcttctacacccctttttttcttgtttctcctcagacgtagcttcctattgcttaggcttcctagcccgcaaaccctccacctgagctccttaacccacagccctgatgatcccctgctctcacagccccgctcctggactctgcctctgaaagccgtggctggcttctccctggtctagtgagggttctctcccaaggctttaactgctgttgggaccccgtcgttgccagggcctcagggaaccctcttggacccgggcacaccggcaactgtctagcgtggtttggggtcatggccggccccttttaagccaggcttgagcagagttgaaccatgaggttggccccagaaccaaacctctagggatgtttcagagtcatcctagccaccagaggggcagggggtggaaaaggggcactcagcagcccttgaccgttgtgaacgccggaagtgtccgcctgggtctcagcagcaactgggctggggggatgggtgggcccctggctaactgatctcagacacaggtcttgagctgtgggtcatacaaaacattctcaggtttagaaacagtgggggttttctgagagtccagagagtctaaaaccaggcagaagttagagatacctgggtttggctgggccctgacacactggggctgggattttctcctttccttccccctttgtgtcctagcagaattgtaagatctttcctcttcccttgtggaggctggaggtaaaggatagcttcttctttttttttttgagacgggttttcactcttgtcacccaggctggagtgcagtggcacaatctcagctctctgcaacctccacctcccgggttcaagtgattctcctgtctcagcctcccgagtagctggaattacaggtgcgccaccacgcccagctatttttgtatttttagtacaggtgggctttcaccatgttggccaggctgatctcgaactcctgacctcaggtgatccgcctatataggcctctcaaagtgttgggattacaggcgttagccactcatccgcccacgtcggcctctcaaagtgttgggattacaggcgtgagccaccgcgcccggcctagtgaggtaaatgatgttattgtcagcactatagagtggcagggtggagtcttaccctgttgtgaaacacctccctccctctctaggtgttctccccaactgcctgctagggagggtactcccctcaggtagaattaagagggctgagggtcaggggccatgggccaaggaggtcagtcagatctccttggatctggaggccctggctttcagccagaggcagggggagaaagatgatgtctcatgatgccagcgcttcctcttcactggcgtctgacccaggagcagtccagaatcagcttctctgacctcactccaactcacgtgtctttgacactttaagggacttcctgttttagggtcttctggctgggtgtcattgaatgggcagtgattctctaactttagactgatgttccccagcctttgtttggggactcggaggcagagtagacagttacccttacccctgggttggggagggtcatattcctggtatccccaggaggtcaacaggggcttcatttttctgagggactagagggtcttgtggagctcctgggacagagatctagatccagagagaacattcgtccttccgatctcagctcagctctgagagccctcccagagagcagctcccgagggctccagagccctccgaaagccctcccagagagcagcccccacctcccaggctgtctgcacttctccttgctatgctttgctctgtaacattttgcaacagtctgcagtacacggggtttgttaatctgagtattcattgtttctcttgctgggcagtgaacttgaggagggcagggattttgtctgttcactgctggagccccagcacccagaatacttaaatctgagttggatgaatggcggccagccactgggattccagggctttgggccccctgccataacatatggcccagggcaggcgccacatgctgggtcagtccccagcctcctgtccacagatccttctctgttctacctcctgggctgtgtccttccacaccctcagctcggtgctcaggcgtgggcagaactggctgggaaggggtggtccttagaggtgggctgtggagaaatgaagatcgagctctggctgccgccatggccttcccatgcaaaaagtattttgtcatccaaaatcaatattttggtcaggcacagtggctcatgcctgtaatcccagcactttgggtggccgaggtgggtggatcatttgaggtcaggagtttgagaccagcctgaccaacatggtgaaattccatctctaccaaaaatacaaaaaaattagctgggcatggtggtggacgcctgtgatcccagctactctcaggaggctgaagcaggagaatcgtttgaacccaggaagctgagattgcagtgagccgagatctcgccactgcactccagcctgggcaacaaagcaagactctttctcaaaaaaaaataaaaataaaaaaatacaggccggacgcagtggctcacacctgtaattccagtactttgggaggccgaggcaggtggatcacgaggttaggagatcaagaccatcctggctaacacagtgaaaccccgtctctactaaaaatacaaaaaaaaaaaaaattagccgggcgtggtggcgggcacctgtagtcccagctactcgggaggctgaggcaggagaatggcgtgaacctgggaggcagagtttgcagtcagccgagatcacaccactgcactccagcctgggcgatagagcgagactccgtctcaaaaaaaaaaaaaaatacagccgggcacggtggctcacacctgtaatcccagcactttgggaggccaaggtgggcggatcacaaggtcaggagattgagaccatcctggctaacatggtgaaaccctgtctctactaaaaatacaaaaaaaaattagccgggcgtggtggcgggtgcctgtagtcccagctactcgggaggctgaggaaggagaatggcatgaacctgggaggcggagcttgcagtgagccgagatcgtgccactgcactccagcctgggcaacagcgtgagactcgtctcaaaaaaaaaaaaaaatccatatttcattccagctttacaagatggggaaatggaggttcagggaagcatgtaagctagattgttgtttaaccagtattgggggttaaaggggtagctgtctggtcgtgtttacaccacttcatgtagacctgttggccctctttccttgccactatccatttctggattcagtcttccccagaacctcaccctttgcctgccctcagctgactgctcattcatttgccaaggggagacaggtgtggacatgagtggctgggatgcagtgccgtagcaggctgggggacacaaaagagaactgacccagcactgctaccctgggcaggagtagaggattagagaaggggacaccggagccactcccaagggaatgaaggctttctgaacctggtgtgatggtaagactcacactccttactgaggcccctcattctctgcctcgtgtggttacccgcatctttcctgcccatacagccatgcgtgggtcagaggtgtaccagctccagcctgggtgactcctcctggtccctgcttgtgtgttgcctcttccaggcagcctcctcagccccaaactgaactgagtcccctcctctgtgtttcttttttgtttgtttgagacggagtcacccagagtcccagctctgtcacccaggctggagggcagtggcgagacctcggctcactccaagctccgcctcccgggttcacgccattctcctgcctcagcctcccaagtagctgggactacaggcacccaccaccaagcccggctaatttttgtatttttagtagagatggggtttcatcgtgttagctaggatggtcttgatctcctgacctcgtgatccacccacctcagcctcccaaagtgctgggattacaggcatgagccaccgtgcctggcccctcctctgtgtttctacagctccttggcttccctctgtcacacgttattgagaacctagcttcccttggcccacttcccggctacacagctccttgagggcgggactatgatttttttctcccttacttctggatctcctctgagcataaatttcatgagaattatggagacactgttctcagcagaatcagaggaggtggggctggcgtgatgggtccagctgcaggggtgggaggagtggggaggaggggaagggccctgaccatagtctctaaaagtggggccctttggagggcagctgtgctcatctgtctgtctacacccacaatcaggtcttgaggctgtctgggcaggaaggcagggggagagctttcccacgtgctcagtcacactcctctcccactcctgaccacacctttgccagggtcaggagtggaagagcaggaatcccactgccgggccacaatgaccccagctctcctcttccagatagagccacgaaccccctgaacaaggagctcgactgggccagcatcaacggcttctgcgagcagctcaacgaggactttgaggggtaggtggccgtccccacttgtttgcactgccctgcactctccagaacccagtctcgggtacaatggcctgggtgggtggagacccggttttcattctgaacgtattcacaaagtgatgaggatggggcacttggcactgaatgctgtttgggtgtcactctctggggtgggccttgctggaaccatttaacaggtaaagaaatcaaggctcagaggactcagatctgcccccacatctcacagggagaaaatgctagtcctgagcttggtaagacccaggcctgctggacctgcagccagtgctttgtggggaaaggccccccagagggagaactgcatgttccccaattgggaggaggccagtaggccctttgctcaaggacgaaccagaactacctgtgttagaatcacctagaatgttggccaggcacagtggctcatgcctgtaatcccagcactttggaaggccgaagtgggtggattacctgaggtcaggagtttgagaccagcgtggccaacatggtgacaccccgtctctactaaaaatgcaaaaattagctgggcgtggtggcacgtgcctgtaatcccagctactcaggaggctgaggcaggagaattgcttgaacccaagagacagagattgtaatgagccgagattgcgccactgccctgcagcctgggcagcagagtgagactctgtctcgaaaaacaaaacaaagaattacctagaatgcttgtcagaaatgtacattcttagccaggcatggtggtgcacacctgtaatctcagttactggggaggccaaggcgggaggatcccttgaggctagcctgggcaacatagcggggcaacatagcgagacatcatctcttaaaaaataaaaaaataggccaggcatggtggctcacgcctgtaatcccagcactttgggaggccaaggcaggtggatcacctgaggttgggagttcaagaccagccttaccaacatagagaaatcccatctctactaaaaatacaaaaaaaattagccgggcatggtggtgcatgcctgtaatcccagctactcgggaggctgaggcaggagaattgcttgaacccaggaggtagaagttgcagtgagccaagatcgtgccattgcactccagcctgggcgacggagtgaaactccgtctcaaaaaataagtaaataaataaataataaaaaataaggccgggtgtggtggcttacgtctataatcccagcactctgggaggctgaggcaggtggatcacgaggccaacagattgagaccatcctggccaacatggtgaaaccccatctctactaaaaatgcaaaaattagcaaggagcggtggtgtgcgcctgtagtcccagctactcgggaggctgaggcaggagaatcgcttgaacccgggaggctgaggttgcagtgagccaagattgcattactgcactccagcatggtgacggtgagactccatctcaaaaaaataaataaagtaaatgcaccttcttgggctgcccccagactcgactgtccagtggggggttgggagtggacattctttttatttttttttttgagatggagtctcgctctgtcgcccaggctggagtgcattggcacgatctcggctcactgcaagctccgcctcccaggttcacgcggttctcctgcctcagcctccccagcagctgggactacaggcgcctgccaccacacccggctaatttttttgtattttttagtagagacagggtttcaccgtgttagccaggatggtctcgatctcctgacctcatgatccacctgcctcggcctcccaaagtgctgggattacaggcatgagccaccgtgcccagctgggagtggacattcttagtgggctccccaggcgatactaaagtttcgggaccacaaacagcggtgtgtgtgctttggagtcgtgctgcttgggtacgagtcctgtcccctctcttagctgagtaaccttgggtgagtggttgcctctgagtgtcagtttcttcacagttgaaggaacttcccacggtgaggcgggaatgaccgtgctgcctgccttatgcagcttaggcaggaaagtgcatgtgagcctcctcacacatgaccagttcagcacatgtgagctcttaccgtcactggtgacgggtcttttacagtctgttagatgatgtcaccacctccaccatgaagctgctctgatttgccacagcagaacgtcctttgccaccttgagttcccagggaactgtgtctgcccgtctctcatggcatattgtaattgtctctatggcaagccaagccaaggacgtgacacatcagagttcttaggccagcccaggagctgagctcataccttttgaaggtccctgcctgcagtctctgtctggccctgccctgccacaatctcaggccataactgatctggagagggagctgggcctttgcatatgcctgcagaaaccttagagggctgaagtctcggcggcgggctggggtggtgaccctcccctagggcgaccagggccccttggaggagggctgcagtcccagcggcctggggtcgtggccctagggtgaccgggactccgtggcgactctggctctgtgttgttcctcccacccaggcctccactcgccacccggctgctggcccacaagatccagtccccacaggagtgggaggcgatccaggccttgacggtgagaaggggagaggccaccatccgtcccccgccatgtgacgacaccaagggaggccaagactgaggttcttggggtccataaggctcttcagagcccaagagagttgtgctaagatggcccaggatggaggtccgggcctgccccaagggtcccaccacagccagcgggctggcctcccaccccagcatccatacacgtaggcctgttgctgagggaaggccctctagggtcatctggtccaggggttctttgcttcagctgcacatcggctgcctctccaggaagcgtgttcaacacatggaatcagggctccacccagacctgccgaggccacactcctggagtatctgcatccagagatctgcacgtttgtaaagctaaggggtggtgcttgggctcaggcctgaggttttgcatctgttcaatagcagaggagagaggggtgtactgtctgtggcccccagcatgggccacataccaacccaccatggagcaaagctgattttaagtggtggtagagatacagtttctcttttaatacttacgtgtttagttgggtgcagtggcttatacctgtaatttcagcacttggggaggccaaggcaggaggcttgcttgaggcaaggagttcaaggctacagtgagctatgattgtgccactgtactccagactggacaacagagtgagaccccatctctaaataataatcattattgttacatatttgttttaacatttttttctcaagtataactagtcctatgatttcatagatgtagcttaggataaggccaaggtaggtgttgcctatataaggtttttttaaaaaaggaaaaataggccgggctggtggctcacgcctgtaatcccagcactttggcaggctgaggcgggcagatcacctgagatcaggagttcaagatcagcctgaccaacatggagaagccccatgtctactaaaaataaaaaattagcgaggcgtggtgggcgggcgcctgtaatcccagctacttgggaggctgaggcagaagaatcatttgaacccaggaggcagaggttacagtgagccgagatcgtgctactgcattccaacctgggcaacaagagtgaaactctgtctcaaaaaaaaaaaaaaaaaggaaaaatagtaagaaaataatgtacagttggtactcagatgtggggcctaagctatgaatgggactagagcattgctacaggttgggcattgctgggcactgtatgtaggtcgcctgaccctatctcccatgggagtgatgaccagtcccagaggcctgtgtgactctgaatcttccaacctcacaggccattccctcccttctgaaagcccacccatgggcttctggcccctgtccaaggcgtgggagggaggccacggcctctgatgcacctgggcgtcccctcccatcccccctccctgcacaggtgctggaaacatgcatgaagagctgcggcaagcggttccacgacgaagtgggcaagttccgctttctcaacgagctcatcaaggtcgtgtctcccaaggttggtgcccccagcccaagctcagacctgccctgtcggatgtggggagaggaaagaggaccttcagattgtggagcgacttttccagggagcctcccactggggtgtcacctcagccccccattagaactcagacctaggaaaaacacagatctcttctcacagtcctctcatacctgattctgggacagcctggggtctcggaggagtgtttccaggctggccaggggcggggcagccatggagctgcccggtgcttaggaagaaatgattccagggaatacataagctgacagatggctgtatgtgtcagccatctctggcctgaaatcactccctgtggacctggccacagaaccctacctggtctctggcaggtttccctgtccccaccacacaagagcaacctccctggacctcagcatccaaggccacagacctgagtgatggagcctgctggctccagacgggccatccccggctcagcccaaggagtcttcccacagaccatgaacgtttctttttctttatttttttgagatggagtcttgctctgtcacccaggctggagtgcaatggcatgatctctacgctccacaacctccacctcctgggttcaagcaattctcctgcctcaacctcccaagtagctgggattgcaggtgcacgccaccatgcccggctaattttttgtatttttagtagagatggggtttcaccatgttggccaggctggtcttgaactcctgacctcatgatctgcctgtcgtggactcccaaagtgccgggattacaggcgtgagccaccatgcccggcctacctaccgtgaacattttttttttttttttgacaaggagtttcactcttgtcacccaagctggagtgcaatggcgcgatctcagctcactgcaccctccacctcccaggtttgagcaattctcctgcctcatcctccagagtagctgcaattataggtgcccaccaccaagcctggctaattttttatttttagtagagacagggtttcaccatattggtcaggctggtcttgaactcctgacctcatgatccacctgcattggcctcccaaagtgctgggattacaggcgtgagccatggcctccggcctactgtgaacatttcttaagctgtttgagtgacagcccacccccttggcccttccttgctcagacccatcctttgaccagagctactgaataatccatatggcctcccattctcctcccaacaggggactctgctgtgagagccactttccccagcccagtttgctgctaggagacggagagtaggcccagggcctcccagttccaccctcacccctccctgggcagcctggagacctctggctcctctttcctgggatgtcaaggctaagtccccagagccgactatgagcaggcctgtccctcatgtcagttctgcatcctcaccatggtgccatctagcaggtggggaaacagacactgagggctgacccagctaataagtggcaggggtagtaggtgaactcagtctaccccaggctggttgggcggggctatgaggaccctgtaggctagagggcttcccggggagtcctggggaggcagtagggtgtggacagggcttgagactgaagtgagtggggctgggcagtatcaaaggcctccccactgtgtccctgaagtatctgggctctcggacatcggagaaggtgaagaacaagatcttggagctcctctacagctggacagtgggcctgcccgaggaggtgaaaatcgcagaggcctaccagatgctaaagaagcagggtgaggcacacagagggtggggggcgaccagggcctgccttcccctcccccaccatgagctggggctccagcggcttcaggggcttctgagccagcaaggtcatgggtctgtcctttaacttctggagaaagtacatacagctagtgcggccttctgtgctctgcctgaggctagcttgggtggaaagaaggtgagttcgaatcaagcttcccctcaaagagtggtctccagggagtggcctcaaaatatgggtccccaaaccatctcccccaggcaattttgatggagtaggtaggagtaggcccaggccactaagagtccagagccagcgtgctggcaaaagactgacctccctcttctgtcctacccttgcctgcccccatccccatgtcacccctacccctgggcctgggacatattgacagcctttctgacactcatctaatccagggattgtaaagtccgaccccaagcttccagatgacactacctttccccttcctcctccacggccgaagaatgtgatctttgaagatgaggagaaatccaaggtgagactccaaggaggcacatatggggactctgagcccaggtgggggtccgtgggttctgacctctagctgccctggcatcagccgttggaacagaggcacacactgagcccaggcatcgttgtagatgatgggcgctgtttactgggcatttaatatgtgctgagtatgtcccatacagcatccccacatttaataaacaggagtgtgtctggtgtccctggagtttgtttgagggtattttgaccttttctataagaatttcactaattttttgttaaaagttaataaaattaaaacttgtgggtgaaaagttaaacagcccaggaggaggtaagattaaaataaagaggttaaagtaaaaggtcccctctccccagtcttagccccagccctggagagtgtctactgttaaggttcttgtacattgtcccagaaaggttctcagccatggggatataaggagcaccatttgttgattacttatttctgctaggcgctgtggtgtgcactttacatgcagtgtctccgctggcctgtggccaccctatcaggcatcagtaaattctcaccatttcacagagagcttaagtaacttactcaggtcccacaggcaggaagcggggagccatcatgtgactccagtcttctgacccctggcccaggtgctgccctcacggtcacacccctctgtctctgcagatgctggcccgcctgctgaagagctcccatcccgaagacctccgcgcagccaataagctcatcaaagagatggtgcaggaggtagcggccgagcccagagcacagggaggaggcgggatgggggtattgagctgggccactgagatggggctgtatgcatcttcacatggaaggagccctgcagtgacccgggctggcacagcagagaagctgatgctgggggaccagggtgtgcagggaagaattcccggcagcctgggtgacttgctctggatgggcctttgggaggctggctacctcttcgtcaaaagttagaaatgaattaggccttagtatatttttaaaaatactaagtatttttaaaattactttttagtatttaaaaatactaagtatttttaaaattattttttagtatttaaaaatactaatgaatatatgtaagtatgtatacgtgtatgtatatgaggagactttttttgagacaaggactcactctctagcccaagcaggagtacagtggcatgatcatggctcattgcagcctcaacctcccgggctcaagcagtcctcccacctcaacctcccaggccgctggcactaaatacgtgtgccaccacaccggtatagtttttgtattttttttgtggagaaggggtttcgccacattgcccaggctggtctggaactcctgggctcaagcaatctgcctgcctcggcgtcccaaagtgctgggattacaggcatgagccactgcctggccaaatgtttaatttttaagtaaatatacatatgttgcctgggtgcctgctgaaactttttttttttaattgagacaagatctcatcctggagtgcagtggcacgatcatggctcactgcagcctcgacctcctgggctcaagcgatcctcccacctcaacctcccaagtagctgggaccaaaggcacacgctacagcgcccggctaattttattttttgtagagacagcatctccctttgttgcccaaactagtctgtaactcctgggctcaatgaccctcccatctcggcctcccaaagtgctgaaaaaaaagtttcaaagctggatgtggtggctcatgcctgtaatcccagcactttggaggccaaggtgggaggactgtgtgaggccacttttcactctgcaaaggaggggcacgcacagtaagcggaggggcaggggaaagccgggctgctcccaaaagcagcctttgaaggcacgggctcccccatctgccaggcaccgacagacactggaagggtcttcctgctcgtttccaggctgtacctggtgaccacagaggtccccttgcactatgaagtacaggaacctcctttgaaagggcaaacacaaggagggcaagagtcactgagaaccacagtggaggtctagggccctgggccttcagaagcacctggtgaggggtttggaaacccaggttcctgggccatctctgaagatcctgatgagcttgtgcagaggcctgggcactgggggcttcttggaccagcgtgcccttcctaggcatgaggggctcctggcagggcctgctggagccccacccagagtgtgatcccacagtcacccagctgtcaacccagatcccagcacacattctctcaagtggcagggggcagtgcctcgtccaggccaaaggttctcaggggcccttggccaatgtgtccccaggaccagaagcggatggagaagatctcgaagagggtgaatgccatcgaggaggtgaacaacaatgtgaaactgctcacggagatggtgatgagccacagccagggcggcgcagcagctggcagcagcgaggacctcatgaaggtgcacctgcctccctgcctaccccactccctgcccactccacagcccacgcggaccctgacccgcccatcctgctgccctcaggaactgtaccagcgctgtgagcggatgcggcccacgctcttccgactggcgagtgacacagaggacaatgatgaggccttaggtgagcccagggcaggtgctgaggtcaggtccccccctctccctccacctcctgcccccacctcccccaggccctgctaagtatctgcagttggaaggagccaccaccagggggcccccttctccagcaccgaccttgggtttctcctctctgaggacacagagcaggggccgcccccctgttgagaggccctgtgggccagcccccttaacaggcatcttatttactacccgcagctgcacaggaggcagacccatccccttttcacaactggggctaagggaggaaaatgacttgcccagatcacagagcagaacagtggcagagccaggggagacggagggccatctgcccccagaccttcctccctaatgagggtgaatggaagctaagagtgcatcccacagcccaggcagttccagacctgagcctgacggcttctgccagggccacataccaggttcttttccttgatctctgcccacgtgtcagcctgggccacttgggctgcggtctgggtaccatccactccctcattaagcaggagccccacccacaaggctcactgcccagattgccccacaccctggcacctggggaaggcagtgttgccgagggcctgattggtgccaggcactgttctaggccctcagggatctggcactgatcaaagtttgcaaaacgccgggtgcagtggttcacacctgtaatcccagcattttgggaggccaaggtgggaggattgctttagtccaggagttcaagaccagcctgggtaacatagagagacccagtctctatttcaaatatatttatattaaaaaaaaaaaaaaaaggttgacaaaaacttcctcatggtagtttagtgagaggagacagacaataaccaagtccatgagcaccgacagttcgtcacggtggtgagtggcatggaggaagagaagcagggaagggatgaggtggtgcaggagggatttaggacaggcctccctgaggtgagccttgggtgaagacctgaaggcagtaagggatgaagccatgcagagatctggggcagccagagagcagagctggagtggaggcctggaggcgggagcgggcccagtgtgttgagacagcccaggcagtatggcagggagtgaatgagggaagggtgggaggtgagaccagggaggtggcggagggccagagtctcagcagacgagatgggctgtttccctgcccctttcccttcccctcacacacaggctgtgatggatgtggggtcctcgtcccctgccgcccagaggcccccacagtccttcagcctggcctctcccctcctgcctgttccagcggagatcctgcaggccaatgacaacctcacccaggtgatcaacctgtataagcagctggtgcggggtgaggaggtcaacggtgatgccacagccggctccatccctggtgaggaggtggcaggagagctgggagggcacccatcaggctggaggggcacagagagtgcagggtggtgtgctggtctcagagcggctggaatgactgccagggtgaccctggccccttaagatggggaaggccccagggagggagctgggggtgaagtctgtgccaagcctgcagctgtgggggaagaagtctggtgggggagctgagggtttggtgaggacaggcagaagaaggaaggcattctttcatttgacaaatctggcacctgttgtatagggctagatgacaccccagaggctttatgtatcagaaaatgcgaggggggttagaaaagtaaacattacagactcaggtctaataagggtaagatggcagccttggggggtcacaaaaggggttagaattggttctgttagggagaagtggagatggaggcgctgcacggaagcagccaagtttcagcagggccttaaggatgggtagcagtttgcccagtagagctaagaaggaaatacattccggacagaagtaccatcatatgccaaagagaggtcctgttgagcagtttccaggcaggggctggtgtggccaaggaaggggaggcaggagaccagtggtaaagcatcgggggttaggtgttgctcccccgcaacccctgtggactctgagagacacgtgtacacccaggacttgccagcctcttctttcccaccccagggagcacctcggccctgctggatctctcaggcctggatctcccgcctgcgggcaccacctacccagctatgcccacccgccctggcgagcaggccagccctgagcagcccagtgcctcagtttccctgcttgacgacgagctcatgtctctgggtgaggaaggggccaggcctggaggagggcgggctcagcagcagatggggcatgatcccagggcccactcacagctagcggaaccacgtaccccaggtgtggatcctgtggggcacgtggatgagcattaggcccacttcacaactgaggaaactgaggctcggggaagttaggagcttgtgcgaggccacacggccagagggtgaggctggcaacctctaagccggcctcggataagctaaccagcattcaggctctggcagcctggggggaaaccaggggatttccccgcaacaggttagagcctggaattgagaactgtctgggcaaaagttcagcagtttcttcatccaccaagaggagagggagggctctgggctccagagcacccagaggctccagagaagccgaggccagagcgcgagggactcggtgatccaagctggtccagggccaggcctgctgttactcccgggcaggctccggctccagagcccagcaggggccaggcttccccggggggaagcagcaaagcgttcccagctgcccaaaccatttttgggtttccaactgctctcagggcagcagccccatccgagagctgagatcagaacagcctcctcctgagagccactgaagggatgaagagcagatacgttagggccacatcaaaggaatcctcagggatatgttggaagccaagattcagactgtggtttcctgagccagttctgaagcaaaaaccagacccgaaggccttgaagaagtgatggggacccggggcgccctgggcggggtctgcctgggttccaggagtgcttcctttggtggtgcccactactgcactctgtcctgtcttaggtgaccctcacggtctctgcaggcaggtgccgttaatagccccactgcacaatgaggaaacggcagcacagaaaggcgcggtggctcacgcctggaatcccagcactttgggaggccaaggcagagggattacttgaggtcaggagtttgaaactagcctggccaacatggcgaaaccccatgtctattaaaaatacaaaattagctgggcgtggtggcacatgcctgtagtcccagctactggggaggctgatgcaggaaaattgcttgaactggggaagcagaggttgcggtgagccgagatggcaccactgcactccagcctggttgacagagcaaggctccgtctcacaaaaaaaagaaaaagaaaaggaaaaagaaaggctgggtgacttgtgcagaaagggctctaggacttgagctgggctctgatcctgaagccacactctgagcagctgggctgctctgactcgttgttcataagcaaggaaaaggaaatgaggacccggagtgtggagggagagctgaaggggaaggagagctgaggggaaaggaggcccagttgtgagctccctttgtgaacccagcagccagcaccctccctgaagctgcttacgagccccatgcagccgccccctcttcattcagagccaagggtgaccgcagggagaggacctttaccccattctacagagaagtaaaggacggtcaagggacaggaacgttcatacaaggtttatcttcccctgtggagccagccctgggtggcagctacctgaggggcagtgggtggggaagtactgcagggccaccagcccccagccagcagctgcagcaccacctccacaagagaagcgagatgcagccgcacttcctgtccccgcactgcactggcatagttctgagccaccagcttccttctgttttcctctcagaggcaaagcatgggggcacaggagccggaagtgccagggcagcctgcagcctgggcctggggaatggaggaggccctggggccacacagggggctggtcctcactcttcacggcaggggtgggagacaggttcctgtccctcaaggagggtgttcaggcagccttaacctcccccgtctcaagtgatcctcccatctcaggctcctgagtagttgggactacaggtgtgtgccaccacacccggttaattagtttatttttagtagacacacggtttcacctgtgttggccaggccggtattgaactcctggcctcaagtgatccacccaccccagcttcctaaaatgctgggatgacaggcatgagccactgcgcccacctctttttggttttgagatgggggtctcactatattgctcaggctggtctcaaacttctggcttcaactaatcctcccatctcagcctcccaagtagatgggaccacaggcattggctaattttttttccttttattctttaggggtagagtctctatgctgccagggcttatctcaaaccccagcttcagcctcccaaatagctgggattacagacattagccactgcacctggctggtgtctccattttacagatgaggctgtcaccccccaatatcacacagccaagtggcagagttgtgttcaaatgctggcagtcaggccatgctctgtctgagtccagactctgccactttctagctgtgtgttctcgggcaggttatttaccaactttgagtccattttcttatccctaaaagagggctgagaagctcacccctacctttgaaggttgtttgaggattaagcaagaccagcatctgaagggcctgaagcatctagggcatcatcagtgcactttatctctggcctctaagaagtgcatctagaagggacccactgtcacagcttcctggtacccttgcctttgcctgtcaggtagcacttcggtttggacctcactttttcaggatttgttggaaacaagatcccttatcttctctaggtcagatttggggtgaacttggctgacagtattccagggcaggcagaggtcaggctggctggtgacctgctgcctccttcccatcggcagctagttctagggccatccacagggatccccagccctccatagtaccagtgagcctcactggcatgtgccagggccaagagggccttcagcgtcgcctccagtccagccctgtcctcgtattcttggggacactgtggctcagccagcacagtgcctagcccacagtcacccagcaggcgtccctcgagtgggccagtggcaggcacagagctgctctccccttgcctggatgcgtgaggaaaggaacctcttctccctgcagcccagccctgcaggctctctgctgccagatgacgagtgaagatgaaagtcctgatgtctattgtctgtgtgcacagagctttggagtggcctggccaggaagaggggaagcgtgtgtggggtcagcacaaggggttgccgggatcttggttactggttctgctctgctgctggttccctctgaaaatgtgggtttctcccctccgtgctgagcctcagaaaggggtagggagccccatgccagcacacatggcccctcggctctctggcctctgcagggtcagcccagctccttcacctctctcctgctttcccctcaggcctcagtgaccccacacccccttcaggcccaagcctggatggtaccggatggaacagcttccaggtaggaggggaccacaaactagtctggcctgtcccagtcccagggtcagggcagctgggacaagtggcctggagaaactaaaaggatggatgggctctactcaagagcccagggccagggggtggcccaggggcctggagacacccacccagggtacagggcctccccttacctccagctgtatcttccccaagtctcagccttggggctgcagcccagcctttgggattgggattgagatgggcaatccctcttcctttcccttgagggtgacagaggtccctggattgtagaacccccaaccagacccagccaccctgcatcatggacatgggtggtctggggtccccacctctgtggctgctttcccagatgtcatttgcaaggaggacactgagcctcagggcaggatcaggtgatgctgacacctctctagacagccccaccccacctgcatccttttccccacagtcgtcggatgccactgagcccccagcccctgctctggcccaggcccccagtatggaaagccgacccccagcgcagacatccctgccagcaagcagcggtctggacgacctagacctcctggggaagaccctcctgcagcagtcgctgcccccggaatcccagcaagtgcggtggtgagggcccaccatggctggcatggggtggggagcactccctgttcccacaaaccagcaacttctcctgggcttgtccaggcccagcagggagaggctcgttgctgtcttgttttgtaagcagcagatgccaagcagtgcacctgcctctggaaacacaacagtgcccaaggcagacctgggcccactggcctggcctccccccaggtgttcccagctcccttgagaaaggtccagagggccggcagaggggaggacactgggctggagtgaataggtggggtgcagggtggagggagaacacgagctgctccttctaaaggtaagacccaaggccagagagatagccacacgtgccagcctttcctgtgcccctgatctctccatcaccaaagaatcactttttctttttttgagagggagtctcaccctgtcacccaggctggagtacagtggcatgatctcggctcactgcaacctccatctcccaaactcaagcgattctcctacgtcaggctcctgagtagctgggaccacaggtgtgcgctaccacgcccagctagttttttgtattttttatacagaccgggtttcgccatgttgcccaggctggtctcaaactcctgagctcaagcgatctgcccgcctcagcctcccaaagtgttggaattacaggggtgagctaccacgctggccaagaatcacttcttaatgcactgtcccccgattaagggagaagcagcagccaaccccccggctcacactccgggacctgcagaataagagcagcagctgcagctcccccagctccagcgccaccagccttctccacaccgtgtccccagagccccccaggcctccgcagcagcccgtaccaaccgagctctcactggccagcatcactgtgcccctggagtccatcaaacccagtgagtagggctggggcaggtgcaggctgggttgggtcagcttgctgccctgtcaggagctctgtctggggaagctagtgggaaagcagggctcccctggctctgccactggccaaccagaggggagctctgaacaaggccctccccttcccaggagtcagtttccttatctgccccagagcaatcagaggactgctgtacaaactccaggcttatataagcaagaagacctctagggagtaggctctgggccccttccatccccaggaaggcagggcccaggacacagagaggtttggggtctcccccagattacagaactgaaccatgataaagacccagatccaaggctgggtttttccagcccaggagcagtaaggggaccatggcccagccccgggccccaagcagacacatgaggcctggtggtcctcagcattgccctctatgagctccctgtgaccaaagacactacccccacagtgtctcccagcagtgggcagagctgcccctctcaccagtaggagaaccctgagctcagagaaggggagtgactgccgcaaggtcacacagcgtgagactcaccctcaccaagtccctcaccccagcactccaggcagcagccacacagcatcgggggaagctgggctgtgactcggctctggggtgggtgtcctgcctccactatcagactgggggttcacctgccctctctgggcaccgctctgtgcccctgcctgcactgccacccagggtccaggtaaggccccaaaggaggactttgctcttgttgccagtacagcagccagctcctgaggccagccgggtgggggctgggggctgagcggatgtgctgcagctcagctgtcccatcgccctcccaccttctcccacaggcaacatcctgcccgtgactgtgtatgaccagcacggcttccgcatcctcttccattttgcccgggacccactgccagggcgctccgacgtgctggtggtggtggtttccatgctgagcaccgccccccagcccatccgcaacatcgtgttccagtcagctgtccccaaggtgacaagccagtcggacagggcatgcctccctcctctcaaggcagggtgacatggagctgggtggggagccacctgtcagggggcaggtctccctcccttgctgggtggttggtgtagaagggaccagaaggactgagccccaggatccccggaggggagctggcaggctgggcctggttcctcagagcaggacaagcagccagggctagctgtgcccatcctgccatctgcccacaggttatgaaggtgaagctgcagccaccctcgggcacggagctgccagcttttaaccccatcgtccacccctcagcaatcacccaggtcctgctgcttgccaacccccagaaggtaaggggcccccaggcagtgctgcagggtggggacggccacttctcctcctctgacccctctgcctttgccatctcttccccaggagaaggttcgcctccgctacaagctcaccttcaccatgggtgaccagacctacaacgagatgggggatgtggaccagttccccccacctgaaacctggggtagcctctagaacagaggggctggggagaggaaggggcagagggaccggtcactgtccagcctggagggaggcattggtggccaaggacaccctttgttgcccatggccattcacccccaggcctggtgcttctccccacacccctgtaggcctcaagtgactcttccccctcctgctccggccccgcccctgctgagccaaacccagtaggaggctgggcctgggtttgtgccgctggggtctccatcaccgggacctggagagggaggggctgtgtagccttggaagaacttgggtcatggggaggaagcacagctgttggggaagggccaggacctcaggcccagccccaaccccagctggggtggggtcttccccacctgtctcttatgccttatgggaaggcccagccataactcgggggccatgctggagctggggaccagcttaggcctcctccataggaacccagtgactggggggtgacgcctacacccccagctatttgcactctggtgtgtggtttgactctgcttttcttccggattggccctgtggtcacagcctcagggggccaggctgggggaacctcacctggcccgtactcctgggggtttccctttgccattgggccccctgagggactgtgggggctcaagggtaatgccagaggcccatggccccagcgaggggctgtggggcacctagagttctcggtgtgtctccttcattcattggcctctgctggggcctcctatgggtgtcttacgtctgtccatccatctgtccgtggtcagaagtggggtcagtgtgtgagtgagagcaggagtatttatgaaaataaaacgtcgtttttcctgg

SEQ ID NO: 12152 - DNA, 3205 bp, Homo sapiens
agtcggcccctcagaccctggagcgatggaggaccccggccccggcgcggtccagcggtgggagcgggcgccgcccacctgtcggatccctgggccatgacccctgggacggcgagtgagctgcgccgggaacccccgggacggagagagcagcctccaacccccaaggctcacattgcttcacggagtagcggcccggggaaggagcacgcgagcggttccccggggttgcatctcacacccgggagggagggaccctactattttcaggccccgaatcctccactctctggccctgcatggcgttcctggagcccgtgtggacatgagtggctgggatgcagtgccgtagcaggctgggggacacaaaagagaactgacccagcactgctaccctgggcaggagtagaggattagagaaggggacaccggagccactcccaagggaatgaaggctttctgaacctggtgtgatgatagagccacgaaccccctgaacaaggagctcgactgggccagcatcaacggcttctgcgagcagctcaacgaggactttgaggggcctccactcgccacccggctgctggcccacaagatccagtccccacaggagtgggaggcgatccaggccttgacggtgctggaaacatgcatgaagagctgcggcaagcggttccacgacgaagtgggcaagttccgctttctcaacgagctcatcaaggtcgtgtctcccaagtatctgggctctcggacatcggagaaggtgaagaacaagatcttggagctcctctacagctggacagtgggcctgcccgaggaggtgaaaatcgcagaggcctaccagatgctaaagaagcaggggattgtaaagtccgaccccaagcttccagatgacactacctttccccttcctcctccacggccgaagaatgtgatctttgaagatgaggagaaatccaagatgctggcccgcctgctgaagagctcccatcccgaagacctccgcgcagccaataagctcatcaaagagatggtgcaggaggaccagaagcggatggagaagatctcgaagagggtgaatgccatcgaggaggtgaacaacaatgtgaaactgctcacggagatggtgatgagccacagccagggcggcgcagcagctggcagcagcgaggacctcatgaaggaactgtaccagcgctgtgagcggatgcggcccacgctcttccgactggcgagtgacacagaggacaatgatgaggccttagcggagatcctgcaggccaatgacaacctcacccaggtgatcaacctgtataagcagctggtgcggggtgaggaggtcaacggtgatgccacagccggctccatccctgggagcacctcggccctgctggatctctcaggcctggatctcccgcctgcgggcaccacctacccagctatgcccacccgccctggcgagcaggccagccctgagcagcccagtgcctcagtttccctgcttgacgacgagctcatgtctctgggcctcagtgaccccacacccccttcaggcccaagcctggatggtaccggatggaacagcttccagtcgtcggatgccactgagcccccagcccctgctctggcccaggcccccagtatggaaagccgacccccagcgcagacatccctgccagcaagcagcggtctggacgacctagacctcctggggaagaccctcctgcagcagtcgctgcccccggaatcccagcaagtgcggtgggagaagcagcagccaaccccccggctcacactccgggacctgcagaataagagcagcagctgcagctcccccagctccagcgccaccagccttctccacaccgtgtccccagagccccccaggcctccgcagcagcccgtaccaaccgagctctcactggccagcatcactgtgcccctggagtccatcaaacccagcaacatcctgcccgtgactgtgtatgaccagcacggcttccgcatcctcttccattttgcccgggacccactgccagggcgctccgacgtgctggtggtggtggtttccatgctgagcaccgccccccagcccatccgcaacatcgtgttccagtcagctgtccccaaggttatgaaggtgaagctgcagccaccctcgggcacggagctgccagcttttaaccccatcgtccacccctcagcaatcacccaggtcctgctgcttgccaacccccagaaggagaaggttcgcctccgctacaagctcaccttcaccatgggtgaccagacctacaacgagatgggggatgtggaccagttccccccacctgaaacctggggtagcctctagaacagaggggctggggagaggaaggggcagagggaccggtcactgtccagcctggagggaggcattggtggccaaggacaccctttgttgcccatggccattcacccccaggcctggtgcttctccccacacccctgtaggcctcaagtgactcttccccctcctgctccggccccgcccctgctgagccaaacccagtaggaggctgggcctgggtttgtgccgctggggtctccatcaccgggacctggagagggaggggctgtgtagccttggaagaacttgggtcatggggaggaagcacagctgttggggaagggccaggacctcaggcccagccccaaccccagctggggtggggtcttccccacctgtctcttatgccttatgggaaggcccagccataactcgggggccatgctggagctggggaccagcttaggcctcctccataggaacccagtgactggggggtgacgcctacacccccagctatttgcactctggtgtgtggtttgactctgcttttcttccggattggccctgtggtcacagcctcagggggccaggctgggggaacctcacctggcccgtactcctgggggtttccctttgccattgggccccctgagggactgtgggggctcaagggtaatgccagaggcccatggccccagcgaggggctgtggggcacctagagttctcggtgtgtctccttcattcattggcctctgctggggcctcctatgggtgtcttacgtctgtccatccatctgtccgtggtcagaagtggggtcagtgtgtgagtgagagcaggagtatttatgaaaataaaacgtcgtttttcctgg

SEQ ID NO: 12153 - DNA, 11316 bp, Homo sapiens
gggccccttcccggcgggggcggggtacgggtcgccccctcctcacgccccgcccccggcccgggaggggcggtgtcctcagtcggcccctcagaccctggagcgatggaggaccccggccccggcgcggtccagcggtgggagcgggcgccgcccacctgtcggatccctgggccatgacccctgggacggcgagtgagctgcgccgggaacccccgggacggagagagcagcctccaacccccaaggctcacattgcttcacggagtagcggcccggggaaggagcacgcgagcggttccccggggttgcatctcacacccgggagggagggaccctactattttcaggccccgaatcctccactctctggccctgcatggcgttcctggagcccgcaagtagtcacatttgctcattaccccgtcctggaagggaggacccactgccccatttgattcctcccgccgctcctagtctctagccacatagtgagaaacccccgcaccctacaggcttgggagagtcttagactccagaagtattaataattccaagctccctgtcactcccttcagcctaacccctcagtctccaagatgcctttcccagctcttgctgaacttccttcaaaggcttctacacccctttttttcttgtttctcctcagacgtagcttcctattgcttaggcttcctagcccgcaaaccctccacctgagctccttaacccacagccctgatgatcccctgctctcacagccccgctcctggactctgcctctgaaagccgtggctggcttctccctggtctagtgagggttctctcccaaggctttaactgctgttgggaccccgtcgttgccagggcctcagggaaccctcttggacccgggcacaccggcaactgtctagcgtggtttggggtcatggccggccccttttaagccaggcttgagcagagttgaaccatgaggttggccccagaaccaaacctctagggatgtttcagagtcatcctagccaccagaggggcagggggtggaaaaggggcactcagcagcccttgaccgttgtgaacgccggaagtgtccgcctgggtctcagcagcaactgggctggggggatgggtgggcccctggctaactgatctcagacacaggtcttgagctgtgggtcatacaaaacattctcaggtttagaaacagtgggggttttctgagagtccagagagtctaaaaccaggcagaagttagagatacctgggtttggctgggccctgacacactggggctgggattttctcctttccttccccctttgtgtcctagcagaattgtaagatctttcctcttcccttgtggaggctggaggtaaaggatagcttcttctttttttttttgagacgggttttcactcttgtcacccaggctggagtgcagtggcacaatctcagctctctgcaacctccacctcccgggttcaagtgattctcctgtctcagcctcccgagtagctggaattacaggtgcgccaccacgcccagctatttttgtatttttagtacaggtgggctttcaccatgttggccaggctgatctcgaactcctgacctcaggtgatccgcctatataggcctctcaaagtgttgggattacaggcgttagccactcatccgcccacgtcggcctctcaaagtgttgggattacaggcgtgagccaccgcgcccggcctagtgaggtaaatgatgttattgtcagcactatagagtggcagggtggagtcttaccctgttgtgaaacacctccctccctctctaggtgttctccccaactgcctgctagggagggtactcccctcaggtagaattaagagggctgagggtcaggggccatgggccaaggaggtcagtcagatctccttggatctggaggccctggctttcagccagaggcagggggagaaagatgatgtctcatgatgccagcgcttcctcttcactggcgtctgacccaggagcagtccagaatcagcttctctgacctcactccaactcacgtgtctttgacactttaagggacttcctgttttagggtcttctggctgggtgtcattgaatgggcagtgattctctaactttagactgatgttccccagcctttgtttggggactcggaggcagagtagacagttacccttacccctgggttggggagggtcatattcctggtatccccaggaggtcaacaggggcttcatttttctgagggactagagggtcttgtggagctcctgggacagagatctagatccagagagaacattcgtccttccgatctcagctcagctctgagagccctcccagagagcagctcccgagggctccagagccctccgaaagccctcccagagagcagcccccacctcccaggctgtctgcacttctccttgctatgctttgctctgtaacattttgcaacagtctgcagtacacggggtttgttaatctgagtattcattgtttctcttgctgggcagtgaacttgaggagggcagggattttgtctgttcactgctggagccccagcacccagaatacttaaatctgagttggatgaatggcggccagccactgggattccagggctttgggccccctgccataacatatggcccagggcaggcgccacatgctgggtcagtccccagcctcctgtccacagatccttctctgttctacctcctgggctgtgtccttccacaccctcagctcggtgctcaggcgtgggcagaactggctgggaaggggtggtccttagaggtgggctgtggagaaatgaagatcgagctctggctgccgccatggccttcccatgcaaaaagtattttgtcatccaaaatcaatattttggtcaggcacagtggctcatgcctgtaatcccagcactttgggtggccgaggtgggtggatcatttgaggtcaggagtttgagaccagcctgaccaacatggtgaaattccatctctaccaaaaatacaaaaaaattagctgggcatggtggtggacgcctgtgatcccagctactctcaggaggctgaagcaggagaatcgtttgaacccaggaagctgagattgcagtgagccgagatctcgccactgcactccagcctgggcaacaaagcaagactctttctcaaaaaaaaataaaaataaaaaaatacaggccggacgcagtggctcacacctgtaattccagtactttgggaggccgaggcaggtggatcacgaggttaggagatcaagaccatcctggctaacacagtgaaaccccgtctctactaaaaatacaaaaaaaaaaaaaattagccgggcgtggtggcgggcacctgtagtcccagctactcgggaggctgaggcaggagaatggcgtgaacctgggaggcagagtttgcagtcagccgagatcacaccactgcactccagcctgggcgatagagcgagactccgtctcaaaaaaaaaaaaaaatacagccgggcacggtggctcacacctgtaatcccagcactttgggaggccaaggtgggcggatcacaaggtcaggagattgagaccatcctggctaacatggtgaaaccctgtctctactaaaaatacaaaaaaaaattagccgggcgtggtggcgggtgcctgtagtcccagctactcgggaggctgaggaaggagaatggcatgaacctgggaggcggagcttgcagtgagccgagatcgtgccactgcactccagcctgggcaacagcgtgagactcgtctcaaaaaaaaaaaaaaatccatatttcattccagctttacaagatggggaaatggaggttcagggaagcatgtaagctagattgttgtttaaccagtattgggggttaaaggggtagctgtctggtcgtgtttacaccacttcatgtagacctgttggccctctttccttgccactatccatttctggattcagtcttccccagaacctcaccctttgcctgccctcagctgactgctcattcatttgccaaggggagacaggtgtggacatgagtggctgggatgcagtgccgtagcaggctgggggacacaaaagagaactgacccagcactgctaccctgggcaggagtagaggattagagaaggggacaccggagccactcccaagggaatgaaggctttctgaacctggtgtgatggtaagactcacactccttactgaggcccctcattctctgcctcgtgtggttacccgcatctttcctgcccatacagccatgcgtgggtcagaggtgtaccagctccagcctgggtgactcctcctggtccctgcttgtgtgttgcctcttccaggcagcctcctcagccccaaactgaactgagtcccctcctctgtgtttcttttttgtttgtttgagacggagtcacccagagtcccagctctgtcacccaggctggagggcagtggcgagacctcggctcactccaagctccgcctcccgggttcacgccattctcctgcctcagcctcccaagtagctgggactacaggcacccaccaccaagcccggctaatttttgtatttttagtagagatggggtttcatcgtgttagctaggatggtcttgatctcctgacctcgtgatccacccacctcagcctcccaaagtgctgggattacaggcatgagccaccgtgcctggcccctcctctgtgtttctacagctccttggcttccctctgtcacacgttattgagaacctagcttcccttggcccacttcccggctacacagctccttgagggcgggactatgatttttttctcccttacttctggatctcctctgagcataaatttcatgagaattatggagacactgttctcagcagaatcagaggaggtggggctggcgtgatgggtccagctgcaggggtgggaggagtggggaggaggggaagggccctgaccatagtctctaaaagtggggccctttggagggcagctgtgctcatctgtctgtctacacccacaatcaggtcttgaggctgtctgggcaggaaggcagggggagagctttcccacgtgctcagtcacactcctctcccactcctgaccacacctttgccagggtcaggagtggaagagcaggaatcccactgccgggccacaatgaccccagctctcctcttccagatagagccacgaaccccctgaacaaggagctcgactgggccagcatcaacggcttctgcgagcagctcaacgaggactttgaggggtaggtggccgtccccacttgtttgcactgccctgcactctccagaacccagtctcgggtacaatggcctgggtgggtggagacccggttttcattctgaacgtattcacaaagtgatgaggatggggcacttggcactgaatgctgtttgggtgtcactctctggggtgggccttgctggaaccatttaacaggtaaagaaatcaaggctcagaggactcagatctgcccccacatctcacagggagaaaatgctagtcctgagcttggtaagacccaggcctgctggacctgcagccagtgctttgtggggaaaggccccccagagggagaactgcatgttccccaattgggaggaggccagtaggccctttgctcaaggacgaaccagaactacctgtgttagaatcacctagaatgttggccaggcacagtggctcatgcctgtaatcccagcactttggaaggccgaagtgggtggattacctgaggtcaggagtttgagaccagcgtggccaacatggtgacaccccgtctctactaaaaatgcaaaaattagctgggcgtggtggcacgtgcctgtaatcccagctactcaggaggctgaggcaggagaattgcttgaacccaagagacagagattgtaatgagccgagattgcgccactgccctgcagcctgggcagcagagtgagactctgtctcgaaaaacaaaacaaagaattacctagaatgcttgtcagaaatgtacattcttagccaggcatggtggtgcacacctgtaatctcagttactggggaggccaaggcgggaggatcccttgaggctagcctgggcaacatagcggggcaacatagcgagacatcatctcttaaaaaataaaaaaataggccaggcatggtggctcacgcctgtaatcccagcactttgggaggccaaggcaggtggatcacctgaggttgggagttcaagaccagccttaccaacatagagaaatcccatctctactaaaaatacaaaaaaaattagccgggcatggtggtgcatgcctgtaatcccagctactcgggaggctgaggcaggagaattgcttgaacccaggaggtagaagttgcagtgagccaagatcgtgccattgcactccagcctgggcgacggagtgaaactccgtctcaaaaaataagtaaataaataaataataaaaaataaggccgggtgtggtggcttacgtctataatcccagcactctgggaggctgaggcaggtggatcacgaggccaacagattgagaccatcctggccaacatggtgaaaccccatctctactaaaaatgcaaaaattagcaaggagcggtggtgtgcgcctgtagtcccagctactcgggaggctgaggcaggagaatcgcttgaacccgggaggctgaggttgcagtgagccaagattgcattactgcactccagcatggtgacggtgagactccatctcaaaaaaataaataaagtaaatgcaccttcttgggctgcccccagactcgactgtccagtggggggttgggagtggacattctttttatttttttttttgagatggagtctcgctctgtcgcccaggctggagtgcattggcacgatctcggctcactgcaagctccgcctcccaggttcacgcggttctcctgcctcagcctccccagcagctgggactacaggcgcctgccaccacacccggctaatttttttgtattttttagtagagacagggtttcaccgtgttagccaggatggtctcgatctcctgacctcatgatccacctgcctcggcctcccaaagtgctgggattacaggcatgagccaccgtgcccagctgggagtggacattcttagtgggctccccaggcgatactaaagtttcgggaccacaaacagcggtgtgtgtgctttggagtcgtgctgcttgggtacgagtcctgtcccctctcttagctgagtaaccttgggtgagtggttgcctctgagtgtcagtttcttcacagttgaaggaacttcccacggtgaggcgggaatgaccgtgctgcctgccttatgcagcttaggcaggaaagtgcatgtgagcctcctcacacatgaccagttcagcacatgtgagctcttaccgtcactggtgacgggtcttttacagtctgttagatgatgtcaccacctccaccatgaagctgctctgatttgccacagcagaacgtcctttgccaccttgagttcccagggaactgtgtctgcccgtctctcatggcatattgtaattgtctctatggcaagccaagccaaggacgtgacacatcagagttcttaggccagcccaggagctgagctcataccttttgaaggtccctgcctgcagtctctgtctggccctgccctgccacaatctcaggccataactgatctggagagggagctgggcctttgcatatgcctgcagaaaccttagagggctgaagtctcggcggcgggctggggtggtgaccctcccctagggcgaccagggccccttggaggagggctgcagtcccagcggcctggggtcgtggccctagggtgaccgggactccgtggcgactctggctctgtgttgttcctcccacccaggcctccactcgccacccggctgctggcccacaagatccagtccccacaggagtgggaggcgatccaggccttgacggtgagaaggggagaggccaccatccgtcccccgccatgtgacgacaccaagggaggccaagactgaggttcttggggtccataaggctcttcagagcccaagagagttgtgctaagatggcccaggatggaggtccgggcctgccccaagggtcccaccacagccagcgggctggcctcccaccccagcatccatacacgtaggcctgttgctgagggaaggccctctagggtcatctggtccaggggttctttgcttcagctgcacatcggctgcctctccaggaagcgtgttcaacacatggaatcagggctccacccagacctgccgaggccacactcctggagtatctgcatccagagatctgcacgtttgtaaagctaaggggtggtgcttgggctcaggcctgaggttttgcatctgttcaatagcagaggagagaggggtgtactgtctgtggcccccagcatgggccacataccaacccaccatggagcaaagctgattttaagtggtggtagagatacagtttctcttttaatacttacgtgtttagttgggtgcagtggcttatacctgtaatttcagcacttggggaggccaaggcaggaggcttgcttgaggcaaggagttcaaggctacagtgagctatgattgtgccactgtactccagactggacaacagagtgagaccccatctctaaataataatcattattgttacatatttgttttaacatttttttctcaagtataactagtcctatgatttcatagatgtagcttaggataaggccaaggtaggtgttgcctatataaggtttttttaaaaaaggaaaaataggccgggctggtggctcacgcctgtaatcccagcactttggcaggctgaggcgggcagatcacctgagatcaggagttcaagatcagcctgaccaacatggagaagccccatgtctactaaaaataaaaaattagcgaggcgtggtgggcgggcgcctgtaatcccagctacttgggaggctgaggcagaagaatcatttgaacccaggaggcagaggttacagtgagccgagatcgtgctactgcattccaacctgggcaacaagagtgaaactctgtctcaaaaaaaaaaaaaaaaaggaaaaatagtaagaaaataatgtacagttggtactcagatgtggggcctaagctatgaatgggactagagcattgctacaggttgggcattgctgggcactgtatgtaggtcgcctgaccctatctcccatgggagtgatgaccagtcccagaggcctgtgtgactctgaatcttccaacctcacaggccattccctcccttctgaaagcccacccatgggcttctggcccctgtccaaggcgtgggagggaggccacggcctctgatgcacctgggcgtcccctcccatcccccctccctgcacaggtgctggaaacatgcatgaagagctgcggcaagcggttccacgacgaagtgggcaagttccgctttctcaacgagctcatcaaggtcgtgtctcccaaggttggtgcccccagcccaagctcagacctgccctgtcggatgtggggagaggaaagaggaccttcagattgtggagcgacttttccagggagcctcccactggggtgtcacctcagccccccattagaactcagacctaggaaaaacacagatctcttctcacagtcctctcatacctgattctgggacagcctggggtctcggaggagtgtttccaggctggccaggggcggggcagccatggagctgcccggtgcttaggaagaaatgattccagggaatacataagctgacagatggctgtatgtgtcagccatctctggcctgaaatcactccctgtggacctggccacagaaccctacctggtctctggcaggtttccctgtccccaccacacaagagcaacctccctggacctcagcatccaaggccacagacctgagtgatggagcctgctggctccagacgggccatccccggctcagcccaaggagtcttcccacagaccatgaacgtttctttttctttatttttttgagatggagtcttgctctgtcacccaggctggagtgcaatggcatgatctctacgctccacaacctccacctcctgggttcaagcaattctcctgcctcaacctcccaagtagctgggattgcaggtgcacgccaccatgcccggctaattttttgtatttttagtagagatggggtttcaccatgttggccaggctggtcttgaactcctgacctcatgatctgcctgtcgtggactcccaaagtgccgggattacaggcgtgagccaccatgcccggcctacctaccgtgaacattttttttttttttttgacaaggagtttcactcttgtcacccaagctggagtgcaatggcgcgatctcagctcactgcaccctccacctcccaggtttgagcaattctcctgcctcatcctccagagtagctgcaattataggtgcccaccaccaagcctggctaattttttatttttagtagagacagggtttcaccatattggtcaggctggtcttgaactcctgacctcatgatccacctgcattggcctcccaaagtgctgggattacaggcgtgagccatggcctccggcctactgtgaacatttcttaagctgtttgagtgacagcccacccccttggcccttccttgctcagacccatcctttgaccagagctactgaataatccatatggcctcccattctcctcccaacaggggactctgctgtgagagccactttccccagcccagtttgctgctaggagacggagagtaggcccagggcctcccagttccaccctcacccctccctgggcagcctggagacctctggctcctctttcctgggatgtcaaggctaagtccccagagccgactatgagcaggcctgtccctcatgtcagttctgcatcctcaccatggtgccatctagcaggtggggaaacagacactgagggctgacccagctaataagtggcaggggtagtaggtgaactcagtctaccccaggctggttgggcggggctatgaggaccctgtaggctagagggcttcccggggagtcctggggaggcagtagggtgtggacagggcttgagactgaagtgagtggggctgggcagtatcaaaggcctccccactgtgtccctgaagtatctgggctctcggacatcggagaaggtgaagaacaa

SEQ ID NO: 12154 - DNA, 661 bp, Homo sapiens
gggccccttcccggcgggggcggggtacgggtcgccccctcctcacgccccgcccccggcccgggaggggcggtgtcctcagtcggcccctcagaccctggagcgatggaggaccccggccccggcgcggtccagcggtgggagcgggcgccgcccacctgtcggatccctgggccatgacccctgggacggcgagggagacaggtgtggacatgagtggctgggatgcagtgccgtagcaggctgggggacacaaaagagaactgacccagcactgctaccctgggcaggagtagaggattagagaaggggacaccggagccactcccaagggaatgaaggctttctgaacctggtgtgatgatagagccacgaaccccctgaacaaggagctcgactgggccagcatcaacggcttctgcgagcagctcaacgaggactttgaggggcctccactcgccacccggctgctggcccacaagatccagtccccacaggagtgggaggcgatccaggccttgacggtgctggaaacatgcatgaagagctgcggcaagcggttccacgacgaagtgggcaagttccgctttctcaacgagctcatcaaggtcgtgtctcccaagtatctgggctctcggacatcggagaaggtgaagaacaa

SEQ ID NO: 12155 - DNA, 7663 bp, Homo sapiens
ctctaaaagtggggccctttggagggcagctgtgctcatctgtctgtctacacccacaatcaggtcttgaggctgtctgggcaggaaggcagggggagagctttcccacgtgctcagtcacactcctctcccactcctgaccacacctttgccagggtcaggagtggaagagcaggaatcccactgccgggccacaatgaccccagctctcctcttccagatagagccacgaaccccctgaacaaggagctcgactgggccagcatcaacggcttctgcgagcagctcaacgaggactttgaggggtaggtggccgtccccacttgtttgcactgccctgcactctccagaacccagtctcgggtacaatggcctgggtgggtggagacccggttttcattctgaacgtattcacaaagtgatgaggatggggcacttggcactgaatgctgtttgggtgtcactctctggggtgggccttgctggaaccatttaacaggtaaagaaatcaaggctcagaggactcagatctgcccccacatctcacagggagaaaatgctagtcctgagcttggtaagacccaggcctgctggacctgcagccagtgctttgtggggaaaggccccccagagggagaactgcatgttccccaattgggaggaggccagtaggccctttgctcaaggacgaaccagaactacctgtgttagaatcacctagaatgttggccaggcacagtggctcatgcctgtaatcccagcactttggaaggccgaagtgggtggattacctgaggtcaggagtttgagaccagcgtggccaacatggtgacaccccgtctctactaaaaatgcaaaaattagctgggcgtggtggcacgtgcctgtaatcccagctactcaggaggctgaggcaggagaattgcttgaacccaagagacagagattgtaatgagccgagattgcgccactgccctgcagcctgggcagcagagtgagactctgtctcgaaaaacaaaacaaagaattacctagaatgcttgtcagaaatgtacattcttagccaggcatggtggtgcacacctgtaatctcagttactggggaggccaaggcgggaggatcccttgaggctagcctgggcaacatagcggggcaacatagcgagacatcatctcttaaaaaataaaaaaataggccaggcatggtggctcacgcctgtaatcccagcactttgggaggccaaggcaggtggatcacctgaggttgggagttcaagaccagccttaccaacatagagaaatcccatctctactaaaaatacaaaaaaaattagccgggcatggtggtgcatgcctgtaatcccagctactcgggaggctgaggcaggagaattgcttgaacccaggaggtagaagttgcagtgagccaagatcgtgccattgcactccagcctgggcgacggagtgaaactccgtctcaaaaaataagtaaataaataaataataaaaaataaggccgggtgtggtggcttacgtctataatcccagcactctgggaggctgaggcaggtggatcacgaggccaacagattgagaccatcctggccaacatggtgaaaccccatctctactaaaaatgcaaaaattagcaaggagcggtggtgtgcgcctgtagtcccagctactcgggaggctgaggcaggagaatcgcttgaacccgggaggctgaggttgcagtgagccaagattgcattactgcactccagcatggtgacggtgagactccatctcaaaaaaataaataaagtaaatgcaccttcttgggctgcccccagactcgactgtccagtggggggttgggagtggacattctttttatttttttttttgagatggagtctcgctctgtcgcccaggctggagtgcattggcacgatctcggctcactgcaagctccgcctcccaggttcacgcggttctcctgcctcagcctccccagcagctgggactacaggcgcctgccaccacacccggctaatttttttgtattttttagtagagacagggtttcaccgtgttagccaggatggtctcgatctcctgacctcatgatccacctgcctcggcctcccaaagtgctgggattacaggcatgagccaccgtgcccagctgggagtggacattcttagtgggctccccaggcgatactaaagtttcgggaccacaaacagcggtgtgtgtgctttggagtcgtgctgcttgggtacgagtcctgtcccctctcttagctgagtaaccttgggtgagtggttgcctctgagtgtcagtttcttcacagttgaaggaacttcccacggtgaggcgggaatgaccgtgctgcctgccttatgcagcttaggcaggaaagtgcatgtgagcctcctcacacatgaccagttcagcacatgtgagctcttaccgtcactggtgacgggtcttttacagtctgttagatgatgtcaccacctccaccatgaagctgctctgatttgccacagcagaacgtcctttgccaccttgagttcccagggaactgtgtctgcccgtctctcatggcatattgtaattgtctctatggcaagccaagccaaggacgtgacacatcagagttcttaggccagcccaggagctgagctcataccttttgaaggtccctgcctgcagtctctgtctggccctgccctgccacaatctcaggccataactgatctggagagggagctgggcctttgcatatgcctgcagaaaccttagagggctgaagtctcggcggcgggctggggtggtgaccctcccctagggcgaccagggccccttggaggagggctgcagtcccagcggcctggggtcgtggccctagggtgaccgggactccgtggcgactctggctctgtgttgttcctcccacccaggcctccactcgccacccggctgctggcccacaagatccagtccccacaggagtgggaggcgatccaggccttgacggtgagaaggggagaggccaccatccgtcccccgccatgtgacgacaccaagggaggccaagactgaggttcttggggtccataaggctcttcagagcccaagagagttgtgctaagatggcccaggatggaggtccgggcctgccccaagggtcccaccacagccagcgggctggcctcccaccccagcatccatacacgtaggcctgttgctgagggaaggccctctagggtcatctggtccaggggttctttgcttcagctgcacatcggctgcctctccaggaagcgtgttcaacacatggaatcagggctccacccagacctgccgaggccacactcctggagtatctgcatccagagatctgcacgtttgtaaagctaaggggtggtgcttgggctcaggcctgaggttttgcatctgttcaatagcagaggagagaggggtgtactgtctgtggcccccagcatgggccacataccaacccaccatggagcaaagctgattttaagtggtggtagagatacagtttctcttttaatacttacgtgtttagttgggtgcagtggcttatacctgtaatttcagcacttggggaggccaaggcaggaggcttgcttgaggcaaggagttcaaggctacagtgagctatgattgtgccactgtactccagactggacaacagagtgagaccccatctctaaataataatcattattgttacatatttgttttaacatttttttctcaagtataactagtcctatgatttcatagatgtagcttaggataaggccaaggtaggtgttgcctatataaggtttttttaaaaaaggaaaaataggccgggctggtggctcacgcctgtaatcccagcactttggcaggctgaggcgggcagatcacctgagatcaggagttcaagatcagcctgaccaacatggagaagccccatgtctactaaaaataaaaaattagcgaggcgtggtgggcgggcgcctgtaatcccagctacttgggaggctgaggcagaagaatcatttgaacccaggaggcagaggttacagtgagccgagatcgtgctactgcattccaacctgggcaacaagagtgaaactctgtctcaaaaaaaaaaaaaaaaaggaaaaatagtaagaaaataatgtacagttggtactcagatgtggggcctaagctatgaatgggactagagcattgctacaggttgggcattgctgggcactgtatgtaggtcgcctgaccctatctcccatgggagtgatgaccagtcccagaggcctgtgtgactctgaatcttccaacctcacaggccattccctcccttctgaaagcccacccatgggcttctggcccctgtccaaggcgtgggagggaggccacggcctctgatgcacctgggcgtcccctcccatcccccctccctgcacaggtgctggaaacatgcatgaagagctgcggcaagcggttccacgacgaagtgggcaagttccgctttctcaacgagctcatcaaggtcgtgtctcccaaggttggtgcccccagcccaagctcagacctgccctgtcggatgtggggagaggaaagaggaccttcagattgtggagcgacttttccagggagcctcccactggggtgtcacctcagccccccattagaactcagacctaggaaaaacacagatctcttctcacagtcctctcatacctgattctgggacagcctggggtctcggaggagtgtttccaggctggccaggggcggggcagccatggagctgcccggtgcttaggaagaaatgattccagggaatacataagctgacagatggctgtatgtgtcagccatctctggcctgaaatcactccctgtggacctggccacagaaccctacctggtctctggcaggtttccctgtccccaccacacaagagcaacctccctggacctcagcatccaaggccacagacctgagtgatggagcctgctggctccagacgggccatccccggctcagcccaaggagtcttcccacagaccatgaacgtttctttttctttatttttttgagatggagtcttgctctgtcacccaggctggagtgcaatggcatgatctctacgctccacaacctccacctcctgggttcaagcaattctcctgcctcaacctcccaagtagctgggattgcaggtgcacgccaccatgcccggctaattttttgtatttttagtagagatggggtttcaccatgttggccaggctggtcttgaactcctgacctcatgatctgcctgtcgtggactcccaaagtgccgggattacaggcgtgagccaccatgcccggcctacctaccgtgaacattttttttttttttttgacaaggagtttcactcttgtcacccaagctggagtgcaatggcgcgatctcagctcactgcaccctccacctcccaggtttgagcaattctcctgcctcatcctccagagtagctgcaattataggtgcccaccaccaagcctggctaattttttatttttagtagagacagggtttcaccatattggtcaggctggtcttgaactcctgacctcatgatccacctgcattggcctcccaaagtgctgggattacaggcgtgagccatggcctccggcctactgtgaacatttcttaagctgtttgagtgacagcccacccccttggcccttccttgctcagacccatcctttgaccagagctactgaataatccatatggcctcccattctcctcccaacaggggactctgctgtgagagccactttccccagcccagtttgctgctaggagacggagagtaggcccagggcctcccagttccaccctcacccctccctgggcagcctggagacctctggctcctctttcctgggatgtcaaggctaagtccccagagccgactatgagcaggcctgtccctcatgtcagttctgcatcctcaccatggtgccatctagcaggtggggaaacagacactgagggctgacccagctaataagtggcaggggtagtaggtgaactcagtctaccccaggctggttgggcggggctatgaggaccctgtaggctagagggcttcccggggagtcctggggaggcagtagggtgtggacagggcttgagactgaagtgagtggggctgggcagtatcaaaggcctccccactgtgtccctgaagtatctgggctctcggacatcggagaaggtgaagaacaagatcttggagctcctctacagctggacagtgggcctgcccgaggaggtgaaaatcgcagaggcctaccagatgctaaagaagcagggtgaggcacacagagggtggggggcgaccagggcctgccttcccctcccccaccatgagctggggctccagcggcttcaggggcttctgagccagcaaggtcatgggtctgtcctttaacttctggagaaagtacatacagctagtgcggccttctgtgctctgcctgaggctagcttgggtggaaagaaggtgagttcgaatcaagcttcccctcaaagagtggtctccagggagtggcctcaaaatatgggtccccaaaccatctcccccaggcaattttgatggagtaggtaggagtaggcccaggccactaagagtccagagccagcgtgctggcaaaagactgacctccctcttctgtcctacccttgcctgcccccatccccatgtcacccctacccctgggcctgggacatattgacagcctttctgacactcatctaatccagggattgtaaagtccgaccccaagcttccagatgacactacctttccccttcctcctccacggccgaagaatgtgatctttgaagatgaggagaaatccaaggtgagactccaaggaggcacatatggggactctgagcccaggtgggggtccgtgggttctgacctctagctgccctggcatcagccgttggaacagaggcacacactgagcccaggcatcgttgtagatgatgggcgctgtttactgggcatttaatatgtgctgagtatgtcccatacagcatccccacatttaataaacaggagtgtgtctggtgtccctggagtttgtttgagggtattttgaccttttctataagaatttcactaattttttgttaaaagttaataaaattaaaacttgtgggtgaaaagttaaacagcccaggaggaggtaagattaaaataaagaggttaaagtaaaaggtcccctctccccagtcttagccccagccctggagagtgtctactgttaaggttcttgtacattgtcccagaaaggttctcagccatggggatataaggagcaccatttgttgattacttatttctgctaggcgctgtggtgtgcactttacatgcagtgtctccgctggcctgtggccaccctatcaggcatcagtaaattctcaccatttcacagagagcttaagtaacttactcaggtcccacaggcaggaagcggggagccatcatgtgactccagtcttctgacccctggcccaggtgctgccctcacggtcacacccctctgtctctgcagatgctggcccgcctgct

SEQ ID NO: 12156 - DNA, 565 bp, Homo sapiens
ctctaaaagtggggccctttggagggcagctgtgctcatctgtctgtctacacccacaatcagatagagccacgaaccccctgaacaaggagctcgactgggccagcatcaacggcttctgcgagcagctcaacgaggactttgaggggcctccactcgccacccggctgctggcccacaagatccagtccccacaggagtgggaggcgatccaggccttgacggtgctggaaacatgcatgaagagctgcggcaagcggttccacgacgaagtgggcaagttccgctttctcaacgagctcatcaaggtcgtgtctcccaagtatctgggctctcggacatcggagaaggtgaagaacaagatcttggagctcctctacagctggacagtgggcctgcccgaggaggtgaaaatcgcagaggcctaccagatgctaaagaagcaggggattgtaaagtccgaccccaagcttccagatgacactacctttccccttcctcctccacggccgaagaatgtgatctttgaagatgaggagaaatccaagatgctggcccgcctgct

SEQ ID NO: 12157 - DNA, 7500 bp, Homo sapiens
gtggaagagcaggaatcccactgccgggccacaatgaccccagctctcctcttccagatagagccacgaaccccctgaacaaggagctcgactgggccagcatcaacggcttctgcgagcagctcaacgaggactttgaggggtaggtggccgtccccacttgtttgcactgccctgcactctccagaacccagtctcgggtacaatggcctgggtgggtggagacccggttttcattctgaacgtattcacaaagtgatgaggatggggcacttggcactgaatgctgtttgggtgtcactctctggggtgggccttgctggaaccatttaacaggtaaagaaatcaaggctcagaggactcagatctgcccccacatctcacagggagaaaatgctagtcctgagcttggtaagacccaggcctgctggacctgcagccagtgctttgtggggaaaggccccccagagggagaactgcatgttccccaattgggaggaggccagtaggccctttgctcaaggacgaaccagaactacctgtgttagaatcacctagaatgttggccaggcacagtggctcatgcctgtaatcccagcactttggaaggccgaagtgggtggattacctgaggtcaggagtttgagaccagcgtggccaacatggtgacaccccgtctctactaaaaatgcaaaaattagctgggcgtggtggcacgtgcctgtaatcccagctactcaggaggctgaggcaggagaattgcttgaacccaagagacagagattgtaatgagccgagattgcgccactgccctgcagcctgggcagcagagtgagactctgtctcgaaaaacaaaacaaagaattacctagaatgcttgtcagaaatgtacattcttagccaggcatggtggtgcacacctgtaatctcagttactggggaggccaaggcgggaggatcccttgaggctagcctgggcaacatagcggggcaacatagcgagacatcatctcttaaaaaataaaaaaataggccaggcatggtggctcacgcctgtaatcccagcactttgggaggccaaggcaggtggatcacctgaggttgggagttcaagaccagccttaccaacatagagaaatcccatctctactaaaaatacaaaaaaaattagccgggcatggtggtgcatgcctgtaatcccagctactcgggaggctgaggcaggagaattgcttgaacccaggaggtagaagttgcagtgagccaagatcgtgccattgcactccagcctgggcgacggagtgaaactccgtctcaaaaaataagtaaataaataaataataaaaaataaggccgggtgtggtggcttacgtctataatcccagcactctgggaggctgaggcaggtggatcacgaggccaacagattgagaccatcctggccaacatggtgaaaccccatctctactaaaaatgcaaaaattagcaaggagcggtggtgtgcgcctgtagtcccagctactcgggaggctgaggcaggagaatcgcttgaacccgggaggctgaggttgcagtgagccaagattgcattactgcactccagcatggtgacggtgagactccatctcaaaaaaataaataaagtaaatgcaccttcttgggctgcccccagactcgactgtccagtggggggttgggagtggacattctttttatttttttttttgagatggagtctcgctctgtcgcccaggctggagtgcattggcacgatctcggctcactgcaagctccgcctcccaggttcacgcggttctcctgcctcagcctccccagcagctgggactacaggcgcctgccaccacacccggctaatttttttgtattttttagtagagacagggtttcaccgtgttagccaggatggtctcgatctcctgacctcatgatccacctgcctcggcctcccaaagtgctgggattacaggcatgagccaccgtgcccagctgggagtggacattcttagtgggctccccaggcgatactaaagtttcgggaccacaaacagcggtgtgtgtgctttggagtcgtgctgcttgggtacgagtcctgtcccctctcttagctgagtaaccttgggtgagtggttgcctctgagtgtcagtttcttcacagttgaaggaacttcccacggtgaggcgggaatgaccgtgctgcctgccttatgcagcttaggcaggaaagtgcatgtgagcctcctcacacatgaccagttcagcacatgtgagctcttaccgtcactggtgacgggtcttttacagtctgttagatgatgtcaccacctccaccatgaagctgctctgatttgccacagcagaacgtcctttgccaccttgagttcccagggaactgtgtctgcccgtctctcatggcatattgtaattgtctctatggcaagccaagccaaggacgtgacacatcagagttcttaggccagcccaggagctgagctcataccttttgaaggtccctgcctgcagtctctgtctggccctgccctgccacaatctcaggccataactgatctggagagggagctgggcctttgcatatgcctgcagaaaccttagagggctgaagtctcggcggcgggctggggtggtgaccctcccctagggcgaccagggccccttggaggagggctgcagtcccagcggcctggggtcgtggccctagggtgaccgggactccgtggcgactctggctctgtgttgttcctcccacccaggcctccactcgccacccggctgctggcccacaagatccagtccccacaggagtgggaggcgatccaggccttgacggtgagaaggggagaggccaccatccgtcccccgccatgtgacgacaccaagggaggccaagactgaggttcttggggtccataaggctcttcagagcccaagagagttgtgctaagatggcccaggatggaggtccgggcctgccccaagggtcccaccacagccagcgggctggcctcccaccccagcatccatacacgtaggcctgttgctgagggaaggccctctagggtcatctggtccaggggttctttgcttcagctgcacatcggctgcctctccaggaagcgtgttcaacacatggaatcagggctccacccagacctgccgaggccacactcctggagtatctgcatccagagatctgcacgtttgtaaagctaaggggtggtgcttgggctcaggcctgaggttttgcatctgttcaatagcagaggagagaggggtgtactgtctgtggcccccagcatgggccacataccaacccaccatggagcaaagctgattttaagtggtggtagagatacagtttctcttttaatacttacgtgtttagttgggtgcagtggcttatacctgtaatttcagcacttggggaggccaaggcaggaggcttgcttgaggcaaggagttcaaggctacagtgagctatgattgtgccactgtactccagactggacaacagagtgagaccccatctctaaataataatcattattgttacatatttgttttaacatttttttctcaagtataactagtcctatgatttcatagatgtagcttaggataaggccaaggtaggtgttgcctatataaggtttttttaaaaaaggaaaaataggccgggctggtggctcacgcctgtaatcccagcactttggcaggctgaggcgggcagatcacctgagatcaggagttcaagatcagcctgaccaacatggagaagccccatgtctactaaaaataaaaaattagcgaggcgtggtgggcgggcgcctgtaatcccagctacttgggaggctgaggcagaagaatcatttgaacccaggaggcagaggttacagtgagccgagatcgtgctactgcattccaacctgggcaacaagagtgaaactctgtctcaaaaaaaaaaaaaaaaaggaaaaatagtaagaaaataatgtacagttggtactcagatgtggggcctaagctatgaatgggactagagcattgctacaggttgggcattgctgggcactgtatgtaggtcgcctgaccctatctcccatgggagtgatgaccagtcccagaggcctgtgtgactctgaatcttccaacctcacaggccattccctcccttctgaaagcccacccatgggcttctggcccctgtccaaggcgtgggagggaggccacggcctctgatgcacctgggcgtcccctcccatcccccctccctgcacaggtgctggaaacatgcatgaagagctgcggcaagcggttccacgacgaagtgggcaagttccgctttctcaacgagctcatcaaggtcgtgtctcccaaggttggtgcccccagcccaagctcagacctgccctgtcggatgtggggagaggaaagaggaccttcagattgtggagcgacttttccagggagcctcccactggggtgtcacctcagccccccattagaactcagacctaggaaaaacacagatctcttctcacagtcctctcatacctgattctgggacagcctggggtctcggaggagtgtttccaggctggccaggggcggggcagccatggagctgcccggtgcttaggaagaaatgattccagggaatacataagctgacagatggctgtatgtgtcagccatctctggcctgaaatcactccctgtggacctggccacagaaccctacctggtctctggcaggtttccctgtccccaccacacaagagcaacctccctggacctcagcatccaaggccacagacctgagtgatggagcctgctggctccagacgggccatccccggctcagcccaaggagtcttcccacagaccatgaacgtttctttttctttatttttttgagatggagtcttgctctgtcacccaggctggagtgcaatggcatgatctctacgctccacaacctccacctcctgggttcaagcaattctcctgcctcaacctcccaagtagctgggattgcaggtgcacgccaccatgcccggctaattttttgtatttttagtagagatggggtttcaccatgttggccaggctggtcttgaactcctgacctcatgatctgcctgtcgtggactcccaaagtgccgggattacaggcgtgagccaccatgcccggcctacctaccgtgaacattttttttttttttttgacaaggagtttcactcttgtcacccaagctggagtgcaatggcgcgatctcagctcactgcaccctccacctcccaggtttgagcaattctcctgcctcatcctccagagtagctgcaattataggtgcccaccaccaagcctggctaattttttatttttagtagagacagggtttcaccatattggtcaggctggtcttgaactcctgacctcatgatccacctgcattggcctcccaaagtgctgggattacaggcgtgagccatggcctccggcctactgtgaacatttcttaagctgtttgagtgacagcccacccccttggcccttccttgctcagacccatcctttgaccagagctactgaataatccatatggcctcccattctcctcccaacaggggactctgctgtgagagccactttccccagcccagtttgctgctaggagacggagagtaggcccagggcctcccagttccaccctcacccctccctgggcagcctggagacctctggctcctctttcctgggatgtcaaggctaagtccccagagccgactatgagcaggcctgtccctcatgtcagttctgcatcctcaccatggtgccatctagcaggtggggaaacagacactgagggctgacccagctaataagtggcaggggtagtaggtgaactcagtctaccccaggctggttgggcggggctatgaggaccctgtaggctagagggcttcccggggagtcctggggaggcagtagggtgtggacagggcttgagactgaagtgagtggggctgggcagtatcaaaggcctccccactgtgtccctgaagtatctgggctctcggacatcggagaaggtgaagaacaagatcttggagctcctctacagctggacagtgggcctgcccgaggaggtgaaaatcgcagaggcctaccagatgctaaagaagcagggtgaggcacacagagggtggggggcgaccagggcctgccttcccctcccccaccatgagctggggctccagcggcttcaggggcttctgagccagcaaggtcatgggtctgtcctttaacttctggagaaagtacatacagctagtgcggccttctgtgctctgcctgaggctagcttgggtggaaagaaggtgagttcgaatcaagcttcccctcaaagagtggtctccagggagtggcctcaaaatatgggtccccaaaccatctcccccaggcaattttgatggagtaggtaggagtaggcccaggccactaagagtccagagccagcgtgctggcaaaagactgacctccctcttctgtcctacccttgcctgcccccatccccatgtcacccctacccctgggcctgggacatattgacagcctttctgacactcatctaatccagggattgtaaagtccgaccccaagcttccagatgacactacctttccccttcctcctccacggccgaagaatgtgatctttgaagatgaggagaaatccaaggtgagactccaaggaggcacatatggggactctgagcccaggtgggggtccgtgggttctgacctctagctgccctggcatcagccgttggaacagaggcacacactgagcccaggcatcgttgtagatgatgggcgctgtttactgggcatttaatatgtgctgagtatgtcccatacagcatccccacatttaataaacaggagtgtgtctggtgtccctggagtttgtttgagggtattttgaccttttctataagaatttcactaattttttgttaaaagttaataaaattaaaacttgtgggtgaaaagttaaacagcccaggaggaggtaagattaaaataaagaggttaaagtaaaaggtcccctctccccagtcttagccccagccctggagagtgtctactgttaaggttcttgtacattgtcccagaaaggttctcagccatggggatataaggagcaccatttgttgattacttatttctgctaggcgctgtggtgtgcactttacatgcagtgtctccgctggcctgtggccaccctatcaggcatcagtaaattctcaccatttcacagagagcttaagtaacttactcaggtcccacaggcaggaagcggggagccatcatgtgactccagtcttctgacccctggcccaggtgctgccctcacggtcacacccctctgtctctgcagatgctggcccgcctgct

SEQ ID NO: 12158 - DNA, 559 bp, Homo sapiens
gtggaagagcaggaatcccactgccgggccacaatgaccccagctctcctcttccagatagagccacgaaccccctgaacaaggagctcgactgggccagcatcaacggcttctgcgagcagctcaacgaggactttgaggggcctccactcgccacccggctgctggcccacaagatccagtccccacaggagtgggaggcgatccaggccttgacggtgctggaaacatgcatgaagagctgcggcaagcggttccacgacgaagtgggcaagttccgctttctcaacgagctcatcaaggtcgtgtctcccaagtatctgggctctcggacatcggagaaggtgaagaacaagatcttggagctcctctacagctggacagtgggcctgcccgaggaggtgaaaatcgcagaggcctaccagatgctaaagaagcaggggattgtaaagtccgaccccaagcttccagatgacactacctttccccttcctcctccacggccgaagaatgtgatctttgaagatgaggagaaatccaagatgctggcccgcctgct

SEQ ID NO: 12159 - DNA, 12797 bp, Homo sapiens
gtgccgaggctgggggccggtggcggatggagcccgcgatggagccggagactctggaggcgcgaatcagtgagtgtccgggaggggcgcgggccggaccggaaccggaaccgggggcacgaggcgggccccttcccggcgggggcggggtacgggtcgccccctcctcacgccccgcccccggcccgggaggggcggtgtcctcagtcggcccctcagaccctggagcgatggaggaccccggccccggcgcggtccagcggtgggagcgggcgccgcccacctgtcggatccctgggccatgacccctgggacggcgagtgagctgcgccgggaacccccgggacggagagagcagcctccaacccccaaggctcacattgcttcacggagtagcggcccggggaaggagcacgcgagcggttccccggggttgcatctcacacccgggagggagggaccctactattttcaggccccgaatcctccactctctggccctgcatggcgttcctggagcccgcaagtagtcacatttgctcattaccccgtcctggaagggaggacccactgccccatttgattcctcccgccgctcctagtctctagccacatagtgagaaacccccgcaccctacaggcttgggagagtcttagactccagaagtattaataattccaagctccctgtcactcccttcagcctaacccctcagtctccaagatgcctttcccagctcttgctgaacttccttcaaaggcttctacacccctttttttcttgtttctcctcagacgtagcttcctattgcttaggcttcctagcccgcaaaccctccacctgagctccttaacccacagccctgatgatcccctgctctcacagccccgctcctggactctgcctctgaaagccgtggctggcttctccctggtctagtgagggttctctcccaaggctttaactgctgttgggaccccgtcgttgccagggcctcagggaaccctcttggacccgggcacaccggcaactgtctagcgtggtttggggtcatggccggccccttttaagccaggcttgagcagagttgaaccatgaggttggccccagaaccaaacctctagggatgtttcagagtcatcctagccaccagaggggcagggggtggaaaaggggcactcagcagcccttgaccgttgtgaacgccggaagtgtccgcctgggtctcagcagcaactgggctggggggatgggtgggcccctggctaactgatctcagacacaggtcttgagctgtgggtcatacaaaacattctcaggtttagaaacagtgggggttttctgagagtccagagagtctaaaaccaggcagaagttagagatacctgggtttggctgggccctgacacactggggctgggattttctcctttccttccccctttgtgtcctagcagaattgtaagatctttcctcttcccttgtggaggctggaggtaaaggatagcttcttctttttttttttgagacgggttttcactcttgtcacccaggctggagtgcagtggcacaatctcagctctctgcaacctccacctcccgggttcaagtgattctcctgtctcagcctcccgagtagctggaattacaggtgcgccaccacgcccagctatttttgtatttttagtacaggtgggctttcaccatgttggccaggctgatctcgaactcctgacctcaggtgatccgcctatataggcctctcaaagtgttgggattacaggcgttagccactcatccgcccacgtcggcctctcaaagtgttgggattacaggcgtgagccaccgcgcccggcctagtgaggtaaatgatgttattgtcagcactatagagtggcagggtggagtcttaccctgttgtgaaacacctccctccctctctaggtgttctccccaactgcctgctagggagggtactcccctcaggtagaattaagagggctgagggtcaggggccatgggccaaggaggtcagtcagatctccttggatctggaggccctggctttcagccagaggcagggggagaaagatgatgtctcatgatgccagcgcttcctcttcactggcgtctgacccaggagcagtccagaatcagcttctctgacctcactccaactcacgtgtctttgacactttaagggacttcctgttttagggtcttctggctgggtgtcattgaatgggcagtgattctctaactttagactgatgttccccagcctttgtttggggactcggaggcagagtagacagttacccttacccctgggttggggagggtcatattcctggtatccccaggaggtcaacaggggcttcatttttctgagggactagagggtcttgtggagctcctgggacagagatctagatccagagagaacattcgtccttccgatctcagctcagctctgagagccctcccagagagcagctcccgagggctccagagccctccgaaagccctcccagagagcagcccccacctcccaggctgtctgcacttctccttgctatgctttgctctgtaacattttgcaacagtctgcagtacacggggtttgttaatctgagtattcattgtttctcttgctgggcagtgaacttgaggagggcagggattttgtctgttcactgctggagccccagcacccagaatacttaaatctgagttggatgaatggcggccagccactgggattccagggctttgggccccctgccataacatatggcccagggcaggcgccacatgctgggtcagtccccagcctcctgtccacagatccttctctgttctacctcctgggctgtgtccttccacaccctcagctcggtgctcaggcgtgggcagaactggctgggaaggggtggtccttagaggtgggctgtggagaaatgaagatcgagctctggctgccgccatggccttcccatgcaaaaagtattttgtcatccaaaatcaatattttggtcaggcacagtggctcatgcctgtaatcccagcactttgggtggccgaggtgggtggatcatttgaggtcaggagtttgagaccagcctgaccaacatggtgaaattccatctctaccaaaaatacaaaaaaattagctgggcatggtggtggacgcctgtgatcccagctactctcaggaggctgaagcaggagaatcgtttgaacccaggaagctgagattgcagtgagccgagatctcgccactgcactccagcctgggcaacaaagcaagactctttctcaaaaaaaaataaaaataaaaaaatacaggccggacgcagtggctcacacctgtaattccagtactttgggaggccgaggcaggtggatcacgaggttaggagatcaagaccatcctggctaacacagtgaaaccccgtctctactaaaaatacaaaaaaaaaaaaaattagccgggcgtggtggcgggcacctgtagtcccagctactcgggaggctgaggcaggagaatggcgtgaacctgggaggcagagtttgcagtcagccgagatcacaccactgcactccagcctgggcgatagagcgagactccgtctcaaaaaaaaaaaaaaatacagccgggcacggtggctcacacctgtaatcccagcactttgggaggccaaggtgggcggatcacaaggtcaggagattgagaccatcctggctaacatggtgaaaccctgtctctactaaaaatacaaaaaaaaattagccgggcgtggtggcgggtgcctgtagtcccagctactcgggaggctgaggaaggagaatggcatgaacctgggaggcggagcttgcagtgagccgagatcgtgccactgcactccagcctgggcaacagcgtgagactcgtctcaaaaaaaaaaaaaaatccatatttcattccagctttacaagatggggaaatggaggttcagggaagcatgtaagctagattgttgtttaaccagtattgggggttaaaggggtagctgtctggtcgtgtttacaccacttcatgtagacctgttggccctctttccttgccactatccatttctggattcagtcttccccagaacctcaccctttgcctgccctcagctgactgctcattcatttgccaaggggagacaggtgtggacatgagtggctgggatgcagtgccgtagcaggctgggggacacaaaagagaactgacccagcactgctaccctgggcaggagtagaggattagagaaggggacaccggagccactcccaagggaatgaaggctttctgaacctggtgtgatggtaagactcacactccttactgaggcccctcattctctgcctcgtgtggttacccgcatctttcctgcccatacagccatgcgtgggtcagaggtgtaccagctccagcctgggtgactcctcctggtccctgcttgtgtgttgcctcttccaggcagcctcctcagccccaaactgaactgagtcccctcctctgtgtttcttttttgtttgtttgagacggagtcacccagagtcccagctctgtcacccaggctggagggcagtggcgagacctcggctcactccaagctccgcctcccgggttcacgccattctcctgcctcagcctcccaagtagctgggactacaggcacccaccaccaagcccggctaatttttgtatttttagtagagatggggtttcatcgtgttagctaggatggtcttgatctcctgacctcgtgatccacccacctcagcctcccaaagtgctgggattacaggcatgagccaccgtgcctggcccctcctctgtgtttctacagctccttggcttccctctgtcacacgttattgagaacctagcttcccttggcccacttcccggctacacagctccttgagggcgggactatgatttttttctcccttacttctggatctcctctgagcataaatttcatgagaattatggagacactgttctcagcagaatcagaggaggtggggctggcgtgatgggtccagctgcaggggtgggaggagtggggaggaggggaagggccctgaccatagtctctaaaagtggggccctttggagggcagctgtgctcatctgtctgtctacacccacaatcaggtcttgaggctgtctgggcaggaaggcagggggagagctttcccacgtgctcagtcacactcctctcccactcctgaccacacctttgccagggtcaggagtggaagagcaggaatcccactgccgggccacaatgaccccagctctcctcttccagatagagccacgaaccccctgaacaaggagctcgactgggccagcatcaacggcttctgcgagcagctcaacgaggactttgaggggtaggtggccgtccccacttgtttgcactgccctgcactctccagaacccagtctcgggtacaatggcctgggtgggtggagacccggttttcattctgaacgtattcacaaagtgatgaggatggggcacttggcactgaatgctgtttgggtgtcactctctggggtgggccttgctggaaccatttaacaggtaaagaaatcaaggctcagaggactcagatctgcccccacatctcacagggagaaaatgctagtcctgagcttggtaagacccaggcctgctggacctgcagccagtgctttgtggggaaaggccccccagagggagaactgcatgttccccaattgggaggaggccagtaggccctttgctcaaggacgaaccagaactacctgtgttagaatcacctagaatgttggccaggcacagtggctcatgcctgtaatcccagcactttggaaggccgaagtgggtggattacctgaggtcaggagtttgagaccagcgtggccaacatggtgacaccccgtctctactaaaaatgcaaaaattagctgggcgtggtggcacgtgcctgtaatcccagctactcaggaggctgaggcaggagaattgcttgaacccaagagacagagattgtaatgagccgagattgcgccactgccctgcagcctgggcagcagagtgagactctgtctcgaaaaacaaaacaaagaattacctagaatgcttgtcagaaatgtacattcttagccaggcatggtggtgcacacctgtaatctcagttactggggaggccaaggcgggaggatcccttgaggctagcctgggcaacatagcggggcaacatagcgagacatcatctcttaaaaaataaaaaaataggccaggcatggtggctcacgcctgtaatcccagcactttgggaggccaaggcaggtggatcacctgaggttgggagttcaagaccagccttaccaacatagagaaatcccatctctactaaaaatacaaaaaaaattagccgggcatggtggtgcatgcctgtaatcccagctactcgggaggctgaggcaggagaattgcttgaacccaggaggtagaagttgcagtgagccaagatcgtgccattgcactccagcctgggcgacggagtgaaactccgtctcaaaaaataagtaaataaataaataataaaaaataaggccgggtgtggtggcttacgtctataatcccagcactctgggaggctgaggcaggtggatcacgaggccaacagattgagaccatcctggccaacatggtgaaaccccatctctactaaaaatgcaaaaattagcaaggagcggtggtgtgcgcctgtagtcccagctactcgggaggctgaggcaggagaatcgcttgaacccgggaggctgaggttgcagtgagccaagattgcattactgcactccagcatggtgacggtgagactccatctcaaaaaaataaataaagtaaatgcaccttcttgggctgcccccagactcgactgtccagtggggggttgggagtggacattctttttatttttttttttgagatggagtctcgctctgtcgcccaggctggagtgcattggcacgatctcggctcactgcaagctccgcctcccaggttcacgcggttctcctgcctcagcctccccagcagctgggactacaggcgcctgccaccacacccggctaatttttttgtattttttagtagagacagggtttcaccgtgttagccaggatggtctcgatctcctgacctcatgatccacctgcctcggcctcccaaagtgctgggattacaggcatgagccaccgtgcccagctgggagtggacattcttagtgggctccccaggcgatactaaagtttcgggaccacaaacagcggtgtgtgtgctttggagtcgtgctgcttgggtacgagtcctgtcccctctcttagctgagtaaccttgggtgagtggttgcctctgagtgtcagtttcttcacagttgaaggaacttcccacggtgaggcgggaatgaccgtgctgcctgccttatgcagcttaggcaggaaagtgcatgtgagcctcctcacacatgaccagttcagcacatgtgagctcttaccgtcactggtgacgggtcttttacagtctgttagatgatgtcaccacctccaccatgaagctgctctgatttgccacagcagaacgtcctttgccaccttgagttcccagggaactgtgtctgcccgtctctcatggcatattgtaattgtctctatggcaagccaagccaaggacgtgacacatcagagttcttaggccagcccaggagctgagctcataccttttgaaggtccctgcctgcagtctctgtctggccctgccctgccacaatctcaggccataactgatctggagagggagctgggcctttgcatatgcctgcagaaaccttagagggctgaagtctcggcggcgggctggggtggtgaccctcccctagggcgaccagggccccttggaggagggctgcagtcccagcggcctggggtcgtggccctagggtgaccgggactccgtggcgactctggctctgtgttgttcctcccacccaggcctccactcgccacccggctgctggcccacaagatccagtccccacaggagtgggaggcgatccaggccttgacggtgagaaggggagaggccaccatccgtcccccgccatgtgacgacaccaagggaggccaagactgaggttcttggggtccataaggctcttcagagcccaagagagttgtgctaagatggcccaggatggaggtccgggcctgccccaagggtcccaccacagccagcgggctggcctcccaccccagcatccatacacgtaggcctgttgctgagggaaggccctctagggtcatctggtccaggggttctttgcttcagctgcacatcggctgcctctccaggaagcgtgttcaacacatggaatcagggctccacccagacctgccgaggccacactcctggagtatctgcatccagagatctgcacgtttgtaaagctaaggggtggtgcttgggctcaggcctgaggttttgcatctgttcaatagcagaggagagaggggtgtactgtctgtggcccccagcatgggccacataccaacccaccatggagcaaagctgattttaagtggtggtagagatacagtttctcttttaatacttacgtgtttagttgggtgcagtggcttatacctgtaatttcagcacttggggaggccaaggcaggaggcttgcttgaggcaaggagttcaaggctacagtgagctatgattgtgccactgtactccagactggacaacagagtgagaccccatctctaaataataatcattattgttacatatttgttttaacatttttttctcaagtataactagtcctatgatttcatagatgtagcttaggataaggccaaggtaggtgttgcctatataaggtttttttaaaaaaggaaaaataggccgggctggtggctcacgcctgtaatcccagcactttggcaggctgaggcgggcagatcacctgagatcaggagttcaagatcagcctgaccaacatggagaagccccatgtctactaaaaataaaaaattagcgaggcgtggtgggcgggcgcctgtaatcccagctacttgggaggctgaggcagaagaatcatttgaacccaggaggcagaggttacagtgagccgagatcgtgctactgcattccaacctgggcaacaagagtgaaactctgtctcaaaaaaaaaaaaaaaaaggaaaaatagtaagaaaataatgtacagttggtactcagatgtggggcctaagctatgaatgggactagagcattgctacaggttgggcattgctgggcactgtatgtaggtcgcctgaccctatctcccatgggagtgatgaccagtcccagaggcctgtgtgactctgaatcttccaacctcacaggccattccctcccttctgaaagcccacccatgggcttctggcccctgtccaaggcgtgggagggaggccacggcctctgatgcacctgggcgtcccctcccatcccccctccctgcacaggtgctggaaacatgcatgaagagctgcggcaagcggttccacgacgaagtgggcaagttccgctttctcaacgagctcatcaaggtcgtgtctcccaaggttggtgcccccagcccaagctcagacctgccctgtcggatgtggggagaggaaagaggaccttcagattgtggagcgacttttccagggagcctcccactggggtgtcacctcagccccccattagaactcagacctaggaaaaacacagatctcttctcacagtcctctcatacctgattctgggacagcctggggtctcggaggagtgtttccaggctggccaggggcggggcagccatggagctgcccggtgcttaggaagaaatgattccagggaatacataagctgacagatggctgtatgtgtcagccatctctggcctgaaatcactccctgtggacctggccacagaaccctacctggtctctggcaggtttccctgtccccaccacacaagagcaacctccctggacctcagcatccaaggccacagacctgagtgatggagcctgctggctccagacgggccatccccggctcagcccaaggagtcttcccacagaccatgaacgtttctttttctttatttttttgagatggagtcttgctctgtcacccaggctggagtgcaatggcatgatctctacgctccacaacctccacctcctgggttcaagcaattctcctgcctcaacctcccaagtagctgggattgcaggtgcacgccaccatgcccggctaattttttgtatttttagtagagatggggtttcaccatgttggccaggctggtcttgaactcctgacctcatgatctgcctgtcgtggactcccaaagtgccgggattacaggcgtgagccaccatgcccggcctacctaccgtgaacattttttttttttttttgacaaggagtttcactcttgtcacccaagctggagtgcaatggcgcgatctcagctcactgcaccctccacctcccaggtttgagcaattctcctgcctcatcctccagagtagctgcaattataggtgcccaccaccaagcctggctaattttttatttttagtagagacagggtttcaccatattggtcaggctggtcttgaactcctgacctcatgatccacctgcattggcctcccaaagtgctgggattacaggcgtgagccatggcctccggcctactgtgaacatttcttaagctgtttgagtgacagcccacccccttggcccttccttgctcagacccatcctttgaccagagctactgaataatccatatggcctcccattctcctcccaacaggggactctgctgtgagagccactttccccagcccagtttgctgctaggagacggagagtaggcccagggcctcccagttccaccctcacccctccctgggcagcctggagacctctggctcctctttcctgggatgtcaaggctaagtccccagagccgactatgagcaggcctgtccctcatgtcagttctgcatcctcaccatggtgccatctagcaggtggggaaacagacactgagggctgacccagctaataagtggcaggggtagtaggtgaactcagtctaccccaggctggttgggcggggctatgaggaccctgtaggctagagggcttcccggggagtcctggggaggcagtagggtgtggacagggcttgagactgaagtgagtggggctgggcagtatcaaaggcctccccactgtgtccctgaagtatctgggctctcggacatcggagaaggtgaagaacaagatcttggagctcctctacagctggacagtgggcctgcccgaggaggtgaaaatcgcagaggcctaccagatgctaaagaagcagggtgaggcacacagagggtggggggcgaccagggcctgccttcccctcccccaccatgagctggggctccagcggcttcaggggcttctgagccagcaaggtcatgggtctgtcctttaacttctggagaaagtacatacagctagtgcggccttctgtgctctgcctgaggctagcttgggtggaaagaaggtgagttcgaatcaagcttcccctcaaagagtggtctccagggagtggcctcaaaatatgggtccccaaaccatctcccccaggcaattttgatggagtaggtaggagtaggcccaggccactaagagtccagagccagcgtgctggcaaaagactgacctccctcttctgtcctacccttgcctgcccccatccccatgtcacccctacccctgggcctgggacatattgacagcctttctgacactcatctaatccagggattgtaaagtccgaccccaagcttccagatgacactacctttccccttcctcctccacggccgaagaatgtgatctttgaagatgaggagaaatccaaggtgagactccaaggaggcacatatggggactctgagcccaggtgggggtccgtgggttctgacctctagctgccctggcatcagccgttggaacagaggcacacactgagcccaggcatcgttgtagatgatgggcgctgtttactgggcatttaatatgtgctgagtatgtcccatacagcatccccacatttaataaacaggagtgtgtctggtgtccctggagtttgtttgagggtattttgaccttttctataagaatttcactaattttttgttaaaagttaataaaattaaaacttgtgggtgaaaagttaaacagcccaggaggaggtaagattaaaataaagaggttaaagtaaaaggtcccctctccccagtcttagccccagccctggagagtgtctactgttaaggttcttgtacattgtcccagaaaggttctcagccatggggatataaggagcaccatttgttgattacttatttctgctaggcgctgtggtgtgcactttacatgcagtgtctccgctggcctgtggccaccctatcaggcatcagtaaattctcaccatttcacagagagcttaagtaacttactcaggtcccacaggcaggaagcggggagccatcatgtgactccagtcttctgacccctggcccaggtgctgccctcacggtcacacccctctgtctctgcagatgctggcccgcctgc

SEQ ID NO: 12160 - DNA, 566 bp, Homo sapiens
gtgccgaggctgggggccggtggcggatggagcccgcgatggagccggagactctggaggcgcgaatcaagccacgaaccccctgaacaaggagctcgactgggccagcatcaacggcttctgcgagcagctcaacgaggactttgaggggcctccactcgccacccggctgctggcccacaagatccagtccccacaggagtgggaggcgatccaggccttgacggtgctggaaacatgcatgaagagctgcggcaagcggttccacgacgaagtgggcaagttccgctttctcaacgagctcatcaaggtcgtgtctcccaagtatctgggctctcggacatcggagaaggtgaagaacaagatcttggagctcctctacagctggacagtgggcctgcccgaggaggtgaaaatcgcagaggcctaccagatgctaaagaagcaggggattgtaaagtccgaccccaagcttccagatgacactacctttccccttcctcctccacggccgaagaatgtgatctttgaagatgaggagaaatccaagatgctggcccgcctgc

SEQ ID NO: 12161 - DNA, 9456 bp, Homo sapiens
gagcgatggaggaccccggccccggcgcggtccagcggtgggagcgggcgccgcccacctgtcggatccctgggccatgacccctgggacggcgagtgagctgcgccgggaacccccgggacggagagagcagcctccaacccccaaggctcacattgcttcacggagtagcggcccggggaaggagcacgcgagcggttccccggggttgcatctcacacccgggagggagggaccctactattttcaggccccgaatcctccactctctggccctgcatggcgttcctggagcccgcaagtagtcacatttgctcattaccccgtcctggaagggaggacccactgccccatttgattcctcccgccgctcctagtctctagccacatagtgagaaacccccgcaccctacaggcttgggagagtcttagactccagaagtattaataattccaagctccctgtcactcccttcagcctaacccctcagtctccaagatgcctttcccagctcttgctgaacttccttcaaaggcttctacacccctttttttcttgtttctcctcagacgtagcttcctattgcttaggcttcctagcccgcaaaccctccacctgagctccttaacccacagccctgatgatcccctgctctcacagccccgctcctggactctgcctctgaaagccgtggctggcttctccctggtctagtgagggttctctcccaaggctttaactgctgttgggaccccgtcgttgccagggcctcagggaaccctcttggacccgggcacaccggcaactgtctagcgtggtttggggtcatggccggccccttttaagccaggcttgagcagagttgaaccatgaggttggccccagaaccaaacctctagggatgtttcagagtcatcctagccaccagaggggcagggggtggaaaaggggcactcagcagcccttgaccgttgtgaacgccggaagtgtccgcctgggtctcagcagcaactgggctggggggatgggtgggcccctggctaactgatctcagacacaggtcttgagctgtgggtcatacaaaacattctcaggtttagaaacagtgggggttttctgagagtccagagagtctaaaaccaggcagaagttagagatacctgggtttggctgggccctgacacactggggctgggattttctcctttccttccccctttgtgtcctagcagaattgtaagatctttcctcttcccttgtggaggctggaggtaaaggatagcttcttctttttttttttgagacgggttttcactcttgtcacccaggctggagtgcagtggcacaatctcagctctctgcaacctccacctcccgggttcaagtgattctcctgtctcagcctcccgagtagctggaattacaggtgcgccaccacgcccagctatttttgtatttttagtacaggtgggctttcaccatgttggccaggctgatctcgaactcctgacctcaggtgatccgcctatataggcctctcaaagtgttgggattacaggcgttagccactcatccgcccacgtcggcctctcaaagtgttgggattacaggcgtgagccaccgcgcccggcctagtgaggtaaatgatgttattgtcagcactatagagtggcagggtggagtcttaccctgttgtgaaacacctccctccctctctaggtgttctccccaactgcctgctagggagggtactcccctcaggtagaattaagagggctgagggtcaggggccatgggccaaggaggtcagtcagatctccttggatctggaggccctggctttcagccagaggcagggggagaaagatgatgtctcatgatgccagcgcttcctcttcactggcgtctgacccaggagcagtccagaatcagcttctctgacctcactccaactcacgtgtctttgacactttaagggacttcctgttttagggtcttctggctgggtgtcattgaatgggcagtgattctctaactttagactgatgttccccagcctttgtttggggactcggaggcagagtagacagttacccttacccctgggttggggagggtcatattcctggtatccccaggaggtcaacaggggcttcatttttctgagggactagagggtcttgtggagctcctgggacagagatctagatccagagagaacattcgtccttccgatctcagctcagctctgagagccctcccagagagcagctcccgagggctccagagccctccgaaagccctcccagagagcagcccccacctcccaggctgtctgcacttctccttgctatgctttgctctgtaacattttgcaacagtctgcagtacacggggtttgttaatctgagtattcattgtttctcttgctgggcagtgaacttgaggagggcagggattttgtctgttcactgctggagccccagcacccagaatacttaaatctgagttggatgaatggcggccagccactgggattccagggctttgggccccctgccataacatatggcccagggcaggcgccacatgctgggtcagtccccagcctcctgtccacagatccttctctgttctacctcctgggctgtgtccttccacaccctcagctcggtgctcaggcgtgggcagaactggctgggaaggggtggtccttagaggtgggctgtggagaaatgaagatcgagctctggctgccgccatggccttcccatgcaaaaagtattttgtcatccaaaatcaatattttggtcaggcacagtggctcatgcctgtaatcccagcactttgggtggccgaggtgggtggatcatttgaggtcaggagtttgagaccagcctgaccaacatggtgaaattccatctctaccaaaaatacaaaaaaattagctgggcatggtggtggacgcctgtgatcccagctactctcaggaggctgaagcaggagaatcgtttgaacccaggaagctgagattgcagtgagccgagatctcgccactgcactccagcctgggcaacaaagcaagactctttctcaaaaaaaaataaaaataaaaaaatacaggccggacgcagtggctcacacctgtaattccagtactttgggaggccgaggcaggtggatcacgaggttaggagatcaagaccatcctggctaacacagtgaaaccccgtctctactaaaaatacaaaaaaaaaaaaaattagccgggcgtggtggcgggcacctgtagtcccagctactcgggaggctgaggcaggagaatggcgtgaacctgggaggcagagtttgcagtcagccgagatcacaccactgcactccagcctgggcgatagagcgagactccgtctcaaaaaaaaaaaaaaatacagccgggcacggtggctcacacctgtaatcccagcactttgggaggccaaggtgggcggatcacaaggtcaggagattgagaccatcctggctaacatggtgaaaccctgtctctactaaaaatacaaaaaaaaattagccgggcgtggtggcgggtgcctgtagtcccagctactcgggaggctgaggaaggagaatggcatgaacctgggaggcggagcttgcagtgagccgagatcgtgccactgcactccagcctgggcaacagcgtgagactcgtctcaaaaaaaaaaaaaaatccatatttcattccagctttacaagatggggaaatggaggttcagggaagcatgtaagctagattgttgtttaaccagtattgggggttaaaggggtagctgtctggtcgtgtttacaccacttcatgtagacctgttggccctctttccttgccactatccatttctggattcagtcttccccagaacctcaccctttgcctgccctcagctgactgctcattcatttgccaaggggagacaggtgtggacatgagtggctgggatgcagtgccgtagcaggctgggggacacaaaagagaactgacccagcactgctaccctgggcaggagtagaggattagagaaggggacaccggagccactcccaagggaatgaaggctttctgaacctggtgtgatggtaagactcacactccttactgaggcccctcattctctgcctcgtgtggttacccgcatctttcctgcccatacagccatgcgtgggtcagaggtgtaccagctccagcctgggtgactcctcctggtccctgcttgtgtgttgcctcttccaggcagcctcctcagccccaaactgaactgagtcccctcctctgtgtttcttttttgtttgtttgagacggagtcacccagagtcccagctctgtcacccaggctggagggcagtggcgagacctcggctcactccaagctccgcctcccgggttcacgccattctcctgcctcagcctcccaagtagctgggactacaggcacccaccaccaagcccggctaatttttgtatttttagtagagatggggtttcatcgtgttagctaggatggtcttgatctcctgacctcgtgatccacccacctcagcctcccaaagtgctgggattacaggcatgagccaccgtgcctggcccctcctctgtgtttctacagctccttggcttccctctgtcacacgttattgagaacctagcttcccttggcccacttcccggctacacagctccttgagggcgggactatgatttttttctcccttacttctggatctcctctgagcataaatttcatgagaattatggagacactgttctcagcagaatcagaggaggtggggctggcgtgatgggtccagctgcaggggtgggaggagtggggaggaggggaagggccctgaccatagtctctaaaagtggggccctttggagggcagctgtgctcatctgtctgtctacacccacaatcaggtcttgaggctgtctgggcaggaaggcagggggagagctttcccacgtgctcagtcacactcctctcccactcctgaccacacctttgccagggtcaggagtggaagagcaggaatcccactgccgggccacaatgaccccagctctcctcttccagatagagccacgaaccccctgaacaaggagctcgactgggccagcatcaacggcttctgcgagcagctcaacgaggactttgaggggtaggtggccgtccccacttgtttgcactgccctgcactctccagaacccagtctcgggtacaatggcctgggtgggtggagacccggttttcattctgaacgtattcacaaagtgatgaggatggggcacttggcactgaatgctgtttgggtgtcactctctggggtgggccttgctggaaccatttaacaggtaaagaaatcaaggctcagaggactcagatctgcccccacatctcacagggagaaaatgctagtcctgagcttggtaagacccaggcctgctggacctgcagccagtgctttgtggggaaaggccccccagagggagaactgcatgttccccaattgggaggaggccagtaggccctttgctcaaggacgaaccagaactacctgtgttagaatcacctagaatgttggccaggcacagtggctcatgcctgtaatcccagcactttggaaggccgaagtgggtggattacctgaggtcaggagtttgagaccagcgtggccaacatggtgacaccccgtctctactaaaaatgcaaaaattagctgggcgtggtggcacgtgcctgtaatcccagctactcaggaggctgaggcaggagaattgcttgaacccaagagacagagattgtaatgagccgagattgcgccactgccctgcagcctgggcagcagagtgagactctgtctcgaaaaacaaaacaaagaattacctagaatgcttgtcagaaatgtacattcttagccaggcatggtggtgcacacctgtaatctcagttactggggaggccaaggcgggaggatcccttgaggctagcctgggcaacatagcggggcaacatagcgagacatcatctcttaaaaaataaaaaaataggccaggcatggtggctcacgcctgtaatcccagcactttgggaggccaaggcaggtggatcacctgaggttgggagttcaagaccagccttaccaacatagagaaatcccatctctactaaaaatacaaaaaaaattagccgggcatggtggtgcatgcctgtaatcccagctactcgggaggctgaggcaggagaattgcttgaacccaggaggtagaagttgcagtgagccaagatcgtgccattgcactccagcctgggcgacggagtgaaactccgtctcaaaaaataagtaaataaataaataataaaaaataaggccgggtgtggtggcttacgtctataatcccagcactctgggaggctgaggcaggtggatcacgaggccaacagattgagaccatcctggccaacatggtgaaaccccatctctactaaaaatgcaaaaattagcaaggagcggtggtgtgcgcctgtagtcccagctactcgggaggctgaggcaggagaatcgcttgaacccgggaggctgaggttgcagtgagccaagattgcattactgcactccagcatggtgacggtgagactccatctcaaaaaaataaataaagtaaatgcaccttcttgggctgcccccagactcgactgtccagtggggggttgggagtggacattctttttatttttttttttgagatggagtctcgctctgtcgcccaggctggagtgcattggcacgatctcggctcactgcaagctccgcctcccaggttcacgcggttctcctgcctcagcctccccagcagctgggactacaggcgcctgccaccacacccggctaatttttttgtattttttagtagagacagggtttcaccgtgttagccaggatggtctcgatctcctgacctcatgatccacctgcctcggcctcccaaagtgctgggattacaggcatgagccaccgtgcccagctgggagtggacattcttagtgggctccccaggcgatactaaagtttcgggaccacaaacagcggtgtgtgtgctttggagtcgtgctgcttgggtacgagtcctgtcccctctcttagctgagtaaccttgggtgagtggttgcctctgagtgtcagtttcttcacagttgaaggaacttcccacggtgaggcgggaatgaccgtgctgcctgccttatgcagcttaggcaggaaagtgcatgtgagcctcctcacacatgaccagttcagcacatgtgagctcttaccgtcactggtgacgggtcttttacagtctgttagatgatgtcaccacctccaccatgaagctgctctgatttgccacagcagaacgtcctttgccaccttgagttcccagggaactgtgtctgcccgtctctcatggcatattgtaattgtctctatggcaagccaagccaaggacgtgacacatcagagttcttaggccagcccaggagctgagctcataccttttgaaggtccctgcctgcagtctctgtctggccctgccctgccacaatctcaggccataactgatctggagagggagctgggcctttgcatatgcctgcagaaaccttagagggctgaagtctcggcggcgggctggggtggtgaccctcccctagggcgaccagggccccttggaggagggctgcagtcccagcggcctggggtcgtggccctagggtgaccgggactccgtggcgactctggctctgtgttgttcctcccacccaggcctccactcgccacccggctgctggcccacaagatccagtccccacaggagtgggaggcgatccaggccttgacggtgagaaggggagaggccaccatccgtcccccgccatgtgacgacaccaagggaggccaagactgaggttcttggggtccataaggctcttcagagcccaagagagttgtgctaagatggcccaggatggaggtccgggcctgccccaagggtcccaccacagccagcgggctggcctcccaccccagcatccatacacgtaggcctgttgctgagggaaggccctctagggtcatctggtccaggggttctttgcttcagctgcacatcggctgcctctccaggaagcgtgttcaacacatggaatcagggctccacccagacctgccgaggccacactcctggagtatctgcatccagagatctgcacgtttgtaaagctaaggggtggtgcttgggctcaggcctgaggttttgcatctgttcaatagcagaggagagaggggtgtactgtctgtggcccccagcatgggccacataccaacccaccatggagcaaagctgattttaagtggtggtagagatacagtttctcttttaatacttacgtgtttagttgggtgcagtggcttatacctgtaatttcagcacttggggaggccaaggcaggaggcttgcttgaggcaaggagttcaaggctacagtgagctatgattgtgccactgtactccagactggacaacagagtgagaccccatctctaaataataatcattattgttacatatttgttttaacatttttttctcaagtataactagtcctatgatttcatagatgtagcttaggataaggccaaggtaggtgttgcctatataaggtttttttaaaaaaggaaaaataggccgggctggtggctcacgcctgtaatcccagcactttggcaggctgaggcgggcagatcacctgagatcaggagttcaagatcagcctgaccaacatggagaagccccatgtctactaaaaataaaaaattagcgaggcgtggtgggcgggcgcctgtaatcccagctacttgggaggctgaggcagaagaatcatttgaacccaggaggcagaggttacagtgagccgagatcgtgctactgcattccaacctgggcaacaagagtgaaactctgtctcaaaaaaaaaaaaaaaaaggaaaaatagtaagaaaataatgtacagttggtactcagatgtggggcctaagctatgaatgggactagagcattgctacaggttgggcattgctgggcactgtatgtaggtcgcctgaccctatctcccatgggagtgatgaccagtcccagaggcctgtgtgactctgaatcttccaacctcacaggccattccctcccttctgaaagcccacccatgggcttctggcccctgtccaaggcgtgggagggaggccacggcctctgatgcacctgggcgtcccctcccatcccccctccctgcacaggtgctggaaacatgcatgaagagctgcggcaagcggttccacgacgaagtgggcaagttccgctttct

SEQ ID NO: 12162 - DNA, 483 bp, Homo sapiens
gagcgatggaggaccccggccccggcgcggtccagcggtgggagcgggcgccgcccacctgtcggatccctgggccatgacccctgggacggcgagtgtggacatgagtggctgggatgcagtgccgtagcaggctgggggacacaaaagagaactgacccagcactgctaccctgggcaggagtagaggattagagaaggggacaccggagccactcccaagggaatgaaggctttctgaacctggtgtgatgatagagccacgaaccccctgaacaaggagctcgactgggccagcatcaacggcttctgcgagcagctcaacgaggactttgaggggcctccactcgccacccggctgctggcccacaagatccagtccccacaggagtgggaggcgatccaggccttgacggtgctggaaacatgcatgaagagctgcggcaagcggttccacgacgaagtgggcaagttccgctttct

SEQ ID NO: 12163 - DNA, 11398 bp, Homo sapiens
ggaaccggaaccgggggcacgaggcgggccccttcccggcgggggcggggtacgggtcgccccctcctcacgccccgcccccggcccgggaggggcggtgtcctcagtcggcccctcagaccctggagcgatggaggaccccggccccggcgcggtccagcggtgggagcgggcgccgcccacctgtcggatccctgggccatgacccctgggacggcgagtgagctgcgccgggaacccccgggacggagagagcagcctccaacccccaaggctcacattgcttcacggagtagcggcccggggaaggagcacgcgagcggttccccggggttgcatctcacacccgggagggagggaccctactattttcaggccccgaatcctccactctctggccctgcatggcgttcctggagcccgcaagtagtcacatttgctcattaccccgtcctggaagggaggacccactgccccatttgattcctcccgccgctcctagtctctagccacatagtgagaaacccccgcaccctacaggcttgggagagtcttagactccagaagtattaataattccaagctccctgtcactcccttcagcctaacccctcagtctccaagatgcctttcccagctcttgctgaacttccttcaaaggcttctacacccctttttttcttgtttctcctcagacgtagcttcctattgcttaggcttcctagcccgcaaaccctccacctgagctccttaacccacagccctgatgatcccctgctctcacagccccgctcctggactctgcctctgaaagccgtggctggcttctccctggtctagtgagggttctctcccaaggctttaactgctgttgggaccccgtcgttgccagggcctcagggaaccctcttggacccgggcacaccggcaactgtctagcgtggtttggggtcatggccggccccttttaagccaggcttgagcagagttgaaccatgaggttggccccagaaccaaacctctagggatgtttcagagtcatcctagccaccagaggggcagggggtggaaaaggggcactcagcagcccttgaccgttgtgaacgccggaagtgtccgcctgggtctcagcagcaactgggctggggggatgggtgggcccctggctaactgatctcagacacaggtcttgagctgtgggtcatacaaaacattctcaggtttagaaacagtgggggttttctgagagtccagagagtctaaaaccaggcagaagttagagatacctgggtttggctgggccctgacacactggggctgggattttctcctttccttccccctttgtgtcctagcagaattgtaagatctttcctcttcccttgtggaggctggaggtaaaggatagcttcttctttttttttttgagacgggttttcactcttgtcacccaggctggagtgcagtggcacaatctcagctctctgcaacctccacctcccgggttcaagtgattctcctgtctcagcctcccgagtagctggaattacaggtgcgccaccacgcccagctatttttgtatttttagtacaggtgggctttcaccatgttggccaggctgatctcgaactcctgacctcaggtgatccgcctatataggcctctcaaagtgttgggattacaggcgttagccactcatccgcccacgtcggcctctcaaagtgttgggattacaggcgtgagccaccgcgcccggcctagtgaggtaaatgatgttattgtcagcactatagagtggcagggtggagtcttaccctgttgtgaaacacctccctccctctctaggtgttctccccaactgcctgctagggagggtactcccctcaggtagaattaagagggctgagggtcaggggccatgggccaaggaggtcagtcagatctccttggatctggaggccctggctttcagccagaggcagggggagaaagatgatgtctcatgatgccagcgcttcctcttcactggcgtctgacccaggagcagtccagaatcagcttctctgacctcactccaactcacgtgtctttgacactttaagggacttcctgttttagggtcttctggctgggtgtcattgaatgggcagtgattctctaactttagactgatgttccccagcctttgtttggggactcggaggcagagtagacagttacccttacccctgggttggggagggtcatattcctggtatccccaggaggtcaacaggggcttcatttttctgagggactagagggtcttgtggagctcctgggacagagatctagatccagagagaacattcgtccttccgatctcagctcagctctgagagccctcccagagagcagctcccgagggctccagagccctccgaaagccctcccagagagcagcccccacctcccaggctgtctgcacttctccttgctatgctttgctctgtaacattttgcaacagtctgcagtacacggggtttgttaatctgagtattcattgtttctcttgctgggcagtgaacttgaggagggcagggattttgtctgttcactgctggagccccagcacccagaatacttaaatctgagttggatgaatggcggccagccactgggattccagggctttgggccccctgccataacatatggcccagggcaggcgccacatgctgggtcagtccccagcctcctgtccacagatccttctctgttctacctcctgggctgtgtccttccacaccctcagctcggtgctcaggcgtgggcagaactggctgggaaggggtggtccttagaggtgggctgtggagaaatgaagatcgagctctggctgccgccatggccttcccatgcaaaaagtattttgtcatccaaaatcaatattttggtcaggcacagtggctcatgcctgtaatcccagcactttgggtggccgaggtgggtggatcatttgaggtcaggagtttgagaccagcctgaccaacatggtgaaattccatctctaccaaaaatacaaaaaaattagctgggcatggtggtggacgcctgtgatcccagctactctcaggaggctgaagcaggagaatcgtttgaacccaggaagctgagattgcagtgagccgagatctcgccactgcactccagcctgggcaacaaagcaagactctttctcaaaaaaaaataaaaataaaaaaatacaggccggacgcagtggctcacacctgtaattccagtactttgggaggccgaggcaggtggatcacgaggttaggagatcaagaccatcctggctaacacagtgaaaccccgtctctactaaaaatacaaaaaaaaaaaaaattagccgggcgtggtggcgggcacctgtagtcccagctactcgggaggctgaggcaggagaatggcgtgaacctgggaggcagagtttgcagtcagccgagatcacaccactgcactccagcctgggcgatagagcgagactccgtctcaaaaaaaaaaaaaaatacagccgggcacggtggctcacacctgtaatcccagcactttgggaggccaaggtgggcggatcacaaggtcaggagattgagaccatcctggctaacatggtgaaaccctgtctctactaaaaatacaaaaaaaaattagccgggcgtggtggcgggtgcctgtagtcccagctactcgggaggctgaggaaggagaatggcatgaacctgggaggcggagcttgcagtgagccgagatcgtgccactgcactccagcctgggcaacagcgtgagactcgtctcaaaaaaaaaaaaaaatccatatttcattccagctttacaagatggggaaatggaggttcagggaagcatgtaagctagattgttgtttaaccagtattgggggttaaaggggtagctgtctggtcgtgtttacaccacttcatgtagacctgttggccctctttccttgccactatccatttctggattcagtcttccccagaacctcaccctttgcctgccctcagctgactgctcattcatttgccaaggggagacaggtgtggacatgagtggctgggatgcagtgccgtagcaggctgggggacacaaaagagaactgacccagcactgctaccctgggcaggagtagaggattagagaaggggacaccggagccactcccaagggaatgaaggctttctgaacctggtgtgatggtaagactcacactccttactgaggcccctcattctctgcctcgtgtggttacccgcatctttcctgcccatacagccatgcgtgggtcagaggtgtaccagctccagcctgggtgactcctcctggtccctgcttgtgtgttgcctcttccaggcagcctcctcagccccaaactgaactgagtcccctcctctgtgtttcttttttgtttgtttgagacggagtcacccagagtcccagctctgtcacccaggctggagggcagtggcgagacctcggctcactccaagctccgcctcccgggttcacgccattctcctgcctcagcctcccaagtagctgggactacaggcacccaccaccaagcccggctaatttttgtatttttagtagagatggggtttcatcgtgttagctaggatggtcttgatctcctgacctcgtgatccacccacctcagcctcccaaagtgctgggattacaggcatgagccaccgtgcctggcccctcctctgtgtttctacagctccttggcttccctctgtcacacgttattgagaacctagcttcccttggcccacttcccggctacacagctccttgagggcgggactatgatttttttctcccttacttctggatctcctctgagcataaatttcatgagaattatggagacactgttctcagcagaatcagaggaggtggggctggcgtgatgggtccagctgcaggggtgggaggagtggggaggaggggaagggccctgaccatagtctctaaaagtggggccctttggagggcagctgtgctcatctgtctgtctacacccacaatcaggtcttgaggctgtctgggcaggaaggcagggggagagctttcccacgtgctcagtcacactcctctcccactcctgaccacacctttgccagggtcaggagtggaagagcaggaatcccactgccgggccacaatgaccccagctctcctcttccagatagagccacgaaccccctgaacaaggagctcgactgggccagcatcaacggcttctgcgagcagctcaacgaggactttgaggggtaggtggccgtccccacttgtttgcactgccctgcactctccagaacccagtctcgggtacaatggcctgggtgggtggagacccggttttcattctgaacgtattcacaaagtgatgaggatggggcacttggcactgaatgctgtttgggtgtcactctctggggtgggccttgctggaaccatttaacaggtaaagaaatcaaggctcagaggactcagatctgcccccacatctcacagggagaaaatgctagtcctgagcttggtaagacccaggcctgctggacctgcagccagtgctttgtggggaaaggccccccagagggagaactgcatgttccccaattgggaggaggccagtaggccctttgctcaaggacgaaccagaactacctgtgttagaatcacctagaatgttggccaggcacagtggctcatgcctgtaatcccagcactttggaaggccgaagtgggtggattacctgaggtcaggagtttgagaccagcgtggccaacatggtgacaccccgtctctactaaaaatgcaaaaattagctgggcgtggtggcacgtgcctgtaatcccagctactcaggaggctgaggcaggagaattgcttgaacccaagagacagagattgtaatgagccgagattgcgccactgccctgcagcctgggcagcagagtgagactctgtctcgaaaaacaaaacaaagaattacctagaatgcttgtcagaaatgtacattcttagccaggcatggtggtgcacacctgtaatctcagttactggggaggccaaggcgggaggatcccttgaggctagcctgggcaacatagcggggcaacatagcgagacatcatctcttaaaaaataaaaaaataggccaggcatggtggctcacgcctgtaatcccagcactttgggaggccaaggcaggtggatcacctgaggttgggagttcaagaccagccttaccaacatagagaaatcccatctctactaaaaatacaaaaaaaattagccgggcatggtggtgcatgcctgtaatcccagctactcgggaggctgaggcaggagaattgcttgaacccaggaggtagaagttgcagtgagccaagatcgtgccattgcactccagcctgggcgacggagtgaaactccgtctcaaaaaataagtaaataaataaataataaaaaataaggccgggtgtggtggcttacgtctataatcccagcactctgggaggctgaggcaggtggatcacgaggccaacagattgagaccatcctggccaacatggtgaaaccccatctctactaaaaatgcaaaaattagcaaggagcggtggtgtgcgcctgtagtcccagctactcgggaggctgaggcaggagaatcgcttgaacccgggaggctgaggttgcagtgagccaagattgcattactgcactccagcatggtgacggtgagactccatctcaaaaaaataaataaagtaaatgcaccttcttgggctgcccccagactcgactgtccagtggggggttgggagtggacattctttttatttttttttttgagatggagtctcgctctgtcgcccaggctggagtgcattggcacgatctcggctcactgcaagctccgcctcccaggttcacgcggttctcctgcctcagcctccccagcagctgggactacaggcgcctgccaccacacccggctaatttttttgtattttttagtagagacagggtttcaccgtgttagccaggatggtctcgatctcctgacctcatgatccacctgcctcggcctcccaaagtgctgggattacaggcatgagccaccgtgcccagctgggagtggacattcttagtgggctccccaggcgatactaaagtttcgggaccacaaacagcggtgtgtgtgctttggagtcgtgctgcttgggtacgagtcctgtcccctctcttagctgagtaaccttgggtgagtggttgcctctgagtgtcagtttcttcacagttgaaggaacttcccacggtgaggcgggaatgaccgtgctgcctgccttatgcagcttaggcaggaaagtgcatgtgagcctcctcacacatgaccagttcagcacatgtgagctcttaccgtcactggtgacgggtcttttacagtctgttagatgatgtcaccacctccaccatgaagctgctctgatttgccacagcagaacgtcctttgccaccttgagttcccagggaactgtgtctgcccgtctctcatggcatattgtaattgtctctatggcaagccaagccaaggacgtgacacatcagagttcttaggccagcccaggagctgagctcataccttttgaaggtccctgcctgcagtctctgtctggccctgccctgccacaatctcaggccataactgatctggagagggagctgggcctttgcatatgcctgcagaaaccttagagggctgaagtctcggcggcgggctggggtggtgaccctcccctagggcgaccagggccccttggaggagggctgcagtcccagcggcctggggtcgtggccctagggtgaccgggactccgtggcgactctggctctgtgttgttcctcccacccaggcctccactcgccacccggctgctggcccacaagatccagtccccacaggagtgggaggcgatccaggccttgacggtgagaaggggagaggccaccatccgtcccccgccatgtgacgacaccaagggaggccaagactgaggttcttggggtccataaggctcttcagagcccaagagagttgtgctaagatggcccaggatggaggtccgggcctgccccaagggtcccaccacagccagcgggctggcctcccaccccagcatccatacacgtaggcctgttgctgagggaaggccctctagggtcatctggtccaggggttctttgcttcagctgcacatcggctgcctctccaggaagcgtgttcaacacatggaatcagggctccacccagacctgccgaggccacactcctggagtatctgcatccagagatctgcacgtttgtaaagctaaggggtggtgcttgggctcaggcctgaggttttgcatctgttcaatagcagaggagagaggggtgtactgtctgtggcccccagcatgggccacataccaacccaccatggagcaaagctgattttaagtggtggtagagatacagtttctcttttaatacttacgtgtttagttgggtgcagtggcttatacctgtaatttcagcacttggggaggccaaggcaggaggcttgcttgaggcaaggagttcaaggctacagtgagctatgattgtgccactgtactccagactggacaacagagtgagaccccatctctaaataataatcattattgttacatatttgttttaacatttttttctcaagtataactagtcctatgatttcatagatgtagcttaggataaggccaaggtaggtgttgcctatataaggtttttttaaaaaaggaaaaataggccgggctggtggctcacgcctgtaatcccagcactttggcaggctgaggcgggcagatcacctgagatcaggagttcaagatcagcctgaccaacatggagaagccccatgtctactaaaaataaaaaattagcgaggcgtggtgggcgggcgcctgtaatcccagctacttgggaggctgaggcagaagaatcatttgaacccaggaggcagaggttacagtgagccgagatcgtgctactgcattccaacctgggcaacaagagtgaaactctgtctcaaaaaaaaaaaaaaaaaggaaaaatagtaagaaaataatgtacagttggtactcagatgtggggcctaagctatgaatgggactagagcattgctacaggttgggcattgctgggcactgtatgtaggtcgcctgaccctatctcccatgggagtgatgaccagtcccagaggcctgtgtgactctgaatcttccaacctcacaggccattccctcccttctgaaagcccacccatgggcttctggcccctgtccaaggcgtgggagggaggccacggcctctgatgcacctgggcgtcccctcccatcccccctccctgcacaggtgctggaaacatgcatgaagagctgcggcaagcggttccacgacgaagtgggcaagttccgctttctcaacgagctcatcaaggtcgtgtctcccaaggttggtgcccccagcccaagctcagacctgccctgtcggatgtggggagaggaaagaggaccttcagattgtggagcgacttttccagggagcctcccactggggtgtcacctcagccccccattagaactcagacctaggaaaaacacagatctcttctcacagtcctctcatacctgattctgggacagcctggggtctcggaggagtgtttccaggctggccaggggcggggcagccatggagctgcccggtgcttaggaagaaatgattccagggaatacataagctgacagatggctgtatgtgtcagccatctctggcctgaaatcactccctgtggacctggccacagaaccctacctggtctctggcaggtttccctgtccccaccacacaagagcaacctccctggacctcagcatccaaggccacagacctgagtgatggagcctgctggctccagacgggccatccccggctcagcccaaggagtcttcccacagaccatgaacgtttctttttctttatttttttgagatggagtcttgctctgtcacccaggctggagtgcaatggcatgatctctacgctccacaacctccacctcctgggttcaagcaattctcctgcctcaacctcccaagtagctgggattgcaggtgcacgccaccatgcccggctaattttttgtatttttagtagagatggggtttcaccatgttggccaggctggtcttgaactcctgacctcatgatctgcctgtcgtggactcccaaagtgccgggattacaggcgtgagccaccatgcccggcctacctaccgtgaacattttttttttttttttgacaaggagtttcactcttgtcacccaagctggagtgcaatggcgcgatctcagctcactgcaccctccacctcccaggtttgagcaattctcctgcctcatcctccagagtagctgcaattataggtgcccaccaccaagcctggctaattttttatttttagtagagacagggtttcaccatattggtcaggctggtcttgaactcctgacctcatgatccacctgcattggcctcccaaagtgctgggattacaggcgtgagccatggcctccggcctactgtgaacatttcttaagctgtttgagtgacagcccacccccttggcccttccttgctcagacccatcctttgaccagagctactgaataatccatatggcctcccattctcctcccaacaggggactctgctgtgagagccactttccccagcccagtttgctgctaggagacggagagtaggcccagggcctcccagttccaccctcacccctccctgggcagcctggagacctctggctcctctttcctgggatgtcaaggctaagtccccagagccgactatgagcaggcctgtccctcatgtcagttctgcatcctcaccatggtgccatctagcaggtggggaaacagacactgagggctgacccagctaataagtggcaggggtagtaggtgaactcagtctaccccaggctggttgggcggggctatgaggaccctgtaggctagagggcttcccggggagtcctggggaggcagtagggtgtggacagggcttgagactgaagtgagtggggctgggcagtatcaaaggcctccccactgtgtccctgaagtatctgggctctcggacatcggagaaggtgaagaacaagatcttggagctcctctacagctggacagtgggcctgcccgaggaggtgaaaatcgc

SEQ ID NO: 12164 - DNA, 568 bp, Homo sapiens
ggaaccggaaccgggggcacgaggcgggccccttcccggcgggggcggggggagacaggtgtggacatgagtggctgggatgcagtgccgtagcaggctgggggacacaaaagagaactgacccagcactgctaccctgggcaggagtagaggattagagaaggggacaccggagccactcccaagggaatgaaggctttctgaacctggtgtgatgagccacgaaccccctgaacaaggagctcgactgggccagcatcaacggcttctgcgagcagctcaacgaggactttgaggggcctccactcgccacccggctgctggcccacaagatccagtccccacaggagtgggaggcgatccaggccttgacggtgctggaaacatgcatgaagagctgcggcaagcggttccacgacgaagtgggcaagttccgctttctcaacgagctcatcaaggtcgtgtctcccaagtatctgggctctcggacatcggagaaggtgaagaacaagatcttggagctcctctacagctggacagtgggcctgcccgaggaggtgaaaatcgc

SEQ ID NO: 12165 - DNA, 9507 bp, Homo sapiens
agtcggcccctcagaccctggagcgatggaggaccccggccccggcgcggtccagcggtgggagcgggcgccgcccacctgtcggatccctgggccatgacccctgggacggcgagtgagctgcgccgggaacccccgggacggagagagcagcctccaacccccaaggctcacattgcttcacggagtagcggcccggggaaggagcacgcgagcggttccccggggttgcatctcacacccgggagggagggaccctactattttcaggccccgaatcctccactctctggccctgcatggcgttcctggagcccgcaagtagtcacatttgctcattaccccgtcctggaagggaggacccactgccccatttgattcctcccgccgctcctagtctctagccacatagtgagaaacccccgcaccctacaggcttgggagagtcttagactccagaagtattaataattccaagctccctgtcactcccttcagcctaacccctcagtctccaagatgcctttcccagctcttgctgaacttccttcaaaggcttctacacccctttttttcttgtttctcctcagacgtagcttcctattgcttaggcttcctagcccgcaaaccctccacctgagctccttaacccacagccctgatgatcccctgctctcacagccccgctcctggactctgcctctgaaagccgtggctggcttctccctggtctagtgagggttctctcccaaggctttaactgctgttgggaccccgtcgttgccagggcctcagggaaccctcttggacccgggcacaccggcaactgtctagcgtggtttggggtcatggccggccccttttaagccaggcttgagcagagttgaaccatgaggttggccccagaaccaaacctctagggatgtttcagagtcatcctagccaccagaggggcagggggtggaaaaggggcactcagcagcccttgaccgttgtgaacgccggaagtgtccgcctgggtctcagcagcaactgggctggggggatgggtgggcccctggctaactgatctcagacacaggtcttgagctgtgggtcatacaaaacattctcaggtttagaaacagtgggggttttctgagagtccagagagtctaaaaccaggcagaagttagagatacctgggtttggctgggccctgacacactggggctgggattttctcctttccttccccctttgtgtcctagcagaattgtaagatctttcctcttcccttgtggaggctggaggtaaaggatagcttcttctttttttttttgagacgggttttcactcttgtcacccaggctggagtgcagtggcacaatctcagctctctgcaacctccacctcccgggttcaagtgattctcctgtctcagcctcccgagtagctggaattacaggtgcgccaccacgcccagctatttttgtatttttagtacaggtgggctttcaccatgttggccaggctgatctcgaactcctgacctcaggtgatccgcctatataggcctctcaaagtgttgggattacaggcgttagccactcatccgcccacgtcggcctctcaaagtgttgggattacaggcgtgagccaccgcgcccggcctagtgaggtaaatgatgttattgtcagcactatagagtggcagggtggagtcttaccctgttgtgaaacacctccctccctctctaggtgttctccccaactgcctgctagggagggtactcccctcaggtagaattaagagggctgagggtcaggggccatgggccaaggaggtcagtcagatctccttggatctggaggccctggctttcagccagaggcagggggagaaagatgatgtctcatgatgccagcgcttcctcttcactggcgtctgacccaggagcagtccagaatcagcttctctgacctcactccaactcacgtgtctttgacactttaagggacttcctgttttagggtcttctggctgggtgtcattgaatgggcagtgattctctaactttagactgatgttccccagcctttgtttggggactcggaggcagagtagacagttacccttacccctgggttggggagggtcatattcctggtatccccaggaggtcaacaggggcttcatttttctgagggactagagggtcttgtggagctcctgggacagagatctagatccagagagaacattcgtccttccgatctcagctcagctctgagagccctcccagagagcagctcccgagggctccagagccctccgaaagccctcccagagagcagcccccacctcccaggctgtctgcacttctccttgctatgctttgctctgtaacattttgcaacagtctgcagtacacggggtttgttaatctgagtattcattgtttctcttgctgggcagtgaacttgaggagggcagggattttgtctgttcactgctggagccccagcacccagaatacttaaatctgagttggatgaatggcggccagccactgggattccagggctttgggccccctgccataacatatggcccagggcaggcgccacatgctgggtcagtccccagcctcctgtccacagatccttctctgttctacctcctgggctgtgtccttccacaccctcagctcggtgctcaggcgtgggcagaactggctgggaaggggtggtccttagaggtgggctgtggagaaatgaagatcgagctctggctgccgccatggccttcccatgcaaaaagtattttgtcatccaaaatcaatattttggtcaggcacagtggctcatgcctgtaatcccagcactttgggtggccgaggtgggtggatcatttgaggtcaggagtttgagaccagcctgaccaacatggtgaaattccatctctaccaaaaatacaaaaaaattagctgggcatggtggtggacgcctgtgatcccagctactctcaggaggctgaagcaggagaatcgtttgaacccaggaagctgagattgcagtgagccgagatctcgccactgcactccagcctgggcaacaaagcaagactctttctcaaaaaaaaataaaaataaaaaaatacaggccggacgcagtggctcacacctgtaattccagtactttgggaggccgaggcaggtggatcacgaggttaggagatcaagaccatcctggctaacacagtgaaaccccgtctctactaaaaatacaaaaaaaaaaaaaattagccgggcgtggtggcgggcacctgtagtcccagctactcgggaggctgaggcaggagaatggcgtgaacctgggaggcagagtttgcagtcagccgagatcacaccactgcactccagcctgggcgatagagcgagactccgtctcaaaaaaaaaaaaaaatacagccgggcacggtggctcacacctgtaatcccagcactttgggaggccaaggtgggcggatcacaaggtcaggagattgagaccatcctggctaacatggtgaaaccctgtctctactaaaaatacaaaaaaaaattagccgggcgtggtggcgggtgcctgtagtcccagctactcgggaggctgaggaaggagaatggcatgaacctgggaggcggagcttgcagtgagccgagatcgtgccactgcactccagcctgggcaacagcgtgagactcgtctcaaaaaaaaaaaaaaatccatatttcattccagctttacaagatggggaaatggaggttcagggaagcatgtaagctagattgttgtttaaccagtattgggggttaaaggggtagctgtctggtcgtgtttacaccacttcatgtagacctgttggccctctttccttgccactatccatttctggattcagtcttccccagaacctcaccctttgcctgccctcagctgactgctcattcatttgccaaggggagacaggtgtggacatgagtggctgggatgcagtgccgtagcaggctgggggacacaaaagagaactgacccagcactgctaccctgggcaggagtagaggattagagaaggggacaccggagccactcccaagggaatgaaggctttctgaacctggtgtgatggtaagactcacactccttactgaggcccctcattctctgcctcgtgtggttacccgcatctttcctgcccatacagccatgcgtgggtcagaggtgtaccagctccagcctgggtgactcctcctggtccctgcttgtgtgttgcctcttccaggcagcctcctcagccccaaactgaactgagtcccctcctctgtgtttcttttttgtttgtttgagacggagtcacccagagtcccagctctgtcacccaggctggagggcagtggcgagacctcggctcactccaagctccgcctcccgggttcacgccattctcctgcctcagcctcccaagtagctgggactacaggcacccaccaccaagcccggctaatttttgtatttttagtagagatggggtttcatcgtgttagctaggatggtcttgatctcctgacctcgtgatccacccacctcagcctcccaaagtgctgggattacaggcatgagccaccgtgcctggcccctcctctgtgtttctacagctccttggcttccctctgtcacacgttattgagaacctagcttcccttggcccacttcccggctacacagctccttgagggcgggactatgatttttttctcccttacttctggatctcctctgagcataaatttcatgagaattatggagacactgttctcagcagaatcagaggaggtggggctggcgtgatgggtccagctgcaggggtgggaggagtggggaggaggggaagggccctgaccatagtctctaaaagtggggccctttggagggcagctgtgctcatctgtctgtctacacccacaatcaggtcttgaggctgtctgggcaggaaggcagggggagagctttcccacgtgctcagtcacactcctctcccactcctgaccacacctttgccagggtcaggagtggaagagcaggaatcccactgccgggccacaatgaccccagctctcctcttccagatagagccacgaaccccctgaacaaggagctcgactgggccagcatcaacggcttctgcgagcagctcaacgaggactttgaggggtaggtggccgtccccacttgtttgcactgccctgcactctccagaacccagtctcgggtacaatggcctgggtgggtggagacccggttttcattctgaacgtattcacaaagtgatgaggatggggcacttggcactgaatgctgtttgggtgtcactctctggggtgggccttgctggaaccatttaacaggtaaagaaatcaaggctcagaggactcagatctgcccccacatctcacagggagaaaatgctagtcctgagcttggtaagacccaggcctgctggacctgcagccagtgctttgtggggaaaggccccccagagggagaactgcatgttccccaattgggaggaggccagtaggccctttgctcaaggacgaaccagaactacctgtgttagaatcacctagaatgttggccaggcacagtggctcatgcctgtaatcccagcactttggaaggccgaagtgggtggattacctgaggtcaggagtttgagaccagcgtggccaacatggtgacaccccgtctctactaaaaatgcaaaaattagctgggcgtggtggcacgtgcctgtaatcccagctactcaggaggctgaggcaggagaattgcttgaacccaagagacagagattgtaatgagccgagattgcgccactgccctgcagcctgggcagcagagtgagactctgtctcgaaaaacaaaacaaagaattacctagaatgcttgtcagaaatgtacattcttagccaggcatggtggtgcacacctgtaatctcagttactggggaggccaaggcgggaggatcccttgaggctagcctgggcaacatagcggggcaacatagcgagacatcatctcttaaaaaataaaaaaataggccaggcatggtggctcacgcctgtaatcccagcactttgggaggccaaggcaggtggatcacctgaggttgggagttcaagaccagccttaccaacatagagaaatcccatctctactaaaaatacaaaaaaaattagccgggcatggtggtgcatgcctgtaatcccagctactcgggaggctgaggcaggagaattgcttgaacccaggaggtagaagttgcagtgagccaagatcgtgccattgcactccagcctgggcgacggagtgaaactccgtctcaaaaaataagtaaataaataaataataaaaaataaggccgggtgtggtggcttacgtctataatcccagcactctgggaggctgaggcaggtggatcacgaggccaacagattgagaccatcctggccaacatggtgaaaccccatctctactaaaaatgcaaaaattagcaaggagcggtggtgtgcgcctgtagtcccagctactcgggaggctgaggcaggagaatcgcttgaacccgggaggctgaggttgcagtgagccaagattgcattactgcactccagcatggtgacggtgagactccatctcaaaaaaataaataaagtaaatgcaccttcttgggctgcccccagactcgactgtccagtggggggttgggagtggacattctttttatttttttttttgagatggagtctcgctctgtcgcccaggctggagtgcattggcacgatctcggctcactgcaagctccgcctcccaggttcacgcggttctcctgcctcagcctccccagcagctgggactacaggcgcctgccaccacacccggctaatttttttgtattttttagtagagacagggtttcaccgtgttagccaggatggtctcgatctcctgacctcatgatccacctgcctcggcctcccaaagtgctgggattacaggcatgagccaccgtgcccagctgggagtggacattcttagtgggctccccaggcgatactaaagtttcgggaccacaaacagcggtgtgtgtgctttggagtcgtgctgcttgggtacgagtcctgtcccctctcttagctgagtaaccttgggtgagtggttgcctctgagtgtcagtttcttcacagttgaaggaacttcccacggtgaggcgggaatgaccgtgctgcctgccttatgcagcttaggcaggaaagtgcatgtgagcctcctcacacatgaccagttcagcacatgtgagctcttaccgtcactggtgacgggtcttttacagtctgttagatgatgtcaccacctccaccatgaagctgctctgatttgccacagcagaacgtcctttgccaccttgagttcccagggaactgtgtctgcccgtctctcatggcatattgtaattgtctctatggcaagccaagccaaggacgtgacacatcagagttcttaggccagcccaggagctgagctcataccttttgaaggtccctgcctgcagtctctgtctggccctgccctgccacaatctcaggccataactgatctggagagggagctgggcctttgcatatgcctgcagaaaccttagagggctgaagtctcggcggcgggctggggtggtgaccctcccctagggcgaccagggccccttggaggagggctgcagtcccagcggcctggggtcgtggccctagggtgaccgggactccgtggcgactctggctctgtgttgttcctcccacccaggcctccactcgccacccggctgctggcccacaagatccagtccccacaggagtgggaggcgatccaggccttgacggtgagaaggggagaggccaccatccgtcccccgccatgtgacgacaccaagggaggccaagactgaggttcttggggtccataaggctcttcagagcccaagagagttgtgctaagatggcccaggatggaggtccgggcctgccccaagggtcccaccacagccagcgggctggcctcccaccccagcatccatacacgtaggcctgttgctgagggaaggccctctagggtcatctggtccaggggttctttgcttcagctgcacatcggctgcctctccaggaagcgtgttcaacacatggaatcagggctccacccagacctgccgaggccacactcctggagtatctgcatccagagatctgcacgtttgtaaagctaaggggtggtgcttgggctcaggcctgaggttttgcatctgttcaatagcagaggagagaggggtgtactgtctgtggcccccagcatgggccacataccaacccaccatggagcaaagctgattttaagtggtggtagagatacagtttctcttttaatacttacgtgtttagttgggtgcagtggcttatacctgtaatttcagcacttggggaggccaaggcaggaggcttgcttgaggcaaggagttcaaggctacagtgagctatgattgtgccactgtactccagactggacaacagagtgagaccccatctctaaataataatcattattgttacatatttgttttaacatttttttctcaagtataactagtcctatgatttcatagatgtagcttaggataaggccaaggtaggtgttgcctatataaggtttttttaaaaaaggaaaaataggccgggctggtggctcacgcctgtaatcccagcactttggcaggctgaggcgggcagatcacctgagatcaggagttcaagatcagcctgaccaacatggagaagccccatgtctactaaaaataaaaaattagcgaggcgtggtgggcgggcgcctgtaatcccagctacttgggaggctgaggcagaagaatcatttgaacccaggaggcagaggttacagtgagccgagatcgtgctactgcattccaacctgggcaacaagagtgaaactctgtctcaaaaaaaaaaaaaaaaaggaaaaatagtaagaaaataatgtacagttggtactcagatgtggggcctaagctatgaatgggactagagcattgctacaggttgggcattgctgggcactgtatgtaggtcgcctgaccctatctcccatgggagtgatgaccagtcccagaggcctgtgtgactctgaatcttccaacctcacaggccattccctcccttctgaaagcccacccatgggcttctggcccctgtccaaggcgtgggagggaggccacggcctctgatgcacctgggcgtcccctcccatcccccctccctgcacaggtgctggaaacatgcatgaagagctgcggcaagcggttccacgacgaagtgggcaagttccgctttctcaacgagctcatcaaggtcgtgtctcccaag

SEQ ID NO: 12166 - DNA, 577 bp, Homo sapiens
agtcggcccctcagaccctggagcgatggaggaccccggccccggcgcggtccagcggtgggagcgggcgccgcccacctgtcggatccctgggccatgacccctgggacggcgagtgagctgcgccgggaacccccgggacggagagagcagcctccaacccccaaggctcacattgcttcacggagtagcggcccggggaaggagcacgcgagcggttccccggggttgcatctcacacccgggagggagggaccctactattttcaggccccgaatcctccactctctggccctgcatggcgttcctggagcccatagagccacgaaccccctgaacaaggagctcgactgggccagcatcaacggcttctgcgagcagctcaacgaggactttgaggggcctccactcgccacccggctgctggcccacaagatccagtccccacaggagtgggaggcgatccaggccttgacggtgctggaaacatgcatgaagagctgcggcaagcggttccacgacgaagtgggcaagttccgctttctcaacgagctcatcaaggtcgtgtctcccaag

SEQ ID NO: 12167 - DNA, 14617 bp, Homo sapiens
ggggcacgaggcgggccccttcccggcgggggcggggtacgggtcgccccctcctcacgccccgcccccggcccgggaggggcggtgtcctcagtcggcccctcagaccctggagcgatggaggaccccggccccggcgcggtccagcggtgggagcgggcgccgcccacctgtcggatccctgggccatgacccctgggacggcgagtgagctgcgccgggaacccccgggacggagagagcagcctccaacccccaaggctcacattgcttcacggagtagcggcccggggaaggagcacgcgagcggttccccggggttgcatctcacacccgggagggagggaccctactattttcaggccccgaatcctccactctctggccctgcatggcgttcctggagcccgcaagtagtcacatttgctcattaccccgtcctggaagggaggacccactgccccatttgattcctcccgccgctcctagtctctagccacatagtgagaaacccccgcaccctacaggcttgggagagtcttagactccagaagtattaataattccaagctccctgtcactcccttcagcctaacccctcagtctccaagatgcctttcccagctcttgctgaacttccttcaaaggcttctacacccctttttttcttgtttctcctcagacgtagcttcctattgcttaggcttcctagcccgcaaaccctccacctgagctccttaacccacagccctgatgatcccctgctctcacagccccgctcctggactctgcctctgaaagccgtggctggcttctccctggtctagtgagggttctctcccaaggctttaactgctgttgggaccccgtcgttgccagggcctcagggaaccctcttggacccgggcacaccggcaactgtctagcgtggtttggggtcatggccggccccttttaagccaggcttgagcagagttgaaccatgaggttggccccagaaccaaacctctagggatgtttcagagtcatcctagccaccagaggggcagggggtggaaaaggggcactcagcagcccttgaccgttgtgaacgccggaagtgtccgcctgggtctcagcagcaactgggctggggggatgggtgggcccctggctaactgatctcagacacaggtcttgagctgtgggtcatacaaaacattctcaggtttagaaacagtgggggttttctgagagtccagagagtctaaaaccaggcagaagttagagatacctgggtttggctgggccctgacacactggggctgggattttctcctttccttccccctttgtgtcctagcagaattgtaagatctttcctcttcccttgtggaggctggaggtaaaggatagcttcttctttttttttttgagacgggttttcactcttgtcacccaggctggagtgcagtggcacaatctcagctctctgcaacctccacctcccgggttcaagtgattctcctgtctcagcctcccgagtagctggaattacaggtgcgccaccacgcccagctatttttgtatttttagtacaggtgggctttcaccatgttggccaggctgatctcgaactcctgacctcaggtgatccgcctatataggcctctcaaagtgttgggattacaggcgttagccactcatccgcccacgtcggcctctcaaagtgttgggattacaggcgtgagccaccgcgcccggcctagtgaggtaaatgatgttattgtcagcactatagagtggcagggtggagtcttaccctgttgtgaaacacctccctccctctctaggtgttctccccaactgcctgctagggagggtactcccctcaggtagaattaagagggctgagggtcaggggccatgggccaaggaggtcagtcagatctccttggatctggaggccctggctttcagccagaggcagggggagaaagatgatgtctcatgatgccagcgcttcctcttcactggcgtctgacccaggagcagtccagaatcagcttctctgacctcactccaactcacgtgtctttgacactttaagggacttcctgttttagggtcttctggctgggtgtcattgaatgggcagtgattctctaactttagactgatgttccccagcctttgtttggggactcggaggcagagtagacagttacccttacccctgggttggggagggtcatattcctggtatccccaggaggtcaacaggggcttcatttttctgagggactagagggtcttgtggagctcctgggacagagatctagatccagagagaacattcgtccttccgatctcagctcagctctgagagccctcccagagagcagctcccgagggctccagagccctccgaaagccctcccagagagcagcccccacctcccaggctgtctgcacttctccttgctatgctttgctctgtaacattttgcaacagtctgcagtacacggggtttgttaatctgagtattcattgtttctcttgctgggcagtgaacttgaggagggcagggattttgtctgttcactgctggagccccagcacccagaatacttaaatctgagttggatgaatggcggccagccactgggattccagggctttgggccccctgccataacatatggcccagggcaggcgccacatgctgggtcagtccccagcctcctgtccacagatccttctctgttctacctcctgggctgtgtccttccacaccctcagctcggtgctcaggcgtgggcagaactggctgggaaggggtggtccttagaggtgggctgtggagaaatgaagatcgagctctggctgccgccatggccttcccatgcaaaaagtattttgtcatccaaaatcaatattttggtcaggcacagtggctcatgcctgtaatcccagcactttgggtggccgaggtgggtggatcatttgaggtcaggagtttgagaccagcctgaccaacatggtgaaattccatctctaccaaaaatacaaaaaaattagctgggcatggtggtggacgcctgtgatcccagctactctcaggaggctgaagcaggagaatcgtttgaacccaggaagctgagattgcagtgagccgagatctcgccactgcactccagcctgggcaacaaagcaagactctttctcaaaaaaaaataaaaataaaaaaatacaggccggacgcagtggctcacacctgtaattccagtactttgggaggccgaggcaggtggatcacgaggttaggagatcaagaccatcctggctaacacagtgaaaccccgtctctactaaaaatacaaaaaaaaaaaaaattagccgggcgtggtggcgggcacctgtagtcccagctactcgggaggctgaggcaggagaatggcgtgaacctgggaggcagagtttgcagtcagccgagatcacaccactgcactccagcctgggcgatagagcgagactccgtctcaaaaaaaaaaaaaaatacagccgggcacggtggctcacacctgtaatcccagcactttgggaggccaaggtgggcggatcacaaggtcaggagattgagaccatcctggctaacatggtgaaaccctgtctctactaaaaatacaaaaaaaaattagccgggcgtggtggcgggtgcctgtagtcccagctactcgggaggctgaggaaggagaatggcatgaacctgggaggcggagcttgcagtgagccgagatcgtgccactgcactccagcctgggcaacagcgtgagactcgtctcaaaaaaaaaaaaaaatccatatttcattccagctttacaagatggggaaatggaggttcagggaagcatgtaagctagattgttgtttaaccagtattgggggttaaaggggtagctgtctggtcgtgtttacaccacttcatgtagacctgttggccctctttccttgccactatccatttctggattcagtcttccccagaacctcaccctttgcctgccctcagctgactgctcattcatttgccaaggggagacaggtgtggacatgagtggctgggatgcagtgccgtagcaggctgggggacacaaaagagaactgacccagcactgctaccctgggcaggagtagaggattagagaaggggacaccggagccactcccaagggaatgaaggctttctgaacctggtgtgatggtaagactcacactccttactgaggcccctcattctctgcctcgtgtggttacccgcatctttcctgcccatacagccatgcgtgggtcagaggtgtaccagctccagcctgggtgactcctcctggtccctgcttgtgtgttgcctcttccaggcagcctcctcagccccaaactgaactgagtcccctcctctgtgtttcttttttgtttgtttgagacggagtcacccagagtcccagctctgtcacccaggctggagggcagtggcgagacctcggctcactccaagctccgcctcccgggttcacgccattctcctgcctcagcctcccaagtagctgggactacaggcacccaccaccaagcccggctaatttttgtatttttagtagagatggggtttcatcgtgttagctaggatggtcttgatctcctgacctcgtgatccacccacctcagcctcccaaagtgctgggattacaggcatgagccaccgtgcctggcccctcctctgtgtttctacagctccttggcttccctctgtcacacgttattgagaacctagcttcccttggcccacttcccggctacacagctccttgagggcgggactatgatttttttctcccttacttctggatctcctctgagcataaatttcatgagaattatggagacactgttctcagcagaatcagaggaggtggggctggcgtgatgggtccagctgcaggggtgggaggagtggggaggaggggaagggccctgaccatagtctctaaaagtggggccctttggagggcagctgtgctcatctgtctgtctacacccacaatcaggtcttgaggctgtctgggcaggaaggcagggggagagctttcccacgtgctcagtcacactcctctcccactcctgaccacacctttgccagggtcaggagtggaagagcaggaatcccactgccgggccacaatgaccccagctctcctcttccagatagagccacgaaccccctgaacaaggagctcgactgggccagcatcaacggcttctgcgagcagctcaacgaggactttgaggggtaggtggccgtccccacttgtttgcactgccctgcactctccagaacccagtctcgggtacaatggcctgggtgggtggagacccggttttcattctgaacgtattcacaaagtgatgaggatggggcacttggcactgaatgctgtttgggtgtcactctctggggtgggccttgctggaaccatttaacaggtaaagaaatcaaggctcagaggactcagatctgcccccacatctcacagggagaaaatgctagtcctgagcttggtaagacccaggcctgctggacctgcagccagtgctttgtggggaaaggccccccagagggagaactgcatgttccccaattgggaggaggccagtaggccctttgctcaaggacgaaccagaactacctgtgttagaatcacctagaatgttggccaggcacagtggctcatgcctgtaatcccagcactttggaaggccgaagtgggtggattacctgaggtcaggagtttgagaccagcgtggccaacatggtgacaccccgtctctactaaaaatgcaaaaattagctgggcgtggtggcacgtgcctgtaatcccagctactcaggaggctgaggcaggagaattgcttgaacccaagagacagagattgtaatgagccgagattgcgccactgccctgcagcctgggcagcagagtgagactctgtctcgaaaaacaaaacaaagaattacctagaatgcttgtcagaaatgtacattcttagccaggcatggtggtgcacacctgtaatctcagttactggggaggccaaggcgggaggatcccttgaggctagcctgggcaacatagcggggcaacatagcgagacatcatctcttaaaaaataaaaaaataggccaggcatggtggctcacgcctgtaatcccagcactttgggaggccaaggcaggtggatcacctgaggttgggagttcaagaccagccttaccaacatagagaaatcccatctctactaaaaatacaaaaaaaattagccgggcatggtggtgcatgcctgtaatcccagctactcgggaggctgaggcaggagaattgcttgaacccaggaggtagaagttgcagtgagccaagatcgtgccattgcactccagcctgggcgacggagtgaaactccgtctcaaaaaataagtaaataaataaataataaaaaataaggccgggtgtggtggcttacgtctataatcccagcactctgggaggctgaggcaggtggatcacgaggccaacagattgagaccatcctggccaacatggtgaaaccccatctctactaaaaatgcaaaaattagcaaggagcggtggtgtgcgcctgtagtcccagctactcgggaggctgaggcaggagaatcgcttgaacccgggaggctgaggttgcagtgagccaagattgcattactgcactccagcatggtgacggtgagactccatctcaaaaaaataaataaagtaaatgcaccttcttgggctgcccccagactcgactgtccagtggggggttgggagtggacattctttttatttttttttttgagatggagtctcgctctgtcgcccaggctggagtgcattggcacgatctcggctcactgcaagctccgcctcccaggttcacgcggttctcctgcctcagcctccccagcagctgggactacaggcgcctgccaccacacccggctaatttttttgtattttttagtagagacagggtttcaccgtgttagccaggatggtctcgatctcctgacctcatgatccacctgcctcggcctcccaaagtgctgggattacaggcatgagccaccgtgcccagctgggagtggacattcttagtgggctccccaggcgatactaaagtttcgggaccacaaacagcggtgtgtgtgctttggagtcgtgctgcttgggtacgagtcctgtcccctctcttagctgagtaaccttgggtgagtggttgcctctgagtgtcagtttcttcacagttgaaggaacttcccacggtgaggcgggaatgaccgtgctgcctgccttatgcagcttaggcaggaaagtgcatgtgagcctcctcacacatgaccagttcagcacatgtgagctcttaccgtcactggtgacgggtcttttacagtctgttagatgatgtcaccacctccaccatgaagctgctctgatttgccacagcagaacgtcctttgccaccttgagttcccagggaactgtgtctgcccgtctctcatggcatattgtaattgtctctatggcaagccaagccaaggacgtgacacatcagagttcttaggccagcccaggagctgagctcataccttttgaaggtccctgcctgcagtctctgtctggccctgccctgccacaatctcaggccataactgatctggagagggagctgggcctttgcatatgcctgcagaaaccttagagggctgaagtctcggcggcgggctggggtggtgaccctcccctagggcgaccagggccccttggaggagggctgcagtcccagcggcctggggtcgtggccctagggtgaccgggactccgtggcgactctggctctgtgttgttcctcccacccaggcctccactcgccacccggctgctggcccacaagatccagtccccacaggagtgggaggcgatccaggccttgacggtgagaaggggagaggccaccatccgtcccccgccatgtgacgacaccaagggaggccaagactgaggttcttggggtccataaggctcttcagagcccaagagagttgtgctaagatggcccaggatggaggtccgggcctgccccaagggtcccaccacagccagcgggctggcctcccaccccagcatccatacacgtaggcctgttgctgagggaaggccctctagggtcatctggtccaggggttctttgcttcagctgcacatcggctgcctctccaggaagcgtgttcaacacatggaatcagggctccacccagacctgccgaggccacactcctggagtatctgcatccagagatctgcacgtttgtaaagctaaggggtggtgcttgggctcaggcctgaggttttgcatctgttcaatagcagaggagagaggggtgtactgtctgtggcccccagcatgggccacataccaacccaccatggagcaaagctgattttaagtggtggtagagatacagtttctcttttaatacttacgtgtttagttgggtgcagtggcttatacctgtaatttcagcacttggggaggccaaggcaggaggcttgcttgaggcaaggagttcaaggctacagtgagctatgattgtgccactgtactccagactggacaacagagtgagaccccatctctaaataataatcattattgttacatatttgttttaacatttttttctcaagtataactagtcctatgatttcatagatgtagcttaggataaggccaaggtaggtgttgcctatataaggtttttttaaaaaaggaaaaataggccgggctggtggctcacgcctgtaatcccagcactttggcaggctgaggcgggcagatcacctgagatcaggagttcaagatcagcctgaccaacatggagaagccccatgtctactaaaaataaaaaattagcgaggcgtggtgggcgggcgcctgtaatcccagctacttgggaggctgaggcagaagaatcatttgaacccaggaggcagaggttacagtgagccgagatcgtgctactgcattccaacctgggcaacaagagtgaaactctgtctcaaaaaaaaaaaaaaaaaggaaaaatagtaagaaaataatgtacagttggtactcagatgtggggcctaagctatgaatgggactagagcattgctacaggttgggcattgctgggcactgtatgtaggtcgcctgaccctatctcccatgggagtgatgaccagtcccagaggcctgtgtgactctgaatcttccaacctcacaggccattccctcccttctgaaagcccacccatgggcttctggcccctgtccaaggcgtgggagggaggccacggcctctgatgcacctgggcgtcccctcccatcccccctccctgcacaggtgctggaaacatgcatgaagagctgcggcaagcggttccacgacgaagtgggcaagttccgctttctcaacgagctcatcaaggtcgtgtctcccaaggttggtgcccccagcccaagctcagacctgccctgtcggatgtggggagaggaaagaggaccttcagattgtggagcgacttttccagggagcctcccactggggtgtcacctcagccccccattagaactcagacctaggaaaaacacagatctcttctcacagtcctctcatacctgattctgggacagcctggggtctcggaggagtgtttccaggctggccaggggcggggcagccatggagctgcccggtgcttaggaagaaatgattccagggaatacataagctgacagatggctgtatgtgtcagccatctctggcctgaaatcactccctgtggacctggccacagaaccctacctggtctctggcaggtttccctgtccccaccacacaagagcaacctccctggacctcagcatccaaggccacagacctgagtgatggagcctgctggctccagacgggccatccccggctcagcccaaggagtcttcccacagaccatgaacgtttctttttctttatttttttgagatggagtcttgctctgtcacccaggctggagtgcaatggcatgatctctacgctccacaacctccacctcctgggttcaagcaattctcctgcctcaacctcccaagtagctgggattgcaggtgcacgccaccatgcccggctaattttttgtatttttagtagagatggggtttcaccatgttggccaggctggtcttgaactcctgacctcatgatctgcctgtcgtggactcccaaagtgccgggattacaggcgtgagccaccatgcccggcctacctaccgtgaacattttttttttttttttgacaaggagtttcactcttgtcacccaagctggagtgcaatggcgcgatctcagctcactgcaccctccacctcccaggtttgagcaattctcctgcctcatcctccagagtagctgcaattataggtgcccaccaccaagcctggctaattttttatttttagtagagacagggtttcaccatattggtcaggctggtcttgaactcctgacctcatgatccacctgcattggcctcccaaagtgctgggattacaggcgtgagccatggcctccggcctactgtgaacatttcttaagctgtttgagtgacagcccacccccttggcccttccttgctcagacccatcctttgaccagagctactgaataatccatatggcctcccattctcctcccaacaggggactctgctgtgagagccactttccccagcccagtttgctgctaggagacggagagtaggcccagggcctcccagttccaccctcacccctccctgggcagcctggagacctctggctcctctttcctgggatgtcaaggctaagtccccagagccgactatgagcaggcctgtccctcatgtcagttctgcatcctcaccatggtgccatctagcaggtggggaaacagacactgagggctgacccagctaataagtggcaggggtagtaggtgaactcagtctaccccaggctggttgggcggggctatgaggaccctgtaggctagagggcttcccggggagtcctggggaggcagtagggtgtggacagggcttgagactgaagtgagtggggctgggcagtatcaaaggcctccccactgtgtccctgaagtatctgggctctcggacatcggagaaggtgaagaacaagatcttggagctcctctacagctggacagtgggcctgcccgaggaggtgaaaatcgcagaggcctaccagatgctaaagaagcagggtgaggcacacagagggtggggggcgaccagggcctgccttcccctcccccaccatgagctggggctccagcggcttcaggggcttctgagccagcaaggtcatgggtctgtcctttaacttctggagaaagtacatacagctagtgcggccttctgtgctctgcctgaggctagcttgggtggaaagaaggtgagttcgaatcaagcttcccctcaaagagtggtctccagggagtggcctcaaaatatgggtccccaaaccatctcccccaggcaattttgatggagtaggtaggagtaggcccaggccactaagagtccagagccagcgtgctggcaaaagactgacctccctcttctgtcctacccttgcctgcccccatccccatgtcacccctacccctgggcctgggacatattgacagcctttctgacactcatctaatccagggattgtaaagtccgaccccaagcttccagatgacactacctttccccttcctcctccacggccgaagaatgtgatctttgaagatgaggagaaatccaaggtgagactccaaggaggcacatatggggactctgagcccaggtgggggtccgtgggttctgacctctagctgccctggcatcagccgttggaacagaggcacacactgagcccaggcatcgttgtagatgatgggcgctgtttactgggcatttaatatgtgctgagtatgtcccatacagcatccccacatttaataaacaggagtgtgtctggtgtccctggagtttgtttgagggtattttgaccttttctataagaatttcactaattttttgttaaaagttaataaaattaaaacttgtgggtgaaaagttaaacagcccaggaggaggtaagattaaaataaagaggttaaagtaaaaggtcccctctccccagtcttagccccagccctggagagtgtctactgttaaggttcttgtacattgtcccagaaaggttctcagccatggggatataaggagcaccatttgttgattacttatttctgctaggcgctgtggtgtgcactttacatgcagtgtctccgctggcctgtggccaccctatcaggcatcagtaaattctcaccatttcacagagagcttaagtaacttactcaggtcccacaggcaggaagcggggagccatcatgtgactccagtcttctgacccctggcccaggtgctgccctcacggtcacacccctctgtctctgcagatgctggcccgcctgctgaagagctcccatcccgaagacctccgcgcagccaataagctcatcaaagagatggtgcaggaggtagcggccgagcccagagcacagggaggaggcgggatgggggtattgagctgggccactgagatggggctgtatgcatcttcacatggaaggagccctgcagtgacccgggctggcacagcagagaagctgatgctgggggaccagggtgtgcagggaagaattcccggcagcctgggtgacttgctctggatgggcctttgggaggctggctacctcttcgtcaaaagttagaaatgaattaggccttagtatatttttaaaaatactaagtatttttaaaattactttttagtatttaaaaatactaagtatttttaaaattattttttagtatttaaaaatactaatgaatatatgtaagtatgtatacgtgtatgtatatgaggagactttttttgagacaaggactcactctctagcccaagcaggagtacagtggcatgatcatggctcattgcagcctcaacctcccgggctcaagcagtcctcccacctcaacctcccaggccgctggcactaaatacgtgtgccaccacaccggtatagtttttgtattttttttgtggagaaggggtttcgccacattgcccaggctggtctggaactcctgggctcaagcaatctgcctgcctcggcgtcccaaagtgctgggattacaggcatgagccactgcctggccaaatgtttaatttttaagtaaatatacatatgttgcctgggtgcctgctgaaactttttttttttaattgagacaagatctcatcctggagtgcagtggcacgatcatggctcactgcagcctcgacctcctgggctcaagcgatcctcccacctcaacctcccaagtagctgggaccaaaggcacacgctacagcgcccggctaattttattttttgtagagacagcatctccctttgttgcccaaactagtctgtaactcctgggctcaatgaccctcccatctcggcctcccaaagtgctgaaaaaaaagtttcaaagctggatgtggtggctcatgcctgtaatcccagcactttggaggccaaggtgggaggactgtgtgaggccacttttcactctgcaaaggaggggcacgcacagtaagcggaggggcaggggaaagccgggctgctcccaaaagcagcctttgaaggcacgggctcccccatctgccaggcaccgacagacactggaagggtcttcctgctcgtttccaggctgtacctggtgaccacagaggtccccttgcactatgaagtacaggaacctcctttgaaagggcaaacacaaggagggcaagagtcactgagaaccacagtggaggtctagggccctgggccttcagaagcacctggtgaggggtttggaaacccaggttcctgggccatctctgaagatcctgatgagcttgtgcagaggcctgggcactgggggcttcttggaccagcgtgcccttcctaggcatgaggggctcctggcagggcctgctggagccccacccagagtgtgatcccacagtcacccagctgtcaacccagatcccagcacacattctctcaagtggcagggggcagtgcctcgtccaggccaaaggttctcaggggcccttggccaatgtgtccccaggaccagaagcggatggagaagatctcgaagagggtgaatgccatcgaggaggtgaacaacaatgtgaaactgctcacggagatggtgatgagccacagccagggcggcgcagcagctggcagcagcgaggacctcatgaaggtgcacctgcctccctgcctaccccactccctgcccactccacagcccacgcggaccctgacccgcccatcctgctgccctcaggaactgtaccagc

SEQ ID NO: 12168 - DNA, 927 bp, Homo sapiens
ggggcacgaggcgggccccttcccggcgggggcggggtacgggtcgccccctcctcacgccccgcccccggcccgggaggggcggtgtcctcagtcggcccctcagaccctggagcgatggaggaccccggccccggcgcggtccagcggtgggagcgggcgccgcccacctgtcggatccctgggccatgacccctgggacggcgaatagagccacgaaccccctgaacaaggagctcgactgggccagcatcaacggcttctgcgagcagctcaacgaggactttgaggggcctccactcgccacccggctgctggcccacaagatccagtccccacaggagtgggaggcgatccaggccttgacggtgctggaaacatgcatgaagagctgcggcaagcggttccacgacgaagtgggcaagttccgctttctcaacgagctcatcaaggtcgtgtctcccaagtatctgggctctcggacatcggagaaggtgaagaacaagatcttggagctcctctacagctggacagtgggcctgcccgaggaggtgaaaatcgcagaggcctaccagatgctaaagaagcaggggattgtaaagtccgaccccaagcttccagatgacactacctttccccttcctcctccacggccgaagaatgtgatctttgaagatgaggagaaatccaagatgctggcccgcctgctgaagagctcccatcccgaagacctccgcgcagccaataagctcatcaaagagatggtgcaggaggaccagaagcggatggagaagatctcgaagagggtgaatgccatcgaggaggtgaacaacaatgtgaaactgctcacggagatggtgatgagccacagccagggcggcgcagcagctggcagcagcgaggacctcatgaaggaactgtaccagc

SEQ ID NO: 12169 - DNA, 11840 bp, Homo sapiens
gggcggggtacgggtcgccccctcctcacgccccgcccccggcccgggaggggcggtgtcctcagtcggcccctcagaccctggagcgatggaggaccccggccccggcgcggtccagcggtgggagcgggcgccgcccacctgtcggatccctgggccatgacccctgggacggcgagtgagctgcgccgggaacccccgggacggagagagcagcctccaacccccaaggctcacattgcttcacggagtagcggcccggggaaggagcacgcgagcggttccccggggttgcatctcacacccgggagggagggaccctactattttcaggccccgaatcctccactctctggccctgcatggcgttcctggagcccgcaagtagtcacatttgctcattaccccgtcctggaagggaggacccactgccccatttgattcctcccgccgctcctagtctctagccacatagtgagaaacccccgcaccctacaggcttgggagagtcttagactccagaagtattaataattccaagctccctgtcactcccttcagcctaacccctcagtctccaagatgcctttcccagctcttgctgaacttccttcaaaggcttctacacccctttttttcttgtttctcctcagacgtagcttcctattgcttaggcttcctagcccgcaaaccctccacctgagctccttaacccacagccctgatgatcccctgctctcacagccccgctcctggactctgcctctgaaagccgtggctggcttctccctggtctagtgagggttctctcccaaggctttaactgctgttgggaccccgtcgttgccagggcctcagggaaccctcttggacccgggcacaccggcaactgtctagcgtggtttggggtcatggccggccccttttaagccaggcttgagcagagttgaaccatgaggttggccccagaaccaaacctctagggatgtttcagagtcatcctagccaccagaggggcagggggtggaaaaggggcactcagcagcccttgaccgttgtgaacgccggaagtgtccgcctgggtctcagcagcaactgggctggggggatgggtgggcccctggctaactgatctcagacacaggtcttgagctgtgggtcatacaaaacattctcaggtttagaaacagtgggggttttctgagagtccagagagtctaaaaccaggcagaagttagagatacctgggtttggctgggccctgacacactggggctgggattttctcctttccttccccctttgtgtcctagcagaattgtaagatctttcctcttcccttgtggaggctggaggtaaaggatagcttcttctttttttttttgagacgggttttcactcttgtcacccaggctggagtgcagtggcacaatctcagctctctgcaacctccacctcccgggttcaagtgattctcctgtctcagcctcccgagtagctggaattacaggtgcgccaccacgcccagctatttttgtatttttagtacaggtgggctttcaccatgttggccaggctgatctcgaactcctgacctcaggtgatccgcctatataggcctctcaaagtgttgggattacaggcgttagccactcatccgcccacgtcggcctctcaaagtgttgggattacaggcgtgagccaccgcgcccggcctagtgaggtaaatgatgttattgtcagcactatagagtggcagggtggagtcttaccctgttgtgaaacacctccctccctctctaggtgttctccccaactgcctgctagggagggtactcccctcaggtagaattaagagggctgagggtcaggggccatgggccaaggaggtcagtcagatctccttggatctggaggccctggctttcagccagaggcagggggagaaagatgatgtctcatgatgccagcgcttcctcttcactggcgtctgacccaggagcagtccagaatcagcttctctgacctcactccaactcacgtgtctttgacactttaagggacttcctgttttagggtcttctggctgggtgtcattgaatgggcagtgattctctaactttagactgatgttccccagcctttgtttggggactcggaggcagagtagacagttacccttacccctgggttggggagggtcatattcctggtatccccaggaggtcaacaggggcttcatttttctgagggactagagggtcttgtggagctcctgggacagagatctagatccagagagaacattcgtccttccgatctcagctcagctctgagagccctcccagagagcagctcccgagggctccagagccctccgaaagccctcccagagagcagcccccacctcccaggctgtctgcacttctccttgctatgctttgctctgtaacattttgcaacagtctgcagtacacggggtttgttaatctgagtattcattgtttctcttgctgggcagtgaacttgaggagggcagggattttgtctgttcactgctggagccccagcacccagaatacttaaatctgagttggatgaatggcggccagccactgggattccagggctttgggccccctgccataacatatggcccagggcaggcgccacatgctgggtcagtccccagcctcctgtccacagatccttctctgttctacctcctgggctgtgtccttccacaccctcagctcggtgctcaggcgtgggcagaactggctgggaaggggtggtccttagaggtgggctgtggagaaatgaagatcgagctctggctgccgccatggccttcccatgcaaaaagtattttgtcatccaaaatcaatattttggtcaggcacagtggctcatgcctgtaatcccagcactttgggtggccgaggtgggtggatcatttgaggtcaggagtttgagaccagcctgaccaacatggtgaaattccatctctaccaaaaatacaaaaaaattagctgggcatggtggtggacgcctgtgatcccagctactctcaggaggctgaagcaggagaatcgtttgaacccaggaagctgagattgcagtgagccgagatctcgccactgcactccagcctgggcaacaaagcaagactctttctcaaaaaaaaataaaaataaaaaaatacaggccggacgcagtggctcacacctgtaattccagtactttgggaggccgaggcaggtggatcacgaggttaggagatcaagaccatcctggctaacacagtgaaaccccgtctctactaaaaatacaaaaaaaaaaaaaattagccgggcgtggtggcgggcacctgtagtcccagctactcgggaggctgaggcaggagaatggcgtgaacctgggaggcagagtttgcagtcagccgagatcacaccactgcactccagcctgggcgatagagcgagactccgtctcaaaaaaaaaaaaaaatacagccgggcacggtggctcacacctgtaatcccagcactttgggaggccaaggtgggcggatcacaaggtcaggagattgagaccatcctggctaacatggtgaaaccctgtctctactaaaaatacaaaaaaaaattagccgggcgtggtggcgggtgcctgtagtcccagctactcgggaggctgaggaaggagaatggcatgaacctgggaggcggagcttgcagtgagccgagatcgtgccactgcactccagcctgggcaacagcgtgagactcgtctcaaaaaaaaaaaaaaatccatatttcattccagctttacaagatggggaaatggaggttcagggaagcatgtaagctagattgttgtttaaccagtattgggggttaaaggggtagctgtctggtcgtgtttacaccacttcatgtagacctgttggccctctttccttgccactatccatttctggattcagtcttccccagaacctcaccctttgcctgccctcagctgactgctcattcatttgccaaggggagacaggtgtggacatgagtggctgggatgcagtgccgtagcaggctgggggacacaaaagagaactgacccagcactgctaccctgggcaggagtagaggattagagaaggggacaccggagccactcccaagggaatgaaggctttctgaacctggtgtgatggtaagactcacactccttactgaggcccctcattctctgcctcgtgtggttacccgcatctttcctgcccatacagccatgcgtgggtcagaggtgtaccagctccagcctgggtgactcctcctggtccctgcttgtgtgttgcctcttccaggcagcctcctcagccccaaactgaactgagtcccctcctctgtgtttcttttttgtttgtttgagacggagtcacccagagtcccagctctgtcacccaggctggagggcagtggcgagacctcggctcactccaagctccgcctcccgggttcacgccattctcctgcctcagcctcccaagtagctgggactacaggcacccaccaccaagcccggctaatttttgtatttttagtagagatggggtttcatcgtgttagctaggatggtcttgatctcctgacctcgtgatccacccacctcagcctcccaaagtgctgggattacaggcatgagccaccgtgcctggcccctcctctgtgtttctacagctccttggcttccctctgtcacacgttattgagaacctagcttcccttggcccacttcccggctacacagctccttgagggcgggactatgatttttttctcccttacttctggatctcctctgagcataaatttcatgagaattatggagacactgttctcagcagaatcagaggaggtggggctggcgtgatgggtccagctgcaggggtgggaggagtggggaggaggggaagggccctgaccatagtctctaaaagtggggccctttggagggcagctgtgctcatctgtctgtctacacccacaatcaggtcttgaggctgtctgggcaggaaggcagggggagagctttcccacgtgctcagtcacactcctctcccactcctgaccacacctttgccagggtcaggagtggaagagcaggaatcccactgccgggccacaatgaccccagctctcctcttccagatagagccacgaaccccctgaacaaggagctcgactgggccagcatcaacggcttctgcgagcagctcaacgaggactttgaggggtaggtggccgtccccacttgtttgcactgccctgcactctccagaacccagtctcgggtacaatggcctgggtgggtggagacccggttttcattctgaacgtattcacaaagtgatgaggatggggcacttggcactgaatgctgtttgggtgtcactctctggggtgggccttgctggaaccatttaacaggtaaagaaatcaaggctcagaggactcagatctgcccccacatctcacagggagaaaatgctagtcctgagcttggtaagacccaggcctgctggacctgcagccagtgctttgtggggaaaggccccccagagggagaactgcatgttccccaattgggaggaggccagtaggccctttgctcaaggacgaaccagaactacctgtgttagaatcacctagaatgttggccaggcacagtggctcatgcctgtaatcccagcactttggaaggccgaagtgggtggattacctgaggtcaggagtttgagaccagcgtggccaacatggtgacaccccgtctctactaaaaatgcaaaaattagctgggcgtggtggcacgtgcctgtaatcccagctactcaggaggctgaggcaggagaattgcttgaacccaagagacagagattgtaatgagccgagattgcgccactgccctgcagcctgggcagcagagtgagactctgtctcgaaaaacaaaacaaagaattacctagaatgcttgtcagaaatgtacattcttagccaggcatggtggtgcacacctgtaatctcagttactggggaggccaaggcgggaggatcccttgaggctagcctgggcaacatagcggggcaacatagcgagacatcatctcttaaaaaataaaaaaataggccaggcatggtggctcacgcctgtaatcccagcactttgggaggccaaggcaggtggatcacctgaggttgggagttcaagaccagccttaccaacatagagaaatcccatctctactaaaaatacaaaaaaaattagccgggcatggtggtgcatgcctgtaatcccagctactcgggaggctgaggcaggagaattgcttgaacccaggaggtagaagttgcagtgagccaagatcgtgccattgcactccagcctgggcgacggagtgaaactccgtctcaaaaaataagtaaataaataaataataaaaaataaggccgggtgtggtggcttacgtctataatcccagcactctgggaggctgaggcaggtggatcacgaggccaacagattgagaccatcctggccaacatggtgaaaccccatctctactaaaaatgcaaaaattagcaaggagcggtggtgtgcgcctgtagtcccagctactcgggaggctgaggcaggagaatcgcttgaacccgggaggctgaggttgcagtgagccaagattgcattactgcactccagcatggtgacggtgagactccatctcaaaaaaataaataaagtaaatgcaccttcttgggctgcccccagactcgactgtccagtggggggttgggagtggacattctttttatttttttttttgagatggagtctcgctctgtcgcccaggctggagtgcattggcacgatctcggctcactgcaagctccgcctcccaggttcacgcggttctcctgcctcagcctccccagcagctgggactacaggcgcctgccaccacacccggctaatttttttgtattttttagtagagacagggtttcaccgtgttagccaggatggtctcgatctcctgacctcatgatccacctgcctcggcctcccaaagtgctgggattacaggcatgagccaccgtgcccagctgggagtggacattcttagtgggctccccaggcgatactaaagtttcgggaccacaaacagcggtgtgtgtgctttggagtcgtgctgcttgggtacgagtcctgtcccctctcttagctgagtaaccttgggtgagtggttgcctctgagtgtcagtttcttcacagttgaaggaacttcccacggtgaggcgggaatgaccgtgctgcctgccttatgcagcttaggcaggaaagtgcatgtgagcctcctcacacatgaccagttcagcacatgtgagctcttaccgtcactggtgacgggtcttttacagtctgttagatgatgtcaccacctccaccatgaagctgctctgatttgccacagcagaacgtcctttgccaccttgagttcccagggaactgtgtctgcccgtctctcatggcatattgtaattgtctctatggcaagccaagccaaggacgtgacacatcagagttcttaggccagcccaggagctgagctcataccttttgaaggtccctgcctgcagtctctgtctggccctgccctgccacaatctcaggccataactgatctggagagggagctgggcctttgcatatgcctgcagaaaccttagagggctgaagtctcggcggcgggctggggtggtgaccctcccctagggcgaccagggccccttggaggagggctgcagtcccagcggcctggggtcgtggccctagggtgaccgggactccgtggcgactctggctctgtgttgttcctcccacccaggcctccactcgccacccggctgctggcccacaagatccagtccccacaggagtgggaggcgatccaggccttgacggtgagaaggggagaggccaccatccgtcccccgccatgtgacgacaccaagggaggccaagactgaggttcttggggtccataaggctcttcagagcccaagagagttgtgctaagatggcccaggatggaggtccgggcctgccccaagggtcccaccacagccagcgggctggcctcccaccccagcatccatacacgtaggcctgttgctgagggaaggccctctagggtcatctggtccaggggttctttgcttcagctgcacatcggctgcctctccaggaagcgtgttcaacacatggaatcagggctccacccagacctgccgaggccacactcctggagtatctgcatccagagatctgcacgtttgtaaagctaaggggtggtgcttgggctcaggcctgaggttttgcatctgttcaatagcagaggagagaggggtgtactgtctgtggcccccagcatgggccacataccaacccaccatggagcaaagctgattttaagtggtggtagagatacagtttctcttttaatacttacgtgtttagttgggtgcagtggcttatacctgtaatttcagcacttggggaggccaaggcaggaggcttgcttgaggcaaggagttcaaggctacagtgagctatgattgtgccactgtactccagactggacaacagagtgagaccccatctctaaataataatcattattgttacatatttgttttaacatttttttctcaagtataactagtcctatgatttcatagatgtagcttaggataaggccaaggtaggtgttgcctatataaggtttttttaaaaaaggaaaaataggccgggctggtggctcacgcctgtaatcccagcactttggcaggctgaggcgggcagatcacctgagatcaggagttcaagatcagcctgaccaacatggagaagccccatgtctactaaaaataaaaaattagcgaggcgtggtgggcgggcgcctgtaatcccagctacttgggaggctgaggcagaagaatcatttgaacccaggaggcagaggttacagtgagccgagatcgtgctactgcattccaacctgggcaacaagagtgaaactctgtctcaaaaaaaaaaaaaaaaaggaaaaatagtaagaaaataatgtacagttggtactcagatgtggggcctaagctatgaatgggactagagcattgctacaggttgggcattgctgggcactgtatgtaggtcgcctgaccctatctcccatgggagtgatgaccagtcccagaggcctgtgtgactctgaatcttccaacctcacaggccattccctcccttctgaaagcccacccatgggcttctggcccctgtccaaggcgtgggagggaggccacggcctctgatgcacctgggcgtcccctcccatcccccctccctgcacaggtgctggaaacatgcatgaagagctgcggcaagcggttccacgacgaagtgggcaagttccgctttctcaacgagctcatcaaggtcgtgtctcccaaggttggtgcccccagcccaagctcagacctgccctgtcggatgtggggagaggaaagaggaccttcagattgtggagcgacttttccagggagcctcccactggggtgtcacctcagccccccattagaactcagacctaggaaaaacacagatctcttctcacagtcctctcatacctgattctgggacagcctggggtctcggaggagtgtttccaggctggccaggggcggggcagccatggagctgcccggtgcttaggaagaaatgattccagggaatacataagctgacagatggctgtatgtgtcagccatctctggcctgaaatcactccctgtggacctggccacagaaccctacctggtctctggcaggtttccctgtccccaccacacaagagcaacctccctggacctcagcatccaaggccacagacctgagtgatggagcctgctggctccagacgggccatccccggctcagcccaaggagtcttcccacagaccatgaacgtttctttttctttatttttttgagatggagtcttgctctgtcacccaggctggagtgcaatggcatgatctctacgctccacaacctccacctcctgggttcaagcaattctcctgcctcaacctcccaagtagctgggattgcaggtgcacgccaccatgcccggctaattttttgtatttttagtagagatggggtttcaccatgttggccaggctggtcttgaactcctgacctcatgatctgcctgtcgtggactcccaaagtgccgggattacaggcgtgagccaccatgcccggcctacctaccgtgaacattttttttttttttttgacaaggagtttcactcttgtcacccaagctggagtgcaatggcgcgatctcagctcactgcaccctccacctcccaggtttgagcaattctcctgcctcatcctccagagtagctgcaattataggtgcccaccaccaagcctggctaattttttatttttagtagagacagggtttcaccatattggtcaggctggtcttgaactcctgacctcatgatccacctgcattggcctcccaaagtgctgggattacaggcgtgagccatggcctccggcctactgtgaacatttcttaagctgtttgagtgacagcccacccccttggcccttccttgctcagacccatcctttgaccagagctactgaataatccatatggcctcccattctcctcccaacaggggactctgctgtgagagccactttccccagcccagtttgctgctaggagacggagagtaggcccagggcctcccagttccaccctcacccctccctgggcagcctggagacctctggctcctctttcctgggatgtcaaggctaagtccccagagccgactatgagcaggcctgtccctcatgtcagttctgcatcctcaccatggtgccatctagcaggtggggaaacagacactgagggctgacccagctaataagtggcaggggtagtaggtgaactcagtctaccccaggctggttgggcggggctatgaggaccctgtaggctagagggcttcccggggagtcctggggaggcagtagggtgtggacagggcttgagactgaagtgagtggggctgggcagtatcaaaggcctccccactgtgtccctgaagtatctgggctctcggacatcggagaaggtgaagaacaagatcttggagctcctctacagctggacagtgggcctgcccgaggaggtgaaaatcgcagaggcctaccagatgctaaagaagcagggtgaggcacacagagggtggggggcgaccagggcctgccttcccctcccccaccatgagctggggctccagcggcttcaggggcttctgagccagcaaggtcatgggtctgtcctttaacttctggagaaagtacatacagctagtgcggccttctgtgctctgcctgaggctagcttgggtggaaagaaggtgagttcgaatcaagcttcccctcaaagagtggtctccagggagtggcctcaaaatatgggtccccaaaccatctcccccaggcaattttgatggagtaggtaggagtaggcccaggccactaagagtccagagccagcgtgctggcaaaagactgacctccctcttctgtcctacccttgcctgcccccatccccatgtcacccctacccctgggcctgggacatattgacagcctttctgacactcatctaatccagggat

SEQ ID NO: 12170 - DNA, 639 bp, Homo sapiens
gggcggggtacgggtcgccccctcctcacgccccgcccccggcccgggaggggcggtgtcctcagtcggcccctcagaccctggagcgatggaggaccccggccccggcgcggtccagcggtgggagcgggcgccgcccacctgtcggatccctgggccatgacccctgggacggcgagagtagaggattagagaaggggacaccggagccactcccaagggaatgaaggctttctgaacctggtgtgatgatagagccacgaaccccctgaacaaggagctcgactgggccagcatcaacggcttctgcgagcagctcaacgaggactttgaggggcctccactcgccacccggctgctggcccacaagatccagtccccacaggagtgggaggcgatccaggccttgacggtgctggaaacatgcatgaagagctgcggcaagcggttccacgacgaagtgggcaagttccgctttctcaacgagctcatcaaggtcgtgtctcccaagtatctgggctctcggacatcggagaaggtgaagaacaagatcttggagctcctctacagctggacagtgggcctgcccgaggaggtgaaaatcgcagaggcctaccagatgctaaagaagcaggggat

SEQ ID NO: 12171 - DNA, 2010 bp, Homo sapiens
gcgattctcctacgtcaggctcctgagtagctgggaccacaggtgtgcgctaccacgcccagctagttttttgtattttttatacagaccgggtttcgccatgttgcccaggctggtctcaaactcctgagctcaagcgatctgcccgcctcagcctcccaaagtgttggaattacaggggtgagctaccacgctggccaagaatcacttcttaatgcactgtcccccgattaagggagaagcagcagccaaccccccggctcacactccgggacctgcagaataagagcagcagctgcagctcccccagctccagcgccaccagccttctccacaccgtgtccccagagccccccaggcctccgcagcagcccgtaccaaccgagctctcactggccagcatcactgtgcccctggagtccatcaaacccagtgagtagggctggggcaggtgcaggctgggttgggtcagcttgctgccctgtcaggagctctgtctggggaagctagtgggaaagcagggctcccctggctctgccactggccaaccagaggggagctctgaacaaggccctccccttcccaggagtcagtttccttatctgccccagagcaatcagaggactgctgtacaaactccaggcttatataagcaagaagacctctagggagtaggctctgggccccttccatccccaggaaggcagggcccaggacacagagaggtttggggtctcccccagattacagaactgaaccatgataaagacccagatccaaggctgggtttttccagcccaggagcagtaaggggaccatggcccagccccgggccccaagcagacacatgaggcctggtggtcctcagcattgccctctatgagctccctgtgaccaaagacactacccccacagtgtctcccagcagtgggcagagctgcccctctcaccagtaggagaaccctgagctcagagaaggggagtgactgccgcaaggtcacacagcgtgagactcaccctcaccaagtccctcaccccagcactccaggcagcagccacacagcatcgggggaagctgggctgtgactcggctctggggtgggtgtcctgcctccactatcagactgggggttcacctgccctctctgggcaccgctctgtgcccctgcctgcactgccacccagggtccaggtaaggccccaaaggaggactttgctcttgttgccagtacagcagccagctcctgaggccagccgggtgggggctgggggctgagcggatgtgctgcagctcagctgtcccatcgccctcccaccttctcccacaggcaacatcctgcccgtgactgtgtatgaccagcacggcttccgcatcctcttccattttgcccgggacccactgccagggcgctccgacgtgctggtggtggtggtttccatgctgagcaccgccccccagcccatccgcaacatcgtgttccagtcagctgtccccaaggtgacaagccagtcggacagggcatgcctccctcctctcaaggcagggtgacatggagctgggtggggagccacctgtcagggggcaggtctccctcccttgctgggtggttggtgtagaagggaccagaaggactgagccccaggatccccggaggggagctggcaggctgggcctggttcctcagagcaggacaagcagccagggctagctgtgcccatcctgccatctgcccacaggttatgaaggtgaagctgcagccaccctcgggcacggagctgccagcttttaaccccatcgtccacccctcagcaatcacccaggtcctgctgcttgccaacccccagaaggtaaggggcccccaggcagtgctgcagggtggggacggccacttctcctcctctgacccctctgcctttgccatctcttccccaggagaaggttcgcctccgctacaagctcaccttcaccatgggtgaccagacctacaacgagatgggggatgtggacca

SEQ ID NO: 12172 - DNA, 790 bp, Homo sapiens
gcgattctcctacgtcaggctcctgagtagctgggaccacaggtgtgcgctaccacgcccagctagttttttgtattttttatacagaccgggtttcgccatgttgcccaggctggtctcaaactcctgagctcaagcgatctgcccgcctcagcctcccaaagtgttggaattacaggggtgagctaccacgctggccaagaatcacttcttaatgcactgtcccccgattaagggagaagcagcagccaaccccccggctcacactccgggacctgcagaataagagcagcagctgcagctcccccagctccagcgccaccagccttctccacaccgtgtccccagagccccccaggcctccgcagcagcccgtaccaaccgagctctcactggccagcatcactgtgcccctggagtccatcaaacccagcaacatcctgcccgtgactgtgtatgaccagcacggcttccgcatcctcttccattttgcccgggacccactgccagggcgctccgacgtgctggtggtggtggtttccatgctgagcaccgccccccagcccatccgcaacatcgtgttccagtcagctgtccccaaggttatgaaggtgaagctgcagccaccctcgggcacggagctgccagcttttaaccccatcgtccacccctcagcaatcacccaggtcctgctgcttgccaacccccagaaggagaaggttcgcctccgctacaagctcaccttcaccatgggtgaccagacctacaacgagatgggggatgtggacca

SEQ ID NO: 12173 - DNA, 838 bp, Homo sapiens
gcctcagtgaccccacacccccttcaggcccaagcctggatggtaccggatggaacagcttccaggtaggaggggaccacaaactagtctggcctgtcccagtcccagggtcagggcagctgggacaagtggcctggagaaactaaaaggatggatgggctctactcaagagcccagggccagggggtggcccaggggcctggagacacccacccagggtacagggcctccccttacctccagctgtatcttccccaagtctcagccttggggctgcagcccagcctttgggattgggattgagatgggcaatccctcttcctttcccttgagggtgacagaggtccctggattgtagaacccccaaccagacccagccaccctgcatcatggacatgggtggtctggggtccccacctctgtggctgctttcccagatgtcatttgcaaggaggacactgagcctcagggcaggatcaggtgatgctgacacctctctagacagccccaccccacctgcatccttttccccacagtcgtcggatgccactgagcccccagcccctgctctggcccaggcccccagtatggaaagccgacccccagcgcagacatccctgccagcaagcagcggtctggacgacctagacctcctggggaagaccctcctgcagcagtcgctgcccccggaatcccagcaagtgcggtggtgagggcccaccatggctggcatggggtggggagcactccctgttcccacaaaccagcaacttctcctgggcttgtccaggcccagcagggagaggctcgttgctgtcttgttttgtaagcagcagat

SEQ ID NO: 12174 - DNA, 367 bp, Homo sapiens
gcctcagtgaccccacacccccttcaggcccaagcctggatggtaccggatggaacagcttccagtcgtcggatgccactgagcccccagcccctgctctggcccaggcccccagtatggaaagccgacccccagcgcagacatccctgccagcaagcagcggtctggacgacctagacctcctggggaagaccctcctgcagcagtcgctgcccccggaatcccagcaagtgcggtggtgagggcccaccatggctggcatggggtggggagcactccctgttcccacaaaccagcaacttctcctgggcttgtccaggcccagcagggagaggctcgttgctgtcttgttttgtaagcagcagat

SEQ ID NO: 12175 - DNA, 3334 bp, Homo sapiens
gggccagcccccttaacaggcatcttatttactacccgcagctgcacaggaggcagacccatccccttttcacaactggggctaagggaggaaaatgacttgcccagatcacagagcagaacagtggcagagccaggggagacggagggccatctgcccccagaccttcctccctaatgagggtgaatggaagctaagagtgcatcccacagcccaggcagttccagacctgagcctgacggcttctgccagggccacataccaggttcttttccttgatctctgcccacgtgtcagcctgggccacttgggctgcggtctgggtaccatccactccctcattaagcaggagccccacccacaaggctcactgcccagattgccccacaccctggcacctggggaaggcagtgttgccgagggcctgattggtgccaggcactgttctaggccctcagggatctggcactgatcaaagtttgcaaaacgccgggtgcagtggttcacacctgtaatcccagcattttgggaggccaaggtgggaggattgctttagtccaggagttcaagaccagcctgggtaacatagagagacccagtctctatttcaaatatatttatattaaaaaaaaaaaaaaaaggttgacaaaaacttcctcatggtagtttagtgagaggagacagacaataaccaagtccatgagcaccgacagttcgtcacggtggtgagtggcatggaggaagagaagcagggaagggatgaggtggtgcaggagggatttaggacaggcctccctgaggtgagccttgggtgaagacctgaaggcagtaagggatgaagccatgcagagatctggggcagccagagagcagagctggagtggaggcctggaggcgggagcgggcccagtgtgttgagacagcccaggcagtatggcagggagtgaatgagggaagggtgggaggtgagaccagggaggtggcggagggccagagtctcagcagacgagatgggctgtttccctgcccctttcccttcccctcacacacaggctgtgatggatgtggggtcctcgtcccctgccgcccagaggcccccacagtccttcagcctggcctctcccctcctgcctgttccagcggagatcctgcaggccaatgacaacctcacccaggtgatcaacctgtataagcagctggtgcggggtgaggaggtcaacggtgatgccacagccggctccatccctggtgaggaggtggcaggagagctgggagggcacccatcaggctggaggggcacagagagtgcagggtggtgtgctggtctcagagcggctggaatgactgccagggtgaccctggccccttaagatggggaaggccccagggagggagctgggggtgaagtctgtgccaagcctgcagctgtgggggaagaagtctggtgggggagctgagggtttggtgaggacaggcagaagaaggaaggcattctttcatttgacaaatctggcacctgttgtatagggctagatgacaccccagaggctttatgtatcagaaaatgcgaggggggttagaaaagtaaacattacagactcaggtctaataagggtaagatggcagccttggggggtcacaaaaggggttagaattggttctgttagggagaagtggagatggaggcgctgcacggaagcagccaagtttcagcagggccttaaggatgggtagcagtttgcccagtagagctaagaaggaaatacattccggacagaagtaccatcatatgccaaagagaggtcctgttgagcagtttccaggcaggggctggtgtggccaaggaaggggaggcaggagaccagtggtaaagcatcgggggttaggtgttgctcccccgcaacccctgtggactctgagagacacgtgtacacccaggacttgccagcctcttctttcccaccccagggagcacctcggccctgctggatctctcaggcctggatctcccgcctgcgggcaccacctacccagctatgcccacccgccctggcgagcaggccagccctgagcagcccagtgcctcagtttccctgcttgacgacgagctcatgtctctgggtgaggaaggggccaggcctggaggagggcgggctcagcagcagatggggcatgatcccagggcccactcacagctagcggaaccacgtaccccaggtgtggatcctgtggggcacgtggatgagcattaggcccacttcacaactgaggaaactgaggctcggggaagttaggagcttgtgcgaggccacacggccagagggtgaggctggcaacctctaagccggcctcggataagctaaccagcattcaggctctggcagcctggggggaaaccaggggatttccccgcaacaggttagagcctggaattgagaactgtctgggcaaaagttcagcagtttcttcatccaccaagaggagagggagggctctgggctccagagcacccagaggctccagagaagccgaggccagagcgcgagggactcggtgatccaagctggtccagggccaggcctgctgttactcccgggcaggctccggctccagagcccagcaggggccaggcttccccggggggaagcagcaaagcgttcccagctgcccaaaccatttttgggtttccaactgctctcagggcagcagccccatccgagagctgagatcagaacagcctcctcctgagagccactgaagggatgaagagcagatacgttagggccacatcaaaggaatcctcagggatatgttggaagccaagattcagactgtggtttcctgagccagttctgaagcaaaaaccagacccgaaggccttgaagaagtgatggggacccggggcgccctgggcggggtctgcctgggttccaggagtgcttcctttggtggtgcccactactgcactctgtcctgtcttaggtgaccctcacggtctctgcaggcaggtgccgttaatagccccactgcacaatgaggaaacggcagcacagaaaggcgcggtggctcacgcctggaatcccagcactttgggaggccaaggcagagggattacttgaggtcaggagtttgaaactagcctggccaacatggcgaaaccccatgtctattaaaaatacaaaattagctgggcgtggtggcacatgcctgtagtcccagctactggggaggctgatgcaggaaaattgcttgaactggggaagcagaggttgcggtgagccgagatggcaccactgcactccagcctggttgacagagcaaggctccgtctcac

SEQ ID NO: 12176 - DNA, 2614 bp, Homo sapiens
gggccagcccccttaacaggcatcttatttactacccgcagctgcacaggaggcagacccatccccttttcacaactggggctaagggaggaaaatgacttgcccagatcacagagcagaacagtggcagagccaggggagacggagggccatctgcccccagaccttcctccctaatgagggtgaatggaagctaagagtgcatcccacagcccaggcagttccagacctgagcctgacggcttctgccagggccacataccaggttcttttccttgatctctgcccacgtgtcagcctgggccacttgggctgcggtctgggtaccatccactccctcattaagcaggagccccacccacaaggctcactgcccagattgccccacaccctggcacctggggaaggcagtgttgccgagggcctgattggtgccaggcactgttctaggccctcagggatctggcactgatcaaagtttgcaaaacgccgggtgcagtggttcacacctgtaatcccagcattttgggaggccaaggtgggaggattgctttagtccaggagttcaagaccagcctgggtaacatagagagacccagtctctatttcaaatatatttatattaaaaaaaaaaaaaaaaggttgacaaaaacttcctcatggtagtttagtgagaggagacagacaataaccaagtccatgagcaccgacagttcgtcacggtggtgagtggcatggaggaagagaagcagggaagggatgaggtggtgcaggagggatttaggacaggcctccctgaggtgagccttgggtgaagacctgaaggcagtaagggatgaagccatgcagagatctggggcagccagagagcagagctggagtggaggcctggaggcgggagcgggcccagtgtgttgagacagcccaggcagtatggcagggagtgaatgagggaagggtgggaggtgagaccagggaggtggcggagggccagagtctcagcagacgagatgggctgtttccctgcccctttcccttcccctcacacacaggctgtgatggatgtggggtcctcgtcccctgccgcccagaggcccccacagtccttcagcctggcctctcccctcctgcctgttccagcggagatcctgcaggccaatgacaacctcacccaggtgatcaacctgtataagcagctggtgcggggtgaggaggtcaacggtgatgccacagccggctccatccctgggagcacctcggccctgctggatctctcaggcctggatctcccgcctgcgggcaccacctacccagctatgcccacccgccctggcgagcaggccagccctgagcagcccagtgcctcagtttccctgcttgacgacgagctcatgtctctgggtgaggaaggggccaggcctggaggagggcgggctcagcagcagatggggcatgatcccagggcccactcacagctagcggaaccacgtaccccaggtgtggatcctgtggggcacgtggatgagcattaggcccacttcacaactgaggaaactgaggctcggggaagttaggagcttgtgcgaggccacacggccagagggtgaggctggcaacctctaagccggcctcggataagctaaccagcattcaggctctggcagcctggggggaaaccaggggatttccccgcaacaggttagagcctggaattgagaactgtctgggcaaaagttcagcagtttcttcatccaccaagaggagagggagggctctgggctccagagcacccagaggctccagagaagccgaggccagagcgcgagggactcggtgatccaagctggtccagggccaggcctgctgttactcccgggcaggctccggctccagagcccagcaggggccaggcttccccggggggaagcagcaaagcgttcccagctgcccaaaccatttttgggtttccaactgctctcagggcagcagccccatccgagagctgagatcagaacagcctcctcctgagagccactgaagggatgaagagcagatacgttagggccacatcaaaggaatcctcagggatatgttggaagccaagattcagactgtggtttcctgagccagttctgaagcaaaaaccagacccgaaggccttgaagaagtgatggggacccggggcgccctgggcggggtctgcctgggttccaggagtgcttcctttggtggtgcccactactgcactctgtcctgtcttaggtgaccctcacggtctctgcaggcaggtgccgttaatagccccactgcacaatgaggaaacggcagcacagaaaggcgcggtggctcacgcctggaatcccagcactttgggaggccaaggcagagggattacttgaggtcaggagtttgaaactagcctggccaacatggcgaaaccccatgtctattaaaaatacaaaattagctgggcgtggtggcacatgcctgtagtcccagctactggggaggctgatgcaggaaaattgcttgaactggggaagcagaggttgcggtgagccgagatggcaccactgcactccagcctggttgacagagcaaggctccgtctcac

SEQ ID NO: 12177 - DNA, 3063 bp, Homo sapiens
tttccccttcctcctccacggccgaagaatgtgatctttgaagatgaggagaaatccaaggtgagactccaaggaggcacatatggggactctgagcccaggtgggggtccgtgggttctgacctctagctgccctggcatcagccgttggaacagaggcacacactgagcccaggcatcgttgtagatgatgggcgctgtttactgggcatttaatatgtgctgagtatgtcccatacagcatccccacatttaataaacaggagtgtgtctggtgtccctggagtttgtttgagggtattttgaccttttctataagaatttcactaattttttgttaaaagttaataaaattaaaacttgtgggtgaaaagttaaacagcccaggaggaggtaagattaaaataaagaggttaaagtaaaaggtcccctctccccagtcttagccccagccctggagagtgtctactgttaaggttcttgtacattgtcccagaaaggttctcagccatggggatataaggagcaccatttgttgattacttatttctgctaggcgctgtggtgtgcactttacatgcagtgtctccgctggcctgtggccaccctatcaggcatcagtaaattctcaccatttcacagagagcttaagtaacttactcaggtcccacaggcaggaagcggggagccatcatgtgactccagtcttctgacccctggcccaggtgctgccctcacggtcacacccctctgtctctgcagatgctggcccgcctgctgaagagctcccatcccgaagacctccgcgcagccaataagctcatcaaagagatggtgcaggaggtagcggccgagcccagagcacagggaggaggcgggatgggggtattgagctgggccactgagatggggctgtatgcatcttcacatggaaggagccctgcagtgacccgggctggcacagcagagaagctgatgctgggggaccagggtgtgcagggaagaattcccggcagcctgggtgacttgctctggatgggcctttgggaggctggctacctcttcgtcaaaagttagaaatgaattaggccttagtatatttttaaaaatactaagtatttttaaaattactttttagtatttaaaaatactaagtatttttaaaattattttttagtatttaaaaatactaatgaatatatgtaagtatgtatacgtgtatgtatatgaggagactttttttgagacaaggactcactctctagcccaagcaggagtacagtggcatgatcatggctcattgcagcctcaacctcccgggctcaagcagtcctcccacctcaacctcccaggccgctggcactaaatacgtgtgccaccacaccggtatagtttttgtattttttttgtggagaaggggtttcgccacattgcccaggctggtctggaactcctgggctcaagcaatctgcctgcctcggcgtcccaaagtgctgggattacaggcatgagccactgcctggccaaatgtttaatttttaagtaaatatacatatgttgcctgggtgcctgctgaaactttttttttttaattgagacaagatctcatcctggagtgcagtggcacgatcatggctcactgcagcctcgacctcctgggctcaagcgatcctcccacctcaacctcccaagtagctgggaccaaaggcacacgctacagcgcccggctaattttattttttgtagagacagcatctccctttgttgcccaaactagtctgtaactcctgggctcaatgaccctcccatctcggcctcccaaagtgctgaaaaaaaagtttcaaagctggatgtggtggctcatgcctgtaatcccagcactttggaggccaaggtgggaggactgtgtgaggccacttttcactctgcaaaggaggggcacgcacagtaagcggaggggcaggggaaagccgggctgctcccaaaagcagcctttgaaggcacgggctcccccatctgccaggcaccgacagacactggaagggtcttcctgctcgtttccaggctgtacctggtgaccacagaggtccccttgcactatgaagtacaggaacctcctttgaaagggcaaacacaaggagggcaagagtcactgagaaccacagtggaggtctagggccctgggccttcagaagcacctggtgaggggtttggaaacccaggttcctgggccatctctgaagatcctgatgagcttgtgcagaggcctgggcactgggggcttcttggaccagcgtgcccttcctaggcatgaggggctcctggcagggcctgctggagccccacccagagtgtgatcccacagtcacccagctgtcaacccagatcccagcacacattctctcaagtggcagggggcagtgcctcgtccaggccaaaggttctcaggggcccttggccaatgtgtccccaggaccagaagcggatggagaagatctcgaagagggtgaatgccatcgaggaggtgaacaacaatgtgaaactgctcacggagatggtgatgagccacagccagggcggcgcagcagctggcagcagcgaggacctcatgaaggtgcacctgcctccctgcctaccccactccctgcccactccacagcccacgcggaccctgacccgcccatcctgctgccctcaggaactgtaccagcgctgtgagcggatgcggcccacgctcttccgactggcgagtgacacagaggacaatgatgaggccttaggtgagcccagggcaggtgctgaggtcaggtccccccctctccctccacctcctgcccccacctcccccaggccctgctaagtatctgcagttggaaggagccaccaccagggggcccccttctccagcaccgaccttgggtttctcctctctgaggacacagagcaggggccgcccccctgttgagaggccctgtgggccagcccccttaacaggcatcttatttactacccgcagctgcacaggaggcagacccatccccttttcacaactggggctaaggg

SEQ ID NO: 12178 - DNA, 647 bp, Homo sapiens
tttccccttcctcctccacggccgaagaatgtgatctttgaagatgaggagaaatccaagatgctggcccgcctgctgaagagctcccatcccgaagacctccgcgcagccaataagctcatcaaagagatggtgcaggaggaccagaagcggatggagaagatctcgaagagggtgaatgccatcgaggaggtgaacaacaatgtgaaactgctcacggagatggtgatgagccacagccagggcggcgcagcagctggcagcagcgaggacctcatgaaggaactgtaccagcgctgtgagcggatgcggcccacgctcttccgactggcgagtgacacagaggacaatgatgaggccttaggtgagcccagggcaggtgctgaggtcaggtccccccctctccctccacctcctgcccccacctcccccaggccctgctaagtatctgcagttggaaggagccaccaccagggggcccccttctccagcaccgaccttgggtttctcctctctgaggacacagagcaggggccgcccccctgttgagaggccctgtgggccagcccccttaacaggcatcttatttactacccgcagctgcacaggaggcagacccatccccttttcacaactggggctaaggg

SEQ ID NO: 12179 - DNA, 5209 bp, Homo sapiens
tggaggaccccggccccggcgcggtccagcggtgggagcgggcgccgcccacctgtcggatccctgggccatgacccctgggacggcgagtgagctgcgccgggaacccccgggacggagagagcagcctccaacccccaaggctcacattgcttcacggagtagcggcccggggaaggagcacgcgagcggttccccggggttgcatctcacacccgggagggagggaccctactattttcaggccccgaatcctccactctctggccctgcatggcgttcctggagcccgcaagtagtcacatttgctcattaccccgtcctggaagggaggacccactgccccatttgattcctcccgccgctcctagtctctagccacatagtgagaaacccccgcaccctacaggcttgggagagtcttagactccagaagtattaataattccaagctccctgtcactcccttcagcctaacccctcagtctccaagatgcctttcccagctcttgctgaacttccttcaaaggcttctacacccctttttttcttgtttctcctcagacgtagcttcctattgcttaggcttcctagcccgcaaaccctccacctgagctccttaacccacagccctgatgatcccctgctctcacagccccgctcctggactctgcctctgaaagccgtggctggcttctccctggtctagtgagggttctctcccaaggctttaactgctgttgggaccccgtcgttgccagggcctcagggaaccctcttggacccgggcacaccggcaactgtctagcgtggtttggggtcatggccggccccttttaagccaggcttgagcagagttgaaccatgaggttggccccagaaccaaacctctagggatgtttcagagtcatcctagccaccagaggggcagggggtggaaaaggggcactcagcagcccttgaccgttgtgaacgccggaagtgtccgcctgggtctcagcagcaactgggctggggggatgggtgggcccctggctaactgatctcagacacaggtcttgagctgtgggtcatacaaaacattctcaggtttagaaacagtgggggttttctgagagtccagagagtctaaaaccaggcagaagttagagatacctgggtttggctgggccctgacacactggggctgggattttctcctttccttccccctttgtgtcctagcagaattgtaagatctttcctcttcccttgtggaggctggaggtaaaggatagcttcttctttttttttttgagacgggttttcactcttgtcacccaggctggagtgcagtggcacaatctcagctctctgcaacctccacctcccgggttcaagtgattctcctgtctcagcctcccgagtagctggaattacaggtgcgccaccacgcccagctatttttgtatttttagtacaggtgggctttcaccatgttggccaggctgatctcgaactcctgacctcaggtgatccgcctatataggcctctcaaagtgttgggattacaggcgttagccactcatccgcccacgtcggcctctcaaagtgttgggattacaggcgtgagccaccgcgcccggcctagtgaggtaaatgatgttattgtcagcactatagagtggcagggtggagtcttaccctgttgtgaaacacctccctccctctctaggtgttctccccaactgcctgctagggagggtactcccctcaggtagaattaagagggctgagggtcaggggccatgggccaaggaggtcagtcagatctccttggatctggaggccctggctttcagccagaggcagggggagaaagatgatgtctcatgatgccagcgcttcctcttcactggcgtctgacccaggagcagtccagaatcagcttctctgacctcactccaactcacgtgtctttgacactttaagggacttcctgttttagggtcttctggctgggtgtcattgaatgggcagtgattctctaactttagactgatgttccccagcctttgtttggggactcggaggcagagtagacagttacccttacccctgggttggggagggtcatattcctggtatccccaggaggtcaacaggggcttcatttttctgagggactagagggtcttgtggagctcctgggacagagatctagatccagagagaacattcgtccttccgatctcagctcagctctgagagccctcccagagagcagctcccgagggctccagagccctccgaaagccctcccagagagcagcccccacctcccaggctgtctgcacttctccttgctatgctttgctctgtaacattttgcaacagtctgcagtacacggggtttgttaatctgagtattcattgtttctcttgctgggcagtgaacttgaggagggcagggattttgtctgttcactgctggagccccagcacccagaatacttaaatctgagttggatgaatggcggccagccactgggattccagggctttgggccccctgccataacatatggcccagggcaggcgccacatgctgggtcagtccccagcctcctgtccacagatccttctctgttctacctcctgggctgtgtccttccacaccctcagctcggtgctcaggcgtgggcagaactggctgggaaggggtggtccttagaggtgggctgtggagaaatgaagatcgagctctggctgccgccatggccttcccatgcaaaaagtattttgtcatccaaaatcaatattttggtcaggcacagtggctcatgcctgtaatcccagcactttgggtggccgaggtgggtggatcatttgaggtcaggagtttgagaccagcctgaccaacatggtgaaattccatctctaccaaaaatacaaaaaaattagctgggcatggtggtggacgcctgtgatcccagctactctcaggaggctgaagcaggagaatcgtttgaacccaggaagctgagattgcagtgagccgagatctcgccactgcactccagcctgggcaacaaagcaagactctttctcaaaaaaaaataaaaataaaaaaatacaggccggacgcagtggctcacacctgtaattccagtactttgggaggccgaggcaggtggatcacgaggttaggagatcaagaccatcctggctaacacagtgaaaccccgtctctactaaaaatacaaaaaaaaaaaaaattagccgggcgtggtggcgggcacctgtagtcccagctactcgggaggctgaggcaggagaatggcgtgaacctgggaggcagagtttgcagtcagccgagatcacaccactgcactccagcctgggcgatagagcgagactccgtctcaaaaaaaaaaaaaaatacagccgggcacggtggctcacacctgtaatcccagcactttgggaggccaaggtgggcggatcacaaggtcaggagattgagaccatcctggctaacatggtgaaaccctgtctctactaaaaatacaaaaaaaaattagccgggcgtggtggcgggtgcctgtagtcccagctactcgggaggctgaggaaggagaatggcatgaacctgggaggcggagcttgcagtgagccgagatcgtgccactgcactccagcctgggcaacagcgtgagactcgtctcaaaaaaaaaaaaaaatccatatttcattccagctttacaagatggggaaatggaggttcagggaagcatgtaagctagattgttgtttaaccagtattgggggttaaaggggtagctgtctggtcgtgtttacaccacttcatgtagacctgttggccctctttccttgccactatccatttctggattcagtcttccccagaacctcaccctttgcctgccctcagctgactgctcattcatttgccaaggggagacaggtgtggacatgagtggctgggatgcagtgccgtagcaggctgggggacacaaaagagaactgacccagcactgctaccctgggcaggagtagaggattagagaaggggacaccggagccactcccaagggaatgaaggctttctgaacctggtgtgatggtaagactcacactccttactgaggcccctcattctctgcctcgtgtggttacccgcatctttcctgcccatacagccatgcgtgggtcagaggtgtaccagctccagcctgggtgactcctcctggtccctgcttgtgtgttgcctcttccaggcagcctcctcagccccaaactgaactgagtcccctcctctgtgtttcttttttgtttgtttgagacggagtcacccagagtcccagctctgtcacccaggctggagggcagtggcgagacctcggctcactccaagctccgcctcccgggttcacgccattctcctgcctcagcctcccaagtagctgggactacaggcacccaccaccaagcccggctaatttttgtatttttagtagagatggggtttcatcgtgttagctaggatggtcttgatctcctgacctcgtgatccacccacctcagcctcccaaagtgctgggattacaggcatgagccaccgtgcctggcccctcctctgtgtttctacagctccttggcttccctctgtcacacgttattgagaacctagcttcccttggcccacttcccggctacacagctccttgagggcgggactatgatttttttctcccttacttctggatctcctctgagcataaatttcatgagaattatggagacactgttctcagcagaatcagaggaggtggggctggcgtgatgggtccagctgcaggggtgggaggagtggggaggaggggaagggccctgaccatagtctctaaaagtggggccctttggagggcagctgtgctcatctgtctgtctacacccacaatcaggtcttgaggctgtctgggcaggaaggcagggggagagctttcccacgtgctcagtcacactcctctcccactcctgaccacacctttgccagggtcaggagtggaagagcaggaatcccactgccgggccacaatgaccccagctctcctcttccagatagagccacgaaccccctgaacaaggagctcgactgggccagcatcaacggcttctgcgagcagctcaacgaggactttgaggg

SEQ ID NO: 12180 - DNA, 449 bp, Homo sapiens
tggaggaccccggccccggcgcggtccagcggtgggagcgggcgccgcccacctgtcggatccctgggccatgacccctgggacggcgagtgagctgcgccgggaacccccgggacggagagagcagcctccaacccccaaggctcacattgcttcacggagtagcggcccggggaaggagcacgcgagcggttccccggggttgcatctcacacccgggagggagggaccctactattttcaggccccgaatcctccactctctggccctgcatggcgttcctggagcccgagtagaggattagagaaggggacaccggagccactcccaagggaatgaaggctttctgaacctggtgtgatgatagagccacgaaccccctgaacaaggagctcgactgggccagcatcaacggcttctgcgagcagctcaacgaggactttgaggg

SEQ ID NO: 12181 - DNA, 4054 bp, Homo sapiens
aaaacattctcaggtttagaaacagtgggggttttctgagagtccagagagtctaaaaccaggcagaagttagagatacctgggtttggctgggccctgacacactggggctgggattttctcctttccttccccctttgtgtcctagcagaattgtaagatctttcctcttcccttgtggaggctggaggtaaaggatagcttcttctttttttttttgagacgggttttcactcttgtcacccaggctggagtgcagtggcacaatctcagctctctgcaacctccacctcccgggttcaagtgattctcctgtctcagcctcccgagtagctggaattacaggtgcgccaccacgcccagctatttttgtatttttagtacaggtgggctttcaccatgttggccaggctgatctcgaactcctgacctcaggtgatccgcctatataggcctctcaaagtgttgggattacaggcgttagccactcatccgcccacgtcggcctctcaaagtgttgggattacaggcgtgagccaccgcgcccggcctagtgaggtaaatgatgttattgtcagcactatagagtggcagggtggagtcttaccctgttgtgaaacacctccctccctctctaggtgttctccccaactgcctgctagggagggtactcccctcaggtagaattaagagggctgagggtcaggggccatgggccaaggaggtcagtcagatctccttggatctggaggccctggctttcagccagaggcagggggagaaagatgatgtctcatgatgccagcgcttcctcttcactggcgtctgacccaggagcagtccagaatcagcttctctgacctcactccaactcacgtgtctttgacactttaagggacttcctgttttagggtcttctggctgggtgtcattgaatgggcagtgattctctaactttagactgatgttccccagcctttgtttggggactcggaggcagagtagacagttacccttacccctgggttggggagggtcatattcctggtatccccaggaggtcaacaggggcttcatttttctgagggactagagggtcttgtggagctcctgggacagagatctagatccagagagaacattcgtccttccgatctcagctcagctctgagagccctcccagagagcagctcccgagggctccagagccctccgaaagccctcccagagagcagcccccacctcccaggctgtctgcacttctccttgctatgctttgctctgtaacattttgcaacagtctgcagtacacggggtttgttaatctgagtattcattgtttctcttgctgggcagtgaacttgaggagggcagggattttgtctgttcactgctggagccccagcacccagaatacttaaatctgagttggatgaatggcggccagccactgggattccagggctttgggccccctgccataacatatggcccagggcaggcgccacatgctgggtcagtccccagcctcctgtccacagatccttctctgttctacctcctgggctgtgtccttccacaccctcagctcggtgctcaggcgtgggcagaactggctgggaaggggtggtccttagaggtgggctgtggagaaatgaagatcgagctctggctgccgccatggccttcccatgcaaaaagtattttgtcatccaaaatcaatattttggtcaggcacagtggctcatgcctgtaatcccagcactttgggtggccgaggtgggtggatcatttgaggtcaggagtttgagaccagcctgaccaacatggtgaaattccatctctaccaaaaatacaaaaaaattagctgggcatggtggtggacgcctgtgatcccagctactctcaggaggctgaagcaggagaatcgtttgaacccaggaagctgagattgcagtgagccgagatctcgccactgcactccagcctgggcaacaaagcaagactctttctcaaaaaaaaataaaaataaaaaaatacaggccggacgcagtggctcacacctgtaattccagtactttgggaggccgaggcaggtggatcacgaggttaggagatcaagaccatcctggctaacacagtgaaaccccgtctctactaaaaatacaaaaaaaaaaaaaattagccgggcgtggtggcgggcacctgtagtcccagctactcgggaggctgaggcaggagaatggcgtgaacctgggaggcagagtttgcagtcagccgagatcacaccactgcactccagcctgggcgatagagcgagactccgtctcaaaaaaaaaaaaaaatacagccgggcacggtggctcacacctgtaatcccagcactttgggaggccaaggtgggcggatcacaaggtcaggagattgagaccatcctggctaacatggtgaaaccctgtctctactaaaaatacaaaaaaaaattagccgggcgtggtggcgggtgcctgtagtcccagctactcgggaggctgaggaaggagaatggcatgaacctgggaggcggagcttgcagtgagccgagatcgtgccactgcactccagcctgggcaacagcgtgagactcgtctcaaaaaaaaaaaaaaatccatatttcattccagctttacaagatggggaaatggaggttcagggaagcatgtaagctagattgttgtttaaccagtattgggggttaaaggggtagctgtctggtcgtgtttacaccacttcatgtagacctgttggccctctttccttgccactatccatttctggattcagtcttccccagaacctcaccctttgcctgccctcagctgactgctcattcatttgccaaggggagacaggtgtggacatgagtggctgggatgcagtgccgtagcaggctgggggacacaaaagagaactgacccagcactgctaccctgggcaggagtagaggattagagaaggggacaccggagccactcccaagggaatgaaggctttctgaacctggtgtgatggtaagactcacactccttactgaggcccctcattctctgcctcgtgtggttacccgcatctttcctgcccatacagccatgcgtgggtcagaggtgtaccagctccagcctgggtgactcctcctggtccctgcttgtgtgttgcctcttccaggcagcctcctcagccccaaactgaactgagtcccctcctctgtgtttcttttttgtttgtttgagacggagtcacccagagtcccagctctgtcacccaggctggagggcagtggcgagacctcggctcactccaagctccgcctcccgggttcacgccattctcctgcctcagcctcccaagtagctgggactacaggcacccaccaccaagcccggctaatttttgtatttttagtagagatggggtttcatcgtgttagctaggatggtcttgatctcctgacctcgtgatccacccacctcagcctcccaaagtgctgggattacaggcatgagccaccgtgcctggcccctcctctgtgtttctacagctccttggcttccctctgtcacacgttattgagaacctagcttcccttggcccacttcccggctacacagctccttgagggcgggactatgatttttttctcccttacttctggatctcctctgagcataaatttcatgagaattatggagacactgttctcagcagaatcagaggaggtggggctggcgtgatgggtccagctgcaggggtgggaggagtggggaggaggggaagggccctgaccatagtctctaaaagtggggccctttggagggcagctgtgctcatctgtctgtctacacccacaatcaggtcttgaggctgtctgggcaggaaggcagggggagagctttcccacgtgctcagtcacactcctctcccactcctgaccacacctttgccagggtcaggagtggaagagcaggaatcccactgccgggccacaatgaccccagctctcctcttccagatagag

SEQ ID NO: 12182 - DNA, 547 bp, Homo sapiens
aaaacattctcaggtttagaaacagtgggggttttctgagagtccagagagtctaaaaccaggcagaagttagagatacctgggtttggctgggccctgacacactggggctgggattttctcctttccttccccctttgtgtcctagcagaattgtaagatctttcctcttcccttgtggaggctggaggtaaaggatagcttcttctttttttttttgagacgggttttcactcttgtcacccaggctggagtgcagtggcacaatctcagctctctgcaacctccacctcccgggttcaagtgattctcctgtctcagcctcccgagtagctggaattacaggtgatccgcctatataggcctctcaaagtgttgggattacaggcgttagccactcatccgcccacgtcggcctctcaaagtgttgggattacaggcgtgagccaccgcgcccggcctagtgaggagtagaggattagagaaggggacaccggagccactcccaagggaatgaaggctttctgaacctggtgtgatgatagag

SEQ ID NO: 12183 - DNA, 9317 bp, Homo sapiens
gggcggtgccgaggctgggggccggtggcggatggagcccgcgatggagccggagactctggaggcgcgaatcagtgagtgtccgggaggggcgcgggccggaccggaaccggaaccgggggcacgaggcgggccccttcccggcgggggcggggtacgggtcgccccctcctcacgccccgcccccggcccgggaggggcggtgtcctcagtcggcccctcagaccctggagcgatggaggaccccggccccggcgcggtccagcggtgggagcgggcgccgcccacctgtcggatccctgggccatgacccctgggacggcgagtgagctgcgccgggaacccccgggacggagagagcagcctccaacccccaaggctcacattgcttcacggagtagcggcccggggaaggagcacgcgagcggttccccggggttgcatctcacacccgggagggagggaccctactattttcaggccccgaatcctccactctctggccctgcatggcgttcctggagcccgcaagtagtcacatttgctcattaccccgtcctggaagggaggacccactgccccatttgattcctcccgccgctcctagtctctagccacatagtgagaaacccccgcaccctacaggcttgggagagtcttagactccagaagtattaataattccaagctccctgtcactcccttcagcctaacccctcagtctccaagatgcctttcccagctcttgctgaacttccttcaaaggcttctacacccctttttttcttgtttctcctcagacgtagcttcctattgcttaggcttcctagcccgcaaaccctccacctgagctccttaacccacagccctgatgatcccctgctctcacagccccgctcctggactctgcctctgaaagccgtggctggcttctccctggtctagtgagggttctctcccaaggctttaactgctgttgggaccccgtcgttgccagggcctcagggaaccctcttggacccgggcacaccggcaactgtctagcgtggtttggggtcatggccggccccttttaagccaggcttgagcagagttgaaccatgaggttggccccagaaccaaacctctagggatgtttcagagtcatcctagccaccagaggggcagggggtggaaaaggggcactcagcagcccttgaccgttgtgaacgccggaagtgtccgcctgggtctcagcagcaactgggctggggggatgggtgggcccctggctaactgatctcagacacaggtcttgagctgtgggtcatacaaaacattctcaggtttagaaacagtgggggttttctgagagtccagagagtctaaaaccaggcagaagttagagatacctgggtttggctgggccctgacacactggggctgggattttctcctttccttccccctttgtgtcctagcagaattgtaagatctttcctcttcccttgtggaggctggaggtaaaggatagcttcttctttttttttttgagacgggttttcactcttgtcacccaggctggagtgcagtggcacaatctcagctctctgcaacctccacctcccgggttcaagtgattctcctgtctcagcctcccgagtagctggaattacaggtgcgccaccacgcccagctatttttgtatttttagtacaggtgggctttcaccatgttggccaggctgatctcgaactcctgacctcaggtgatccgcctatataggcctctcaaagtgttgggattacaggcgttagccactcatccgcccacgtcggcctctcaaagtgttgggattacaggcgtgagccaccgcgcccggcctagtgaggtaaatgatgttattgtcagcactatagagtggcagggtggagtcttaccctgttgtgaaacacctccctccctctctaggtgttctccccaactgcctgctagggagggtactcccctcaggtagaattaagagggctgagggtcaggggccatgggccaaggaggtcagtcagatctccttggatctggaggccctggctttcagccagaggcagggggagaaagatgatgtctcatgatgccagcgcttcctcttcactggcgtctgacccaggagcagtccagaatcagcttctctgacctcactccaactcacgtgtctttgacactttaagggacttcctgttttagggtcttctggctgggtgtcattgaatgggcagtgattctctaactttagactgatgttccccagcctttgtttggggactcggaggcagagtagacagttacccttacccctgggttggggagggtcatattcctggtatccccaggaggtcaacaggggcttcatttttctgagggactagagggtcttgtggagctcctgggacagagatctagatccagagagaacattcgtccttccgatctcagctcagctctgagagccctcccagagagcagctcccgagggctccagagccctccgaaagccctcccagagagcagcccccacctcccaggctgtctgcacttctccttgctatgctttgctctgtaacattttgcaacagtctgcagtacacggggtttgttaatctgagtattcattgtttctcttgctgggcagtgaacttgaggagggcagggattttgtctgttcactgctggagccccagcacccagaatacttaaatctgagttggatgaatggcggccagccactgggattccagggctttgggccccctgccataacatatggcccagggcaggcgccacatgctgggtcagtccccagcctcctgtccacagatccttctctgttctacctcctgggctgtgtccttccacaccctcagctcggtgctcaggcgtgggcagaactggctgggaaggggtggtccttagaggtgggctgtggagaaatgaagatcgagctctggctgccgccatggccttcccatgcaaaaagtattttgtcatccaaaatcaatattttggtcaggcacagtggctcatgcctgtaatcccagcactttgggtggccgaggtgggtggatcatttgaggtcaggagtttgagaccagcctgaccaacatggtgaaattccatctctaccaaaaatacaaaaaaattagctgggcatggtggtggacgcctgtgatcccagctactctcaggaggctgaagcaggagaatcgtttgaacccaggaagctgagattgcagtgagccgagatctcgccactgcactccagcctgggcaacaaagcaagactctttctcaaaaaaaaataaaaataaaaaaatacaggccggacgcagtggctcacacctgtaattccagtactttgggaggccgaggcaggtggatcacgaggttaggagatcaagaccatcctggctaacacagtgaaaccccgtctctactaaaaatacaaaaaaaaaaaaaattagccgggcgtggtggcgggcacctgtagtcccagctactcgggaggctgaggcaggagaatggcgtgaacctgggaggcagagtttgcagtcagccgagatcacaccactgcactccagcctgggcgatagagcgagactccgtctcaaaaaaaaaaaaaaatacagccgggcacggtggctcacacctgtaatcccagcactttgggaggccaaggtgggcggatcacaaggtcaggagattgagaccatcctggctaacatggtgaaaccctgtctctactaaaaatacaaaaaaaaattagccgggcgtggtggcgggtgcctgtagtcccagctactcgggaggctgaggaaggagaatggcatgaacctgggaggcggagcttgcagtgagccgagatcgtgccactgcactccagcctgggcaacagcgtgagactcgtctcaaaaaaaaaaaaaaatccatatttcattccagctttacaagatggggaaatggaggttcagggaagcatgtaagctagattgttgtttaaccagtattgggggttaaaggggtagctgtctggtcgtgtttacaccacttcatgtagacctgttggccctctttccttgccactatccatttctggattcagtcttccccagaacctcaccctttgcctgccctcagctgactgctcattcatttgccaaggggagacaggtgtggacatgagtggctgggatgcagtgccgtagcaggctgggggacacaaaagagaactgacccagcactgctaccctgggcaggagtagaggattagagaaggggacaccggagccactcccaagggaatgaaggctttctgaacctggtgtgatggtaagactcacactccttactgaggcccctcattctctgcctcgtgtggttacccgcatctttcctgcccatacagccatgcgtgggtcagaggtgtaccagctccagcctgggtgactcctcctggtccctgcttgtgtgttgcctcttccaggcagcctcctcagccccaaactgaactgagtcccctcctctgtgtttcttttttgtttgtttgagacggagtcacccagagtcccagctctgtcacccaggctggagggcagtggcgagacctcggctcactccaagctccgcctcccgggttcacgccattctcctgcctcagcctcccaagtagctgggactacaggcacccaccaccaagcccggctaatttttgtatttttagtagagatggggtttcatcgtgttagctaggatggtcttgatctcctgacctcgtgatccacccacctcagcctcccaaagtgctgggattacaggcatgagccaccgtgcctggcccctcctctgtgtttctacagctccttggcttccctctgtcacacgttattgagaacctagcttcccttggcccacttcccggctacacagctccttgagggcgggactatgatttttttctcccttacttctggatctcctctgagcataaatttcatgagaattatggagacactgttctcagcagaatcagaggaggtggggctggcgtgatgggtccagctgcaggggtgggaggagtggggaggaggggaagggccctgaccatagtctctaaaagtggggccctttggagggcagctgtgctcatctgtctgtctacacccacaatcaggtcttgaggctgtctgggcaggaaggcagggggagagctttcccacgtgctcagtcacactcctctcccactcctgaccacacctttgccagggtcaggagtggaagagcaggaatcccactgccgggccacaatgaccccagctctcctcttccagatagagccacgaaccccctgaacaaggagctcgactgggccagcatcaacggcttctgcgagcagctcaacgaggactttgaggggtaggtggccgtccccacttgtttgcactgccctgcactctccagaacccagtctcgggtacaatggcctgggtgggtggagacccggttttcattctgaacgtattcacaaagtgatgaggatggggcacttggcactgaatgctgtttgggtgtcactctctggggtgggccttgctggaaccatttaacaggtaaagaaatcaaggctcagaggactcagatctgcccccacatctcacagggagaaaatgctagtcctgagcttggtaagacccaggcctgctggacctgcagccagtgctttgtggggaaaggccccccagagggagaactgcatgttccccaattgggaggaggccagtaggccctttgctcaaggacgaaccagaactacctgtgttagaatcacctagaatgttggccaggcacagtggctcatgcctgtaatcccagcactttggaaggccgaagtgggtggattacctgaggtcaggagtttgagaccagcgtggccaacatggtgacaccccgtctctactaaaaatgcaaaaattagctgggcgtggtggcacgtgcctgtaatcccagctactcaggaggctgaggcaggagaattgcttgaacccaagagacagagattgtaatgagccgagattgcgccactgccctgcagcctgggcagcagagtgagactctgtctcgaaaaacaaaacaaagaattacctagaatgcttgtcagaaatgtacattcttagccaggcatggtggtgcacacctgtaatctcagttactggggaggccaaggcgggaggatcccttgaggctagcctgggcaacatagcggggcaacatagcgagacatcatctcttaaaaaataaaaaaataggccaggcatggtggctcacgcctgtaatcccagcactttgggaggccaaggcaggtggatcacctgaggttgggagttcaagaccagccttaccaacatagagaaatcccatctctactaaaaatacaaaaaaaattagccgggcatggtggtgcatgcctgtaatcccagctactcgggaggctgaggcaggagaattgcttgaacccaggaggtagaagttgcagtgagccaagatcgtgccattgcactccagcctgggcgacggagtgaaactccgtctcaaaaaataagtaaataaataaataataaaaaataaggccgggtgtggtggcttacgtctataatcccagcactctgggaggctgaggcaggtggatcacgaggccaacagattgagaccatcctggccaacatggtgaaaccccatctctactaaaaatgcaaaaattagcaaggagcggtggtgtgcgcctgtagtcccagctactcgggaggctgaggcaggagaatcgcttgaacccgggaggctgaggttgcagtgagccaagattgcattactgcactccagcatggtgacggtgagactccatctcaaaaaaataaataaagtaaatgcaccttcttgggctgcccccagactcgactgtccagtggggggttgggagtggacattctttttatttttttttttgagatggagtctcgctctgtcgcccaggctggagtgcattggcacgatctcggctcactgcaagctccgcctcccaggttcacgcggttctcctgcctcagcctccccagcagctgggactacaggcgcctgccaccacacccggctaatttttttgtattttttagtagagacagggtttcaccgtgttagccaggatggtctcgatctcctgacctcatgatccacctgcctcggcctcccaaagtgctgggattacaggcatgagccaccgtgcccagctgggagtggacattcttagtgggctccccaggcgatactaaagtttcgggaccacaaacagcggtgtgtgtgctttggagtcgtgctgcttgggtacgagtcctgtcccctctcttagctgagtaaccttgggtgagtggttgcctctgagtgtcagtttcttcacagttgaaggaacttcccacggtgaggcgggaatgaccgtgctgcctgccttatgcagcttaggcaggaaagtgcatgtgagcctcctcacacatgaccagttcagcacatgtgagctcttaccgtcactggtgacgggtcttttacagtctgttagatgatgtcaccacctccaccatgaagctgctctgatttgccacagcagaacgtcctttgccaccttgagttcccagggaactgtgtctgcccgtctctcatggcatattgtaattgtctctatggcaagccaagccaaggacgtgacacatcagagttcttaggccagcccaggagctgagctcataccttttgaaggtccctgcctgcagtctctgtctggccctgccctgccacaatctcaggccataactgatctggagagggagctgggcctttgcatatgcctgcagaaaccttagagggctgaagtctcggcggcgggctggggtggtgaccctcccctagggcgaccagggccccttggaggagggctgcagtcccagcggcctggggtcgtggccctagggtgaccgggactccgtggcgactctggctctgtgttgttcctcccacccaggcctccactcgccacccggctgctggcccacaagatccagtccccacaggagtgggaggcgatccaggccttgacggtgagaaggggagaggccaccatccgtcccccgccatgtgacgacaccaagggaggccaagactgaggttcttggggtccataaggctcttcagagcccaagagagttgtgctaagatggcccaggatggaggtccgggcctgccccaagggtcccaccacagccagcgggctggcctcccaccccagcatccatacacgtaggcctgttgctgagggaaggccctctagggtcatctggtccaggggttctttgcttcagctgcacatcggctgcctctccaggaagcgtgttcaacacatggaatcagggctccacccagacctgccgaggccacactcctggagtatctgcatccagagatctgcacgtttgtaaagctaaggggtggtgcttgggctcaggcctgaggttttgcatctgttcaatagcagaggagagaggggtgtactgtctgtggcccccagcatgggccacataccaacccaccatggagcaaagctgattttaagtggtggtagagatacagtttctcttttaatacttacgtgtttagttgggtgcagtggcttatacctgtaatttcagcacttggggaggccaaggcaggaggcttgcttgaggcaaggagttcaaggctacagtgagctatgattgtgccactgtactccagactggacaacagagtgagaccccatctctaaataataatcattattgttacatatttgttttaacatttttttctcaagtataactagtcctatgatttcatagatgtagcttaggataaggccaaggtaggtgttgcctatataaggtttttttaaaaaaggaaaaataggccgggctggtggctcacgcctgtaatcccagcactttggcaggctgaggcgggcagatcacctgagatcaggagttcaagatcagcctgaccaacatggagaagccccatgtctactaaaaataaaaaattagcgaggcgtggtgggcgggcgcctgtaatcccagctacttgggaggctgaggcagaagaatcatttgaacccaggaggcagaggttacagtgagccgagatcgtgctactgcattccaacctgggcaacaagagtgaaactctgtctcaaaaaaaaaaaaaaaaaggaaaaa

SEQ ID NO: 12184 - DNA, 1384 bp, Homo sapiens
gggcggtgccgaggctgggggccggtggcggatggagcccgcgatggagccggagactctggaggcgcgaatcaatagagccacgaaccccctgaacaaggagctcgactgggccagcatcaacggcttctgcgagcagctcaacgaggactttgaggggcctccactcgccacccggctgctggcccacaagatccagtccccacaggagtgggaggcgatccaggccttgacggtgagaaggggagaggccaccatccgtcccccgccatgtgacgacaccaagggaggccaagactgaggttcttggggtccataaggctcttcagagcccaagagagttgtgctaagatggcccaggatggaggtccgggcctgccccaagggtcccaccacagccagcgggctggcctcccaccccagcatccatacacgtaggcctgttgctgagggaaggccctctagggtcatctggtccaggggttctttgcttcagctgcacatcggctgcctctccaggaagcgtgttcaacacatggaatcagggctccacccagacctgccgaggccacactcctggagtatctgcatccagagatctgcacgtttgtaaagctaaggggtggtgcttgggctcaggcctgaggttttgcatctgttcaatagcagaggagagaggggtgtactgtctgtggcccccagcatgggccacataccaacccaccatggagcaaagctgattttaagtggtggtagagatacagtttctcttttaatacttacgtgtttagttgggtgcagtggcttatacctgtaatttcagcacttggggaggccaaggcaggaggcttgcttgaggcaaggagttcaaggctacagtgagctatgattgtgccactgtactccagactggacaacagagtgagaccccatctctaaataataatcattattgttacatatttgttttaacatttttttctcaagtataactagtcctatgatttcatagatgtagcttaggataaggccaaggtaggtgttgcctatataaggtttttttaaaaaaggaaaaataggccgggctggtggctcacgcctgtaatcccagcactttggcaggctgaggcgggcagatcacctgagatcaggagttcaagatcagcctgaccaacatggagaagccccatgtctactaaaaataaaaaattagcgaggcgtggtgggcgggcgcctgtaatcccagctacttgggaggctgaggcagaagaatcatttgaacccaggaggcagaggttacagtgagccgagatcgtgctactgcattccaacctgggcaacaagagtgaaactctgtctcaaaaaaaaaaaaaaaaaggaaaaa

SEQ ID NO: 12185 - DNA, 1847 bp, Homo sapiens
tctgatgcacctgggcgtcccctcccatcccccctccctgcacaggtgctggaaacatgcatgaagagctgcggcaagcggttccacgacgaagtgggcaagttccgctttctcaacgagctcatcaaggtcgtgtctcccaaggttggtgcccccagcccaagctcagacctgccctgtcggatgtggggagaggaaagaggaccttcagattgtggagcgacttttccagggagcctcccactggggtgtcacctcagccccccattagaactcagacctaggaaaaacacagatctcttctcacagtcctctcatacctgattctgggacagcctggggtctcggaggagtgtttccaggctggccaggggcggggcagccatggagctgcccggtgcttaggaagaaatgattccagggaatacataagctgacagatggctgtatgtgtcagccatctctggcctgaaatcactccctgtggacctggccacagaaccctacctggtctctggcaggtttccctgtccccaccacacaagagcaacctccctggacctcagcatccaaggccacagacctgagtgatggagcctgctggctccagacgggccatccccggctcagcccaaggagtcttcccacagaccatgaacgtttctttttctttatttttttgagatggagtcttgctctgtcacccaggctggagtgcaatggcatgatctctacgctccacaacctccacctcctgggttcaagcaattctcctgcctcaacctcccaagtagctgggattgcaggtgcacgccaccatgcccggctaattttttgtatttttagtagagatggggtttcaccatgttggccaggctggtcttgaactcctgacctcatgatctgcctgtcgtggactcccaaagtgccgggattacaggcgtgagccaccatgcccggcctacctaccgtgaacattttttttttttttttgacaaggagtttcactcttgtcacccaagctggagtgcaatggcgcgatctcagctcactgcaccctccacctcccaggtttgagcaattctcctgcctcatcctccagagtagctgcaattataggtgcccaccaccaagcctggctaattttttatttttagtagagacagggtttcaccatattggtcaggctggtcttgaactcctgacctcatgatccacctgcattggcctcccaaagtgctgggattacaggcgtgagccatggcctccggcctactgtgaacatttcttaagctgtttgagtgacagcccacccccttggcccttccttgctcagacccatcctttgaccagagctactgaataatccatatggcctcccattctcctcccaacaggggactctgctgtgagagccactttccccagcccagtttgctgctaggagacggagagtaggcccagggcctcccagttccaccctcacccctccctgggcagcctggagacctctggctcctctttcctgggatgtcaaggctaagtccccagagccgactatgagcaggcctgtccctcatgtcagttctgcatcctcaccatggtgccatctagcaggtggggaaacagacactgagggctgacccagctaataagtggcaggggtagtaggtgaactcagtctaccccaggctggttgggcggggctatgaggaccctgtaggctagagggcttcccggggagtcctggggaggcagtagggtgtggacagggcttgagactgaagtgagtggggctgggcagtatcaaaggcctccccactgtgtccctgaagtatctgggctct

SEQ ID NO: 12186 - DNA, 594 bp, Homo sapiens
tctgatgcacctgggcgtcccctcccatcccccctccctgcacaggtgctggaaacatgcatgaagagctgcggcaagcggttccacgacgaagtgggcaagttccgctttctcaacgagctcatcaaggtcgtgtctcccaaggggactctgctgtgagagccactttccccagcccagtttgctgctaggagacggagagtaggcccagggcctcccagttccaccctcacccctccctgggcagcctggagacctctggctcctctttcctgggatgtcaaggctaagtccccagagccgactatgagcaggcctgtccctcatgtcagttctgcatcctcaccatggtgccatctagcaggtggggaaacagacactgagggctgacccagctaataagtggcaggggtagtaggtgaactcagtctaccccaggctggttgggcggggctatgaggaccctgtaggctagagggcttcccggggagtcctggggaggcagtagggtgtggacagggcttgagactgaagtgagtggggctgggcagtatcaaaggcctccccactgtgtccctgaagtatctgggctct

SEQ ID NO: 12187 - DNA, 25206 bp, Homo sapiens
gcgtttctctccactgatctggacgttagagtttttcactccggggtccaaaggggagcgccaaaaggaaacccttgccctccctgtatccgtcgcagtctggcgcggccctcggtgacggcactcactcctctcaggaccccatgcaggccccgccccgtctcagctcgtgcagactctcgcgagttttgaagccgcggggccgggcggctgcaatatggcggaggcggaaggggaaagcctggagtcctggctcagtgagtagccgcggccgtttctgcctgccctcgagccgctgggctgcccctgtcttcacccccacgtcccctccccgggctccacggcgtcgcctcttggcagcccacgcccggtctcgccctcgccgcgagcagcctgcgatcacgccccttccctatcagggcgccgggccccagtccggcccccgcttccctcgctgcggcgcgtcctcttgctctggcgcgcggcggcgtgaactcgggctcctgtcgggcaccgcaggctcggggaaaggcgacagccaagatcttcgggctgacatgcttcggcgctttggggagattgtggtggggtcgccgcccggcggtgacaccaggaacccagcgccccaatccctgactaagggagaagcttcggattggggctgagtctccggtagtggtgggtgctgccgactgcgttcagtcgcctggcagcttcagaattgtgaccatgtgttggagaagtgacggcttcgctcaggcagaatgcttgaagtgagaataatattccaaagagagcgatgatagagaacagagagctctacctttttcctgcagtgaccacagaagcatggtgaaatcggtgtcgggaattccccccccacacacatacatatacccccttgaatatcctaacgagtcagtgttgatagcctattctgagtaaggctgaggagcacagtctgaagctgtagttatagaagcgtattgctgtcattgcactgtgaattacagtgctacgaaggaaatgtgtgttaacctggttagcaggtagtactctgcctgagggttaataagtgaactttcctgtaggctagacctggaagcctcctttaagtggagagagaaattggactggtaatgggataggtgagatacctagtattgccttgttctgaggtctcttatttagtactgcttccgggatcttggaggtgatagctatttcctcaaattgtctgatttttcctagtaagaaacccccttcaggaggttgagcttcagtttaaaggggagcatatcccaaaagagagaaaaagtaagatcacgtttgcaaaatctgcagttgcaggcaggtcataaggcttctttatatatggaagtgttctccaaggagctcaaagtactttacagatattcattaaattagtttaccaagtattctagcaaagcaggcactactgccataatttcacaaaaagaggacatcctgactccagtcaaaccacttgcccagaaatgcccaacttgctataaccagagtggaattagtttgctttgaaggtattaatatgggtattgaataatttaaatgacctaagctgagtttaataggctacatttagagttacattttgtttttgttacttgtttttgagacagagtctcgcgcgctgttgtctaggctggagtgcaggggtgcgatcatagctcactgcagccttgaacccctgtgctcaaataagtcttctacctcagcctcctgagtagctgggactataggcacacgccaccatgcttggctaattcttttgatttttagtagagatgaggtcttgctgtgttgcccaggatggtctcaaactcgagttcaagtgatcctcccacctttcccttacaaagcgctgggattacacacgtgagctaccgcacccagcctagagtcacattatgaaatgagagggacacacttggtgggggggagtcacatggtatctgtagagacataagcttcacagttgttacgacttaatgtgaactgtaccagttgaacaaaccagcagttggggttcagcatcgtctcagtcagcgtccttgtcaccccacgtttgcctgaattgttgcagaagcctctgcttggcccagagacccaggtctctcccgtcctcacctctcctcagtccattctgctcccagaagcgcacttgtgttgaatcaaatcattccactgttgcctgtaatctggccttggttgttccaggcctttttctctgtggcttctacgttttcctgctctactcagtctgatgttcttggtttaccaatacacgttgctctccttacctggaagccctgctcccgtttcctcaactaaatgcttgaaaacccatctcagattctcttttctcacaaaccatctcttgatgacttcagtcttctttcaagtcccaccatgatcaatcaatcaatgtttaatgagtacctgctacgtggggtgttataggagttaggaagtttaagaagattttgcctttagttggatggaggtgatgctggagtggatgaagaactctcctgtaatcccagcacgttgggaggccgaggcgggtggatcacgaggtcaggagatcgagaccatcctggctaacacagtgaaaccccgtctctactaaaaaatacaaaaaaatagccaggcgtagtggcgggcgcctgtagtcccagctacacgggaggctgaggcaggagaatggtgtgaacccgagaggtggagcttgcagtgagctgggattgtgccactgcactccagcctcggtgacagagcgagactccgtctccaaaaaaaaaaaaaaaaaagatacaaggcagtgctaaaacgccggcattctctttagggaactggggatgggggaagagatgattcattgaggatactccatttgagctagccattaaataatgggaaaagttggaaaaaaaaaaacactagatggtgatgtggagagagcaaacctgtttggggcacacagtaacagaggtgtttgggaatgagggaagataaggctgggaagttaagaccagattctaccaagtctccaatttccagcccaagaagtttattttatttatttatttatttgagacagagtcttgcactgtcacccaggctggaatgcagtggcacaatctcggctcactgcaacttccgttgcttaggtgcaagcaattctccatcctcagcctcccaagtagctgggactactggtatgtgccactacacctggctcatttttgtatttttagtagagatggggtttcaccatgttggccaggctgttgtcaaactcttgacctcaagtgagccacctgcctcagctccctccaaagtgttgggattacaggcttgagctaccacgcccagcccagccgaagaagtttaaatttctgcagttatcaggccctcattccttctgtactaggtgaaatcggtgttttggtgtcttaagaggcttgatttgatataggtttcatgcgcgtccgtgtgaagagactaccaaacaggctttgtgtgagcaacatggctgtttatttcacctggatgcaggcaggctgagtccgaaaagagagtcagcaaagggtggtggattatcattagttcttacaggttttgggataggcggtgaagttaagagcaatgttttgcgggcagggatggatctcacaaagtacattctcaagggtggggagaattacgaagaaccttcttaagggtgggggagattacaaagtacattgatcagttagggtggggcagaaacaaatcacaatggtggaatgtcatcagttaaggctatttttacttcttttgtggatcttcagttacgtcaggccatctggatgtgtacgtgcaagtcataggggatgcgatggcttggcttgggctcaggcctgacattcctgccttcttatattaataagaaaaataaaacaaaatagtgttgaagtgttggggcagcgaaaatttttgtggggtggtatggagagagaatgggcgatgtttctcagggctgcttcaagtgggattaggggcggcgtgggaacctagagtgggagagattaagccgaagggagatcttgtggggatgttagaagaaacatttgtcgtatagaatgattggtgatggcctggatatggttttgtatgaattgaaaaactaagtggaataagagaaggagaaaaacaggtataaaaggtctaagaattgggaggacctaggacatctgattagagagtgcctaaggagattcagcatagtcctgccagcaaagattatttatttacttcaagagttaagagtggcagtttggggatagcacgaggagatatcacctgtgatggcttggagaaacagtgtaaaccagcagtgtaaacaagagcagggcatgtatgagtagttgagaacgttgaataggagtatgactagacagaagatagtagggatgatgacaggttttttttgggggggggggcacagtctaagttggtctggtgtctggaatgagactggggcctaataaaaaggagcatctatacaggagcttaaatgggctgtaccttgtagcattctgaggacaggtctgacttctgagaagggaaagtggtaaaagtattgtccagtcctttttaagttggtggctgagcttggtgaagtgtttttaaaagacctttagtccgttctgcttttcttgaagacggaggaccgtaagggatataaaggtttcactgaatactaagagcctgagaaactgcttggctgatttgactaataagggctggtctgttagactgtatagaggtgggaaggctaaactgaggaattgtgtctgaccgaagggaagaaatgactgcggtggccttctcagaccctgtaggaaaggcctctacttacctagtgaaagtgtctacttagactaagaggtattttagttatctgactcggggcatgttgagtaaagctaatttgccagtcctgggtgggggcaaatcttcaagcttgatgtgtagggaagggagggggcctgaataatccctgaggagtagtagaatagcagatggaacactgagaagttatttccttgaggatagatttccacaatggaaaggaaatgaggttctaagaggcgggctagtggcttgtactatagcatagcctgcctttgctgctgtgtggcgattaggcctgctggaactgccatcaataaatcaagcgtgatcagggtgaggaacaggaaagaaggaaatatggggaaatggggtgaatgtcaggtggatcagagagatacagtcatgggggtcaggtgtggtatcaggaataatgtgggaggccagattgaggtccgggccaggaacagtggtaattgtgggacttaacaaagagtgagtacagctgaaggagccggggagcagaaagtatatgcatcaggtatgaggaagaaaataatattggaagttatgagaaatgtagagagtgagttgagcatagtttgttatttttagggcctctaaaagtattaaagcagcggcagccactgcaagcagacatgagggctaggctaaaacagtaaggtcaagttgtttgggcagaaagactacagggtgcggtcctggctcttgtgtaagaattctgacacactaaccatgcctaggaaggaaaggagttgttgttttgtaagggattgaggtttgggagattaatcggacacgatcagcagggagagcacgtgtgttttcatgagaattatgccgagataggtaacagatgaggatgaaatttgggcttgactgaagtaatgggggctgtctgtgaagccttgcagcagtacagcccaggtaatttgctgagcctaatggatgtcagggtcagtccaagtgaaagcaaagagaggctgggatgacgggtgcaaaggaattgtaaagaaagcatgtttgagatccagaacagaataatggattgtggagggaggtattgaggataggagagtatatggtttggtaccatggggtggataggcaaaacaatttggttgataaggcatagatcctgaactaacttgtaaggcttgtctggttttaggacaggtaaaatgggggaattgtaaggagagtttataggctttaaaaggccatgctgtagcaggcatgtgataacaggctttactcctttcaaagcatactgtgggatgggatattggcattgagcggggtaagggtgattaggttttaatgagatggtaaggggtgcatgatcggtcgccaaggagggagtagaggtatcttatacttgtgggttaaggtgggggggaatacaagaggaggacgcaaaggaggctttggattggaaagggcagcaatgagatgtagctgtaacccaggaatagtcagggaagcagataatttagttaaagtgtctcggcctaataagggaactgggcaggtggggataactaaaaacgagtgcttaaaagagtattgtctaagttggcaccagagttggggagttttaagaggtttagaagcctggctgtcaatacccacaacagttatggaggcaagggaaacaggcccttgaaaagaaggtaatgtggagtgggtagcctccgtattgattaagaagaggacggacttactctccactgtgagagttacctaaagctcggcatctgtgatggtctatggggcttccgaggcgatcgggcagcgtcagtcttcagccgttaagccgagaagatctgggaaggagtcagagagccttgggccagagttccaggggctctgggagtggctgtcaggtgagttgaacagtccaattttcagtggggtcccacacagatgggactcgcttaggaggaatcccgggctgcgggcattccttggctcggtggccagatttctggcacttgtagcaagctcctgggggaggcagttatggaggaatgcctggccactgcggtttaggcgtttggaagttcttgtgtgctggagatgtagctggggtttgtctcacagtggaggtaaggaattgcaactcagaaatatgttgttacttggctgcctctactctattattgtacaccttgaaggcgaggttaattaagtcctgttgtggggtttgagggccggaatttaatttttggagttttatttaatgtcgggagcagattgggtaataaaacgtatattgagaataagacggccctttgacctcttagggtctagggctgtaaagcgtctcagggttgctgccgaacgagccatgaactgggctggatttttatatttgatgaaaaagagcctaaacgcttctgatttgggataaagaaaaaggagcattaaccttgactatgcctttagctccagccacctttttaagagtaaattgctgggcaggtgggggagggccagtcactgaacgaaactgtaagctggaccaggtgtgaggaggggaggtgataaaaggattctagggtggaggagcagaggctgaggaagaattgggacctagatggcctggcgacgagcagcctgaggagaaggggaaaggtcagatgggtctgtagaaaagactggaaagacccagcgacacttggggttgggactgaggggacaggcgggagggaaagaaggaggatttgggaggaatcgcattgggaacagagacttgagagggaacgaagtgtgaaaaatgcctggatgtgaggcacctcagaccatttgcccattttttgacaaaaattatttaggtcttataggatggagaaatcgaaagtgccgttttctggccatttagagccattgtcaagtttgtactggggccaagcggtgttgcagaagaaaataaggcatttaggttttaggtcaggtgcgagttgacgaggttttaagttcttgagaacacaggctaagggagaaggaggaatggaggctggaaggttgcccatagtaaaggaggcaagcccagagaaaagagagagtagagacacggagggaaggggttcgagggttcttaccctccagaaaagcaggaaaggggtcagggtgtggaaataagggattggggcacacagataagaggtcggggtgcggaaataagggattgggggttcttgccccctagaaaagcgggacttaccgctaagggtgaaggagaaggggttgaggggtacttgcccctcccccagaaatgcagagaaggggtagagacacggagagaaggggttgtggtacttgcccctcccccagaaaagcaggacttgccgctaagggtgaaggaccaaggcaggcgtccctgagtggtctgacacctttgaaacgtgagtgaataatcagagaggtgtccctgcaatgattaaacaccaaggaaaggctgccttcccagtctgtgaccagcgccagagttttgggtccacggataaaacgtgtctcgtttgtctctaccagaaaatgaaaggaattgaaattaagagaagggagagattgaagagtggaaaggagaaagtggttgagggatagtgagagaggttggagaagagagtaagaagaggccgcctacctgatttaaaattggtgagatgttccttgggctggtgggtctgaggacctgaggtcgtaggtggatctttttcacggagcaaagaacaggaggacaggggattgatctcccaagggaggtcccgcgatccgagtcatggcaccaaatttcatgcgcgtccatgtgaagagaccaccaaacaggctttgtgtgagcaacatggctgtttatttcacctggatgcaggcgggctgagtccgaaaagagagtcagcaaatggtgtggtggattatcattagttcttataggttttgggataggcggtgaagttaagagcaatgttttgcgggcagggatggatctcacaaagtacattctcaagggtggggagaattacgaagaaccttcttaagggtgggggagattacaaagtacattgatcagttagggtggggcagaaacaaatcacaatgctggaatgtcatcaggtaaggctatttttacatcttttgtggatcttcagttacttcaggccatctggatgtatacgtgcaagtcataggggatgccatggcttggcttgggctcagaggcctgacaatagggactttacataggattaggatggattagaacagaagttctagaagcaggtgagaaggagtggagggtagggataaggaaggaagggatttaagaagacattgagaaggaaaggaccacaagactgagaggaatggatgaggagagagggaagaaggagtcaaaaaagaggtgggggaataggggacttttggaaggtgcagcatttataggaatagtgacttaatagaccacatgcagtggctcattcctgtggtcccagctactcaggaggctgaggtgggagcatcgcctgagcccaggagttggaggctacagtgagccatgatcgcctactgcagcccggggcaatagagtgagacccccatctctaaaaaaagaacaagcacacgcctgtgggtggtcccagctactcaggaggttgaggtgggaggatcacttgagcctgggaggcagagactgcagtgagctgtaagagccactgcactccaacctgggtgacagagtgagaccccgtctcaaacaacaaaaaagaaaaaaaaaaacgaaagacgccaggcactgggactcacacctgtaatcctagcaccttgggagttaaaggcaggcagattgcttgagcctaggagttcaagaccagcctgagcaacatggcaaaattctgtctctaccaaaagtacaaaaaattagctaggtgtgatgtgagtgtctgtggtcccagctaggctgaggtagaagaatcatctgagcctgggaagttgaggctacagtgaagccatgatcgcaccactgcactcttgcctgagtgacagagtgagaccctgtctcaaaaaagaaaaaaaaaggaagaagaaaaagaaatggggaagtcaggaaaaagaagtgatgcttttttttttttttttttttttgagaaggagtctcactctagtcgcccaggctagagtgcagtggcacaatctcagctcattgcaacctctgccgcctgggttaaagcgattctcctgcctcagcctcccaagtagctgggattacaggcgcctgccacttcgcctggctaatttttgtagttttagtagagacagggtttcactatcttagccaggctggtcttgaactcctgacctcgcgatccacccacctcagcctctcaaaatgctgggattgcgggtgtgagccaccgtgcctgggccatacatttgtttttacactcatttctgtaccaaattagcccaattatctactgtcttgttttttgaactgattttttttttttttcatgtattgaaccaggagagcacagcctccttgagggtaaaatctgtgtctggaactttttctgtagtccctccagggtctggcatgctgacatgctgtttacttcattgtctgcgggtgcttaacaaagacttggtgattgactaagtttgtgtttccattcaggaccctagtgaaggttgacctttattccctttccagcccatgttcttgcttctgcttgtttgtaagtcatttgttacgtagatttttctttttggagatggagcctcactctgtggcccaggctggagtgcaatggcctgatctcagctcactgcagcctctgcctcctgggttcaagtggttctcctgccttagcctcctgagtagctgggatcacaggtgcgcggaaccatgcccagctaattttgtgtttttagtagagatggggtttcaccatgttggtcaggctggtctcgaactcctaacctcacgcaggtgatccgcctgcctcggcctcccaaagtgctgggattacaggcgtgagccaccgtgcccagaccatatgtatataattttttttttttttttttttggagatggagtctcactctgttgcccaggctggagtgcagtggtacaatcatggctcactgcaacctctgcctcctgggttcaagcagttctccagcctcagccttcaagtagctgagattacaggtgtgtgctaccgtgcctagctaattttagtatttttagtagagacaggatttcaccatgttgaacaggctggtcttgaactcctgacctcaaatgatccacctgccttggcctcccaaagtgctgagattacgggcgtgagccaccgcatccagcctgctatgtagatcttgttttctctggaatgtttgagccgtgctggaatggggtacccaatgctgctgtttccatccccacatgacgttttaagtcccacgagagtaggctagcgatggagtgaagctgaaaaatgaaagcaggaaatccagagacacagaaacagatgaggctttcaacagagactcgaaaatagacagaaaccatgagtcagagcagagcccggaggggcggttcgggaaggcaaggtctataggggaagctcgggtgtcacctctatgccaggtgaaggaaatgttgagtgggtgggaggctgtgtgcatctgctggggaggcagtaggcagatggaaagatcaagtcacccagaattatccccagaggttccttcccgttcctgtgggcgggtgagctctgctttctgagctgcccagagagctggaggagatagacatggaactgaccattgcagaaactagggctttttgtgcccgtgagtaggcaaagagctccctgtggatttgccataaaaaggtctatcaaggtggaagaaagtgagattctagagaaattaatacaagtgaaaagtgggcaggagtgttcttggaagtagaaatgctgttggaagtctaatagacttgggaagaagataacgtatggtgaataccagttgcttcgggggttggggggatccacattttactctgtactcagaagatgcttttccccgtgcaaaaagtgaaagtgagtgggccagtttttcttctgtcacaaggtgtatgactgttcccaaaataatagccctgggggatggggattgcttctcagaccattcaatttttgtaccctgtagacttttggtgttatgtgagaactttaagcacctgataggaattagtaacagagctacgctaatgcctgaggaaatttcagacaattggtgggagagacttggcatttggaatgtgatagctggtaggctaccatacagtaatgcaggattgccagacatttctttccaaatggctacccttgattacatttaactcccctcctttcaagctccagattttgaaggacctgttaattctctttcaagattgaagacagacaccttctttttcttctaaagaggaacctaggcggggtgcggtggctcccgcctgtaatcccagcactttgggaggccagggctggtcttgacctccttacctgaggtcaggaggcctggccaccatggcgaaaccccatctctactaaaaatacaaaaagtagccaggcatagtggcgcatgcctataatcccagctactcgggaggctgaggcaggagaatagctcgaacctgggaggtggaggttgcagtgagcctagatcgcgccactgcactccagcctgggtgacacagcgagactcaatctcaaaataaataaataaataaatatgaacctaaaccatcagaatcttccccttgcagccacaacagaaacactgccggggaggccgagccccgacctgggaagcagggtgatacactgggtgccacgggccttccctctgcctggcagctgtcgctactcagatccctgcagccctgttgccagtgaaggagctggagtctctgttatgatgtgttcatccagctggtgagtttttttttttttgttttgttttttttgtttttgtttttgttttttttttagacagagttttcacttgttgcccaggctggagtgcaatggcacgatctcggctcaaggcaacctctgcctcccaggttcaagcgattttcctgcctcagcctcctgagtagctgggactacaggcatgtgccaccatgcccagctaattctgtatttttagtagtgatggggtttctccatgttggtcaggctggtcttgaactcctgacctcaggtgatccgcctgcctcggcctcccaaagtgttgggattacaggcgtgagccactgcacccggcccagctggtgattttttttttttttttttttttttttgagacggagtctcgctgtcgcccaggctggaatgcagtggtgcgatctcagctcactgcagactccaccccccgggttcgcgccattctcctgcctcagcctaccgagtagctgggactacaggcgcccgccaccttgcccagctaactttttgtatttttagtagagagggggtttcaccgtgttaaccaggatggtctcgatctcctgacctcgtgatccgcccgcctcggcctcccaaagtgctgggattacaggcgtgagccaccacgcccggccccgtagctggtgatttttaaagttaacaaaatacaattatgagaaatcagaattcagaaagtaatgacagagagggccttgtcgggaggggctctgacaccctgctttgggccctcatagagatctggggagggagcaggagtgttttaaggggtgtgcgtcttcagccttccatttgtcttcagaacccaaagccctaaatttagcaaacagctggagagtgctttctgaagagggaggctctggacctgaatcagagatgggaacccatgtaaccaccctcagctgggctcttcagtgtaatcacaggtttgggaaggtaactgaggagagcccatgccaaatatcagaactttgcatttggtgcctggattttaaatcccaggggccctctgagaactctagtacttgtgtttgtgcttgaccatggaaggccattagagcctgggggtgctagatactcaagctgcaatcccaggcaagttgcacggtgaccagggcttagtaggggctaagtaaatgttgttggcttgacaatgatgagcattatgtgcaatttcaaaaacacttaaagcattatggaaggctaggtctggaaaaaccttttgacaggtatgtggaaaatattcgctgggcgcggtgactcacgcctgtaatcccagcactttgggaggccaaggcgggccgatcacctgaggtcgggagtttgagaccagcctgaccaacatggagaaaccccgtctctaccaaaaatacaaaattagttgggcatggtggtatgcacctgtagtcccagctacttgggaggctgaggcaggagaatcacttgaacccgggaggcagaggctgcaatgagccgagatcgtgccactgtactacagcctgggcaacaagagcgagactccatgtcaaaaaaaaaaaaaaaatttgtggttacaaatatgtatttttttatctagttcagtctgatttcagtttccccaaaaacccttcttgaccatctccacttgcttaacactgagctcatttttatatagctggagttccctttattatctttacatgtttcatgtaggcatttttttgggaatattttaattatttgtgtttgtccttttgaccttgattccactctaagcttcatgagacagaatttgttttctcttttatttgtgactttcaaaatactggacagaaagcagtatttgtatttgctctccgactgaattttttttttttctgtctccttgctactgactgttctactgaggcttctctattagagagtaaagttgaaagcaaactcttagtgcttaaaacttgcgaagaaaaccttccattgcatcctcattgctcttcctaacacttgtcctcttctttgttgtgttgcaagataaagccaccaatccttccaaccgccaggaggactgggaatacataattggcttctgtgatcagatcaacaaggagctggaagggtgagtctcagcactgtgggggcagctgagagggagcggactgggaaggggaacaaccatggccaaggagggccagccaggtagccccaggcttagtgcactggagtgtgttctgcttgtcccccaggccacagatcgccgtccgactgctggcccacaagatccagtccccacaggaatgggaggcgctccaggccctgacggtaggtccttcactctccggaggtggaaaccgcagcccttcacctgcccacgccattcctcgtgtccccatagcggttcttagggctcctgccaaaagccaacagaaagtccttgatacagactagatagatctcgaatctgttcagccagctgttccacaaatctgtgtgcattgtgccaggccctgaggcctcagaggtgactgcagtgccgtccctgccagcatggccacatggttagtgtgtgaggcagaggggctaaggaaagcagcccagagtcagggccctgagccccatgtggcgcaagagaaggcttggtgaagagatgctgacagggctgtgttgatagttcagagctggccagctgaagaaaagaggggtcggtccagttcattctgtagttaaacaatgccagtcactagcgaaggtgtcgcactgatggctgaggcccctagggcagatcctggtgtctgttcagactgagggaatttaaggtgtggaatggtgcctggccctcagtgcctccacatgctccgaaaacaaagagcagccgagatctgaggaatccggggctctagcctgactgcattcaggtcctggaaagcgaaaagaggaaatatcatctggttcacatgcacccctcagtcatatttgctgtagaacgaattccttaaaacagtgattctcagcagggcacggtggcttgtacctatagtcccagcaccctgtggggcctaggccgggaggatcgcttaagggaattcaagaccagcctaggcaacgtagtgagacattgtctctacaaaaaataaaaaaatcagccaggcacggtggcacacacctgtggtcccagctcctcgggaggctgaggttgaaggatggcttgagcctgggaagttgaggcgaaagtgagtggtgatcacaccgttgcactctagcctgaccaacatagcgagattctgtgtcaaaaaacaaaaaaaaaacgtaacaaaacccagtgattctcaacagggccctccagggaacatttggcagtgtctggaaacatttttagttgtcacacatcggggtgggggtcctcctggcatcaagtaggcagaggccagggatgctgttcgacaccctataaagtgcagagtggccccccacaacgaagaatgaccagcccaaaatgtcagccaggcctcacctgagaaaccttgctttaaaatgcagaagccaagaaagagagcctggacagtgcactcccccttagaaaccgcagtgccagggaccacaggcagcacaggaaagccaaagcgtgagttagggagataagcggagggaggagaaatatcctgtcatctttctcacagataataggatttaaacatccctcccattccctgcacaattgttggtgagcttgtggaaaaaacccaggacaccaagtcagagaaactttgtccctggacctcacctccctcattgtaaaacacgaggccagaatctttaaggaaggcaccttccaggactggcatccaggccttcttggggtcggggtctcggggtttcttgctttagtccctgcccagcttccccagcagaggtttgcagttggagggacatggtctgtgagtgatctcgttgcttaattacactgtccccgggcagtgcacactgcttttcgtgatgagctccttcctgtgggcgtgtttattcagtactctctgggtgccagggatcttgccagtgccaggttccagccccgagcacgccctcactgagcgcctctcctctgtgcggctacaggtgctggaggcatgcatgaagaactgtgggaggagatttcataacgaagtggggaagttccgctttttgaatgagttaatcaaagtcgtctctccaaaggtcagtcagcggcagattcctcgcttttagggacttcttttgtgttcattcccatctcccatcatactggctttcactgcccatccaacatctccagggagctgagattatttgtgtcttgtccttagagagctaggccctggaggtaacgggatgaccaaacaggccacagggaccggcagctttttctgaagcgccctcagcccaaatctgacaggtgatgtggtagtggctgtgtgtttgtccagggtgagggcccatgtagtgtgggactctaggcacctggcacatggcagttgtgggttttgtgggttttcttggcctgtgtcacgtggatacggggagctggcctccgtcattgctccgatgctcagctggccgtgttctgttgcacgctggtgtggcgcagctctgggcccccacttaaagcagagggaatactttaccatgctaaagacattctcatggacacccccaagataaaatgcagttgtgtttctggcaacttgtgcgtgaaaatgcactttcctcagaactcaaaatatccacccaaccatggcctgcaccacatgggcatcagggtcacaaggaagcctctctgtcttgatgtccccaaggtagtaaggaaaggcagagagcaggggtgagcaccgagggcatggtctctggtgtcagactcaggtttccatccggcccttacaccctgggcaagttagatgatcccaggcggcaaatggggacgccacccctactgacgtggctgctgtgcagatgagtaaggtcatgaatacacttacaggacacttcctggacaggaggtgatgacctcctggccccctgcctatccacagactgtatccagatggacacagccacaccacagggagtcgttcccctccccacgctgtctcacacacacttggacacctgcagattttgagtaggaccatagctgctgagcagccacgccattgctgtggagggagccttacactttctctgcctccgaactgcacttactaggtcctcattttcttttgccatgtagtacctgggggacagggtgtctgagaaagtgaagaccaaggttattgagctgctgtacagctggaccatggccctgccagaagaagcaaagatcaaagacgcctaccacatgctgaagagacagggtacgtgtctgcctgcccgcagcctccaggcagccctcgaaggctggcccaggcaaggagagaagggaaggtttgggatccccagagtccctcctgaagagaacagcatttgtccccaggcaaggctgagtcggagttggatgggataaggtgtagcagcctgccctccaccctgctaccctttgcaggtcttgatcacagggacgtggcccttggtgtatgaggaggggtgacaaggcaaccacagcctgagtgcacgtgctgccatgtcccctttcaggcatagtgcagtctgacccaccaattcctgtggataggacgctgatcccctctccaccacctcgtcccaaaaaccctgtttttgatgatgaggagaagtccaaggtaaaggacaccctgggcctgggattttctcatacgagagtgggtggcagcaggggaatgtggtttgcactgtgctgcggggagcctctggggtttccctggggtacgggtgctgcctcttcccttcacctctgatttcctcctctctcagcttttagccaagctgctgaaaagcaaaaacccagatgacctgcaggaggccaacaagctcatcaagtccatggtgaaggaagtgagtgggccccggtccttcaggcacggggtggaggagcccatggccacacagcagaagccgctttgccccggacacgggcctgttttgttctcccctgctgccagctgccctacctgtgccccggtggctgagagtgggaggaggagcacaatagcttccgcgggagcacggaagagaggagtgggttgggagcagtgttgtgaaagcagaagtatagactgggccccaggcaccccacactgaaaggagcttccgagcgtctgtacttgtgttgtggggtaaggtgtgacctggtggaagtggaaagacagtcaagtgacgctctctttctcttgaacttcttcactggggcaggacgaggcacggatccagaaggtgaccaagcgtctgcacacgttagaggaagttaacaacaacgtgagactgctcagtgagatgctgcttcattacagccaggaggactcttcggacggggacagagagctgatgaaggtgggaccgccgacggcaaaggctgcctcccggggctgcgctgcccttcaggagctcagccagcatttgctgagcacgtgccttgtcagagacacgggctgtgcacttggcagtgtattcatgaccttactcatctgcacagcagccacgtcagtagagggtggcgtccccatttgcctcctgggatcagctgacttgtccagggtgtaagggccagatggaaacctgagtctgactccagagaccacactctcggtgctcacccctgctctctccctttccttactaccttggggacatcaagacagagaggcttccttgtaaccctgatgcccatgtggtgcaggccatggttgggtggatattttgagttctgaggaacatgccagcctggaaggcaggaggggactgacttcccctgacccatcctggtgactgctacctagacaaacatcctgggtgatgtggtgtggtggtggtggctggtggcaagaagacgtgcgctgtgatcccagctttgctggtaattgaccgtggcaattggcatatcccggtcattttctgggcatgaaccctgaatgaatcagatgatctctaagggcctttgtggtttgatttttatgtccgagtctctttcaggagctgtttgatcagtgtgagaacaagaggcggactttatttaaactcgccagtgagactgaggacaatgataacagtttgggtgagtgaaagagcgacggtcagggataagccaggcatttggatatgtgggtgggaactgtcacaacaggagtgagaagtctctctttcctgctccaggggacatcctgcaagccagtgacaacctctcccgggtcatcaactcttacaaaacaattattgaagggcaggtcatcaatggcgaggtggctaccttaaccctgcctgactcggaaggtgagatgctctggtccccaactctaggctcctccagaccagcctcaggcccctatcatgaagctgcgggtgtaggctggccagcgtggtggtgttgcacaaggcccaagggagttctttgccattccaagcaatcctccggcttcccggaggcctggagatgtgggtaggaatttccccacctgctttctcgggcttgctttgcagcatcccctggcagagatgccgttggattaggccagaggctgtagcagtgacctctgtgcctagggtgctgcctcctgccacacagccactagaagacccctaattattcctgttctgctctgttgacccatccaggaaacagtcagtgcagtaaccaaggcacgctcatcgaccttgcggagctggacacgaccaacagtttgtcctccgtgttggccccagcacctactccaccctcctcaggcatcccaatcctccctccaccaccccaggcctcaggacctccacggagccgctcctctagccaggccgaggccaccctggggcccagcagcacaagcaacgccctctcctggctggacgaggagctactctgcttgggtgcggcccacagggggcgtcaggggcatcccctgacagggctctgggaggaagggtgtgtggaattaggagccctgagcggggccccagtgtgactgttggggtgggcaaagaaccctgagttggaggtactcagtgaagttcagcgaccctgagggccccagggccatcctcccggtggactctgcctcctgccctgcaccccgccccacaggccccccgcttctgcatcatggactggagcgctccattcccctctggaggctgcctgcagaacagcttctcccggcgccttcacccattgatgtcacttgtcacctgacccctcctcaggcaaggcggggctagggctgcctagctcagagcctcttctcatcctgttttcttctctattgtcaggcctcgccgacccagcccctaatgttcctcccaaagagtcagctgggaacagccagtggcacctgctccaggtaggggcacaggatcggtgacagcactactgtgccaaggacctccactttccagcgtcatgtctcctgggctgcagttagctgtccttccctccagagcgtgccagctgcagcggggaacaatgagtgcctccggggctgtcttccgtgcagtccttggagggctgcgccccgttccagcggcaggccctccccacccgccctcggctcaccaccctttctgttgttcatagagggaacagtccgacctggacttcttcagccccaggccggggaccgctgcctgtggcgcctccgatgctcctctgctccagccctcagccccctcctcaagcagctcccaagctccactgccgcctcccttcccagctcctgtggtcccagccagtgttcctgcccccagtgcgggctcctccttgttttctactggagtggccccagccttggccccaaaagttgagcccgcagtccctgggcaccatggcttggcgttgggcaacagcgcgctgcaccacctggatgccctcgatcagcttctagaagaggccaaagtgtaatgagtgggaggagatgtggggttgctgagggttgggcctgaatgtgtcagaaccagagctaactttgaaggggtgggggtgccttgtagtcccatcagtcaggctggaaggcaaggggtgggcctgggtaagagcatggtcaggggccttgggtgagagtcctgcagctctggctggctctctgacgtgctttccatccttcccacctcccaggacctcgggcttggtgaaacccactacctcccctctcatccccaccaccaccccagccaggcccctcctgcccttctccacggggcccggcagcccgctcttccagccactgagtttccagtcccagggcagccccccgaaggggcctgagctctccctggccagcatccacgtgcccctggaatcgatcaagcctagtaggtgttggaggattgaggtgggtggggcggtggggcctatagccacggagctgtaggacatgcgacagggatggatccaggcactctttgcagggggtcccttaaagccaggcaggcctccctgcctgcattctcagtcttaagctcctcactgagcgcctctcccagattccgttaggaagcactggactcatcatgaccacggagtagcccttttctcctcaccgccggggctctgttgggtgtctctggtgctgctcctcccacactcacgtcacgttcttacaggcagtgcccttcctgtgacagcctacgataaaaacggcttccgcatcctcttccactttgccaaggagtgtcccccaggacgacctgacgtgctggtggtggtggtgtccatgctgaacacggctcccttacctgtcaagagcatcgtgctgcaggctgcagtgcccaaggtaccagtgtctccctggggccaaaacggccttatcttgaccctgttgtgtagaggcctttgcagccagcaggtggcagtgtgtgtgtgcactgcaggttccatctgggggcacctaccagttctcttcaaaggagtttctctctctttagtcaatgaaagtgaagttgcagccaccttctgggacagaactctctccatttagccccatccagccacctgcagccatcacccaggtcatgttgctggccaatccactgaaggtgagcagcaaagaacccaggggtcccagcctgaggccccagctgccccagattaggacgtcaggcccaccacctcccagctggaagtgttttgactgtaggattgacacatccctttgctgccttaggttaagtgtctgagcatggttgggggttgcggggaaaagggaccattcctctagcacagagagggtagcagaatagagggcgtcctgccaaggggccgcctgggctggatctcacttgctgccctctgtcacaggagaaggtgcggcttcggtataagctgaccttcgccctgggggagcagctgagcacagaggtgggcgaggtggaccagttccctcctgtggaacagtgggggaacctatgaccccagaggacgctgtgatctccaccttgaagccaggcaggctgccctgagacgaggagggctctggtcccgtcactctccatgccctgacaacagtgcttgtagctttgatgtggaacaggggccctgggcatttctgctgagaaccaaactgctgctgtgataacctctcctttggcccctaaaaggacctgtttttatctacctgtgtgacttgaagtggccatatgctgtcaggggtgcggagtggcccctgacttcactgctgtcccgggaacatggacccccaggcttggcgtaggtgtttgcttccttctactggcattcactgaagccactggggtggggggtggggggtgggagtctctaaagagagactgtcatgggtcattccccacaagagccacatcctcacacctgacagatgcacggcccaaggggctgcagccctgttgcaattccatgcttcccccgccaaccagctcctgctgccatccccagggaggtggcccaggaaggtgcctggcccagaataaggaactggcatactgcaaagtccccagccctgcctctggtggacagcatcgtcctggaatggccacggagtgatgagttgtgtgcttgtccctggcagtggcaggctgtgtcctatggacatcttggcaggacatggaatttggcctcatgacaggcccaactagggataggaaggaaaatgaagagagccagtatttccccttctccagaagcaggtactcagctttctgggaaaagcgtgcctccagccgtggggacaggccatcctactgactacctcttgcttggcatgaaataaactgctatcctccccttggaatctaccgccactctacatcctactgctttggcctccctctcctctcaccagatggcatgtggtgtggcacctgtggctggacacaggaggcctcaggatcacaaatgttacactagacatatgtcctaatgtgctgcccagaaacctcaactgttccccagctactgaggggcactgtcagcgagatgttgggtctggaggtgatgagatcgggccacacttgagctgagtcaccagaccctattgcttcaacagtgcttggcccccgccagcttgtcccagccactctagctgctggatgtgatcctgggacatgtactccaagcctccgtcacaaaaaaaaaatcaccagctgccatagacacgggggaagcttgcggagcccaggtgaacaagctcagcaatcggacatctctggggaaaggaaggtggcacagaccatgttccctggttcctccctgccccttgccaggcttccttattccttactatgggaagaggtcatatcccttccctgcccctcgctgtctttagcaagcaggtttcactgcttcattagaagaggacaagtcaaaagtgaatcatttttcactacttaaggaataaatccaagagctttccagagactggctgctgcagccctgggaatgtctgtggaattactatgtggaaatggaactttgtgttatgctctagacattacagttatttgagtgttactcgttactgttgaggtcagtgcttcgtggcaaatggctgtactggatatcccagctctgctgcccttgttttgctgcatgttaaataaaaccattttcactgta

SEQ ID NO: 12188 - DNA, 4069 bp, Homo sapiens
gcgtttctctccactgatctggacgttagagtttttcactccggggtccaaaggggagcgccaaaaggaaacccttgccctccctgtatccgtcgcagtctggcgcggccctcggtgacggcactcactcctctcaggaccccatgcaggccccgccccgtctcagctcgtgcagactctcgcgagttttgaagccgcggggccgggcggctgcaatatggcggaggcggaaggggaaagcctggagtcctggctcaataaagccaccaatccttccaaccgccaggaggactgggaatacataattggcttctgtgatcagatcaacaaggagctggaagggccacagatcgccgtccgactgctggcccacaagatccagtccccacaggaatgggaggcgctccaggccctgacggtgctggaggcatgcatgaagaactgtgggaggagatttcataacgaagtggggaagttccgctttttgaatgagttaatcaaagtcgtctctccaaagtacctgggggacagggtgtctgagaaagtgaagaccaaggttattgagctgctgtacagctggaccatggccctgccagaagaagcaaagatcaaagacgcctaccacatgctgaagagacagggcatagtgcagtctgacccaccaattcctgtggataggacgctgatcccctctccaccacctcgtcccaaaaaccctgtttttgatgatgaggagaagtccaagcttttagccaagctgctgaaaagcaaaaacccagatgacctgcaggaggccaacaagctcatcaagtccatggtgaaggaagacgaggcacggatccagaaggtgaccaagcgtctgcacacgttagaggaagttaacaacaacgtgagactgctcagtgagatgctgcttcattacagccaggaggactcttcggacggggacagagagctgatgaaggagctgtttgatcagtgtgagaacaagaggcggactttatttaaactcgccagtgagactgaggacaatgataacagtttgggggacatcctgcaagccagtgacaacctctcccgggtcatcaactcttacaaaacaattattgaagggcaggtcatcaatggcgaggtggctaccttaaccctgcctgactcggaaggaaacagtcagtgcagtaaccaaggcacgctcatcgaccttgcggagctggacacgaccaacagtttgtcctccgtgttggccccagcacctactccaccctcctcaggcatcccaatcctccctccaccaccccaggcctcaggacctccacggagccgctcctctagccaggccgaggccaccctggggcccagcagcacaagcaacgccctctcctggctggacgaggagctactctgcttgggcctcgccgacccagcccctaatgttcctcccaaagagtcagctgggaacagccagtggcacctgctccagagggaacagtccgacctggacttcttcagccccaggccggggaccgctgcctgtggcgcctccgatgctcctctgctccagccctcagccccctcctcaagcagctcccaagctccactgccgcctcccttcccagctcctgtggtcccagccagtgttcctgcccccagtgcgggctcctccttgttttctactggagtggccccagccttggccccaaaagttgagcccgcagtccctgggcaccatggcttggcgttgggcaacagcgcgctgcaccacctggatgccctcgatcagcttctagaagaggccaaagtgacctcgggcttggtgaaacccactacctcccctctcatccccaccaccaccccagccaggcccctcctgcccttctccacggggcccggcagcccgctcttccagccactgagtttccagtcccagggcagccccccgaaggggcctgagctctccctggccagcatccacgtgcccctggaatcgatcaagcctagcagtgcccttcctgtgacagcctacgataaaaacggcttccgcatcctcttccactttgccaaggagtgtcccccaggacgacctgacgtgctggtggtggtggtgtccatgctgaacacggctcccttacctgtcaagagcatcgtgctgcaggctgcagtgcccaagtcaatgaaagtgaagttgcagccaccttctgggacagaactctctccatttagccccatccagccacctgcagccatcacccaggtcatgttgctggccaatccactgaaggagaaggtgcggcttcggtataagctgaccttcgccctgggggagcagctgagcacagaggtgggcgaggtggaccagttccctcctgtggaacagtgggggaacctatgaccccagaggacgctgtgatctccaccttgaagccaggcaggctgccctgagacgaggagggctctggtcccgtcactctccatgccctgacaacagtgcttgtagctttgatgtggaacaggggccctgggcatttctgctgagaaccaaactgctgctgtgataacctctcctttggcccctaaaaggacctgtttttatctacctgtgtgacttgaagtggccatatgctgtcaggggtgcggagtggcccctgacttcactgctgtcccgggaacatggacccccaggcttggcgtaggtgtttgcttccttctactggcattcactgaagccactggggtggggggtggggggtgggagtctctaaagagagactgtcatgggtcattccccacaagagccacatcctcacacctgacagatgcacggcccaaggggctgcagccctgttgcaattccatgcttcccccgccaaccagctcctgctgccatccccagggaggtggcccaggaaggtgcctggcccagaataaggaactggcatactgcaaagtccccagccctgcctctggtggacagcatcgtcctggaatggccacggagtgatgagttgtgtgcttgtccctggcagtggcaggctgtgtcctatggacatcttggcaggacatggaatttggcctcatgacaggcccaactagggataggaaggaaaatgaagagagccagtatttccccttctccagaagcaggtactcagctttctgggaaaagcgtgcctccagccgtggggacaggccatcctactgactacctcttgcttggcatgaaataaactgctatcctccccttggaatctaccgccactctacatcctactgctttggcctccctctcctctcaccagatggcatgtggtgtggcacctgtggctggacacaggaggcctcaggatcacaaatgttacactagacatatgtcctaatgtgctgcccagaaacctcaactgttccccagctactgaggggcactgtcagcgagatgttgggtctggaggtgatgagatcgggccacacttgagctgagtcaccagaccctattgcttcaacagtgcttggcccccgccagcttgtcccagccactctagctgctggatgtgatcctgggacatgtactccaagcctccgtcacaaaaaaaaaatcaccagctgccatagacacgggggaagcttgcggagcccaggtgaacaagctcagcaatcggacatctctggggaaaggaaggtggcacagaccatgttccctggttcctccctgccccttgccaggcttccttattccttactatgggaagaggtcatatcccttccctgcccctcgctgtctttagcaagcaggtttcactgcttcattagaagaggacaagtcaaaagtgaatcatttttcactacttaaggaataaatccaagagctttccagagactggctgctgcagccctgggaatgtctgtggaattactatgtggaaatggaactttgtgttatgctctagacattacagttatttgagtgttactcgttactgttgaggtcagtgcttcgtggcaaatggctgtactggatatcccagctctgctgcccttgttttgctgcatgttaaataaaaccattttcactgta

SEQ ID NO: 12189 - DNA, 25002 bp, Homo sapiens
gggcggctgcaatatggcggaggcggaaggggaaagcctggagtcctggctcagtgagtagccgcggccgtttctgcctgccctcgagccgctgggctgcccctgtcttcacccccacgtcccctccccgggctccacggcgtcgcctcttggcagcccacgcccggtctcgccctcgccgcgagcagcctgcgatcacgccccttccctatcagggcgccgggccccagtccggcccccgcttccctcgctgcggcgcgtcctcttgctctggcgcgcggcggcgtgaactcgggctcctgtcgggcaccgcaggctcggggaaaggcgacagccaagatcttcgggctgacatgcttcggcgctttggggagattgtggtggggtcgccgcccggcggtgacaccaggaacccagcgccccaatccctgactaagggagaagcttcggattggggctgagtctccggtagtggtgggtgctgccgactgcgttcagtcgcctggcagcttcagaattgtgaccatgtgttggagaagtgacggcttcgctcaggcagaatgcttgaagtgagaataatattccaaagagagcgatgatagagaacagagagctctacctttttcctgcagtgaccacagaagcatggtgaaatcggtgtcgggaattccccccccacacacatacatatacccccttgaatatcctaacgagtcagtgttgatagcctattctgagtaaggctgaggagcacagtctgaagctgtagttatagaagcgtattgctgtcattgcactgtgaattacagtgctacgaaggaaatgtgtgttaacctggttagcaggtagtactctgcctgagggttaataagtgaactttcctgtaggctagacctggaagcctcctttaagtggagagagaaattggactggtaatgggataggtgagatacctagtattgccttgttctgaggtctcttatttagtactgcttccgggatcttggaggtgatagctatttcctcaaattgtctgatttttcctagtaagaaacccccttcaggaggttgagcttcagtttaaaggggagcatatcccaaaagagagaaaaagtaagatcacgtttgcaaaatctgcagttgcaggcaggtcataaggcttctttatatatggaagtgttctccaaggagctcaaagtactttacagatattcattaaattagtttaccaagtattctagcaaagcaggcactactgccataatttcacaaaaagaggacatcctgactccagtcaaaccacttgcccagaaatgcccaacttgctataaccagagtggaattagtttgctttgaaggtattaatatgggtattgaataatttaaatgacctaagctgagtttaataggctacatttagagttacattttgtttttgttacttgtttttgagacagagtctcgcgcgctgttgtctaggctggagtgcaggggtgcgatcatagctcactgcagccttgaacccctgtgctcaaataagtcttctacctcagcctcctgagtagctgggactataggcacacgccaccatgcttggctaattcttttgatttttagtagagatgaggtcttgctgtgttgcccaggatggtctcaaactcgagttcaagtgatcctcccacctttcccttacaaagcgctgggattacacacgtgagctaccgcacccagcctagagtcacattatgaaatgagagggacacacttggtgggggggagtcacatggtatctgtagagacataagcttcacagttgttacgacttaatgtgaactgtaccagttgaacaaaccagcagttggggttcagcatcgtctcagtcagcgtccttgtcaccccacgtttgcctgaattgttgcagaagcctctgcttggcccagagacccaggtctctcccgtcctcacctctcctcagtccattctgctcccagaagcgcacttgtgttgaatcaaatcattccactgttgcctgtaatctggccttggttgttccaggcctttttctctgtggcttctacgttttcctgctctactcagtctgatgttcttggtttaccaatacacgttgctctccttacctggaagccctgctcccgtttcctcaactaaatgcttgaaaacccatctcagattctcttttctcacaaaccatctcttgatgacttcagtcttctttcaagtcccaccatgatcaatcaatcaatgtttaatgagtacctgctacgtggggtgttataggagttaggaagtttaagaagattttgcctttagttggatggaggtgatgctggagtggatgaagaactctcctgtaatcccagcacgttgggaggccgaggcgggtggatcacgaggtcaggagatcgagaccatcctggctaacacagtgaaaccccgtctctactaaaaaatacaaaaaaatagccaggcgtagtggcgggcgcctgtagtcccagctacacgggaggctgaggcaggagaatggtgtgaacccgagaggtggagcttgcagtgagctgggattgtgccactgcactccagcctcggtgacagagcgagactccgtctccaaaaaaaaaaaaaaaaaagatacaaggcagtgctaaaacgccggcattctctttagggaactggggatgggggaagagatgattcattgaggatactccatttgagctagccattaaataatgggaaaagttggaaaaaaaaaaacactagatggtgatgtggagagagcaaacctgtttggggcacacagtaacagaggtgtttgggaatgagggaagataaggctgggaagttaagaccagattctaccaagtctccaatttccagcccaagaagtttattttatttatttatttatttgagacagagtcttgcactgtcacccaggctggaatgcagtggcacaatctcggctcactgcaacttccgttgcttaggtgcaagcaattctccatcctcagcctcccaagtagctgggactactggtatgtgccactacacctggctcatttttgtatttttagtagagatggggtttcaccatgttggccaggctgttgtcaaactcttgacctcaagtgagccacctgcctcagctccctccaaagtgttgggattacaggcttgagctaccacgcccagcccagccgaagaagtttaaatttctgcagttatcaggccctcattccttctgtactaggtgaaatcggtgttttggtgtcttaagaggcttgatttgatataggtttcatgcgcgtccgtgtgaagagactaccaaacaggctttgtgtgagcaacatggctgtttatttcacctggatgcaggcaggctgagtccgaaaagagagtcagcaaagggtggtggattatcattagttcttacaggttttgggataggcggtgaagttaagagcaatgttttgcgggcagggatggatctcacaaagtacattctcaagggtggggagaattacgaagaaccttcttaagggtgggggagattacaaagtacattgatcagttagggtggggcagaaacaaatcacaatggtggaatgtcatcagttaaggctatttttacttcttttgtggatcttcagttacgtcaggccatctggatgtgtacgtgcaagtcataggggatgcgatggcttggcttgggctcaggcctgacattcctgccttcttatattaataagaaaaataaaacaaaatagtgttgaagtgttggggcagcgaaaatttttgtggggtggtatggagagagaatgggcgatgtttctcagggctgcttcaagtgggattaggggcggcgtgggaacctagagtgggagagattaagccgaagggagatcttgtggggatgttagaagaaacatttgtcgtatagaatgattggtgatggcctggatatggttttgtatgaattgaaaaactaagtggaataagagaaggagaaaaacaggtataaaaggtctaagaattgggaggacctaggacatctgattagagagtgcctaaggagattcagcatagtcctgccagcaaagattatttatttacttcaagagttaagagtggcagtttggggatagcacgaggagatatcacctgtgatggcttggagaaacagtgtaaaccagcagtgtaaacaagagcagggcatgtatgagtagttgagaacgttgaataggagtatgactagacagaagatagtagggatgatgacaggttttttttgggggggggggcacagtctaagttggtctggtgtctggaatgagactggggcctaataaaaaggagcatctatacaggagcttaaatgggctgtaccttgtagcattctgaggacaggtctgacttctgagaagggaaagtggtaaaagtattgtccagtcctttttaagttggtggctgagcttggtgaagtgtttttaaaagacctttagtccgttctgcttttcttgaagacggaggaccgtaagggatataaaggtttcactgaatactaagagcctgagaaactgcttggctgatttgactaataagggctggtctgttagactgtatagaggtgggaaggctaaactgaggaattgtgtctgaccgaagggaagaaatgactgcggtggccttctcagaccctgtaggaaaggcctctacttacctagtgaaagtgtctacttagactaagaggtattttagttatctgactcggggcatgttgagtaaagctaatttgccagtcctgggtgggggcaaatcttcaagcttgatgtgtagggaagggagggggcctgaataatccctgaggagtagtagaatagcagatggaacactgagaagttatttccttgaggatagatttccacaatggaaaggaaatgaggttctaagaggcgggctagtggcttgtactatagcatagcctgcctttgctgctgtgtggcgattaggcctgctggaactgccatcaataaatcaagcgtgatcagggtgaggaacaggaaagaaggaaatatggggaaatggggtgaatgtcaggtggatcagagagatacagtcatgggggtcaggtgtggtatcaggaataatgtgggaggccagattgaggtccgggccaggaacagtggtaattgtgggacttaacaaagagtgagtacagctgaaggagccggggagcagaaagtatatgcatcaggtatgaggaagaaaataatattggaagttatgagaaatgtagagagtgagttgagcatagtttgttatttttagggcctctaaaagtattaaagcagcggcagccactgcaagcagacatgagggctaggctaaaacagtaaggtcaagttgtttgggcagaaagactacagggtgcggtcctggctcttgtgtaagaattctgacacactaaccatgcctaggaaggaaaggagttgttgttttgtaagggattgaggtttgggagattaatcggacacgatcagcagggagagcacgtgtgttttcatgagaattatgccgagataggtaacagatgaggatgaaatttgggcttgactgaagtaatgggggctgtctgtgaagccttgcagcagtacagcccaggtaatttgctgagcctaatggatgtcagggtcagtccaagtgaaagcaaagagaggctgggatgacgggtgcaaaggaattgtaaagaaagcatgtttgagatccagaacagaataatggattgtggagggaggtattgaggataggagagtatatggtttggtaccatggggtggataggcaaaacaatttggttgataaggcatagatcctgaactaacttgtaaggcttgtctggttttaggacaggtaaaatgggggaattgtaaggagagtttataggctttaaaaggccatgctgtagcaggcatgtgataacaggctttactcctttcaaagcatactgtgggatgggatattggcattgagcggggtaagggtgattaggttttaatgagatggtaaggggtgcatgatcggtcgccaaggagggagtagaggtatcttatacttgtgggttaaggtgggggggaatacaagaggaggacgcaaaggaggctttggattggaaagggcagcaatgagatgtagctgtaacccaggaatagtcagggaagcagataatttagttaaagtgtctcggcctaataagggaactgggcaggtggggataactaaaaacgagtgcttaaaagagtattgtctaagttggcaccagagttggggagttttaagaggtttagaagcctggctgtcaatacccacaacagttatggaggcaagggaaacaggcccttgaaaagaaggtaatgtggagtgggtagcctccgtattgattaagaagaggacggacttactctccactgtgagagttacctaaagctcggcatctgtgatggtctatggggcttccgaggcgatcgggcagcgtcagtcttcagccgttaagccgagaagatctgggaaggagtcagagagccttgggccagagttccaggggctctgggagtggctgtcaggtgagttgaacagtccaattttcagtggggtcccacacagatgggactcgcttaggaggaatcccgggctgcgggcattccttggctcggtggccagatttctggcacttgtagcaagctcctgggggaggcagttatggaggaatgcctggccactgcggtttaggcgtttggaagttcttgtgtgctggagatgtagctggggtttgtctcacagtggaggtaaggaattgcaactcagaaatatgttgttacttggctgcctctactctattattgtacaccttgaaggcgaggttaattaagtcctgttgtggggtttgagggccggaatttaatttttggagttttatttaatgtcgggagcagattgggtaataaaacgtatattgagaataagacggccctttgacctcttagggtctagggctgtaaagcgtctcagggttgctgccgaacgagccatgaactgggctggatttttatatttgatgaaaaagagcctaaacgcttctgatttgggataaagaaaaaggagcattaaccttgactatgcctttagctccagccacctttttaagagtaaattgctgggcaggtgggggagggccagtcactgaacgaaactgtaagctggaccaggtgtgaggaggggaggtgataaaaggattctagggtggaggagcagaggctgaggaagaattgggacctagatggcctggcgacgagcagcctgaggagaaggggaaaggtcagatgggtctgtagaaaagactggaaagacccagcgacacttggggttgggactgaggggacaggcgggagggaaagaaggaggatttgggaggaatcgcattgggaacagagacttgagagggaacgaagtgtgaaaaatgcctggatgtgaggcacctcagaccatttgcccattttttgacaaaaattatttaggtcttataggatggagaaatcgaaagtgccgttttctggccatttagagccattgtcaagtttgtactggggccaagcggtgttgcagaagaaaataaggcatttaggttttaggtcaggtgcgagttgacgaggttttaagttcttgagaacacaggctaagggagaaggaggaatggaggctggaaggttgcccatagtaaaggaggcaagcccagagaaaagagagagtagagacacggagggaaggggttcgagggttcttaccctccagaaaagcaggaaaggggtcagggtgtggaaataagggattggggcacacagataagaggtcggggtgcggaaataagggattgggggttcttgccccctagaaaagcgggacttaccgctaagggtgaaggagaaggggttgaggggtacttgcccctcccccagaaatgcagagaaggggtagagacacggagagaaggggttgtggtacttgcccctcccccagaaaagcaggacttgccgctaagggtgaaggaccaaggcaggcgtccctgagtggtctgacacctttgaaacgtgagtgaataatcagagaggtgtccctgcaatgattaaacaccaaggaaaggctgccttcccagtctgtgaccagcgccagagttttgggtccacggataaaacgtgtctcgtttgtctctaccagaaaatgaaaggaattgaaattaagagaagggagagattgaagagtggaaaggagaaagtggttgagggatagtgagagaggttggagaagagagtaagaagaggccgcctacctgatttaaaattggtgagatgttccttgggctggtgggtctgaggacctgaggtcgtaggtggatctttttcacggagcaaagaacaggaggacaggggattgatctcccaagggaggtcccgcgatccgagtcatggcaccaaatttcatgcgcgtccatgtgaagagaccaccaaacaggctttgtgtgagcaacatggctgtttatttcacctggatgcaggcgggctgagtccgaaaagagagtcagcaaatggtgtggtggattatcattagttcttataggttttgggataggcggtgaagttaagagcaatgttttgcgggcagggatggatctcacaaagtacattctcaagggtggggagaattacgaagaaccttcttaagggtgggggagattacaaagtacattgatcagttagggtggggcagaaacaaatcacaatgctggaatgtcatcaggtaaggctatttttacatcttttgtggatcttcagttacttcaggccatctggatgtatacgtgcaagtcataggggatgccatggcttggcttgggctcagaggcctgacaatagggactttacataggattaggatggattagaacagaagttctagaagcaggtgagaaggagtggagggtagggataaggaaggaagggatttaagaagacattgagaaggaaaggaccacaagactgagaggaatggatgaggagagagggaagaaggagtcaaaaaagaggtgggggaataggggacttttggaaggtgcagcatttataggaatagtgacttaatagaccacatgcagtggctcattcctgtggtcccagctactcaggaggctgaggtgggagcatcgcctgagcccaggagttggaggctacagtgagccatgatcgcctactgcagcccggggcaatagagtgagacccccatctctaaaaaaagaacaagcacacgcctgtgggtggtcccagctactcaggaggttgaggtgggaggatcacttgagcctgggaggcagagactgcagtgagctgtaagagccactgcactccaacctgggtgacagagtgagaccccgtctcaaacaacaaaaaagaaaaaaaaaaacgaaagacgccaggcactgggactcacacctgtaatcctagcaccttgggagttaaaggcaggcagattgcttgagcctaggagttcaagaccagcctgagcaacatggcaaaattctgtctctaccaaaagtacaaaaaattagctaggtgtgatgtgagtgtctgtggtcccagctaggctgaggtagaagaatcatctgagcctgggaagttgaggctacagtgaagccatgatcgcaccactgcactcttgcctgagtgacagagtgagaccctgtctcaaaaaagaaaaaaaaaggaagaagaaaaagaaatggggaagtcaggaaaaagaagtgatgcttttttttttttttttttttttgagaaggagtctcactctagtcgcccaggctagagtgcagtggcacaatctcagctcattgcaacctctgccgcctgggttaaagcgattctcctgcctcagcctcccaagtagctgggattacaggcgcctgccacttcgcctggctaatttttgtagttttagtagagacagggtttcactatcttagccaggctggtcttgaactcctgacctcgcgatccacccacctcagcctctcaaaatgctgggattgcgggtgtgagccaccgtgcctgggccatacatttgtttttacactcatttctgtaccaaattagcccaattatctactgtcttgttttttgaactgattttttttttttttcatgtattgaaccaggagagcacagcctccttgagggtaaaatctgtgtctggaactttttctgtagtccctccagggtctggcatgctgacatgctgtttacttcattgtctgcgggtgcttaacaaagacttggtgattgactaagtttgtgtttccattcaggaccctagtgaaggttgacctttattccctttccagcccatgttcttgcttctgcttgtttgtaagtcatttgttacgtagatttttctttttggagatggagcctcactctgtggcccaggctggagtgcaatggcctgatctcagctcactgcagcctctgcctcctgggttcaagtggttctcctgccttagcctcctgagtagctgggatcacaggtgcgcggaaccatgcccagctaattttgtgtttttagtagagatggggtttcaccatgttggtcaggctggtctcgaactcctaacctcacgcaggtgatccgcctgcctcggcctcccaaagtgctgggattacaggcgtgagccaccgtgcccagaccatatgtatataattttttttttttttttttttggagatggagtctcactctgttgcccaggctggagtgcagtggtacaatcatggctcactgcaacctctgcctcctgggttcaagcagttctccagcctcagccttcaagtagctgagattacaggtgtgtgctaccgtgcctagctaattttagtatttttagtagagacaggatttcaccatgttgaacaggctggtcttgaactcctgacctcaaatgatccacctgccttggcctcccaaagtgctgagattacgggcgtgagccaccgcatccagcctgctatgtagatcttgttttctctggaatgtttgagccgtgctggaatggggtacccaatgctgctgtttccatccccacatgacgttttaagtcccacgagagtaggctagcgatggagtgaagctgaaaaatgaaagcaggaaatccagagacacagaaacagatgaggctttcaacagagactcgaaaatagacagaaaccatgagtcagagcagagcccggaggggcggttcgggaaggcaaggtctataggggaagctcgggtgtcacctctatgccaggtgaaggaaatgttgagtgggtgggaggctgtgtgcatctgctggggaggcagtaggcagatggaaagatcaagtcacccagaattatccccagaggttccttcccgttcctgtgggcgggtgagctctgctttctgagctgcccagagagctggaggagatagacatggaactgaccattgcagaaactagggctttttgtgcccgtgagtaggcaaagagctccctgtggatttgccataaaaaggtctatcaaggtggaagaaagtgagattctagagaaattaatacaagtgaaaagtgggcaggagtgttcttggaagtagaaatgctgttggaagtctaatagacttgggaagaagataacgtatggtgaataccagttgcttcgggggttggggggatccacattttactctgtactcagaagatgcttttccccgtgcaaaaagtgaaagtgagtgggccagtttttcttctgtcacaaggtgtatgactgttcccaaaataatagccctgggggatggggattgcttctcagaccattcaatttttgtaccctgtagacttttggtgttatgtgagaactttaagcacctgataggaattagtaacagagctacgctaatgcctgaggaaatttcagacaattggtgggagagacttggcatttggaatgtgatagctggtaggctaccatacagtaatgcaggattgccagacatttctttccaaatggctacccttgattacatttaactcccctcctttcaagctccagattttgaaggacctgttaattctctttcaagattgaagacagacaccttctttttcttctaaagaggaacctaggcggggtgcggtggctcccgcctgtaatcccagcactttgggaggccagggctggtcttgacctccttacctgaggtcaggaggcctggccaccatggcgaaaccccatctctactaaaaatacaaaaagtagccaggcatagtggcgcatgcctataatcccagctactcgggaggctgaggcaggagaatagctcgaacctgggaggtggaggttgcagtgagcctagatcgcgccactgcactccagcctgggtgacacagcgagactcaatctcaaaataaataaataaataaatatgaacctaaaccatcagaatcttccccttgcagccacaacagaaacactgccggggaggccgagccccgacctgggaagcagggtgatacactgggtgccacgggccttccctctgcctggcagctgtcgctactcagatccctgcagccctgttgccagtgaaggagctggagtctctgttatgatgtgttcatccagctggtgagtttttttttttttgttttgttttttttgtttttgtttttgttttttttttagacagagttttcacttgttgcccaggctggagtgcaatggcacgatctcggctcaaggcaacctctgcctcccaggttcaagcgattttcctgcctcagcctcctgagtagctgggactacaggcatgtgccaccatgcccagctaattctgtatttttagtagtgatggggtttctccatgttggtcaggctggtcttgaactcctgacctcaggtgatccgcctgcctcggcctcccaaagtgttgggattacaggcgtgagccactgcacccggcccagctggtgattttttttttttttttttttttttttgagacggagtctcgctgtcgcccaggctggaatgcagtggtgcgatctcagctcactgcagactccaccccccgggttcgcgccattctcctgcctcagcctaccgagtagctgggactacaggcgcccgccaccttgcccagctaactttttgtatttttagtagagagggggtttcaccgtgttaaccaggatggtctcgatctcctgacctcgtgatccgcccgcctcggcctcccaaagtgctgggattacaggcgtgagccaccacgcccggccccgtagctggtgatttttaaagttaacaaaatacaattatgagaaatcagaattcagaaagtaatgacagagagggccttgtcgggaggggctctgacaccctgctttgggccctcatagagatctggggagggagcaggagtgttttaaggggtgtgcgtcttcagccttccatttgtcttcagaacccaaagccctaaatttagcaaacagctggagagtgctttctgaagagggaggctctggacctgaatcagagatgggaacccatgtaaccaccctcagctgggctcttcagtgtaatcacaggtttgggaaggtaactgaggagagcccatgccaaatatcagaactttgcatttggtgcctggattttaaatcccaggggccctctgagaactctagtacttgtgtttgtgcttgaccatggaaggccattagagcctgggggtgctagatactcaagctgcaatcccaggcaagttgcacggtgaccagggcttagtaggggctaagtaaatgttgttggcttgacaatgatgagcattatgtgcaatttcaaaaacacttaaagcattatggaaggctaggtctggaaaaaccttttgacaggtatgtggaaaatattcgctgggcgcggtgactcacgcctgtaatcccagcactttgggaggccaaggcgggccgatcacctgaggtcgggagtttgagaccagcctgaccaacatggagaaaccccgtctctaccaaaaatacaaaattagttgggcatggtggtatgcacctgtagtcccagctacttgggaggctgaggcaggagaatcacttgaacccgggaggcagaggctgcaatgagccgagatcgtgccactgtactacagcctgggcaacaagagcgagactccatgtcaaaaaaaaaaaaaaaatttgtggttacaaatatgtatttttttatctagttcagtctgatttcagtttccccaaaaacccttcttgaccatctccacttgcttaacactgagctcatttttatatagctggagttccctttattatctttacatgtttcatgtaggcatttttttgggaatattttaattatttgtgtttgtccttttgaccttgattccactctaagcttcatgagacagaatttgttttctcttttatttgtgactttcaaaatactggacagaaagcagtatttgtatttgctctccgactgaattttttttttttctgtctccttgctactgactgttctactgaggcttctctattagagagtaaagttgaaagcaaactcttagtgcttaaaacttgcgaagaaaaccttccattgcatcctcattgctcttcctaacacttgtcctcttctttgttgtgttgcaagataaagccaccaatccttccaaccgccaggaggactgggaatacataattggcttctgtgatcagatcaacaaggagctggaagggtgagtctcagcactgtgggggcagctgagagggagcggactgggaaggggaacaaccatggccaaggagggccagccaggtagccccaggcttagtgcactggagtgtgttctgcttgtcccccaggccacagatcgccgtccgactgctggcccacaagatccagtccccacaggaatgggaggcgctccaggccctgacggtaggtccttcactctccggaggtggaaaccgcagcccttcacctgcccacgccattcctcgtgtccccatagcggttcttagggctcctgccaaaagccaacagaaagtccttgatacagactagatagatctcgaatctgttcagccagctgttccacaaatctgtgtgcattgtgccaggccctgaggcctcagaggtgactgcagtgccgtccctgccagcatggccacatggttagtgtgtgaggcagaggggctaaggaaagcagcccagagtcagggccctgagccccatgtggcgcaagagaaggcttggtgaagagatgctgacagggctgtgttgatagttcagagctggccagctgaagaaaagaggggtcggtccagttcattctgtagttaaacaatgccagtcactagcgaaggtgtcgcactgatggctgaggcccctagggcagatcctggtgtctgttcagactgagggaatttaaggtgtggaatggtgcctggccctcagtgcctccacatgctccgaaaacaaagagcagccgagatctgaggaatccggggctctagcctgactgcattcaggtcctggaaagcgaaaagaggaaatatcatctggttcacatgcacccctcagtcatatttgctgtagaacgaattccttaaaacagtgattctcagcagggcacggtggcttgtacctatagtcccagcaccctgtggggcctaggccgggaggatcgcttaagggaattcaagaccagcctaggcaacgtagtgagacattgtctctacaaaaaataaaaaaatcagccaggcacggtggcacacacctgtggtcccagctcctcgggaggctgaggttgaaggatggcttgagcctgggaagttgaggcgaaagtgagtggtgatcacaccgttgcactctagcctgaccaacatagcgagattctgtgtcaaaaaacaaaaaaaaaacgtaacaaaacccagtgattctcaacagggccctccagggaacatttggcagtgtctggaaacatttttagttgtcacacatcggggtgggggtcctcctggcatcaagtaggcagaggccagggatgctgttcgacaccctataaagtgcagagtggccccccacaacgaagaatgaccagcccaaaatgtcagccaggcctcacctgagaaaccttgctttaaaatgcagaagccaagaaagagagcctggacagtgcactcccccttagaaaccgcagtgccagggaccacaggcagcacaggaaagccaaagcgtgagttagggagataagcggagggaggagaaatatcctgtcatctttctcacagataataggatttaaacatccctcccattccctgcacaattgttggtgagcttgtggaaaaaacccaggacaccaagtcagagaaactttgtccctggacctcacctccctcattgtaaaacacgaggccagaatctttaaggaaggcaccttccaggactggcatccaggccttcttggggtcggggtctcggggtttcttgctttagtccctgcccagcttccccagcagaggtttgcagttggagggacatggtctgtgagtgatctcgttgcttaattacactgtccccgggcagtgcacactgcttttcgtgatgagctccttcctgtgggcgtgtttattcagtactctctgggtgccagggatcttgccagtgccaggttccagccccgagcacgccctcactgagcgcctctcctctgtgcggctacaggtgctggaggcatgcatgaagaactgtgggaggagatttcataacgaagtggggaagttccgctttttgaatgagttaatcaaagtcgtctctccaaaggtcagtcagcggcagattcctcgcttttagggacttcttttgtgttcattcccatctcccatcatactggctttcactgcccatccaacatctccagggagctgagattatttgtgtcttgtccttagagagctaggccctggaggtaacgggatgaccaaacaggccacagggaccggcagctttttctgaagcgccctcagcccaaatctgacaggtgatgtggtagtggctgtgtgtttgtccagggtgagggcccatgtagtgtgggactctaggcacctggcacatggcagttgtgggttttgtgggttttcttggcctgtgtcacgtggatacggggagctggcctccgtcattgctccgatgctcagctggccgtgttctgttgcacgctggtgtggcgcagctctgggcccccacttaaagcagagggaatactttaccatgctaaagacattctcatggacacccccaagataaaatgcagttgtgtttctggcaacttgtgcgtgaaaatgcactttcctcagaactcaaaatatccacccaaccatggcctgcaccacatgggcatcagggtcacaaggaagcctctctgtcttgatgtccccaaggtagtaaggaaaggcagagagcaggggtgagcaccgagggcatggtctctggtgtcagactcaggtttccatccggcccttacaccctgggcaagttagatgatcccaggcggcaaatggggacgccacccctactgacgtggctgctgtgcagatgagtaaggtcatgaatacacttacaggacacttcctggacaggaggtgatgacctcctggccccctgcctatccacagactgtatccagatggacacagccacaccacagggagtcgttcccctccccacgctgtctcacacacacttggacacctgcagattttgagtaggaccatagctgctgagcagccacgccattgctgtggagggagccttacactttctctgcctccgaactgcacttactaggtcctcattttcttttgccatgtagtacctgggggacagggtgtctgagaaagtgaagaccaaggttattgagctgctgtacagctggaccatggccctgccagaagaagcaaagatcaaagacgcctaccacatgctgaagagacagggtacgtgtctgcctgcccgcagcctccaggcagccctcgaaggctggcccaggcaaggagagaagggaaggtttgggatccccagagtccctcctgaagagaacagcatttgtccccaggcaaggctgagtcggagttggatgggataaggtgtagcagcctgccctccaccctgctaccctttgcaggtcttgatcacagggacgtggcccttggtgtatgaggaggggtgacaaggcaaccacagcctgagtgcacgtgctgccatgtcccctttcaggcatagtgcagtctgacccaccaattcctgtggataggacgctgatcccctctccaccacctcgtcccaaaaaccctgtttttgatgatgaggagaagtccaaggtaaaggacaccctgggcctgggattttctcatacgagagtgggtggcagcaggggaatgtggtttgcactgtgctgcggggagcctctggggtttccctggggtacgggtgctgcctcttcccttcacctctgatttcctcctctctcagcttttagccaagctgctgaaaagcaaaaacccagatgacctgcaggaggccaacaagctcatcaagtccatggtgaaggaagtgagtgggccccggtccttcaggcacggggtggaggagcccatggccacacagcagaagccgctttgccccggacacgggcctgttttgttctcccctgctgccagctgccctacctgtgccccggtggctgagagtgggaggaggagcacaatagcttccgcgggagcacggaagagaggagtgggttgggagcagtgttgtgaaagcagaagtatagactgggccccaggcaccccacactgaaaggagcttccgagcgtctgtacttgtgttgtggggtaaggtgtgacctggtggaagtggaaagacagtcaagtgacgctctctttctcttgaacttcttcactggggcaggacgaggcacggatccagaaggtgaccaagcgtctgcacacgttagaggaagttaacaacaacgtgagactgctcagtgagatgctgcttcattacagccaggaggactcttcggacggggacagagagctgatgaaggtgggaccgccgacggcaaaggctgcctcccggggctgcgctgcccttcaggagctcagccagcatttgctgagcacgtgccttgtcagagacacgggctgtgcacttggcagtgtattcatgaccttactcatctgcacagcagccacgtcagtagagggtggcgtccccatttgcctcctgggatcagctgacttgtccagggtgtaagggccagatggaaacctgagtctgactccagagaccacactctcggtgctcacccctgctctctccctttccttactaccttggggacatcaagacagagaggcttccttgtaaccctgatgcccatgtggtgcaggccatggttgggtggatattttgagttctgaggaacatgccagcctggaaggcaggaggggactgacttcccctgacccatcctggtgactgctacctagacaaacatcctgggtgatgtggtgtggtggtggtggctggtggcaagaagacgtgcgctgtgatcccagctttgctggtaattgaccgtggcaattggcatatcccggtcattttctgggcatgaaccctgaatgaatcagatgatctctaagggcctttgtggtttgatttttatgtccgagtctctttcaggagctgtttgatcagtgtgagaacaagaggcggactttatttaaactcgccagtgagactgaggacaatgataacagtttgggtgagtgaaagagcgacggtcagggataagccaggcatttggatatgtgggtgggaactgtcacaacaggagtgagaagtctctctttcctgctccaggggacatcctgcaagccagtgacaacctctcccgggtcatcaactcttacaaaacaattattgaagggcaggtcatcaatggcgaggtggctaccttaaccctgcctgactcggaaggtgagatgctctggtccccaactctaggctcctccagaccagcctcaggcccctatcatgaagctgcgggtgtaggctggccagcgtggtggtgttgcacaaggcccaagggagttctttgccattccaagcaatcctccggcttcccggaggcctggagatgtgggtaggaatttccccacctgctttctcgggcttgctttgcagcatcccctggcagagatgccgttggattaggccagaggctgtagcagtgacctctgtgcctagggtgctgcctcctgccacacagccactagaagacccctaattattcctgttctgctctgttgacccatccaggaaacagtcagtgcagtaaccaaggcacgctcatcgaccttgcggagctggacacgaccaacagtttgtcctccgtgttggccccagcacctactccaccctcctcaggcatcccaatcctccctccaccaccccaggcctcaggacctccacggagccgctcctctagccaggccgaggccaccctggggcccagcagcacaagcaacgccctctcctggctggacgaggagctactctgcttgggtgcggcccacagggggcgtcaggggcatcccctgacagggctctgggaggaagggtgtgtggaattaggagccctgagcggggccccagtgtgactgttggggtgggcaaagaaccctgagttggaggtactcagtgaagttcagcgaccctgagggccccagggccatcctcccggtggactctgcctcctgccctgcaccccgccccacaggccccccgcttctgcatcatggactggagcgctccattcccctctggaggctgcctgcagaacagcttctcccggcgccttcacccattgatgtcacttgtcacctgacccctcctcaggcaaggcggggctagggctgcctagctcagagcctcttctcatcctgttttcttctctattgtcaggcctcgccgacccagcccctaatgttcctcccaaagagtcagctgggaacagccagtggcacctgctccaggtaggggcacaggatcggtgacagcactactgtgccaaggacctccactttccagcgtcatgtctcctgggctgcagttagctgtccttccctccagagcgtgccagctgcagcggggaacaatgagtgcctccggggctgtcttccgtgcagtccttggagggctgcgccccgttccagcggcaggccctccccacccgccctcggctcaccaccctttctgttgttcatagagggaacagtccgacctggacttcttcagccccaggccggggaccgctgcctgtggcgcctccgatgctcctctgctccagccctcagccccctcctcaagcagctcccaagctccactgccgcctcccttcccagctcctgtggtcccagccagtgttcctgcccccagtgcgggctcctccttgttttctactggagtggccccagccttggccccaaaagttgagcccgcagtccctgggcaccatggcttggcgttgggcaacagcgcgctgcaccacctggatgccctcgatcagcttctagaagaggccaaagtgtaatgagtgggaggagatgtggggttgctgagggttgggcctgaatgtgtcagaaccagagctaactttgaaggggtgggggtgccttgtagtcccatcagtcaggctggaaggcaaggggtgggcctgggtaagagcatggtcaggggccttgggtgagagtcctgcagctctggctggctctctgacgtgctttccatccttcccacctcccaggacctcgggcttggtgaaacccactacctcccctctcatccccaccaccaccccagccaggcccctcctgcccttctccacggggcccggcagcccgctcttccagccactgagtttccagtcccagggcagccccccgaaggggcctgagctctccctggccagcatccacgtgcccctggaatcgatcaagcctagtaggtgttggaggattgaggtgggtggggcggtggggcctatagccacggagctgtaggacatgcgacagggatggatccaggcactctttgcagggggtcccttaaagccaggcaggcctccctgcctgcattctcagtcttaagctcctcactgagcgcctctcccagattccgttaggaagcactggactcatcatgaccacggagtagcccttttctcctcaccgccggggctctgttgggtgtctctggtgctgctcctcccacactcacgtcacgttcttacaggcagtgcccttcctgtgacagcctacgataaaaacggcttccgcatcctcttccactttgccaaggagtgtcccccaggacgacctgacgtgctggtggtggtggtgtccatgctgaacacggctcccttacctgtcaagagcatcgtgctgcaggctgcagtgcccaaggtaccagtgtctccctggggccaaaacggccttatcttgaccctgttgtgtagaggcctttgcagccagcaggtggcagtgtgtgtgtgcactgcaggttccatctgggggcacctaccagttctcttcaaaggagtttctctctctttagtcaatgaaagtgaagttgcagccaccttctgggacagaactctctccatttagccccatccagccacctgcagccatcacccaggtcatgttgctggccaatccactgaaggtgagcagcaaagaacccaggggtcccagcctgaggccccagctgccccagattaggacgtcaggcccaccacctcccagctggaagtgttttgactgtaggattgacacatccctttgctgccttaggttaagtgtctgagcatggttgggggttgcggggaaaagggaccattcctctagcacagagagggtagcagaatagagggcgtcctgccaaggggccgcctgggctggatctcacttgctgccctctgtcacaggagaaggtgcggcttcggtataagctgaccttcgccctgggggagcagctgagcacagaggtgggcgaggtggaccagttccctcctgtggaacagtgggggaacctatgaccccagaggacgctgtgatctccaccttgaagccaggcaggctgccctgagacgaggagggctctggtcccgtcactctccatgccctgacaacagtgcttgtagctttgatgtggaacaggggccctgggcatttctgctgagaaccaaactgctgctgtgataacctctcctttggcccctaaaaggacctgtttttatctacctgtgtgacttgaagtggccatatgctgtcaggggtgcggagtggcccctgacttcactgctgtcccgggaacatggacccccaggcttggcgtaggtgtttgcttccttctactggcattcactgaagccactggggtggggggtggggggtgggagtctctaaagagagactgtcatgggtcattccccacaagagccacatcctcacacctgacagatgcacggcccaaggggctgcagccctgttgcaattccatgcttcccccgccaaccagctcctgctgccatccccagggaggtggcccaggaaggtgcctggcccagaataaggaactggcatactgcaaagtccccagccctgcctctggtggacagcatcgtcctggaatggccacggagtgatgagttgtgtgcttgtccctggcagtggcaggctgtgtcctatggacatcttggcaggacatggaatttggcctcatgacaggcccaactagggataggaaggaaaatgaagagagccagtatttccccttctccagaagcaggtactcagctttctgggaaaagcgtgcctccagccgtggggacaggccatcctactgactacctcttgcttggcatgaaataaactgctatcctccccttggaatctaccgccactctacatcctactgctttggcctccctctcctctcaccagatggcatgtggtgtggcacctgtggctggacacaggaggcctcaggatcacaaatgttacactagacatatgtcctaatgtgctgcccagaaacctcaactgttccccagctactgaggggcactgtcagcgagatgttgggtctggaggtgatgagatcgggccacacttgagctgagtcaccagaccctattgcttcaacagtgcttggcccccgccagcttgtcccagccactctagctgctggatgtgatcctgggacatgtactccaagcctccgtcacaaaaaaaaaatcaccagctgccatagacacgggggaagcttgcggagcccaggtgaacaagctcagcaatcggacatctctggggaaaggaaggtggcacagaccatgttccctggttcctccctgccccttgccaggcttccttattccttactatgggaagaggtcatatcccttccctgcccctcgctgtctttagcaagcaggtttcactgcttcattagaagaggacaagtcaaaagtgaatcatttttcactacttaaggaataaatccaagagctttccagagactggctgctgcagccctgggaatgtctgtggaattactatgtggaaatggaactttgtgttatgctctagacattacagttatttgagtgttactcgttactgttgaggtcagtgcttcgtggcaaatggctgtactggatatcccagctctgctgcccttgttttgctgcatgttaaataaaaccattttcactgta

SEQ ID NO: 12190 - DNA, 3766 bp, Homo sapiens
gggcggctgcaatatggcggaggcggaaggggaaagcctggagtcctggctcaataaagccaccaatccttccaaccgccaggaggactgggaatacataattggcttctgtgatcagatcaacaaggagctggaagggccacagatcgccgtccgactgctggcccacaagatccagtccccacaggaatgggaggcgctccaggccctgacgtacctgggggacagggtgtctgagaaagtgaagaccaaggttattgagctgctgtacagctggaccatggccctgccagaagaagcaaagatcaaagacgcctaccacatgctgaagagacagggcatagtgcagtctgacccaccaattcctgtggataggacgctgatcccctctccaccacctcgtcccaaaaaccctgtttttgatgatgaggagaagtccaagcttttagccaagctgctgaaaagcaaaaacccagatgacctgcaggaggccaacaagctcatcaagtccatggtgaaggaagacgaggcacggatccagaaggtgaccaagcgtctgcacacgttagaggaagttaacaacaacgtgagactgctcagtgagatgctgcttcattacagccaggaggactcttcggacggggacagagagctgatgaaggagctgtttgatcagtgtgagaacaagaggcggactttatttaaactcgccagtgagactgaggacaatgataacagtttgggggacatcctgcaagccagtgacaacctctcccgggtcatcaactcttacaaaacaattattgaagggcaggtcatcaatggcgaggtggctaccttaaccctgcctgactcggaaggaaacagtcagtgcagtaaccaaggcacgctcatcgaccttgcggagctggacacgaccaacagtttgtcctccgtgttggccccagcacctactccaccctcctcaggcatcccaatcctccctccaccaccccaggcctcaggacctccacggagccgctcctctagccaggccgaggccaccctggggcccagcagcacaagcaacgccctctcctggctggacgaggagctactctgcttgggcctcgccgacccagcccctaatgttcctcccaaagagtcagctgggaacagccagtggcacctgctccagagggaacagtccgacctggacttcttcagccccaggccggggaccgctgcctgtggcgcctccgatgctcctctgctccagccctcagccccctcctcaagcagctcccaagctccactgccgcctcccttcccagctcctgtggtcccagccagtgttcctgcccccagtgcgggctcctccttgttttctactggagtggccccagccttggccccaaaagttgagcccgcagtccctgggcaccatggcttggcgttgggcaacagcgcgctgcaccacctggatgccctcgatcagcttctagaagaggccaaagtgacctcgggcttggtgaaacccactacctcccctctcatccccaccaccaccccagccaggcccctcctgcccttctccacggggcccggcagcccgctcttccagccactgagtttccagtcccagggcagccccccgaaggggcctgagctctccctggccagcatccacgtgcccctggaatcgatcaagcctagcagtgcccttcctgtgacagcctacgataaaaacggcttccgcatcctcttccactttgccaaggagtgtcccccaggacgacctgacgtgctggtggtggtggtgtccatgctgaacacggctcccttacctgtcaagagcatcgtgctgcaggctgcagtgcccaagtcaatgaaagtgaagttgcagccaccttctgggacagaactctctccatttagccccatccagccacctgcagccatcacccaggtcatgttgctggccaatccactgaaggagaaggtgcggcttcggtataagctgaccttcgccctgggggagcagctgagcacagaggtgggcgaggtggaccagttccctcctgtggaacagtgggggaacctatgaccccagaggacgctgtgatctccaccttgaagccaggcaggctgccctgagacgaggagggctctggtcccgtcactctccatgccctgacaacagtgcttgtagctttgatgtggaacaggggccctgggcatttctgctgagaaccaaactgctgctgtgataacctctcctttggcccctaaaaggacctgtttttatctacctgtgtgacttgaagtggccatatgctgtcaggggtgcggagtggcccctgacttcactgctgtcccgggaacatggacccccaggcttggcgtaggtgtttgcttccttctactggcattcactgaagccactggggtggggggtggggggtgggagtctctaaagagagactgtcatgggtcattccccacaagagccacatcctcacacctgacagatgcacggcccaaggggctgcagccctgttgcaattccatgcttcccccgccaaccagctcctgctgccatccccagggaggtggcccaggaaggtgcctggcccagaataaggaactggcatactgcaaagtccccagccctgcctctggtggacagcatcgtcctggaatggccacggagtgatgagttgtgtgcttgtccctggcagtggcaggctgtgtcctatggacatcttggcaggacatggaatttggcctcatgacaggcccaactagggataggaaggaaaatgaagagagccagtatttccccttctccagaagcaggtactcagctttctgggaaaagcgtgcctccagccgtggggacaggccatcctactgactacctcttgcttggcatgaaataaactgctatcctccccttggaatctaccgccactctacatcctactgctttggcctccctctcctctcaccagatggcatgtggtgtggcacctgtggctggacacaggaggcctcaggatcacaaatgttacactagacatatgtcctaatgtgctgcccagaaacctcaactgttccccagctactgaggggcactgtcagcgagatgttgggtctggaggtgatgagatcgggccacacttgagctgagtcaccagaccctattgcttcaacagtgcttggcccccgccagcttgtcccagccactctagctgctggatgtgatcctgggacatgtactccaagcctccgtcacaaaaaaaaaatcaccagctgccatagacacgggggaagcttgcggagcccaggtgaacaagctcagcaatcggacatctctggggaaaggaaggtggcacagaccatgttccctggttcctccctgccccttgccaggcttccttattccttactatgggaagaggtcatatcccttccctgcccctcgctgtctttagcaagcaggtttcactgcttcattagaagaggacaagtcaaaagtgaatcatttttcactacttaaggaataaatccaagagctttccagagactggctgctgcagccctgggaatgtctgtggaattactatgtggaaatggaactttgtgttatgctctagacattacagttatttgagtgttactcgttactgttgaggtcagtgcttcgtggcaaatggctgtactggatatcccagctctgctgcccttgttttgctgcatgttaaataaaaccattttcactgta

SEQ ID NO: 12191 - DNA, 18729 bp, Homo sapiens
tttgaagccgcggggccgggcggctgcaatatggcggaggcggaaggggaaagcctggagtcctggctcagtgagtagccgcggccgtttctgcctgccctcgagccgctgggctgcccctgtcttcacccccacgtcccctccccgggctccacggcgtcgcctcttggcagcccacgcccggtctcgccctcgccgcgagcagcctgcgatcacgccccttccctatcagggcgccgggccccagtccggcccccgcttccctcgctgcggcgcgtcctcttgctctggcgcgcggcggcgtgaactcgggctcctgtcgggcaccgcaggctcggggaaaggcgacagccaagatcttcgggctgacatgcttcggcgctttggggagattgtggtggggtcgccgcccggcggtgacaccaggaacccagcgccccaatccctgactaagggagaagcttcggattggggctgagtctccggtagtggtgggtgctgccgactgcgttcagtcgcctggcagcttcagaattgtgaccatgtgttggagaagtgacggcttcgctcaggcagaatgcttgaagtgagaataatattccaaagagagcgatgatagagaacagagagctctacctttttcctgcagtgaccacagaagcatggtgaaatcggtgtcgggaattccccccccacacacatacatatacccccttgaatatcctaacgagtcagtgttgatagcctattctgagtaaggctgaggagcacagtctgaagctgtagttatagaagcgtattgctgtcattgcactgtgaattacagtgctacgaaggaaatgtgtgttaacctggttagcaggtagtactctgcctgagggttaataagtgaactttcctgtaggctagacctggaagcctcctttaagtggagagagaaattggactggtaatgggataggtgagatacctagtattgccttgttctgaggtctcttatttagtactgcttccgggatcttggaggtgatagctatttcctcaaattgtctgatttttcctagtaagaaacccccttcaggaggttgagcttcagtttaaaggggagcatatcccaaaagagagaaaaagtaagatcacgtttgcaaaatctgcagttgcaggcaggtcataaggcttctttatatatggaagtgttctccaaggagctcaaagtactttacagatattcattaaattagtttaccaagtattctagcaaagcaggcactactgccataatttcacaaaaagaggacatcctgactccagtcaaaccacttgcccagaaatgcccaacttgctataaccagagtggaattagtttgctttgaaggtattaatatgggtattgaataatttaaatgacctaagctgagtttaataggctacatttagagttacattttgtttttgttacttgtttttgagacagagtctcgcgcgctgttgtctaggctggagtgcaggggtgcgatcatagctcactgcagccttgaacccctgtgctcaaataagtcttctacctcagcctcctgagtagctgggactataggcacacgccaccatgcttggctaattcttttgatttttagtagagatgaggtcttgctgtgttgcccaggatggtctcaaactcgagttcaagtgatcctcccacctttcccttacaaagcgctgggattacacacgtgagctaccgcacccagcctagagtcacattatgaaatgagagggacacacttggtgggggggagtcacatggtatctgtagagacataagcttcacagttgttacgacttaatgtgaactgtaccagttgaacaaaccagcagttggggttcagcatcgtctcagtcagcgtccttgtcaccccacgtttgcctgaattgttgcagaagcctctgcttggcccagagacccaggtctctcccgtcctcacctctcctcagtccattctgctcccagaagcgcacttgtgttgaatcaaatcattccactgttgcctgtaatctggccttggttgttccaggcctttttctctgtggcttctacgttttcctgctctactcagtctgatgttcttggtttaccaatacacgttgctctccttacctggaagccctgctcccgtttcctcaactaaatgcttgaaaacccatctcagattctcttttctcacaaaccatctcttgatgacttcagtcttctttcaagtcccaccatgatcaatcaatcaatgtttaatgagtacctgctacgtggggtgttataggagttaggaagtttaagaagattttgcctttagttggatggaggtgatgctggagtggatgaagaactctcctgtaatcccagcacgttgggaggccgaggcgggtggatcacgaggtcaggagatcgagaccatcctggctaacacagtgaaaccccgtctctactaaaaaatacaaaaaaatagccaggcgtagtggcgggcgcctgtagtcccagctacacgggaggctgaggcaggagaatggtgtgaacccgagaggtggagcttgcagtgagctgggattgtgccactgcactccagcctcggtgacagagcgagactccgtctccaaaaaaaaaaaaaaaaaagatacaaggcagtgctaaaacgccggcattctctttagggaactggggatgggggaagagatgattcattgaggatactccatttgagctagccattaaataatgggaaaagttggaaaaaaaaaaacactagatggtgatgtggagagagcaaacctgtttggggcacacagtaacagaggtgtttgggaatgagggaagataaggctgggaagttaagaccagattctaccaagtctccaatttccagcccaagaagtttattttatttatttatttatttgagacagagtcttgcactgtcacccaggctggaatgcagtggcacaatctcggctcactgcaacttccgttgcttaggtgcaagcaattctccatcctcagcctcccaagtagctgggactactggtatgtgccactacacctggctcatttttgtatttttagtagagatggggtttcaccatgttggccaggctgttgtcaaactcttgacctcaagtgagccacctgcctcagctccctccaaagtgttgggattacaggcttgagctaccacgcccagcccagccgaagaagtttaaatttctgcagttatcaggccctcattccttctgtactaggtgaaatcggtgttttggtgtcttaagaggcttgatttgatataggtttcatgcgcgtccgtgtgaagagactaccaaacaggctttgtgtgagcaacatggctgtttatttcacctggatgcaggcaggctgagtccgaaaagagagtcagcaaagggtggtggattatcattagttcttacaggttttgggataggcggtgaagttaagagcaatgttttgcgggcagggatggatctcacaaagtacattctcaagggtggggagaattacgaagaaccttcttaagggtgggggagattacaaagtacattgatcagttagggtggggcagaaacaaatcacaatggtggaatgtcatcagttaaggctatttttacttcttttgtggatcttcagttacgtcaggccatctggatgtgtacgtgcaagtcataggggatgcgatggcttggcttgggctcaggcctgacattcctgccttcttatattaataagaaaaataaaacaaaatagtgttgaagtgttggggcagcgaaaatttttgtggggtggtatggagagagaatgggcgatgtttctcagggctgcttcaagtgggattaggggcggcgtgggaacctagagtgggagagattaagccgaagggagatcttgtggggatgttagaagaaacatttgtcgtatagaatgattggtgatggcctggatatggttttgtatgaattgaaaaactaagtggaataagagaaggagaaaaacaggtataaaaggtctaagaattgggaggacctaggacatctgattagagagtgcctaaggagattcagcatagtcctgccagcaaagattatttatttacttcaagagttaagagtggcagtttggggatagcacgaggagatatcacctgtgatggcttggagaaacagtgtaaaccagcagtgtaaacaagagcagggcatgtatgagtagttgagaacgttgaataggagtatgactagacagaagatagtagggatgatgacaggttttttttgggggggggggcacagtctaagttggtctggtgtctggaatgagactggggcctaataaaaaggagcatctatacaggagcttaaatgggctgtaccttgtagcattctgaggacaggtctgacttctgagaagggaaagtggtaaaagtattgtccagtcctttttaagttggtggctgagcttggtgaagtgtttttaaaagacctttagtccgttctgcttttcttgaagacggaggaccgtaagggatataaaggtttcactgaatactaagagcctgagaaactgcttggctgatttgactaataagggctggtctgttagactgtatagaggtgggaaggctaaactgaggaattgtgtctgaccgaagggaagaaatgactgcggtggccttctcagaccctgtaggaaaggcctctacttacctagtgaaagtgtctacttagactaagaggtattttagttatctgactcggggcatgttgagtaaagctaatttgccagtcctgggtgggggcaaatcttcaagcttgatgtgtagggaagggagggggcctgaataatccctgaggagtagtagaatagcagatggaacactgagaagttatttccttgaggatagatttccacaatggaaaggaaatgaggttctaagaggcgggctagtggcttgtactatagcatagcctgcctttgctgctgtgtggcgattaggcctgctggaactgccatcaataaatcaagcgtgatcagggtgaggaacaggaaagaaggaaatatggggaaatggggtgaatgtcaggtggatcagagagatacagtcatgggggtcaggtgtggtatcaggaataatgtgggaggccagattgaggtccgggccaggaacagtggtaattgtgggacttaacaaagagtgagtacagctgaaggagccggggagcagaaagtatatgcatcaggtatgaggaagaaaataatattggaagttatgagaaatgtagagagtgagttgagcatagtttgttatttttagggcctctaaaagtattaaagcagcggcagccactgcaagcagacatgagggctaggctaaaacagtaaggtcaagttgtttgggcagaaagactacagggtgcggtcctggctcttgtgtaagaattctgacacactaaccatgcctaggaaggaaaggagttgttgttttgtaagggattgaggtttgggagattaatcggacacgatcagcagggagagcacgtgtgttttcatgagaattatgccgagataggtaacagatgaggatgaaatttgggcttgactgaagtaatgggggctgtctgtgaagccttgcagcagtacagcccaggtaatttgctgagcctaatggatgtcagggtcagtccaagtgaaagcaaagagaggctgggatgacgggtgcaaaggaattgtaaagaaagcatgtttgagatccagaacagaataatggattgtggagggaggtattgaggataggagagtatatggtttggtaccatggggtggataggcaaaacaatttggttgataaggcatagatcctgaactaacttgtaaggcttgtctggttttaggacaggtaaaatgggggaattgtaaggagagtttataggctttaaaaggccatgctgtagcaggcatgtgataacaggctttactcctttcaaagcatactgtgggatgggatattggcattgagcggggtaagggtgattaggttttaatgagatggtaaggggtgcatgatcggtcgccaaggagggagtagaggtatcttatacttgtgggttaaggtgggggggaatacaagaggaggacgcaaaggaggctttggattggaaagggcagcaatgagatgtagctgtaacccaggaatagtcagggaagcagataatttagttaaagtgtctcggcctaataagggaactgggcaggtggggataactaaaaacgagtgcttaaaagagtattgtctaagttggcaccagagttggggagttttaagaggtttagaagcctggctgtcaatacccacaacagttatggaggcaagggaaacaggcccttgaaaagaaggtaatgtggagtgggtagcctccgtattgattaagaagaggacggacttactctccactgtgagagttacctaaagctcggcatctgtgatggtctatggggcttccgaggcgatcgggcagcgtcagtcttcagccgttaagccgagaagatctgggaaggagtcagagagccttgggccagagttccaggggctctgggagtggctgtcaggtgagttgaacagtccaattttcagtggggtcccacacagatgggactcgcttaggaggaatcccgggctgcgggcattccttggctcggtggccagatttctggcacttgtagcaagctcctgggggaggcagttatggaggaatgcctggccactgcggtttaggcgtttggaagttcttgtgtgctggagatgtagctggggtttgtctcacagtggaggtaaggaattgcaactcagaaatatgttgttacttggctgcctctactctattattgtacaccttgaaggcgaggttaattaagtcctgttgtggggtttgagggccggaatttaatttttggagttttatttaatgtcgggagcagattgggtaataaaacgtatattgagaataagacggccctttgacctcttagggtctagggctgtaaagcgtctcagggttgctgccgaacgagccatgaactgggctggatttttatatttgatgaaaaagagcctaaacgcttctgatttgggataaagaaaaaggagcattaaccttgactatgcctttagctccagccacctttttaagagtaaattgctgggcaggtgggggagggccagtcactgaacgaaactgtaagctggaccaggtgtgaggaggggaggtgataaaaggattctagggtggaggagcagaggctgaggaagaattgggacctagatggcctggcgacgagcagcctgaggagaaggggaaaggtcagatgggtctgtagaaaagactggaaagacccagcgacacttggggttgggactgaggggacaggcgggagggaaagaaggaggatttgggaggaatcgcattgggaacagagacttgagagggaacgaagtgtgaaaaatgcctggatgtgaggcacctcagaccatttgcccattttttgacaaaaattatttaggtcttataggatggagaaatcgaaagtgccgttttctggccatttagagccattgtcaagtttgtactggggccaagcggtgttgcagaagaaaataaggcatttaggttttaggtcaggtgcgagttgacgaggttttaagttcttgagaacacaggctaagggagaaggaggaatggaggctggaaggttgcccatagtaaaggaggcaagcccagagaaaagagagagtagagacacggagggaaggggttcgagggttcttaccctccagaaaagcaggaaaggggtcagggtgtggaaataagggattggggcacacagataagaggtcggggtgcggaaataagggattgggggttcttgccccctagaaaagcgggacttaccgctaagggtgaaggagaaggggttgaggggtacttgcccctcccccagaaatgcagagaaggggtagagacacggagagaaggggttgtggtacttgcccctcccccagaaaagcaggacttgccgctaagggtgaaggaccaaggcaggcgtccctgagtggtctgacacctttgaaacgtgagtgaataatcagagaggtgtccctgcaatgattaaacaccaaggaaaggctgccttcccagtctgtgaccagcgccagagttttgggtccacggataaaacgtgtctcgtttgtctctaccagaaaatgaaaggaattgaaattaagagaagggagagattgaagagtggaaaggagaaagtggttgagggatagtgagagaggttggagaagagagtaagaagaggccgcctacctgatttaaaattggtgagatgttccttgggctggtgggtctgaggacctgaggtcgtaggtggatctttttcacggagcaaagaacaggaggacaggggattgatctcccaagggaggtcccgcgatccgagtcatggcaccaaatttcatgcgcgtccatgtgaagagaccaccaaacaggctttgtgtgagcaacatggctgtttatttcacctggatgcaggcgggctgagtccgaaaagagagtcagcaaatggtgtggtggattatcattagttcttataggttttgggataggcggtgaagttaagagcaatgttttgcgggcagggatggatctcacaaagtacattctcaagggtggggagaattacgaagaaccttcttaagggtgggggagattacaaagtacattgatcagttagggtggggcagaaacaaatcacaatgctggaatgtcatcaggtaaggctatttttacatcttttgtggatcttcagttacttcaggccatctggatgtatacgtgcaagtcataggggatgccatggcttggcttgggctcagaggcctgacaatagggactttacataggattaggatggattagaacagaagttctagaagcaggtgagaaggagtggagggtagggataaggaaggaagggatttaagaagacattgagaaggaaaggaccacaagactgagaggaatggatgaggagagagggaagaaggagtcaaaaaagaggtgggggaataggggacttttggaaggtgcagcatttataggaatagtgacttaatagaccacatgcagtggctcattcctgtggtcccagctactcaggaggctgaggtgggagcatcgcctgagcccaggagttggaggctacagtgagccatgatcgcctactgcagcccggggcaatagagtgagacccccatctctaaaaaaagaacaagcacacgcctgtgggtggtcccagctactcaggaggttgaggtgggaggatcacttgagcctgggaggcagagactgcagtgagctgtaagagccactgcactccaacctgggtgacagagtgagaccccgtctcaaacaacaaaaaagaaaaaaaaaaacgaaagacgccaggcactgggactcacacctgtaatcctagcaccttgggagttaaaggcaggcagattgcttgagcctaggagttcaagaccagcctgagcaacatggcaaaattctgtctctaccaaaagtacaaaaaattagctaggtgtgatgtgagtgtctgtggtcccagctaggctgaggtagaagaatcatctgagcctgggaagttgaggctacagtgaagccatgatcgcaccactgcactcttgcctgagtgacagagtgagaccctgtctcaaaaaagaaaaaaaaaggaagaagaaaaagaaatggggaagtcaggaaaaagaagtgatgcttttttttttttttttttttttgagaaggagtctcactctagtcgcccaggctagagtgcagtggcacaatctcagctcattgcaacctctgccgcctgggttaaagcgattctcctgcctcagcctcccaagtagctgggattacaggcgcctgccacttcgcctggctaatttttgtagttttagtagagacagggtttcactatcttagccaggctggtcttgaactcctgacctcgcgatccacccacctcagcctctcaaaatgctgggattgcgggtgtgagccaccgtgcctgggccatacatttgtttttacactcatttctgtaccaaattagcccaattatctactgtcttgttttttgaactgattttttttttttttcatgtattgaaccaggagagcacagcctccttgagggtaaaatctgtgtctggaactttttctgtagtccctccagggtctggcatgctgacatgctgtttacttcattgtctgcgggtgcttaacaaagacttggtgattgactaagtttgtgtttccattcaggaccctagtgaaggttgacctttattccctttccagcccatgttcttgcttctgcttgtttgtaagtcatttgttacgtagatttttctttttggagatggagcctcactctgtggcccaggctggagtgcaatggcctgatctcagctcactgcagcctctgcctcctgggttcaagtggttctcctgccttagcctcctgagtagctgggatcacaggtgcgcggaaccatgcccagctaattttgtgtttttagtagagatggggtttcaccatgttggtcaggctggtctcgaactcctaacctcacgcaggtgatccgcctgcctcggcctcccaaagtgctgggattacaggcgtgagccaccgtgcccagaccatatgtatataattttttttttttttttttttggagatggagtctcactctgttgcccaggctggagtgcagtggtacaatcatggctcactgcaacctctgcctcctgggttcaagcagttctccagcctcagccttcaagtagctgagattacaggtgtgtgctaccgtgcctagctaattttagtatttttagtagagacaggatttcaccatgttgaacaggctggtcttgaactcctgacctcaaatgatccacctgccttggcctcccaaagtgctgagattacgggcgtgagccaccgcatccagcctgctatgtagatcttgttttctctggaatgtttgagccgtgctggaatggggtacccaatgctgctgtttccatccccacatgacgttttaagtcccacgagagtaggctagcgatggagtgaagctgaaaaatgaaagcaggaaatccagagacacagaaacagatgaggctttcaacagagactcgaaaatagacagaaaccatgagtcagagcagagcccggaggggcggttcgggaaggcaaggtctataggggaagctcgggtgtcacctctatgccaggtgaaggaaatgttgagtgggtgggaggctgtgtgcatctgctggggaggcagtaggcagatggaaagatcaagtcacccagaattatccccagaggttccttcccgttcctgtgggcgggtgagctctgctttctgagctgcccagagagctggaggagatagacatggaactgaccattgcagaaactagggctttttgtgcccgtgagtaggcaaagagctccctgtggatttgccataaaaaggtctatcaaggtggaagaaagtgagattctagagaaattaatacaagtgaaaagtgggcaggagtgttcttggaagtagaaatgctgttggaagtctaatagacttgggaagaagataacgtatggtgaataccagttgcttcgggggttggggggatccacattttactctgtactcagaagatgcttttccccgtgcaaaaagtgaaagtgagtgggccagtttttcttctgtcacaaggtgtatgactgttcccaaaataatagccctgggggatggggattgcttctcagaccattcaatttttgtaccctgtagacttttggtgttatgtgagaactttaagcacctgataggaattagtaacagagctacgctaatgcctgaggaaatttcagacaattggtgggagagacttggcatttggaatgtgatagctggtaggctaccatacagtaatgcaggattgccagacatttctttccaaatggctacccttgattacatttaactcccctcctttcaagctccagattttgaaggacctgttaattctctttcaagattgaagacagacaccttctttttcttctaaagaggaacctaggcggggtgcggtggctcccgcctgtaatcccagcactttgggaggccagggctggtcttgacctccttacctgaggtcaggaggcctggccaccatggcgaaaccccatctctactaaaaatacaaaaagtagccaggcatagtggcgcatgcctataatcccagctactcgggaggctgaggcaggagaatagctcgaacctgggaggtggaggttgcagtgagcctagatcgcgccactgcactccagcctgggtgacacagcgagactcaatctcaaaataaataaataaataaatatgaacctaaaccatcagaatcttccccttgcagccacaacagaaacactgccggggaggccgagccccgacctgggaagcagggtgatacactgggtgccacgggccttccctctgcctggcagctgtcgctactcagatccctgcagccctgttgccagtgaaggagctggagtctctgttatgatgtgttcatccagctggtgagtttttttttttttgttttgttttttttgtttttgtttttgttttttttttagacagagttttcacttgttgcccaggctggagtgcaatggcacgatctcggctcaaggcaacctctgcctcccaggttcaagcgattttcctgcctcagcctcctgagtagctgggactacaggcatgtgccaccatgcccagctaattctgtatttttagtagtgatggggtttctccatgttggtcaggctggtcttgaactcctgacctcaggtgatccgcctgcctcggcctcccaaagtgttgggattacaggcgtgagccactgcacccggcccagctggtgattttttttttttttttttttttttttgagacggagtctcgctgtcgcccaggctggaatgcagtggtgcgatctcagctcactgcagactccaccccccgggttcgcgccattctcctgcctcagcctaccgagtagctgggactacaggcgcccgccaccttgcccagctaactttttgtatttttagtagagagggggtttcaccgtgttaaccaggatggtctcgatctcctgacctcgtgatccgcccgcctcggcctcccaaagtgctgggattacaggcgtgagccaccacgcccggccccgtagctggtgatttttaaagttaacaaaatacaattatgagaaatcagaattcagaaagtaatgacagagagggccttgtcgggaggggctctgacaccctgctttgggccctcatagagatctggggagggagcaggagtgttttaaggggtgtgcgtcttcagccttccatttgtcttcagaacccaaagccctaaatttagcaaacagctggagagtgctttctgaagagggaggctctggacctgaatcagagatgggaacccatgtaaccaccctcagctgggctcttcagtgtaatcacaggtttgggaaggtaactgaggagagcccatgccaaatatcagaactttgcatttggtgcctggattttaaatcccaggggccctctgagaactctagtacttgtgtttgtgcttgaccatggaaggccattagagcctgggggtgctagatactcaagctgcaatcccaggcaagttgcacggtgaccagggcttagtaggggctaagtaaatgttgttggcttgacaatgatgagcattatgtgcaatttcaaaaacacttaaagcattatggaaggctaggtctggaaaaaccttttgacaggtatgtggaaaatattcgctgggcgcggtgactcacgcctgtaatcccagcactttgggaggccaaggcgggccgatcacctgaggtcgggagtttgagaccagcctgaccaacatggagaaaccccgtctctaccaaaaatacaaaattagttgggcatggtggtatgcacctgtagtcccagctacttgggaggctgaggcaggagaatcacttgaacccgggaggcagaggctgcaatgagccgagatcgtgccactgtactacagcctgggcaacaagagcgagactccatgtcaaaaaaaaaaaaaaaatttgtggttacaaatatgtatttttttatctagttcagtctgatttcagtttccccaaaaacccttcttgaccatctccacttgcttaacactgagctcatttttatatagctggagttccctttattatctttacatgtttcatgtaggcatttttttgggaatattttaattatttgtgtttgtccttttgaccttgattccactctaagcttcatgagacagaatttgttttctcttttatttgtgactttcaaaatactggacagaaagcagtatttgtatttgctctccgactgaattttttttttttctgtctccttgctactgactgttctactgaggcttctctattagagagtaaagttgaaagcaaactcttagtgcttaaaacttgcgaagaaaaccttccattgcatcctcattgctcttcctaacacttgtcctcttctttgttgtgttgcaagataaagccaccaatccttccaaccgccaggaggactgggaatacataattggcttctgtgatcagatcaacaaggagctggaagggtgagtctcagcactgtgggggcagctgagagggagcggactgggaaggggaacaaccatggccaaggagggccagccaggtagccccaggcttagtgcactggagtgtgttctgcttgtcccccaggccacagatcgccgtccgactgctggcccacaagatccagtccccacaggaatgggaggcgctccaggccctgacggtaggtccttcactctccggaggtggaaaccgcagcccttcacctgcccacgccattcctcgtgtccccatagcggttcttagggctcctgccaaaagccaacagaaagtccttgatacagactagatagatctcgaatctgttcagccagctgttccacaaatctgtgtgcattgtgccaggccctgaggcctcagaggtgactgcagtgccgtccctgccagcatggccacatggttagtgtgtgaggcagaggggctaaggaaagcagcccagagtcagggccctgagccccatgtggcgcaagagaaggcttggtgaagagatgctgacagggctgtgttgatagttcagagctggccagctgaagaaaagaggggtcggtccagttcattctgtagttaaacaatgccagtcactagcgaaggtgtcgcactgatggctgaggcccctagggcagatcctggtgtctgttcagactgagggaatttaaggtgtggaatggtgcctggccctcagtgcctccacatgctccgaaaacaaagagcagccgagatctgaggaatccggggctctagcctgactgcattcaggtcctggaaagcgaaaagaggaaatatcatctggttcacatgcacccctcagtcatatttgctgtagaacgaattccttaaaacagtgattctcagcagggcacggtggcttgtacctatagtcccagcaccctgtggggcctaggccgggaggatcgcttaagggaattcaagaccagcctaggcaacgtagtgagacattgtctctacaaaaaataaaaaaatcagccaggcacggtggcacacacctgtggtcccagctcctcgggaggctgaggttgaaggatggcttgagcctgggaagttgaggcgaaagtgagtggtgatcacaccgttgcactctagcctgaccaacatagcgagattctgtgtcaaaaaacaaaaaaaaaacgtaacaaaacccagtgattctcaacagggccctccagggaacatttggcagtgtctggaaacatttttagttgtcacacatcggggtgggggtcctcctggcatcaagtaggcagaggccagggatgctgttcgacaccctataaagtgcagagtggccccccacaacgaagaatgaccagcccaaaatgtcagccaggcctcacctgagaaaccttgctttaaaatgcagaagccaagaaagagagcctggacagtgcactcccccttagaaaccgcagtgccagggaccacaggcagcacaggaaagccaaagcgtgagttagggagataagcggagggaggagaaatatcctgtcatctttctcacagataataggatttaaacatccctcccattccctgcacaattgttggtgagcttgtggaaaaaacccaggacaccaagtcagagaaactttgtccctggacctcacctccctcattgtaaaacacgaggccagaatctttaaggaaggcaccttccaggactggcatccaggccttcttggggtcggggtctcggggtttcttgctttagtccctgcccagcttccccagcagaggtttgcagttggagggacatggtctgtgagtgatctcgttgcttaattacactgtccccgggcagtgcacactgcttttcgtgatgagctccttcctgtgggcgtgtttattcagtactctctgggtgccagggatcttgccagtgccaggttccagccccgagcacgccctcactgagcgcctctcctctgtgcggctacaggtgctggaggcatgcatgaagaactgtgggaggagatttcataacgaagtggggaagttccgctttttgaatgagttaatcaaagtcgtctctccaaaggtcagtcagcggcagattcctcgcttttagggacttcttttgtgttcattcccatctcccatcatactggctttcactgcccatccaacatctccagggagctgagattatttgtgtcttgtccttagagagctaggccctggaggtaacgggatgaccaaacaggccacagggaccggcagctttttctgaagcgccctcagcccaaatctgacaggtgatgtggtagtggctgtgtgtttgtccagggtgagggcccatgtagtgtgggactctaggcacctggcacatggcagttgtgggttttgtgggttttcttggcctgtgtcacgtggatacggggagctggcctccgtcattgctccgatgctcagctggccgtgttctgttgcacgctggtgtggcgcagctctgggcccccacttaaagcagagggaatactttaccatgctaaagacattctcatggacacccccaagataaaatgcagttgtgtttctggcaacttgtgcgtgaaaatgcactttcctcagaactcaaaatatccacccaaccatggcctgcaccacatgggcatcagggtcacaaggaagcctctctgtcttgatgtccccaaggtagtaaggaaaggcagagagcaggggtgagcaccgagggcatggtctctggtgtcagactcaggtttccatccggcccttacaccctgggcaagttagatgatcccaggcggcaaatggggacgccacccctactgacgtggctgctgtgcagatgagtaaggtcatgaatacacttacaggacacttcctggacaggaggtgatgacctcctggccccctgcctatccacagactgtatccagatggacacagccacaccacagggagtcgttcccctccccacgctgtctcacacacacttggacacctgcagattttgagtaggaccatagctgctgagcagccacgccattgctgtggagggagccttacactttctctgcctccgaactgcacttactaggtcctcattttcttttgccatgtagtacctgggggacagggtgtctgagaaagtgaagaccaaggttattgagctgctgtacagctggaccatggccctgccagaagaagcaaagatcaaagacgcctaccacatgctgaagagacagggtacgtgtctgcctgcccgcagcctccaggcagccctcgaaggctggcccaggcaaggagagaagggaaggtttgggatccccagagtccctcctgaagagaacagcatttgtccccaggcaaggctgagtcggagttggatgggataaggtgtagcagcctgccctccaccctgctaccctttgcaggtcttgatcacagggacgtggcccttggtgtatgaggaggggtgacaaggcaaccacagcctgagtgcacgtgctgccatgtcccctttcaggcatagtgcagtctgacccaccaattcctgtggataggacgctgatcccctctccaccacctcgtcccaaaaaccctgtttttgatgatgaggagaagtccaaggtaaaggacaccctgggcctgggattttctcatacgagagtgggtggcagcaggggaatgtggtttgcactgtgctgcggggagcctctggggtttccctggggtacgggtgctgcctcttcccttcacctctgatttcctcctctctcagcttttagccaagctgctgaaaag

SEQ ID NO: 12192 - DNA, 547 bp, Homo sapiens
tttgaagccgcggggccgggcggctgcaatatggcggaggcggaaggggaaagcctggagtcctggctcaccacaacagaaacactgccggggaggccgagccccgacctgggaagcagggtgatacactgggtgccacgggccttccctctgcctggcagctgtcgctactcagatccctgcagccctgttgccagtgaaggagctggagtctctgttatgatgtgttcatccagctgataaagccaccaatccttccaaccgccaggaggactgggaatacataattggcttctgtgatcagatcaacaaggagctggaagggccacagatcgccgtccgactgctggcccacaagatccagtccccacaggaatgggaggcgctccaggccctgacgtacctgggggacagggtgtctgagaaagtgaagaccaaggttattgagctgctgtacagctggaccatggccctgccagaagaagcaaagatcaaagacgcctaccacatgctgaagagacaggcttttagccaagctgctgaaaag

SEQ ID NO: 12193 - DNA, 629 bp, Homo sapiens
gtggtggtgtccatgctgaacacggctcccttacctgtcaagagcatcgtgctgcaggctgcagtgcccaaggtaccagtgtctccctggggccaaaacggccttatcttgaccctgttgtgtagaggcctttgcagccagcaggtggcagtgtgtgtgtgcactgcaggttccatctgggggcacctaccagttctcttcaaaggagtttctctctctttagtcaatgaaagtgaagttgcagccaccttctgggacagaactctctccatttagccccatccagccacctgcagccatcacccaggtcatgttgctggccaatccactgaaggtgagcagcaaagaacccaggggtcccagcctgaggccccagctgccccagattaggacgtcaggcccaccacctcccagctggaagtgttttgactgtaggattgacacatccctttgctgccttaggttaagtgtctgagcatggttgggggttgcggggaaaagggaccattcctctagcacagagagggtagcagaatagagggcgtcctgccaaggggccgcctgggctggatctcacttgctgccctctgtcacaggagaaggtgcggcttcggtataagctgaccttc

SEQ ID NO: 12194 - DNA, 478 bp, Homo sapiens
gtggtggtgtccatgctgaacacggctcccttacctgtcaagagcatcgtgctgcaggctgcagtgcccaagtcaatgaaagtgaagttgcagccaccttctgggacagaactctctccatttagccccatccagccacctgcagccatcacccaggtcatgttgctggccaatccactgaaggtgagcagcaaagaacccaggggtcccagcctgaggccccagctgccccagattaggacgtcaggcccaccacctcccagctggaagtgttttgactgtaggattgacacatccctttgctgccttaggttaagtgtctgagcatggttgggggttgcggggaaaagggaccattcctctagcacagagagggtagcagaatagagggcgtcctgccaaggggccgcctgggctggatctcacttgctgccctctgtcacaggagaaggtgcggcttcggtataagctgaccttc

SEQ ID NO: 12195 - DNA, 25078 bp, Homo sapiens
aacaattcaggcccttgtcccaagtaggaggacattccccaagcaggcgggtaaagtctcctcctggtcaagtgctaacggtaaggatgggcttggcgcctacacacccatcccaattcacaggcgatcccagatctgagctctttagctgaaccgcactttcagctccgcgttagaaccctagatcagccagactccttaggcgagaggtagtcactaaaccttcggattggcgcagggtcacgcagctaacttagaagcttgaatccagatactccggcccccagggcaatgctctctctaggggcccacgcggcctgcctgtggcccccttccttcctcgcagcgcccccccgccgctgctcgccaccctctcaccctggaagctgcaagacagcccgccgcacgcccaacgccaggcccgaccatcctcgggcaaccttcactgcgggggcagccatcttggctggccacgaggaccccacaaggactgccctcggcgcgcctgagcgagtgacgggaaacgggtgaaaaagactcctcagggtcctaaatctgcgtttctctccactgatctggacgttagagtttttcactccggggtccaaaggggagcgccaaaaggaaacccttgccctccctgtatccgtcgcagtctggcgcggccctcggtgacggcactcactcctctcaggaccccatgcaggccccgccccgtctcagctcgtgcagactctcgcgagttttgaagccgcggggccgggcggctgcaatatggcggaggcggaaggggaaagcctggagtcctggctcagtgagtagccgcggccgtttctgcctgccctcgagccgctgggctgcccctgtcttcacccccacgtcccctccccgggctccacggcgtcgcctcttggcagcccacgcccggtctcgccctcgccgcgagcagcctgcgatcacgccccttccctatcagggcgccgggccccagtccggcccccgcttccctcgctgcggcgcgtcctcttgctctggcgcgcggcggcgtgaactcgggctcctgtcgggcaccgcaggctcggggaaaggcgacagccaagatcttcgggctgacatgcttcggcgctttggggagattgtggtggggtcgccgcccggcggtgacaccaggaacccagcgccccaatccctgactaagggagaagcttcggattggggctgagtctccggtagtggtgggtgctgccgactgcgttcagtcgcctggcagcttcagaattgtgaccatgtgttggagaagtgacggcttcgctcaggcagaatgcttgaagtgagaataatattccaaagagagcgatgatagagaacagagagctctacctttttcctgcagtgaccacagaagcatggtgaaatcggtgtcgggaattccccccccacacacatacatatacccccttgaatatcctaacgagtcagtgttgatagcctattctgagtaaggctgaggagcacagtctgaagctgtagttatagaagcgtattgctgtcattgcactgtgaattacagtgctacgaaggaaatgtgtgttaacctggttagcaggtagtactctgcctgagggttaataagtgaactttcctgtaggctagacctggaagcctcctttaagtggagagagaaattggactggtaatgggataggtgagatacctagtattgccttgttctgaggtctcttatttagtactgcttccgggatcttggaggtgatagctatttcctcaaattgtctgatttttcctagtaagaaacccccttcaggaggttgagcttcagtttaaaggggagcatatcccaaaagagagaaaaagtaagatcacgtttgcaaaatctgcagttgcaggcaggtcataaggcttctttatatatggaagtgttctccaaggagctcaaagtactttacagatattcattaaattagtttaccaagtattctagcaaagcaggcactactgccataatttcacaaaaagaggacatcctgactccagtcaaaccacttgcccagaaatgcccaacttgctataaccagagtggaattagtttgctttgaaggtattaatatgggtattgaataatttaaatgacctaagctgagtttaataggctacatttagagttacattttgtttttgttacttgtttttgagacagagtctcgcgcgctgttgtctaggctggagtgcaggggtgcgatcatagctcactgcagccttgaacccctgtgctcaaataagtcttctacctcagcctcctgagtagctgggactataggcacacgccaccatgcttggctaattcttttgatttttagtagagatgaggtcttgctgtgttgcccaggatggtctcaaactcgagttcaagtgatcctcccacctttcccttacaaagcgctgggattacacacgtgagctaccgcacccagcctagagtcacattatgaaatgagagggacacacttggtgggggggagtcacatggtatctgtagagacataagcttcacagttgttacgacttaatgtgaactgtaccagttgaacaaaccagcagttggggttcagcatcgtctcagtcagcgtccttgtcaccccacgtttgcctgaattgttgcagaagcctctgcttggcccagagacccaggtctctcccgtcctcacctctcctcagtccattctgctcccagaagcgcacttgtgttgaatcaaatcattccactgttgcctgtaatctggccttggttgttccaggcctttttctctgtggcttctacgttttcctgctctactcagtctgatgttcttggtttaccaatacacgttgctctccttacctggaagccctgctcccgtttcctcaactaaatgcttgaaaacccatctcagattctcttttctcacaaaccatctcttgatgacttcagtcttctttcaagtcccaccatgatcaatcaatcaatgtttaatgagtacctgctacgtggggtgttataggagttaggaagtttaagaagattttgcctttagttggatggaggtgatgctggagtggatgaagaactctcctgtaatcccagcacgttgggaggccgaggcgggtggatcacgaggtcaggagatcgagaccatcctggctaacacagtgaaaccccgtctctactaaaaaatacaaaaaaatagccaggcgtagtggcgggcgcctgtagtcccagctacacgggaggctgaggcaggagaatggtgtgaacccgagaggtggagcttgcagtgagctgggattgtgccactgcactccagcctcggtgacagagcgagactccgtctccaaaaaaaaaaaaaaaaaagatacaaggcagtgctaaaacgccggcattctctttagggaactggggatgggggaagagatgattcattgaggatactccatttgagctagccattaaataatgggaaaagttggaaaaaaaaaaacactagatggtgatgtggagagagcaaacctgtttggggcacacagtaacagaggtgtttgggaatgagggaagataaggctgggaagttaagaccagattctaccaagtctccaatttccagcccaagaagtttattttatttatttatttatttgagacagagtcttgcactgtcacccaggctggaatgcagtggcacaatctcggctcactgcaacttccgttgcttaggtgcaagcaattctccatcctcagcctcccaagtagctgggactactggtatgtgccactacacctggctcatttttgtatttttagtagagatggggtttcaccatgttggccaggctgttgtcaaactcttgacctcaagtgagccacctgcctcagctccctccaaagtgttgggattacaggcttgagctaccacgcccagcccagccgaagaagtttaaatttctgcagttatcaggccctcattccttctgtactaggtgaaatcggtgttttggtgtcttaagaggcttgatttgatataggtttcatgcgcgtccgtgtgaagagactaccaaacaggctttgtgtgagcaacatggctgtttatttcacctggatgcaggcaggctgagtccgaaaagagagtcagcaaagggtggtggattatcattagttcttacaggttttgggataggcggtgaagttaagagcaatgttttgcgggcagggatggatctcacaaagtacattctcaagggtggggagaattacgaagaaccttcttaagggtgggggagattacaaagtacattgatcagttagggtggggcagaaacaaatcacaatggtggaatgtcatcagttaaggctatttttacttcttttgtggatcttcagttacgtcaggccatctggatgtgtacgtgcaagtcataggggatgcgatggcttggcttgggctcaggcctgacattcctgccttcttatattaataagaaaaataaaacaaaatagtgttgaagtgttggggcagcgaaaatttttgtggggtggtatggagagagaatgggcgatgtttctcagggctgcttcaagtgggattaggggcggcgtgggaacctagagtgggagagattaagccgaagggagatcttgtggggatgttagaagaaacatttgtcgtatagaatgattggtgatggcctggatatggttttgtatgaattgaaaaactaagtggaataagagaaggagaaaaacaggtataaaaggtctaagaattgggaggacctaggacatctgattagagagtgcctaaggagattcagcatagtcctgccagcaaagattatttatttacttcaagagttaagagtggcagtttggggatagcacgaggagatatcacctgtgatggcttggagaaacagtgtaaaccagcagtgtaaacaagagcagggcatgtatgagtagttgagaacgttgaataggagtatgactagacagaagatagtagggatgatgacaggttttttttgggggggggggcacagtctaagttggtctggtgtctggaatgagactggggcctaataaaaaggagcatctatacaggagcttaaatgggctgtaccttgtagcattctgaggacaggtctgacttctgagaagggaaagtggtaaaagtattgtccagtcctttttaagttggtggctgagcttggtgaagtgtttttaaaagacctttagtccgttctgcttttcttgaagacggaggaccgtaagggatataaaggtttcactgaatactaagagcctgagaaactgcttggctgatttgactaataagggctggtctgttagactgtatagaggtgggaaggctaaactgaggaattgtgtctgaccgaagggaagaaatgactgcggtggccttctcagaccctgtaggaaaggcctctacttacctagtgaaagtgtctacttagactaagaggtattttagttatctgactcggggcatgttgagtaaagctaatttgccagtcctgggtgggggcaaatcttcaagcttgatgtgtagggaagggagggggcctgaataatccctgaggagtagtagaatagcagatggaacactgagaagttatttccttgaggatagatttccacaatggaaaggaaatgaggttctaagaggcgggctagtggcttgtactatagcatagcctgcctttgctgctgtgtggcgattaggcctgctggaactgccatcaataaatcaagcgtgatcagggtgaggaacaggaaagaaggaaatatggggaaatggggtgaatgtcaggtggatcagagagatacagtcatgggggtcaggtgtggtatcaggaataatgtgggaggccagattgaggtccgggccaggaacagtggtaattgtgggacttaacaaagagtgagtacagctgaaggagccggggagcagaaagtatatgcatcaggtatgaggaagaaaataatattggaagttatgagaaatgtagagagtgagttgagcatagtttgttatttttagggcctctaaaagtattaaagcagcggcagccactgcaagcagacatgagggctaggctaaaacagtaaggtcaagttgtttgggcagaaagactacagggtgcggtcctggctcttgtgtaagaattctgacacactaaccatgcctaggaaggaaaggagttgttgttttgtaagggattgaggtttgggagattaatcggacacgatcagcagggagagcacgtgtgttttcatgagaattatgccgagataggtaacagatgaggatgaaatttgggcttgactgaagtaatgggggctgtctgtgaagccttgcagcagtacagcccaggtaatttgctgagcctaatggatgtcagggtcagtccaagtgaaagcaaagagaggctgggatgacgggtgcaaaggaattgtaaagaaagcatgtttgagatccagaacagaataatggattgtggagggaggtattgaggataggagagtatatggtttggtaccatggggtggataggcaaaacaatttggttgataaggcatagatcctgaactaacttgtaaggcttgtctggttttaggacaggtaaaatgggggaattgtaaggagagtttataggctttaaaaggccatgctgtagcaggcatgtgataacaggctttactcctttcaaagcatactgtgggatgggatattggcattgagcggggtaagggtgattaggttttaatgagatggtaaggggtgcatgatcggtcgccaaggagggagtagaggtatcttatacttgtgggttaaggtgggggggaatacaagaggaggacgcaaaggaggctttggattggaaagggcagcaatgagatgtagctgtaacccaggaatagtcagggaagcagataatttagttaaagtgtctcggcctaataagggaactgggcaggtggggataactaaaaacgagtgcttaaaagagtattgtctaagttggcaccagagttggggagttttaagaggtttagaagcctggctgtcaatacccacaacagttatggaggcaagggaaacaggcccttgaaaagaaggtaatgtggagtgggtagcctccgtattgattaagaagaggacggacttactctccactgtgagagttacctaaagctcggcatctgtgatggtctatggggcttccgaggcgatcgggcagcgtcagtcttcagccgttaagccgagaagatctgggaaggagtcagagagccttgggccagagttccaggggctctgggagtggctgtcaggtgagttgaacagtccaattttcagtggggtcccacacagatgggactcgcttaggaggaatcccgggctgcgggcattccttggctcggtggccagatttctggcacttgtagcaagctcctgggggaggcagttatggaggaatgcctggccactgcggtttaggcgtttggaagttcttgtgtgctggagatgtagctggggtttgtctcacagtggaggtaaggaattgcaactcagaaatatgttgttacttggctgcctctactctattattgtacaccttgaaggcgaggttaattaagtcctgttgtggggtttgagggccggaatttaatttttggagttttatttaatgtcgggagcagattgggtaataaaacgtatattgagaataagacggccctttgacctcttagggtctagggctgtaaagcgtctcagggttgctgccgaacgagccatgaactgggctggatttttatatttgatgaaaaagagcctaaacgcttctgatttgggataaagaaaaaggagcattaaccttgactatgcctttagctccagccacctttttaagagtaaattgctgggcaggtgggggagggccagtcactgaacgaaactgtaagctggaccaggtgtgaggaggggaggtgataaaaggattctagggtggaggagcagaggctgaggaagaattgggacctagatggcctggcgacgagcagcctgaggagaaggggaaaggtcagatgggtctgtagaaaagactggaaagacccagcgacacttggggttgggactgaggggacaggcgggagggaaagaaggaggatttgggaggaatcgcattgggaacagagacttgagagggaacgaagtgtgaaaaatgcctggatgtgaggcacctcagaccatttgcccattttttgacaaaaattatttaggtcttataggatggagaaatcgaaagtgccgttttctggccatttagagccattgtcaagtttgtactggggccaagcggtgttgcagaagaaaataaggcatttaggttttaggtcaggtgcgagttgacgaggttttaagttcttgagaacacaggctaagggagaaggaggaatggaggctggaaggttgcccatagtaaaggaggcaagcccagagaaaagagagagtagagacacggagggaaggggttcgagggttcttaccctccagaaaagcaggaaaggggtcagggtgtggaaataagggattggggcacacagataagaggtcggggtgcggaaataagggattgggggttcttgccccctagaaaagcgggacttaccgctaagggtgaaggagaaggggttgaggggtacttgcccctcccccagaaatgcagagaaggggtagagacacggagagaaggggttgtggtacttgcccctcccccagaaaagcaggacttgccgctaagggtgaaggaccaaggcaggcgtccctgagtggtctgacacctttgaaacgtgagtgaataatcagagaggtgtccctgcaatgattaaacaccaaggaaaggctgccttcccagtctgtgaccagcgccagagttttgggtccacggataaaacgtgtctcgtttgtctctaccagaaaatgaaaggaattgaaattaagagaagggagagattgaagagtggaaaggagaaagtggttgagggatagtgagagaggttggagaagagagtaagaagaggccgcctacctgatttaaaattggtgagatgttccttgggctggtgggtctgaggacctgaggtcgtaggtggatctttttcacggagcaaagaacaggaggacaggggattgatctcccaagggaggtcccgcgatccgagtcatggcaccaaatttcatgcgcgtccatgtgaagagaccaccaaacaggctttgtgtgagcaacatggctgtttatttcacctggatgcaggcgggctgagtccgaaaagagagtcagcaaatggtgtggtggattatcattagttcttataggttttgggataggcggtgaagttaagagcaatgttttgcgggcagggatggatctcacaaagtacattctcaagggtggggagaattacgaagaaccttcttaagggtgggggagattacaaagtacattgatcagttagggtggggcagaaacaaatcacaatgctggaatgtcatcaggtaaggctatttttacatcttttgtggatcttcagttacttcaggccatctggatgtatacgtgcaagtcataggggatgccatggcttggcttgggctcagaggcctgacaatagggactttacataggattaggatggattagaacagaagttctagaagcaggtgagaaggagtggagggtagggataaggaaggaagggatttaagaagacattgagaaggaaaggaccacaagactgagaggaatggatgaggagagagggaagaaggagtcaaaaaagaggtgggggaataggggacttttggaaggtgcagcatttataggaatagtgacttaatagaccacatgcagtggctcattcctgtggtcccagctactcaggaggctgaggtgggagcatcgcctgagcccaggagttggaggctacagtgagccatgatcgcctactgcagcccggggcaatagagtgagacccccatctctaaaaaaagaacaagcacacgcctgtgggtggtcccagctactcaggaggttgaggtgggaggatcacttgagcctgggaggcagagactgcagtgagctgtaagagccactgcactccaacctgggtgacagagtgagaccccgtctcaaacaacaaaaaagaaaaaaaaaaacgaaagacgccaggcactgggactcacacctgtaatcctagcaccttgggagttaaaggcaggcagattgcttgagcctaggagttcaagaccagcctgagcaacatggcaaaattctgtctctaccaaaagtacaaaaaattagctaggtgtgatgtgagtgtctgtggtcccagctaggctgaggtagaagaatcatctgagcctgggaagttgaggctacagtgaagccatgatcgcaccactgcactcttgcctgagtgacagagtgagaccctgtctcaaaaaagaaaaaaaaaggaagaagaaaaagaaatggggaagtcaggaaaaagaagtgatgcttttttttttttttttttttttgagaaggagtctcactctagtcgcccaggctagagtgcagtggcacaatctcagctcattgcaacctctgccgcctgggttaaagcgattctcctgcctcagcctcccaagtagctgggattacaggcgcctgccacttcgcctggctaatttttgtagttttagtagagacagggtttcactatcttagccaggctggtcttgaactcctgacctcgcgatccacccacctcagcctctcaaaatgctgggattgcgggtgtgagccaccgtgcctgggccatacatttgtttttacactcatttctgtaccaaattagcccaattatctactgtcttgttttttgaactgattttttttttttttcatgtattgaaccaggagagcacagcctccttgagggtaaaatctgtgtctggaactttttctgtagtccctccagggtctggcatgctgacatgctgtttacttcattgtctgcgggtgcttaacaaagacttggtgattgactaagtttgtgtttccattcaggaccctagtgaaggttgacctttattccctttccagcccatgttcttgcttctgcttgtttgtaagtcatttgttacgtagatttttctttttggagatggagcctcactctgtggcccaggctggagtgcaatggcctgatctcagctcactgcagcctctgcctcctgggttcaagtggttctcctgccttagcctcctgagtagctgggatcacaggtgcgcggaaccatgcccagctaattttgtgtttttagtagagatggggtttcaccatgttggtcaggctggtctcgaactcctaacctcacgcaggtgatccgcctgcctcggcctcccaaagtgctgggattacaggcgtgagccaccgtgcccagaccatatgtatataattttttttttttttttttttggagatggagtctcactctgttgcccaggctggagtgcagtggtacaatcatggctcactgcaacctctgcctcctgggttcaagcagttctccagcctcagccttcaagtagctgagattacaggtgtgtgctaccgtgcctagctaattttagtatttttagtagagacaggatttcaccatgttgaacaggctggtcttgaactcctgacctcaaatgatccacctgccttggcctcccaaagtgctgagattacgggcgtgagccaccgcatccagcctgctatgtagatcttgttttctctggaatgtttgagccgtgctggaatggggtacccaatgctgctgtttccatccccacatgacgttttaagtcccacgagagtaggctagcgatggagtgaagctgaaaaatgaaagcaggaaatccagagacacagaaacagatgaggctttcaacagagactcgaaaatagacagaaaccatgagtcagagcagagcccggaggggcggttcgggaaggcaaggtctataggggaagctcgggtgtcacctctatgccaggtgaaggaaatgttgagtgggtgggaggctgtgtgcatctgctggggaggcagtaggcagatggaaagatcaagtcacccagaattatccccagaggttccttcccgttcctgtgggcgggtgagctctgctttctgagctgcccagagagctggaggagatagacatggaactgaccattgcagaaactagggctttttgtgcccgtgagtaggcaaagagctccctgtggatttgccataaaaaggtctatcaaggtggaagaaagtgagattctagagaaattaatacaagtgaaaagtgggcaggagtgttcttggaagtagaaatgctgttggaagtctaatagacttgggaagaagataacgtatggtgaataccagttgcttcgggggttggggggatccacattttactctgtactcagaagatgcttttccccgtgcaaaaagtgaaagtgagtgggccagtttttcttctgtcacaaggtgtatgactgttcccaaaataatagccctgggggatggggattgcttctcagaccattcaatttttgtaccctgtagacttttggtgttatgtgagaactttaagcacctgataggaattagtaacagagctacgctaatgcctgaggaaatttcagacaattggtgggagagacttggcatttggaatgtgatagctggtaggctaccatacagtaatgcaggattgccagacatttctttccaaatggctacccttgattacatttaactcccctcctttcaagctccagattttgaaggacctgttaattctctttcaagattgaagacagacaccttctttttcttctaaagaggaacctaggcggggtgcggtggctcccgcctgtaatcccagcactttgggaggccagggctggtcttgacctccttacctgaggtcaggaggcctggccaccatggcgaaaccccatctctactaaaaatacaaaaagtagccaggcatagtggcgcatgcctataatcccagctactcgggaggctgaggcaggagaatagctcgaacctgggaggtggaggttgcagtgagcctagatcgcgccactgcactccagcctgggtgacacagcgagactcaatctcaaaataaataaataaataaatatgaacctaaaccatcagaatcttccccttgcagccacaacagaaacactgccggggaggccgagccccgacctgggaagcagggtgatacactgggtgccacgggccttccctctgcctggcagctgtcgctactcagatccctgcagccctgttgccagtgaaggagctggagtctctgttatgatgtgttcatccagctggtgagtttttttttttttgttttgttttttttgtttttgtttttgttttttttttagacagagttttcacttgttgcccaggctggagtgcaatggcacgatctcggctcaaggcaacctctgcctcccaggttcaagcgattttcctgcctcagcctcctgagtagctgggactacaggcatgtgccaccatgcccagctaattctgtatttttagtagtgatggggtttctccatgttggtcaggctggtcttgaactcctgacctcaggtgatccgcctgcctcggcctcccaaagtgttgggattacaggcgtgagccactgcacccggcccagctggtgattttttttttttttttttttttttttgagacggagtctcgctgtcgcccaggctggaatgcagtggtgcgatctcagctcactgcagactccaccccccgggttcgcgccattctcctgcctcagcctaccgagtagctgggactacaggcgcccgccaccttgcccagctaactttttgtatttttagtagagagggggtttcaccgtgttaaccaggatggtctcgatctcctgacctcgtgatccgcccgcctcggcctcccaaagtgctgggattacaggcgtgagccaccacgcccggccccgtagctggtgatttttaaagttaacaaaatacaattatgagaaatcagaattcagaaagtaatgacagagagggccttgtcgggaggggctctgacaccctgctttgggccctcatagagatctggggagggagcaggagtgttttaaggggtgtgcgtcttcagccttccatttgtcttcagaacccaaagccctaaatttagcaaacagctggagagtgctttctgaagagggaggctctggacctgaatcagagatgggaacccatgtaaccaccctcagctgggctcttcagtgtaatcacaggtttgggaaggtaactgaggagagcccatgccaaatatcagaactttgcatttggtgcctggattttaaatcccaggggccctctgagaactctagtacttgtgtttgtgcttgaccatggaaggccattagagcctgggggtgctagatactcaagctgcaatcccaggcaagttgcacggtgaccagggcttagtaggggctaagtaaatgttgttggcttgacaatgatgagcattatgtgcaatttcaaaaacacttaaagcattatggaaggctaggtctggaaaaaccttttgacaggtatgtggaaaatattcgctgggcgcggtgactcacgcctgtaatcccagcactttgggaggccaaggcgggccgatcacctgaggtcgggagtttgagaccagcctgaccaacatggagaaaccccgtctctaccaaaaatacaaaattagttgggcatggtggtatgcacctgtagtcccagctacttgggaggctgaggcaggagaatcacttgaacccgggaggcagaggctgcaatgagccgagatcgtgccactgtactacagcctgggcaacaagagcgagactccatgtcaaaaaaaaaaaaaaaatttgtggttacaaatatgtatttttttatctagttcagtctgatttcagtttccccaaaaacccttcttgaccatctccacttgcttaacactgagctcatttttatatagctggagttccctttattatctttacatgtttcatgtaggcatttttttgggaatattttaattatttgtgtttgtccttttgaccttgattccactctaagcttcatgagacagaatttgttttctcttttatttgtgactttcaaaatactggacagaaagcagtatttgtatttgctctccgactgaattttttttttttctgtctccttgctactgactgttctactgaggcttctctattagagagtaaagttgaaagcaaactcttagtgcttaaaacttgcgaagaaaaccttccattgcatcctcattgctcttcctaacacttgtcctcttctttgttgtgttgcaagataaagccaccaatccttccaaccgccaggaggactgggaatacataattggcttctgtgatcagatcaacaaggagctggaagggtgagtctcagcactgtgggggcagctgagagggagcggactgggaaggggaacaaccatggccaaggagggccagccaggtagccccaggcttagtgcactggagtgtgttctgcttgtcccccaggccacagatcgccgtccgactgctggcccacaagatccagtccccacaggaatgggaggcgctccaggccctgacggtaggtccttcactctccggaggtggaaaccgcagcccttcacctgcccacgccattcctcgtgtccccatagcggttcttagggctcctgccaaaagccaacagaaagtccttgatacagactagatagatctcgaatctgttcagccagctgttccacaaatctgtgtgcattgtgccaggccctgaggcctcagaggtgactgcagtgccgtccctgccagcatggccacatggttagtgtgtgaggcagaggggctaaggaaagcagcccagagtcagggccctgagccccatgtggcgcaagagaaggcttggtgaagagatgctgacagggctgtgttgatagttcagagctggccagctgaagaaaagaggggtcggtccagttcattctgtagttaaacaatgccagtcactagcgaaggtgtcgcactgatggctgaggcccctagggcagatcctggtgtctgttcagactgagggaatttaaggtgtggaatggtgcctggccctcagtgcctccacatgctccgaaaacaaagagcagccgagatctgaggaatccggggctctagcctgactgcattcaggtcctggaaagcgaaaagaggaaatatcatctggttcacatgcacccctcagtcatatttgctgtagaacgaattccttaaaacagtgattctcagcagggcacggtggcttgtacctatagtcccagcaccctgtggggcctaggccgggaggatcgcttaagggaattcaagaccagcctaggcaacgtagtgagacattgtctctacaaaaaataaaaaaatcagccaggcacggtggcacacacctgtggtcccagctcctcgggaggctgaggttgaaggatggcttgagcctgggaagttgaggcgaaagtgagtggtgatcacaccgttgcactctagcctgaccaacatagcgagattctgtgtcaaaaaacaaaaaaaaaacgtaacaaaacccagtgattctcaacagggccctccagggaacatttggcagtgtctggaaacatttttagttgtcacacatcggggtgggggtcctcctggcatcaagtaggcagaggccagggatgctgttcgacaccctataaagtgcagagtggccccccacaacgaagaatgaccagcccaaaatgtcagccaggcctcacctgagaaaccttgctttaaaatgcagaagccaagaaagagagcctggacagtgcactcccccttagaaaccgcagtgccagggaccacaggcagcacaggaaagccaaagcgtgagttagggagataagcggagggaggagaaatatcctgtcatctttctcacagataataggatttaaacatccctcccattccctgcacaattgttggtgagcttgtggaaaaaacccaggacaccaagtcagagaaactttgtccctggacctcacctccctcattgtaaaacacgaggccagaatctttaaggaaggcaccttccaggactggcatccaggccttcttggggtcggggtctcggggtttcttgctttagtccctgcccagcttccccagcagaggtttgcagttggagggacatggtctgtgagtgatctcgttgcttaattacactgtccccgggcagtgcacactgcttttcgtgatgagctccttcctgtgggcgtgtttattcagtactctctgggtgccagggatcttgccagtgccaggttccagccccgagcacgccctcactgagcgcctctcctctgtgcggctacaggtgctggaggcatgcatgaagaactgtgggaggagatttcataacgaagtggggaagttccgctttttgaatgagttaatcaaagtcgtctctccaaaggtcagtcagcggcagattcctcgcttttagggacttcttttgtgttcattcccatctcccatcatactggctttcactgcccatccaacatctccagggagctgagattatttgtgtcttgtccttagagagctaggccctggaggtaacgggatgaccaaacaggccacagggaccggcagctttttctgaagcgccctcagcccaaatctgacaggtgatgtggtagtggctgtgtgtttgtccagggtgagggcccatgtagtgtgggactctaggcacctggcacatggcagttgtgggttttgtgggttttcttggcctgtgtcacgtggatacggggagctggcctccgtcattgctccgatgctcagctggccgtgttctgttgcacgctggtgtggcgcagctctgggcccccacttaaagcagagggaatactttaccatgctaaagacattctcatggacacccccaagataaaatgcagttgtgtttctggcaacttgtgcgtgaaaatgcactttcctcagaactcaaaatatccacccaaccatggcctgcaccacatgggcatcagggtcacaaggaagcctctctgtcttgatgtccccaaggtagtaaggaaaggcagagagcaggggtgagcaccgagggcatggtctctggtgtcagactcaggtttccatccggcccttacaccctgggcaagttagatgatcccaggcggcaaatggggacgccacccctactgacgtggctgctgtgcagatgagtaaggtcatgaatacacttacaggacacttcctggacaggaggtgatgacctcctggccccctgcctatccacagactgtatccagatggacacagccacaccacagggagtcgttcccctccccacgctgtctcacacacacttggacacctgcagattttgagtaggaccatagctgctgagcagccacgccattgctgtggagggagccttacactttctctgcctccgaactgcacttactaggtcctcattttcttttgccatgtagtacctgggggacagggtgtctgagaaagtgaagaccaaggttattgagctgctgtacagctggaccatggccctgccagaagaagcaaagatcaaagacgcctaccacatgctgaagagacagggtacgtgtctgcctgcccgcagcctccaggcagccctcgaaggctggcccaggcaaggagagaagggaaggtttgggatccccagagtccctcctgaagagaacagcatttgtccccaggcaaggctgagtcggagttggatgggataaggtgtagcagcctgccctccaccctgctaccctttgcaggtcttgatcacagggacgtggcccttggtgtatgaggaggggtgacaaggcaaccacagcctgagtgcacgtgctgccatgtcccctttcaggcatagtgcagtctgacccaccaattcctgtggataggacgctgatcccctctccaccacctcgtcccaaaaaccctgtttttgatgatgaggagaagtccaaggtaaaggacaccctgggcctgggattttctcatacgagagtgggtggcagcaggggaatgtggtttgcactgtgctgcggggagcctctggggtttccctggggtacgggtgctgcctcttcccttcacctctgatttcctcctctctcagcttttagccaagctgctgaaaagcaaaaacccagatgacctgcaggaggccaacaagctcatcaagtccatggtgaaggaagtgagtgggccccggtccttcaggcacggggtggaggagcccatggccacacagcagaagccgctttgccccggacacgggcctgttttgttctcccctgctgccagctgccctacctgtgccccggtggctgagagtgggaggaggagcacaatagcttccgcgggagcacggaagagaggagtgggttgggagcagtgttgtgaaagcagaagtatagactgggccccaggcaccccacactgaaaggagcttccgagcgtctgtacttgtgttgtggggtaaggtgtgacctggtggaagtggaaagacagtcaagtgacgctctctttctcttgaacttcttcactggggcaggacgaggcacggatccagaaggtgaccaagcgtctgcacacgttagaggaagttaacaacaacgtgagactgctcagtgagatgctgcttcattacagccaggaggactcttcggacggggacagagagctgatgaaggtgggaccgccgacggcaaaggctgcctcccggggctgcgctgcccttcaggagctcagccagcatttgctgagcacgtgccttgtcagagacacgggctgtgcacttggcagtgtattcatgaccttactcatctgcacagcagccacgtcagtagagggtggcgtccccatttgcctcctgggatcagctgacttgtccagggtgtaagggccagatggaaacctgagtctgactccagagaccacactctcggtgctcacccctgctctctccctttccttactaccttggggacatcaagacagagaggcttccttgtaaccctgatgcccatgtggtgcaggccatggttgggtggatattttgagttctgaggaacatgccagcctggaaggcaggaggggactgacttcccctgacccatcctggtgactgctacctagacaaacatcctgggtgatgtggtgtggtggtggtggctggtggcaagaagacgtgcgctgtgatcccagctttgctggtaattgaccgtggcaattggcatatcccggtcattttctgggcatgaaccctgaatgaatcagatgatctctaagggcctttgtggtttgatttttatgtccgagtctctttcaggagctgtttgatcagtgtgagaacaagaggcggactttatttaaactcgccagtgagactgaggacaatgataacagtttgggtgagtgaaagagcgacggtcagggataagccaggcatttggatatgtgggtgggaactgtcacaacaggagtgagaagtctctctttcctgctccaggggacatcctgcaagccagtgacaacctctcccgggtcatcaactcttacaaaacaattattgaagggcaggtcatcaatggcgaggtggctaccttaaccctgcctgactcggaaggtgagatgctctggtccccaactctaggctcctccagaccagcctcaggcccctatcatgaagctgcgggtgtaggctggccagcgtggtggtgttgcacaaggcccaagggagttctttgccattccaagcaatcctccggcttcccggaggcctggagatgtgggtaggaatttccccacctgctttctcgggcttgctttgcagcatcccctggcagagatgccgttggattaggccagaggctgtagcagtgacctctgtgcctagggtgctgcctcctgccacacagccactagaagacccctaattattcctgttctgctctgttgacccatccaggaaacagtcagtgcagtaaccaaggcacgctcatcgaccttgcggagctggacacgaccaacagtttgtcctccgtgttggccccagcacctactccaccctcctcaggcatcccaatcctccctccaccaccccaggcctcaggacctccacggagccgctcctctagccaggccgaggccaccctggggcccagcagcacaagcaacgccctctcctggctggacgaggagctactctgcttgggtgcggcccacagggggcgtcaggggcatcccctgacagggctctgggaggaagggtgtgtggaattaggagccctgagcggggccccagtgtgactgttggggtgggcaaagaaccctgagttggaggtactcagtgaagttcagcgaccctgagggccccagggccatcctcccggtggactctgcctcctgccctgcaccccgccccacaggccccccgcttctgcatcatggactggagcgctccattcccctctggaggctgcctgcagaacagcttctcccggcgccttcacccattgatgtcacttgtcacctgacccctcctcaggcaaggcggggctagggctgcctagctcagagcctcttctcatcctgttttcttctctattgtcaggcctcgccgacccagcccctaatgttcctcccaaagagtcagctgggaacagccagtggcacctgctccaggtaggggcacaggatcggtgacagcactactgtgccaaggacctccactttccagcgtcatgtctcctgggctgcagttagctgtccttccctccagagcgtgccagctgcagcggggaacaatgagtgcctccggggctgtcttccgtgcagtccttggagggctgcgccccgttccagcggcaggccctccccacccgccctcggctcaccaccctttctgttgttcatagagggaacagtccgacctggacttcttcagccccaggccggggaccgctgcctgtggcgcctccgatgctcctctgctccagccctcagccccctcctcaagcagctcccaagctccactgccgcctcccttcccagctcctgtggtcccagccagtgttcctgcccccagtgcgggctcctccttgttttctactggagtggccccagccttggccccaaaagttgagcccgcagtccctgggcaccatggcttggcgttgggcaacagcgcgctgcaccacctggatgccctcgatcagcttctagaagaggccaaagtgtaatgagtgggaggagatgtggggttgctgagggttgggcctgaatgtgtcagaaccagagctaactttgaaggggtgggggtgccttgtagtcccatcagtcaggctggaaggcaaggggtgggcctgggtaagagcatggtcaggggccttgggtgagagtcctgcagctctggctggctctctgacgtgctttccatccttcccacctcccaggacctcgggcttggtgaaacccactacctcccctctcatccccaccaccaccccagccaggcccctcctgcccttctccacggggcccggcagcccgctcttccagccactgagtttccagtcccagggcagccccccgaaggggcctgagctctccctggccagcatccacgtgcccctggaatcgatcaagcctagtaggtgttggaggattgaggtgggtggggcggtggggcctatagccacggagctgtaggacatgcgacagggatggatccaggcactctttgcagggggtcccttaaagccaggcaggcctccctgcctgcattctcagtcttaagctcctcactgagcgcctctcccagattccgttaggaagcactggactcatcatgaccacggagtagcccttttctcctcaccgccggggctctgttgggtgtctctggtgctgctcctcccacactcacgtcacgttcttacaggcagtgcccttcctgtgacagcctacgataaaaacggcttccgcatcctcttccactttgccaaggagtgtcccccaggacgacctgacgtgctggtggtggtggtgtccatgctgaacacggctcccttacctgtcaagagcatcgtgctgcaggctgcagtgcccaaggtaccagtgtctccctggggccaaaacggccttatcttgaccctgttgtgtagaggcctttgcagccagcaggtggcagtgtgtgtgtgcactgcaggttccatctgggggcacctaccagttctcttcaaaggagtttctctctctttagtcaatgaaagtgaagttgcagccaccttctgggacagaactctctccatttagccccatccagccacctgcagccatcacccaggtcatgttgctggccaatccactgaaggtgagcagcaaagaacccaggggtcccagcctgaggccccagctgccccagattaggacgtcaggcccaccacctcccagctggaagtgttttgactgtaggattgacacatccctttgctgccttaggttaagtgtctgagcatggttgggggttgcggggaaaagggaccattcctctagcacagagagggtagcagaatagagggcgtcctgccaaggggccgcctgggctggatctcacttgctgccctctgtcacaggagaaggtgcggcttcggtataagctgaccttcgccctgggggagcagctgagcacagaggtgggcgaggtggaccagttccctcctgtggaacagtgggggaacctatgaccccagaggacgctgtgatctccaccttgaagccaggcaggctgccctgagacgaggagggctctggtcccgtcactctccatgccctgacaacagtgcttgtagctttgatgtggaacaggggccctgggcatttctgctgagaaccaaactgctgctgtgataacctctcctttggcccctaaaaggacctgtttttatctacctgtgtgacttgaagtggccatatgctgtcaggggtgcggagtggcccctgacttcactgctgtcccgggaacatggacccccaggcttggcgtaggtgtttgcttccttctactggcattcactgaagccactggggtggggggtggggggtgggagtctctaaagagagactgtcatgggtcattccccacaagagccacatcctcacacctgacagatgcacggcccaaggggctgcagccctgttgcaattccatgcttcccccgccaaccagctcctgctgccatccccagggaggtggcccaggaaggtgcctggcccagaataaggaactggcatactgcaaagtccccagccctgcctctggtggacagcatcgtcctggaatggccacggagtgatgagttgtgtgcttgtccctggcagtggcaggctgtgtcctatggacatcttggcaggacatggaatttggcctcatgacaggcccaactagggataggaaggaaaatgaagagagccagtatttccccttctccagaagcaggtactcagctttctgggaaaagcgtgcctccagccgtggggacaggccatcctactgactacctcttgcttggcatgaaataaactgctatcctccccttggaatctaccgccactctacatcctactgctttggcctccctctcctctcaccagatggcatgtggtgtggcacctgtggctggacacaggaggcctcaggatcacaaatgttacactagacatatgtcctaatgtgctgccc

SEQ ID NO: 12196 - DNA, 2251 bp, Homo sapiens
aacaattcaggcccttgtcccaagtaggaggacattccccaagcaggcgggtaaagtctcctcctggtcaagtgctaacgataaagccaccaatccttccaaccgccaggaggactgggaatacataattggcttctgtgatcagatcaacaaggagctggaagggccacagatcgccgtccgactgctggcccacaagatccagtccccacaggaatgggaggcgctccaggccctgacgtacctgggggacagggtgtctgagaaagtgaagaccaaggttattgagctgctgtacagctggaccatggccctgccagaagaagcaaagatcaaagacgcctaccacatgctgaagagacagggcatagtgcagtctgacccaccaattcctgtggataggacgctgatcccctctccaccacctcgtcccaaaaaccctgtttttgatgatgaggagaagtccaagcttttagccaagctgctgaaaagcaaaaacccagatgacctgcaggaggccaacaagctcatcaagtccatggtgaaggaagacgaggcacggatccagaaggtgaccaagcgtctgcacacgttagaggaagttaacaacaacgtgagactgctcagtgagatgctgcttcattacagccaggaggactcttcggacggggacagagagctgatgaaggagctgtttgatcagtgtgagaacaagaggcggactttatttaaactcgccagtgagactgaggacaatgataacagtttgggggacatcctgcaagccagtgacaacctctcccgggtcatcaactcttacaaaacaattattgaagggcaggtcatcaatggcgaggtggctaccttaaccctgcctgactcggaaggaaacagtcagtgcagtaaccaaggcacgctcatcgaccttgcggagctggacacgaccaacagtttgtcctccgtgttggccccagcacctactccaccctcctcaggcatcccaatcctccctccaccaccccaggcctcaggacctccacggagccgctcctctagccaggccgaggccaccctggggcccagcagcacaagcaacgccctctcctggctggacgaggagctactctgcttgggcctcgccgacccagcccctaatgttcctcccaaagagtcagctgggaacagccagtggcacctgctccagagggaacagtccgacctggacttcttcagccccaggccggggaccgctgcctgtggcgcctccgatgctcctctgctccagccctcagccccctcctcaagcagctcccaagctccactgccgcctcccttcccagctcctgtggtcccagccagtgttcctgcccccagtgcgggctcctccttgttttctactggagtggccccagccttggccccaaaagttgagcccgcagtccctgggcaccatggcttggcgttgggcaacagcgcgctgcaccacctggatgccctcgatcagcttctagaagaggccaaagtgacctcgggcttggtgaaacccactacctcccctctcatccccaccaccaccccagccaggcccctcctgcccttctccacggggcccggcagcccgctcttccagccactgagtttccagtcccagggcagccccccgaaggggcctgagctctccctggccagcatccacgtgcccctggaatcgatcaagcctagcagtgcccttcctgtgacagcctacgataaaaacggcttccgcatcctcttccactttgccaaggagtgtcccccaggacgacctgacgtgctggtggtggtggtgtccatgctgaacacggctcccttacctgtcaagagcatcgtgctgcaggctgcagtgcccaagtcaatgaaagtgaagttgcagccaccttctgggacagaactctctccatttagccccatccagccacctgcagccatcacccaggtcatgttgctggccaatccactgaagaagcaggtactcagctttctgggaaaagcgtgcctccagccgtggggacaggccatcctactgactacctcttgcttggcatgaaataaactgctatcctccccttggaatctaccgccactctacatcctactgctttggcctccctctcctctcaccagatggcatgtggtgtggcacctgtggctggacacaggaggcctcaggatcacaaatgttacactagacatatgtcctaatgtgctgccc

SEQ ID NO: 12197 - DNA, 1306 bp, Homo sapiens
ccactacctcccctctcatccccaccaccaccccagccaggcccctcctgcccttctccacggggcccggcagcccgctcttccagccactgagtttccagtcccagggcagccccccgaaggggcctgagctctccctggccagcatccacgtgcccctggaatcgatcaagcctagtaggtgttggaggattgaggtgggtggggcggtggggcctatagccacggagctgtaggacatgcgacagggatggatccaggcactctttgcagggggtcccttaaagccaggcaggcctccctgcctgcattctcagtcttaagctcctcactgagcgcctctcccagattccgttaggaagcactggactcatcatgaccacggagtagcccttttctcctcaccgccggggctctgttgggtgtctctggtgctgctcctcccacactcacgtcacgttcttacaggcagtgcccttcctgtgacagcctacgataaaaacggcttccgcatcctcttccactttgccaaggagtgtcccccaggacgacctgacgtgctggtggtggtggtgtccatgctgaacacggctcccttacctgtcaagagcatcgtgctgcaggctgcagtgcccaaggtaccagtgtctccctggggccaaaacggccttatcttgaccctgttgtgtagaggcctttgcagccagcaggtggcagtgtgtgtgtgcactgcaggttccatctgggggcacctaccagttctcttcaaaggagtttctctctctttagtcaatgaaagtgaagttgcagccaccttctgggacagaactctctccatttagccccatccagccacctgcagccatcacccaggtcatgttgctggccaatccactgaaggtgagcagcaaagaacccaggggtcccagcctgaggccccagctgccccagattaggacgtcaggcccaccacctcccagctggaagtgttttgactgtaggattgacacatccctttgctgccttaggttaagtgtctgagcatggttgggggttgcggggaaaagggaccattcctctagcacagagagggtagcagaatagagggcgtcctgccaaggggccgcctgggctggatctcacttgctgccctctgtcacaggagaaggtgcggcttcggtataagctgaccttcgccctgggggagcagctgagcacagaggtgggcgaggtggaccagttccctcctgtggaacagtgggggaacctatgaccccagaggacgctgtgatctccaccttgaagc

SEQ ID NO: 12198 - DNA, 432 bp, Homo sapiens
ccactacctcccctctcatccccaccaccaccccagccaggcccctcctgcccttctccacggggcccggcagcccgctcttccagccactgagtttccagtcccagggcagccccccgaaggggcctgagctctccctggccagcatccacgtgcccctggaatcgatcaagcctatcaatgaaagtgaagttgcagccaccttctgggacagaactctctccatttagccccatccagccacctgcagccatcacccaggtcatgttgctggccaatccactgaaggagaaggtgcggcttcggtataagctgaccttcgccctgggggagcagctgagcacagaggtgggcgaggtggaccagttccctcctgtggaacagtgggggaacctatgaccccagaggacgctgtgatctccaccttgaagc

SEQ ID NO: 12199 - DNA, 1420 bp, Homo sapiens
gactcttcggacggggacagagagctgatgaaggtgggaccgccgacggcaaaggctgcctcccggggctgcgctgcccttcaggagctcagccagcatttgctgagcacgtgccttgtcagagacacgggctgtgcacttggcagtgtattcatgaccttactcatctgcacagcagccacgtcagtagagggtggcgtccccatttgcctcctgggatcagctgacttgtccagggtgtaagggccagatggaaacctgagtctgactccagagaccacactctcggtgctcacccctgctctctccctttccttactaccttggggacatcaagacagagaggcttccttgtaaccctgatgcccatgtggtgcaggccatggttgggtggatattttgagttctgaggaacatgccagcctggaaggcaggaggggactgacttcccctgacccatcctggtgactgctacctagacaaacatcctgggtgatgtggtgtggtggtggtggctggtggcaagaagacgtgcgctgtgatcccagctttgctggtaattgaccgtggcaattggcatatcccggtcattttctgggcatgaaccctgaatgaatcagatgatctctaagggcctttgtggtttgatttttatgtccgagtctctttcaggagctgtttgatcagtgtgagaacaagaggcggactttatttaaactcgccagtgagactgaggacaatgataacagtttgggtgagtgaaagagcgacggtcagggataagccaggcatttggatatgtgggtgggaactgtcacaacaggagtgagaagtctctctttcctgctccaggggacatcctgcaagccagtgacaacctctcccgggtcatcaactcttacaaaacaattattgaagggcaggtcatcaatggcgaggtggctaccttaaccctgcctgactcggaaggtgagatgctctggtccccaactctaggctcctccagaccagcctcaggcccctatcatgaagctgcgggtgtaggctggccagcgtggtggtgttgcacaaggcccaagggagttctttgccattccaagcaatcctccggcttcccggaggcctggagatgtgggtaggaatttccccacctgctttctcgggcttgctttgcagcatcccctggcagagatgccgttggattaggccagaggctgtagcagtgacctctgtgcctagggtgctgcctcctgccacacagccactagaagacccctaattattcctgttctgctctgttgacccatccaggaaacagtcagtgcagtaaccaaggcacgctcatcgaccttgcggagctggacacgaccaacagtttgtcctccgtgttggccccagcacctactccaccctcctcagg

SEQ ID NO: 12200 - DNA, 439 bp, Homo sapiens
gactcttcggacggggacagagagctgatgaaggagctgtttgatcagtgtgagaacaagaggcggactttatttaaactcgccagtgagactgaggacaatgataacagtttgggtgagtgaaagagcgacggtcagggataagccaggcatttggatatgtgggtgggaactgtcacaacaggagtgagaagtctctctttcctgctccaggggacatcctgcaagccagtgacaacctctcccgggtcatcaactcttacaaaacaattattgaagggcaggtcatcaatggcgaggtggctaccttaaccctgcctgactcggaaggaaacagtcagtgcagtaaccaaggcacgctcatcgaccttgcggagctggacacgaccaacagtttgtcctccgtgttggccccagcacctactccaccctcctcagg

SEQ ID NO: 12201 - DNA, 18842 bp, Homo sapiens
aattcaggcccttgtcccaagtaggaggacattccccaagcaggcgggtaaagtctcctcctggtcaagtgctaacggtaaggatgggcttggcgcctacacacccatcccaattcacaggcgatcccagatctgagctctttagctgaaccgcactttcagctccgcgttagaaccctagatcagccagactccttaggcgagaggtagtcactaaaccttcggattggcgcagggtcacgcagctaacttagaagcttgaatccagatactccggcccccagggcaatgctctctctaggggcccacgcggcctgcctgtggcccccttccttcctcgcagcgcccccccgccgctgctcgccaccctctcaccctggaagctgcaagacagcccgccgcacgcccaacgccaggcccgaccatcctcgggcaaccttcactgcgggggcagccatcttggctggccacgaggaccccacaaggactgccctcggcgcgcctgagcgagtgacgggaaacgggtgaaaaagactcctcagggtcctaaatctgcgtttctctccactgatctggacgttagagtttttcactccggggtccaaaggggagcgccaaaaggaaacccttgccctccctgtatccgtcgcagtctggcgcggccctcggtgacggcactcactcctctcaggaccccatgcaggccccgccccgtctcagctcgtgcagactctcgcgagttttgaagccgcggggccgggcggctgcaatatggcggaggcggaaggggaaagcctggagtcctggctcagtgagtagccgcggccgtttctgcctgccctcgagccgctgggctgcccctgtcttcacccccacgtcccctccccgggctccacggcgtcgcctcttggcagcccacgcccggtctcgccctcgccgcgagcagcctgcgatcacgccccttccctatcagggcgccgggccccagtccggcccccgcttccctcgctgcggcgcgtcctcttgctctggcgcgcggcggcgtgaactcgggctcctgtcgggcaccgcaggctcggggaaaggcgacagccaagatcttcgggctgacatgcttcggcgctttggggagattgtggtggggtcgccgcccggcggtgacaccaggaacccagcgccccaatccctgactaagggagaagcttcggattggggctgagtctccggtagtggtgggtgctgccgactgcgttcagtcgcctggcagcttcagaattgtgaccatgtgttggagaagtgacggcttcgctcaggcagaatgcttgaagtgagaataatattccaaagagagcgatgatagagaacagagagctctacctttttcctgcagtgaccacagaagcatggtgaaatcggtgtcgggaattccccccccacacacatacatatacccccttgaatatcctaacgagtcagtgttgatagcctattctgagtaaggctgaggagcacagtctgaagctgtagttatagaagcgtattgctgtcattgcactgtgaattacagtgctacgaaggaaatgtgtgttaacctggttagcaggtagtactctgcctgagggttaataagtgaactttcctgtaggctagacctggaagcctcctttaagtggagagagaaattggactggtaatgggataggtgagatacctagtattgccttgttctgaggtctcttatttagtactgcttccgggatcttggaggtgatagctatttcctcaaattgtctgatttttcctagtaagaaacccccttcaggaggttgagcttcagtttaaaggggagcatatcccaaaagagagaaaaagtaagatcacgtttgcaaaatctgcagttgcaggcaggtcataaggcttctttatatatggaagtgttctccaaggagctcaaagtactttacagatattcattaaattagtttaccaagtattctagcaaagcaggcactactgccataatttcacaaaaagaggacatcctgactccagtcaaaccacttgcccagaaatgcccaacttgctataaccagagtggaattagtttgctttgaaggtattaatatgggtattgaataatttaaatgacctaagctgagtttaataggctacatttagagttacattttgtttttgttacttgtttttgagacagagtctcgcgcgctgttgtctaggctggagtgcaggggtgcgatcatagctcactgcagccttgaacccctgtgctcaaataagtcttctacctcagcctcctgagtagctgggactataggcacacgccaccatgcttggctaattcttttgatttttagtagagatgaggtcttgctgtgttgcccaggatggtctcaaactcgagttcaagtgatcctcccacctttcccttacaaagcgctgggattacacacgtgagctaccgcacccagcctagagtcacattatgaaatgagagggacacacttggtgggggggagtcacatggtatctgtagagacataagcttcacagttgttacgacttaatgtgaactgtaccagttgaacaaaccagcagttggggttcagcatcgtctcagtcagcgtccttgtcaccccacgtttgcctgaattgttgcagaagcctctgcttggcccagagacccaggtctctcccgtcctcacctctcctcagtccattctgctcccagaagcgcacttgtgttgaatcaaatcattccactgttgcctgtaatctggccttggttgttccaggcctttttctctgtggcttctacgttttcctgctctactcagtctgatgttcttggtttaccaatacacgttgctctccttacctggaagccctgctcccgtttcctcaactaaatgcttgaaaacccatctcagattctcttttctcacaaaccatctcttgatgacttcagtcttctttcaagtcccaccatgatcaatcaatcaatgtttaatgagtacctgctacgtggggtgttataggagttaggaagtttaagaagattttgcctttagttggatggaggtgatgctggagtggatgaagaactctcctgtaatcccagcacgttgggaggccgaggcgggtggatcacgaggtcaggagatcgagaccatcctggctaacacagtgaaaccccgtctctactaaaaaatacaaaaaaatagccaggcgtagtggcgggcgcctgtagtcccagctacacgggaggctgaggcaggagaatggtgtgaacccgagaggtggagcttgcagtgagctgggattgtgccactgcactccagcctcggtgacagagcgagactccgtctccaaaaaaaaaaaaaaaaaagatacaaggcagtgctaaaacgccggcattctctttagggaactggggatgggggaagagatgattcattgaggatactccatttgagctagccattaaataatgggaaaagttggaaaaaaaaaaacactagatggtgatgtggagagagcaaacctgtttggggcacacagtaacagaggtgtttgggaatgagggaagataaggctgggaagttaagaccagattctaccaagtctccaatttccagcccaagaagtttattttatttatttatttatttgagacagagtcttgcactgtcacccaggctggaatgcagtggcacaatctcggctcactgcaacttccgttgcttaggtgcaagcaattctccatcctcagcctcccaagtagctgggactactggtatgtgccactacacctggctcatttttgtatttttagtagagatggggtttcaccatgttggccaggctgttgtcaaactcttgacctcaagtgagccacctgcctcagctccctccaaagtgttgggattacaggcttgagctaccacgcccagcccagccgaagaagtttaaatttctgcagttatcaggccctcattccttctgtactaggtgaaatcggtgttttggtgtcttaagaggcttgatttgatataggtttcatgcgcgtccgtgtgaagagactaccaaacaggctttgtgtgagcaacatggctgtttatttcacctggatgcaggcaggctgagtccgaaaagagagtcagcaaagggtggtggattatcattagttcttacaggttttgggataggcggtgaagttaagagcaatgttttgcgggcagggatggatctcacaaagtacattctcaagggtggggagaattacgaagaaccttcttaagggtgggggagattacaaagtacattgatcagttagggtggggcagaaacaaatcacaatggtggaatgtcatcagttaaggctatttttacttcttttgtggatcttcagttacgtcaggccatctggatgtgtacgtgcaagtcataggggatgcgatggcttggcttgggctcaggcctgacattcctgccttcttatattaataagaaaaataaaacaaaatagtgttgaagtgttggggcagcgaaaatttttgtggggtggtatggagagagaatgggcgatgtttctcagggctgcttcaagtgggattaggggcggcgtgggaacctagagtgggagagattaagccgaagggagatcttgtggggatgttagaagaaacatttgtcgtatagaatgattggtgatggcctggatatggttttgtatgaattgaaaaactaagtggaataagagaaggagaaaaacaggtataaaaggtctaagaattgggaggacctaggacatctgattagagagtgcctaaggagattcagcatagtcctgccagcaaagattatttatttacttcaagagttaagagtggcagtttggggatagcacgaggagatatcacctgtgatggcttggagaaacagtgtaaaccagcagtgtaaacaagagcagggcatgtatgagtagttgagaacgttgaataggagtatgactagacagaagatagtagggatgatgacaggttttttttgggggggggggcacagtctaagttggtctggtgtctggaatgagactggggcctaataaaaaggagcatctatacaggagcttaaatgggctgtaccttgtagcattctgaggacaggtctgacttctgagaagggaaagtggtaaaagtattgtccagtcctttttaagttggtggctgagcttggtgaagtgtttttaaaagacctttagtccgttctgcttttcttgaagacggaggaccgtaagggatataaaggtttcactgaatactaagagcctgagaaactgcttggctgatttgactaataagggctggtctgttagactgtatagaggtgggaaggctaaactgaggaattgtgtctgaccgaagggaagaaatgactgcggtggccttctcagaccctgtaggaaaggcctctacttacctagtgaaagtgtctacttagactaagaggtattttagttatctgactcggggcatgttgagtaaagctaatttgccagtcctgggtgggggcaaatcttcaagcttgatgtgtagggaagggagggggcctgaataatccctgaggagtagtagaatagcagatggaacactgagaagttatttccttgaggatagatttccacaatggaaaggaaatgaggttctaagaggcgggctagtggcttgtactatagcatagcctgcctttgctgctgtgtggcgattaggcctgctggaactgccatcaataaatcaagcgtgatcagggtgaggaacaggaaagaaggaaatatggggaaatggggtgaatgtcaggtggatcagagagatacagtcatgggggtcaggtgtggtatcaggaataatgtgggaggccagattgaggtccgggccaggaacagtggtaattgtgggacttaacaaagagtgagtacagctgaaggagccggggagcagaaagtatatgcatcaggtatgaggaagaaaataatattggaagttatgagaaatgtagagagtgagttgagcatagtttgttatttttagggcctctaaaagtattaaagcagcggcagccactgcaagcagacatgagggctaggctaaaacagtaaggtcaagttgtttgggcagaaagactacagggtgcggtcctggctcttgtgtaagaattctgacacactaaccatgcctaggaaggaaaggagttgttgttttgtaagggattgaggtttgggagattaatcggacacgatcagcagggagagcacgtgtgttttcatgagaattatgccgagataggtaacagatgaggatgaaatttgggcttgactgaagtaatgggggctgtctgtgaagccttgcagcagtacagcccaggtaatttgctgagcctaatggatgtcagggtcagtccaagtgaaagcaaagagaggctgggatgacgggtgcaaaggaattgtaaagaaagcatgtttgagatccagaacagaataatggattgtggagggaggtattgaggataggagagtatatggtttggtaccatggggtggataggcaaaacaatttggttgataaggcatagatcctgaactaacttgtaaggcttgtctggttttaggacaggtaaaatgggggaattgtaaggagagtttataggctttaaaaggccatgctgtagcaggcatgtgataacaggctttactcctttcaaagcatactgtgggatgggatattggcattgagcggggtaagggtgattaggttttaatgagatggtaaggggtgcatgatcggtcgccaaggagggagtagaggtatcttatacttgtgggttaaggtgggggggaatacaagaggaggacgcaaaggaggctttggattggaaagggcagcaatgagatgtagctgtaacccaggaatagtcagggaagcagataatttagttaaagtgtctcggcctaataagggaactgggcaggtggggataactaaaaacgagtgcttaaaagagtattgtctaagttggcaccagagttggggagttttaagaggtttagaagcctggctgtcaatacccacaacagttatggaggcaagggaaacaggcccttgaaaagaaggtaatgtggagtgggtagcctccgtattgattaagaagaggacggacttactctccactgtgagagttacctaaagctcggcatctgtgatggtctatggggcttccgaggcgatcgggcagcgtcagtcttcagccgttaagccgagaagatctgggaaggagtcagagagccttgggccagagttccaggggctctgggagtggctgtcaggtgagttgaacagtccaattttcagtggggtcccacacagatgggactcgcttaggaggaatcccgggctgcgggcattccttggctcggtggccagatttctggcacttgtagcaagctcctgggggaggcagttatggaggaatgcctggccactgcggtttaggcgtttggaagttcttgtgtgctggagatgtagctggggtttgtctcacagtggaggtaaggaattgcaactcagaaatatgttgttacttggctgcctctactctattattgtacaccttgaaggcgaggttaattaagtcctgttgtggggtttgagggccggaatttaatttttggagttttatttaatgtcgggagcagattgggtaataaaacgtatattgagaataagacggccctttgacctcttagggtctagggctgtaaagcgtctcagggttgctgccgaacgagccatgaactgggctggatttttatatttgatgaaaaagagcctaaacgcttctgatttgggataaagaaaaaggagcattaaccttgactatgcctttagctccagccacctttttaagagtaaattgctgggcaggtgggggagggccagtcactgaacgaaactgtaagctggaccaggtgtgaggaggggaggtgataaaaggattctagggtggaggagcagaggctgaggaagaattgggacctagatggcctggcgacgagcagcctgaggagaaggggaaaggtcagatgggtctgtagaaaagactggaaagacccagcgacacttggggttgggactgaggggacaggcgggagggaaagaaggaggatttgggaggaatcgcattgggaacagagacttgagagggaacgaagtgtgaaaaatgcctggatgtgaggcacctcagaccatttgcccattttttgacaaaaattatttaggtcttataggatggagaaatcgaaagtgccgttttctggccatttagagccattgtcaagtttgtactggggccaagcggtgttgcagaagaaaataaggcatttaggttttaggtcaggtgcgagttgacgaggttttaagttcttgagaacacaggctaagggagaaggaggaatggaggctggaaggttgcccatagtaaaggaggcaagcccagagaaaagagagagtagagacacggagggaaggggttcgagggttcttaccctccagaaaagcaggaaaggggtcagggtgtggaaataagggattggggcacacagataagaggtcggggtgcggaaataagggattgggggttcttgccccctagaaaagcgggacttaccgctaagggtgaaggagaaggggttgaggggtacttgcccctcccccagaaatgcagagaaggggtagagacacggagagaaggggttgtggtacttgcccctcccccagaaaagcaggacttgccgctaagggtgaaggaccaaggcaggcgtccctgagtggtctgacacctttgaaacgtgagtgaataatcagagaggtgtccctgcaatgattaaacaccaaggaaaggctgccttcccagtctgtgaccagcgccagagttttgggtccacggataaaacgtgtctcgtttgtctctaccagaaaatgaaaggaattgaaattaagagaagggagagattgaagagtggaaaggagaaagtggttgagggatagtgagagaggttggagaagagagtaagaagaggccgcctacctgatttaaaattggtgagatgttccttgggctggtgggtctgaggacctgaggtcgtaggtggatctttttcacggagcaaagaacaggaggacaggggattgatctcccaagggaggtcccgcgatccgagtcatggcaccaaatttcatgcgcgtccatgtgaagagaccaccaaacaggctttgtgtgagcaacatggctgtttatttcacctggatgcaggcgggctgagtccgaaaagagagtcagcaaatggtgtggtggattatcattagttcttataggttttgggataggcggtgaagttaagagcaatgttttgcgggcagggatggatctcacaaagtacattctcaagggtggggagaattacgaagaaccttcttaagggtgggggagattacaaagtacattgatcagttagggtggggcagaaacaaatcacaatgctggaatgtcatcaggtaaggctatttttacatcttttgtggatcttcagttacttcaggccatctggatgtatacgtgcaagtcataggggatgccatggcttggcttgggctcagaggcctgacaatagggactttacataggattaggatggattagaacagaagttctagaagcaggtgagaaggagtggagggtagggataaggaaggaagggatttaagaagacattgagaaggaaaggaccacaagactgagaggaatggatgaggagagagggaagaaggagtcaaaaaagaggtgggggaataggggacttttggaaggtgcagcatttataggaatagtgacttaatagaccacatgcagtggctcattcctgtggtcccagctactcaggaggctgaggtgggagcatcgcctgagcccaggagttggaggctacagtgagccatgatcgcctactgcagcccggggcaatagagtgagacccccatctctaaaaaaagaacaagcacacgcctgtgggtggtcccagctactcaggaggttgaggtgggaggatcacttgagcctgggaggcagagactgcagtgagctgtaagagccactgcactccaacctgggtgacagagtgagaccccgtctcaaacaacaaaaaagaaaaaaaaaaacgaaagacgccaggcactgggactcacacctgtaatcctagcaccttgggagttaaaggcaggcagattgcttgagcctaggagttcaagaccagcctgagcaacatggcaaaattctgtctctaccaaaagtacaaaaaattagctaggtgtgatgtgagtgtctgtggtcccagctaggctgaggtagaagaatcatctgagcctgggaagttgaggctacagtgaagccatgatcgcaccactgcactcttgcctgagtgacagagtgagaccctgtctcaaaaaagaaaaaaaaaggaagaagaaaaagaaatggggaagtcaggaaaaagaagtgatgcttttttttttttttttttttttgagaaggagtctcactctagtcgcccaggctagagtgcagtggcacaatctcagctcattgcaacctctgccgcctgggttaaagcgattctcctgcctcagcctcccaagtagctgggattacaggcgcctgccacttcgcctggctaatttttgtagttttagtagagacagggtttcactatcttagccaggctggtcttgaactcctgacctcgcgatccacccacctcagcctctcaaaatgctgggattgcgggtgtgagccaccgtgcctgggccatacatttgtttttacactcatttctgtaccaaattagcccaattatctactgtcttgttttttgaactgattttttttttttttcatgtattgaaccaggagagcacagcctccttgagggtaaaatctgtgtctggaactttttctgtagtccctccagggtctggcatgctgacatgctgtttacttcattgtctgcgggtgcttaacaaagacttggtgattgactaagtttgtgtttccattcaggaccctagtgaaggttgacctttattccctttccagcccatgttcttgcttctgcttgtttgtaagtcatttgttacgtagatttttctttttggagatggagcctcactctgtggcccaggctggagtgcaatggcctgatctcagctcactgcagcctctgcctcctgggttcaagtggttctcctgccttagcctcctgagtagctgggatcacaggtgcgcggaaccatgcccagctaattttgtgtttttagtagagatggggtttcaccatgttggtcaggctggtctcgaactcctaacctcacgcaggtgatccgcctgcctcggcctcccaaagtgctgggattacaggcgtgagccaccgtgcccagaccatatgtatataattttttttttttttttttttggagatggagtctcactctgttgcccaggctggagtgcagtggtacaatcatggctcactgcaacctctgcctcctgggttcaagcagttctccagcctcagccttcaagtagctgagattacaggtgtgtgctaccgtgcctagctaattttagtatttttagtagagacaggatttcaccatgttgaacaggctggtcttgaactcctgacctcaaatgatccacctgccttggcctcccaaagtgctgagattacgggcgtgagccaccgcatccagcctgctatgtagatcttgttttctctggaatgtttgagccgtgctggaatggggtacccaatgctgctgtttccatccccacatgacgttttaagtcccacgagagtaggctagcgatggagtgaagctgaaaaatgaaagcaggaaatccagagacacagaaacagatgaggctttcaacagagactcgaaaatagacagaaaccatgagtcagagcagagcccggaggggcggttcgggaaggcaaggtctataggggaagctcgggtgtcacctctatgccaggtgaaggaaatgttgagtgggtgggaggctgtgtgcatctgctggggaggcagtaggcagatggaaagatcaagtcacccagaattatccccagaggttccttcccgttcctgtgggcgggtgagctctgctttctgagctgcccagagagctggaggagatagacatggaactgaccattgcagaaactagggctttttgtgcccgtgagtaggcaaagagctccctgtggatttgccataaaaaggtctatcaaggtggaagaaagtgagattctagagaaattaatacaagtgaaaagtgggcaggagtgttcttggaagtagaaatgctgttggaagtctaatagacttgggaagaagataacgtatggtgaataccagttgcttcgggggttggggggatccacattttactctgtactcagaagatgcttttccccgtgcaaaaagtgaaagtgagtgggccagtttttcttctgtcacaaggtgtatgactgttcccaaaataatagccctgggggatggggattgcttctcagaccattcaatttttgtaccctgtagacttttggtgttatgtgagaactttaagcacctgataggaattagtaacagagctacgctaatgcctgaggaaatttcagacaattggtgggagagacttggcatttggaatgtgatagctggtaggctaccatacagtaatgcaggattgccagacatttctttccaaatggctacccttgattacatttaactcccctcctttcaagctccagattttgaaggacctgttaattctctttcaagattgaagacagacaccttctttttcttctaaagaggaacctaggcggggtgcggtggctcccgcctgtaatcccagcactttgggaggccagggctggtcttgacctccttacctgaggtcaggaggcctggccaccatggcgaaaccccatctctactaaaaatacaaaaagtagccaggcatagtggcgcatgcctataatcccagctactcgggaggctgaggcaggagaatagctcgaacctgggaggtggaggttgcagtgagcctagatcgcgccactgcactccagcctgggtgacacagcgagactcaatctcaaaataaataaataaataaatatgaacctaaaccatcagaatcttccccttgcagccacaacagaaacactgccggggaggccgagccccgacctgggaagcagggtgatacactgggtgccacgggccttccctctgcctggcagctgtcgctactcagatccctgcagccctgttgccagtgaaggagctggagtctctgttatgatgtgttcatccagctggtgagtttttttttttttgttttgttttttttgtttttgtttttgttttttttttagacagagttttcacttgttgcccaggctggagtgcaatggcacgatctcggctcaaggcaacctctgcctcccaggttcaagcgattttcctgcctcagcctcctgagtagctgggactacaggcatgtgccaccatgcccagctaattctgtatttttagtagtgatggggtttctccatgttggtcaggctggtcttgaactcctgacctcaggtgatccgcctgcctcggcctcccaaagtgttgggattacaggcgtgagccactgcacccggcccagctggtgattttttttttttttttttttttttttgagacggagtctcgctgtcgcccaggctggaatgcagtggtgcgatctcagctcactgcagactccaccccccgggttcgcgccattctcctgcctcagcctaccgagtagctgggactacaggcgcccgccaccttgcccagctaactttttgtatttttagtagagagggggtttcaccgtgttaaccaggatggtctcgatctcctgacctcgtgatccgcccgcctcggcctcccaaagtgctgggattacaggcgtgagccaccacgcccggccccgtagctggtgatttttaaagttaacaaaatacaattatgagaaatcagaattcagaaagtaatgacagagagggccttgtcgggaggggctctgacaccctgctttgggccctcatagagatctggggagggagcaggagtgttttaaggggtgtgcgtcttcagccttccatttgtcttcagaacccaaagccctaaatttagcaaacagctggagagtgctttctgaagagggaggctctggacctgaatcagagatgggaacccatgtaaccaccctcagctgggctcttcagtgtaatcacaggtttgggaaggtaactgaggagagcccatgccaaatatcagaactttgcatttggtgcctggattttaaatcccaggggccctctgagaactctagtacttgtgtttgtgcttgaccatggaaggccattagagcctgggggtgctagatactcaagctgcaatcccaggcaagttgcacggtgaccagggcttagtaggggctaagtaaatgttgttggcttgacaatgatgagcattatgtgcaatttcaaaaacacttaaagcattatggaaggctaggtctggaaaaaccttttgacaggtatgtggaaaatattcgctgggcgcggtgactcacgcctgtaatcccagcactttgggaggccaaggcgggccgatcacctgaggtcgggagtttgagaccagcctgaccaacatggagaaaccccgtctctaccaaaaatacaaaattagttgggcatggtggtatgcacctgtagtcccagctacttgggaggctgaggcaggagaatcacttgaacccgggaggcagaggctgcaatgagccgagatcgtgccactgtactacagcctgggcaacaagagcgagactccatgtcaaaaaaaaaaaaaaaatttgtggttacaaatatgtatttttttatctagttcagtctgatttcagtttccccaaaaacccttcttgaccatctccacttgcttaacactgagctcatttttatatagctggagttccctttattatctttacatgtttcatgtaggcatttttttgggaatattttaattatttgtgtttgtccttttgaccttgattccactctaagcttcatgagacagaatttgttttctcttttatttgtgactttcaaaatactggacagaaagcagtatttgtatttgctctccgactgaattttttttttttctgtctccttgctactgactgttctactgaggcttctctattagagagtaaagttgaaagcaaactcttagtgcttaaaacttgcgaagaaaaccttccattgcatcctcattgctcttcctaacacttgtcctcttctttgttgtgttgcaagataaagccaccaatccttccaaccgccaggaggactgggaatacataattggcttctgtgatcagatcaacaaggagctggaagggtgagtctcagcactgtgggggcagctgagagggagcggactgggaaggggaacaaccatggccaaggagggccagccaggtagccccaggcttagtgcactggagtgtgttctgcttgtcccccaggccacagatcgccgtccgactgctggcccacaagatccagtccccacaggaatgggaggcgctccaggccctgacggtaggtccttcactctccggaggtggaaaccgcagcccttcacctgcccacgccattcctcgtgtccccatagcggttcttagggctcctgccaaaagccaacagaaagtccttgatacagactagatagatctcgaatctgttcagccagctgttccacaaatctgtgtgcattgtgccaggccctgaggcctcagaggtgactgcagtgccgtccctgccagcatggccacatggttagtgtgtgaggcagaggggctaaggaaagcagcccagagtcagggccctgagccccatgtggcgcaagagaaggcttggtgaagagatgctgacagggctgtgttgatagttcagagctggccagctgaagaaaagaggggtcggtccagttcattctgtagttaaacaatgccagtcactagcgaaggtgtcgcactgatggctgaggcccctagggcagatcctggtgtctgttcagactgagggaatttaaggtgtggaatggtgcctggccctcagtgcctccacatgctccgaaaacaaagagcagccgagatctgaggaatccggggctctagcctgactgcattcaggtcctggaaagcgaaaagaggaaatatcatctggttcacatgcacccctcagtcatatttgctgtagaacgaattccttaaaacagtgattctcagcagggcacggtggcttgtacctatagtcccagcaccctgtggggcctaggccgggaggatcgcttaagggaattcaagaccagcctaggcaacgtagtgagacattgtctctacaaaaaataaaaaaatcagccaggcacggtggcacacacctgtggtcccagctcctcgggaggctgaggttgaaggatggcttgagcctgggaagttgaggcgaaagtgagtggtgatcacaccgttgcactctagcctgaccaacatagcgagattctgtgtcaaaaaacaaaaaaaaaacgtaacaaaacccagtgattctcaacagggccctccagggaacatttggcagtgtctggaaacatttttagttgtcacacatcggggtgggggtcctcctggcatcaagtaggcagaggccagggatgctgttcgacaccctataaagtgcagagtggccccccacaacgaagaatgaccagcccaaaatgtcagccaggcctcacctgagaaaccttgctttaaaatgcagaagccaagaaagagagcctggacagtgcactcccccttagaaaccgcagtgccagggaccacaggcagcacaggaaagccaaagcgtgagttagggagataagcggagggaggagaaatatcctgtcatctttctcacagataataggatttaaacatccctcccattccctgcacaattgttggtgagcttgtggaaaaaacccaggacaccaagtcagagaaactttgtccctggacctcacctccctcattgtaaaacacgaggccagaatctttaaggaaggcaccttccaggactggcatccaggccttcttggggtcggggtctcggggtttcttgctttagtccctgcccagcttccccagcagaggtttgcagttggagggacatggtctgtgagtgatctcgttgcttaattacactgtccccgggcagtgcacactgcttttcgtgatgagctccttcctgtgggcgtgtttattcagtactctctgggtgccagggatcttgccagtgccaggttccagccccgagcacgccctcactgagcgcctctcctctgtgcggctacaggtgctggaggcatgcatgaagaactgtgggaggagatttcataacgaagtggggaagttccgctttttgaatgagttaatcaaagtcgtctctccaaaggtcagtcagcggcagattcctcgcttttagggacttcttttgtgttcattcccatctcccatcatactggctttcactgcccatccaacatctccagggagctgagattatttgtgtcttgtccttagagagctaggccctggaggtaacgggatgaccaaacaggccacagggaccggcagctttttctgaagcgccctcagcccaaatctgacaggtgatgtggtagtggctgtgtgtttgtccagggtgagggcccatgtagtgtgggactctaggcacctggcacatggcagttgtgggttttgtgggttttcttggcctgtgtcacgtggatacggggagctggcctccgtcattgctccgatgctcagctggccgtgttctgttgcacgctggtgtggcgcagctctgggcccccacttaaagcagagggaatactttaccatgctaaagacattctcatggacacccccaagataaaatgcagttgtgtttctggcaacttgtgcgtgaaaatgcactttcctcagaactcaaaatatccacccaaccatggcctgcaccacatgggcatcagggtcacaaggaagcctctctgtcttgatgtccccaaggtagtaaggaaaggcagagagcaggggtgagcaccgagggcatggtctctggtgtcagactcaggtttccatccggcccttacaccctgggcaagttagatgatcccaggcggcaaatggggacgccacccctactgacgtggctgctgtgcagatgagtaaggtcatgaatacacttacaggacacttcctggacaggaggtgatgacctcctggccccctgcctatccacagactgtatccagatggacacagccacaccacagggagtcgttcccctccccacgctgtctcacacacacttggacacctgcagattttgagtaggaccatagctgctgagcagccacgccattgctgtggagggagccttacactttctctgcctccgaactgcacttactaggtcctcattttcttttgccatgtagtacctgggggacagggtgtctgagaaagtgaagaccaaggttattgagctgctg

SEQ ID NO: 12202 - DNA, 560 bp, Homo sapiens
aattcaggcccttgtcccaagtaggaggacattccccaagcaggcgggtaaagtctcctcctggtcaagtgctaacgccacaacagaaacactgccggggaggccgagccccgacctgggaagcagggtgatacactgggtgccacgggccttccctctgcctggcagctgtcgctactcagatccctgcagccctgttgccagtgaaggagctggagtctctgttatgatgtgttcatccagctgataaagccaccaatccttccaaccgccaggaggactgggaatacataattggcttctgtgatcagatcaacaaggagctggaagggccacagatcgccgtccgactgctggcccacaagatccagtccccacaggaatgggaggcgctccaggccctgacggtgctggaggcatgcatgaagaactgtgggaggagatttcataacgaagtggggaagttccgctttttgaatgagttaatcaaagtcgtctctccaaagtacctgggggacagggtgtctgagaaagtgaagaccaaggttattgagctgctg

SEQ ID NO: 12203 - DNA, 2017 bp, Homo sapiens
tctcatccccaccaccaccccagccaggcccctcctgcccttctccacggggcccggcagcccgctcttccagccactgagtttccagtcccagggcagccccccgaaggggcctgagctctccctggccagcatccacgtgcccctggaatcgatcaagcctagtaggtgttggaggattgaggtgggtggggcggtggggcctatagccacggagctgtaggacatgcgacagggatggatccaggcactctttgcagggggtcccttaaagccaggcaggcctccctgcctgcattctcagtcttaagctcctcactgagcgcctctcccagattccgttaggaagcactggactcatcatgaccacggagtagcccttttctcctcaccgccggggctctgttgggtgtctctggtgctgctcctcccacactcacgtcacgttcttacaggcagtgcccttcctgtgacagcctacgataaaaacggcttccgcatcctcttccactttgccaaggagtgtcccccaggacgacctgacgtgctggtggtggtggtgtccatgctgaacacggctcccttacctgtcaagagcatcgtgctgcaggctgcagtgcccaaggtaccagtgtctccctggggccaaaacggccttatcttgaccctgttgtgtagaggcctttgcagccagcaggtggcagtgtgtgtgtgcactgcaggttccatctgggggcacctaccagttctcttcaaaggagtttctctctctttagtcaatgaaagtgaagttgcagccaccttctgggacagaactctctccatttagccccatccagccacctgcagccatcacccaggtcatgttgctggccaatccactgaaggtgagcagcaaagaacccaggggtcccagcctgaggccccagctgccccagattaggacgtcaggcccaccacctcccagctggaagtgttttgactgtaggattgacacatccctttgctgccttaggttaagtgtctgagcatggttgggggttgcggggaaaagggaccattcctctagcacagagagggtagcagaatagagggcgtcctgccaaggggccgcctgggctggatctcacttgctgccctctgtcacaggagaaggtgcggcttcggtataagctgaccttcgccctgggggagcagctgagcacagaggtgggcgaggtggaccagttccctcctgtggaacagtgggggaacctatgaccccagaggacgctgtgatctccaccttgaagccaggcaggctgccctgagacgaggagggctctggtcccgtcactctccatgccctgacaacagtgcttgtagctttgatgtggaacaggggccctgggcatttctgctgagaaccaaactgctgctgtgataacctctcctttggcccctaaaaggacctgtttttatctacctgtgtgacttgaagtggccatatgctgtcaggggtgcggagtggcccctgacttcactgctgtcccgggaacatggacccccaggcttggcgtaggtgtttgcttccttctactggcattcactgaagccactggggtggggggtggggggtgggagtctctaaagagagactgtcatgggtcattccccacaagagccacatcctcacacctgacagatgcacggcccaaggggctgcagccctgttgcaattccatgcttcccccgccaaccagctcctgctgccatccccagggaggtggcccaggaaggtgcctggcccagaataaggaactggcatactgcaaagtccccagccctgcctctggtggacagcatcgtcctggaatggccacggagtgatgagttgtgtgcttgtccctggcagtggcaggctgtgtcctatggacatcttggcaggacatggaatttggcctcatgacaggcccaactagggataggaaggaaaatgaagagagccagtatttccccttctccagaagcaggtact

SEQ ID NO: 12204 - DNA, 829 bp, Homo sapiens
tctcatccccaccaccaccccagccaggcccctcctgcccttctccacggggcccggcagcccgctcttccagccactgagtttccagtcccagggcagccccccgaaggggcctgagctctccctggccagcatccacgtgcccctggaatcgatcaagcctagcagtgcccttcctgtgacagcctacgataaaaacggcttccgcatcctcttccactttgccaaggagtgtcccccaggacgacctgacgtgctggtggtggtggtgtccatgctgaacacggctcccttacctgtcaagagcatcgtgctgcaggctgcagtgcccaagtcaatgaaagtgaagttgcagccaccttctgggacagaactctctccatttagccccatccagccacctgcagccatcacccaggtcatgttgctggccaatccactgaaggacctgtttttatctacctgtgtgacttgaagtggccatatgctgtcaggggtgcggagtggcccctgacttcactgctgtcccgggaacatggacccccaggcttggcctcctgctgccatccccagggaggtggcccaggaaggtgcctggcccagaataaggaactggcatactgcaaagtccccagccctgcctctggtggacagcatcgtcctggaatggccacggagtgatgagttgtgtgcttgtccctggcagtggcaggctgtgtcctatggacatcttggcaggacatggaatttggcctcatgacaggcccaactagggataggaaggaaaatgaagagagccagtatttccccttctccagaagcaggtact

SEQ ID NO: 12205 - DNA, 19925 bp, Homo sapiens
tgcaatatggcggaggcggaaggggaaagcctggagtcctggctcagtgagtagccgcggccgtttctgcctgccctcgagccgctgggctgcccctgtcttcacccccacgtcccctccccgggctccacggcgtcgcctcttggcagcccacgcccggtctcgccctcgccgcgagcagcctgcgatcacgccccttccctatcagggcgccgggccccagtccggcccccgcttccctcgctgcggcgcgtcctcttgctctggcgcgcggcggcgtgaactcgggctcctgtcgggcaccgcaggctcggggaaaggcgacagccaagatcttcgggctgacatgcttcggcgctttggggagattgtggtggggtcgccgcccggcggtgacaccaggaacccagcgccccaatccctgactaagggagaagcttcggattggggctgagtctccggtagtggtgggtgctgccgactgcgttcagtcgcctggcagcttcagaattgtgaccatgtgttggagaagtgacggcttcgctcaggcagaatgcttgaagtgagaataatattccaaagagagcgatgatagagaacagagagctctacctttttcctgcagtgaccacagaagcatggtgaaatcggtgtcgggaattccccccccacacacatacatatacccccttgaatatcctaacgagtcagtgttgatagcctattctgagtaaggctgaggagcacagtctgaagctgtagttatagaagcgtattgctgtcattgcactgtgaattacagtgctacgaaggaaatgtgtgttaacctggttagcaggtagtactctgcctgagggttaataagtgaactttcctgtaggctagacctggaagcctcctttaagtggagagagaaattggactggtaatgggataggtgagatacctagtattgccttgttctgaggtctcttatttagtactgcttccgggatcttggaggtgatagctatttcctcaaattgtctgatttttcctagtaagaaacccccttcaggaggttgagcttcagtttaaaggggagcatatcccaaaagagagaaaaagtaagatcacgtttgcaaaatctgcagttgcaggcaggtcataaggcttctttatatatggaagtgttctccaaggagctcaaagtactttacagatattcattaaattagtttaccaagtattctagcaaagcaggcactactgccataatttcacaaaaagaggacatcctgactccagtcaaaccacttgcccagaaatgcccaacttgctataaccagagtggaattagtttgctttgaaggtattaatatgggtattgaataatttaaatgacctaagctgagtttaataggctacatttagagttacattttgtttttgttacttgtttttgagacagagtctcgcgcgctgttgtctaggctggagtgcaggggtgcgatcatagctcactgcagccttgaacccctgtgctcaaataagtcttctacctcagcctcctgagtagctgggactataggcacacgccaccatgcttggctaattcttttgatttttagtagagatgaggtcttgctgtgttgcccaggatggtctcaaactcgagttcaagtgatcctcccacctttcccttacaaagcgctgggattacacacgtgagctaccgcacccagcctagagtcacattatgaaatgagagggacacacttggtgggggggagtcacatggtatctgtagagacataagcttcacagttgttacgacttaatgtgaactgtaccagttgaacaaaccagcagttggggttcagcatcgtctcagtcagcgtccttgtcaccccacgtttgcctgaattgttgcagaagcctctgcttggcccagagacccaggtctctcccgtcctcacctctcctcagtccattctgctcccagaagcgcacttgtgttgaatcaaatcattccactgttgcctgtaatctggccttggttgttccaggcctttttctctgtggcttctacgttttcctgctctactcagtctgatgttcttggtttaccaatacacgttgctctccttacctggaagccctgctcccgtttcctcaactaaatgcttgaaaacccatctcagattctcttttctcacaaaccatctcttgatgacttcagtcttctttcaagtcccaccatgatcaatcaatcaatgtttaatgagtacctgctacgtggggtgttataggagttaggaagtttaagaagattttgcctttagttggatggaggtgatgctggagtggatgaagaactctcctgtaatcccagcacgttgggaggccgaggcgggtggatcacgaggtcaggagatcgagaccatcctggctaacacagtgaaaccccgtctctactaaaaaatacaaaaaaatagccaggcgtagtggcgggcgcctgtagtcccagctacacgggaggctgaggcaggagaatggtgtgaacccgagaggtggagcttgcagtgagctgggattgtgccactgcactccagcctcggtgacagagcgagactccgtctccaaaaaaaaaaaaaaaaaagatacaaggcagtgctaaaacgccggcattctctttagggaactggggatgggggaagagatgattcattgaggatactccatttgagctagccattaaataatgggaaaagttggaaaaaaaaaaacactagatggtgatgtggagagagcaaacctgtttggggcacacagtaacagaggtgtttgggaatgagggaagataaggctgggaagttaagaccagattctaccaagtctccaatttccagcccaagaagtttattttatttatttatttatttgagacagagtcttgcactgtcacccaggctggaatgcagtggcacaatctcggctcactgcaacttccgttgcttaggtgcaagcaattctccatcctcagcctcccaagtagctgggactactggtatgtgccactacacctggctcatttttgtatttttagtagagatggggtttcaccatgttggccaggctgttgtcaaactcttgacctcaagtgagccacctgcctcagctccctccaaagtgttgggattacaggcttgagctaccacgcccagcccagccgaagaagtttaaatttctgcagttatcaggccctcattccttctgtactaggtgaaatcggtgttttggtgtcttaagaggcttgatttgatataggtttcatgcgcgtccgtgtgaagagactaccaaacaggctttgtgtgagcaacatggctgtttatttcacctggatgcaggcaggctgagtccgaaaagagagtcagcaaagggtggtggattatcattagttcttacaggttttgggataggcggtgaagttaagagcaatgttttgcgggcagggatggatctcacaaagtacattctcaagggtggggagaattacgaagaaccttcttaagggtgggggagattacaaagtacattgatcagttagggtggggcagaaacaaatcacaatggtggaatgtcatcagttaaggctatttttacttcttttgtggatcttcagttacgtcaggccatctggatgtgtacgtgcaagtcataggggatgcgatggcttggcttgggctcaggcctgacattcctgccttcttatattaataagaaaaataaaacaaaatagtgttgaagtgttggggcagcgaaaatttttgtggggtggtatggagagagaatgggcgatgtttctcagggctgcttcaagtgggattaggggcggcgtgggaacctagagtgggagagattaagccgaagggagatcttgtggggatgttagaagaaacatttgtcgtatagaatgattggtgatggcctggatatggttttgtatgaattgaaaaactaagtggaataagagaaggagaaaaacaggtataaaaggtctaagaattgggaggacctaggacatctgattagagagtgcctaaggagattcagcatagtcctgccagcaaagattatttatttacttcaagagttaagagtggcagtttggggatagcacgaggagatatcacctgtgatggcttggagaaacagtgtaaaccagcagtgtaaacaagagcagggcatgtatgagtagttgagaacgttgaataggagtatgactagacagaagatagtagggatgatgacaggttttttttgggggggggggcacagtctaagttggtctggtgtctggaatgagactggggcctaataaaaaggagcatctatacaggagcttaaatgggctgtaccttgtagcattctgaggacaggtctgacttctgagaagggaaagtggtaaaagtattgtccagtcctttttaagttggtggctgagcttggtgaagtgtttttaaaagacctttagtccgttctgcttttcttgaagacggaggaccgtaagggatataaaggtttcactgaatactaagagcctgagaaactgcttggctgatttgactaataagggctggtctgttagactgtatagaggtgggaaggctaaactgaggaattgtgtctgaccgaagggaagaaatgactgcggtggccttctcagaccctgtaggaaaggcctctacttacctagtgaaagtgtctacttagactaagaggtattttagttatctgactcggggcatgttgagtaaagctaatttgccagtcctgggtgggggcaaatcttcaagcttgatgtgtagggaagggagggggcctgaataatccctgaggagtagtagaatagcagatggaacactgagaagttatttccttgaggatagatttccacaatggaaaggaaatgaggttctaagaggcgggctagtggcttgtactatagcatagcctgcctttgctgctgtgtggcgattaggcctgctggaactgccatcaataaatcaagcgtgatcagggtgaggaacaggaaagaaggaaatatggggaaatggggtgaatgtcaggtggatcagagagatacagtcatgggggtcaggtgtggtatcaggaataatgtgggaggccagattgaggtccgggccaggaacagtggtaattgtgggacttaacaaagagtgagtacagctgaaggagccggggagcagaaagtatatgcatcaggtatgaggaagaaaataatattggaagttatgagaaatgtagagagtgagttgagcatagtttgttatttttagggcctctaaaagtattaaagcagcggcagccactgcaagcagacatgagggctaggctaaaacagtaaggtcaagttgtttgggcagaaagactacagggtgcggtcctggctcttgtgtaagaattctgacacactaaccatgcctaggaaggaaaggagttgttgttttgtaagggattgaggtttgggagattaatcggacacgatcagcagggagagcacgtgtgttttcatgagaattatgccgagataggtaacagatgaggatgaaatttgggcttgactgaagtaatgggggctgtctgtgaagccttgcagcagtacagcccaggtaatttgctgagcctaatggatgtcagggtcagtccaagtgaaagcaaagagaggctgggatgacgggtgcaaaggaattgtaaagaaagcatgtttgagatccagaacagaataatggattgtggagggaggtattgaggataggagagtatatggtttggtaccatggggtggataggcaaaacaatttggttgataaggcatagatcctgaactaacttgtaaggcttgtctggttttaggacaggtaaaatgggggaattgtaaggagagtttataggctttaaaaggccatgctgtagcaggcatgtgataacaggctttactcctttcaaagcatactgtgggatgggatattggcattgagcggggtaagggtgattaggttttaatgagatggtaaggggtgcatgatcggtcgccaaggagggagtagaggtatcttatacttgtgggttaaggtgggggggaatacaagaggaggacgcaaaggaggctttggattggaaagggcagcaatgagatgtagctgtaacccaggaatagtcagggaagcagataatttagttaaagtgtctcggcctaataagggaactgggcaggtggggataactaaaaacgagtgcttaaaagagtattgtctaagttggcaccagagttggggagttttaagaggtttagaagcctggctgtcaatacccacaacagttatggaggcaagggaaacaggcccttgaaaagaaggtaatgtggagtgggtagcctccgtattgattaagaagaggacggacttactctccactgtgagagttacctaaagctcggcatctgtgatggtctatggggcttccgaggcgatcgggcagcgtcagtcttcagccgttaagccgagaagatctgggaaggagtcagagagccttgggccagagttccaggggctctgggagtggctgtcaggtgagttgaacagtccaattttcagtggggtcccacacagatgggactcgcttaggaggaatcccgggctgcgggcattccttggctcggtggccagatttctggcacttgtagcaagctcctgggggaggcagttatggaggaatgcctggccactgcggtttaggcgtttggaagttcttgtgtgctggagatgtagctggggtttgtctcacagtggaggtaaggaattgcaactcagaaatatgttgttacttggctgcctctactctattattgtacaccttgaaggcgaggttaattaagtcctgttgtggggtttgagggccggaatttaatttttggagttttatttaatgtcgggagcagattgggtaataaaacgtatattgagaataagacggccctttgacctcttagggtctagggctgtaaagcgtctcagggttgctgccgaacgagccatgaactgggctggatttttatatttgatgaaaaagagcctaaacgcttctgatttgggataaagaaaaaggagcattaaccttgactatgcctttagctccagccacctttttaagagtaaattgctgggcaggtgggggagggccagtcactgaacgaaactgtaagctggaccaggtgtgaggaggggaggtgataaaaggattctagggtggaggagcagaggctgaggaagaattgggacctagatggcctggcgacgagcagcctgaggagaaggggaaaggtcagatgggtctgtagaaaagactggaaagacccagcgacacttggggttgggactgaggggacaggcgggagggaaagaaggaggatttgggaggaatcgcattgggaacagagacttgagagggaacgaagtgtgaaaaatgcctggatgtgaggcacctcagaccatttgcccattttttgacaaaaattatttaggtcttataggatggagaaatcgaaagtgccgttttctggccatttagagccattgtcaagtttgtactggggccaagcggtgttgcagaagaaaataaggcatttaggttttaggtcaggtgcgagttgacgaggttttaagttcttgagaacacaggctaagggagaaggaggaatggaggctggaaggttgcccatagtaaaggaggcaagcccagagaaaagagagagtagagacacggagggaaggggttcgagggttcttaccctccagaaaagcaggaaaggggtcagggtgtggaaataagggattggggcacacagataagaggtcggggtgcggaaataagggattgggggttcttgccccctagaaaagcgggacttaccgctaagggtgaaggagaaggggttgaggggtacttgcccctcccccagaaatgcagagaaggggtagagacacggagagaaggggttgtggtacttgcccctcccccagaaaagcaggacttgccgctaagggtgaaggaccaaggcaggcgtccctgagtggtctgacacctttgaaacgtgagtgaataatcagagaggtgtccctgcaatgattaaacaccaaggaaaggctgccttcccagtctgtgaccagcgccagagttttgggtccacggataaaacgtgtctcgtttgtctctaccagaaaatgaaaggaattgaaattaagagaagggagagattgaagagtggaaaggagaaagtggttgagggatagtgagagaggttggagaagagagtaagaagaggccgcctacctgatttaaaattggtgagatgttccttgggctggtgggtctgaggacctgaggtcgtaggtggatctttttcacggagcaaagaacaggaggacaggggattgatctcccaagggaggtcccgcgatccgagtcatggcaccaaatttcatgcgcgtccatgtgaagagaccaccaaacaggctttgtgtgagcaacatggctgtttatttcacctggatgcaggcgggctgagtccgaaaagagagtcagcaaatggtgtggtggattatcattagttcttataggttttgggataggcggtgaagttaagagcaatgttttgcgggcagggatggatctcacaaagtacattctcaagggtggggagaattacgaagaaccttcttaagggtgggggagattacaaagtacattgatcagttagggtggggcagaaacaaatcacaatgctggaatgtcatcaggtaaggctatttttacatcttttgtggatcttcagttacttcaggccatctggatgtatacgtgcaagtcataggggatgccatggcttggcttgggctcagaggcctgacaatagggactttacataggattaggatggattagaacagaagttctagaagcaggtgagaaggagtggagggtagggataaggaaggaagggatttaagaagacattgagaaggaaaggaccacaagactgagaggaatggatgaggagagagggaagaaggagtcaaaaaagaggtgggggaataggggacttttggaaggtgcagcatttataggaatagtgacttaatagaccacatgcagtggctcattcctgtggtcccagctactcaggaggctgaggtgggagcatcgcctgagcccaggagttggaggctacagtgagccatgatcgcctactgcagcccggggcaatagagtgagacccccatctctaaaaaaagaacaagcacacgcctgtgggtggtcccagctactcaggaggttgaggtgggaggatcacttgagcctgggaggcagagactgcagtgagctgtaagagccactgcactccaacctgggtgacagagtgagaccccgtctcaaacaacaaaaaagaaaaaaaaaaacgaaagacgccaggcactgggactcacacctgtaatcctagcaccttgggagttaaaggcaggcagattgcttgagcctaggagttcaagaccagcctgagcaacatggcaaaattctgtctctaccaaaagtacaaaaaattagctaggtgtgatgtgagtgtctgtggtcccagctaggctgaggtagaagaatcatctgagcctgggaagttgaggctacagtgaagccatgatcgcaccactgcactcttgcctgagtgacagagtgagaccctgtctcaaaaaagaaaaaaaaaggaagaagaaaaagaaatggggaagtcaggaaaaagaagtgatgcttttttttttttttttttttttgagaaggagtctcactctagtcgcccaggctagagtgcagtggcacaatctcagctcattgcaacctctgccgcctgggttaaagcgattctcctgcctcagcctcccaagtagctgggattacaggcgcctgccacttcgcctggctaatttttgtagttttagtagagacagggtttcactatcttagccaggctggtcttgaactcctgacctcgcgatccacccacctcagcctctcaaaatgctgggattgcgggtgtgagccaccgtgcctgggccatacatttgtttttacactcatttctgtaccaaattagcccaattatctactgtcttgttttttgaactgattttttttttttttcatgtattgaaccaggagagcacagcctccttgagggtaaaatctgtgtctggaactttttctgtagtccctccagggtctggcatgctgacatgctgtttacttcattgtctgcgggtgcttaacaaagacttggtgattgactaagtttgtgtttccattcaggaccctagtgaaggttgacctttattccctttccagcccatgttcttgcttctgcttgtttgtaagtcatttgttacgtagatttttctttttggagatggagcctcactctgtggcccaggctggagtgcaatggcctgatctcagctcactgcagcctctgcctcctgggttcaagtggttctcctgccttagcctcctgagtagctgggatcacaggtgcgcggaaccatgcccagctaattttgtgtttttagtagagatggggtttcaccatgttggtcaggctggtctcgaactcctaacctcacgcaggtgatccgcctgcctcggcctcccaaagtgctgggattacaggcgtgagccaccgtgcccagaccatatgtatataattttttttttttttttttttggagatggagtctcactctgttgcccaggctggagtgcagtggtacaatcatggctcactgcaacctctgcctcctgggttcaagcagttctccagcctcagccttcaagtagctgagattacaggtgtgtgctaccgtgcctagctaattttagtatttttagtagagacaggatttcaccatgttgaacaggctggtcttgaactcctgacctcaaatgatccacctgccttggcctcccaaagtgctgagattacgggcgtgagccaccgcatccagcctgctatgtagatcttgttttctctggaatgtttgagccgtgctggaatggggtacccaatgctgctgtttccatccccacatgacgttttaagtcccacgagagtaggctagcgatggagtgaagctgaaaaatgaaagcaggaaatccagagacacagaaacagatgaggctttcaacagagactcgaaaatagacagaaaccatgagtcagagcagagcccggaggggcggttcgggaaggcaaggtctataggggaagctcgggtgtcacctctatgccaggtgaaggaaatgttgagtgggtgggaggctgtgtgcatctgctggggaggcagtaggcagatggaaagatcaagtcacccagaattatccccagaggttccttcccgttcctgtgggcgggtgagctctgctttctgagctgcccagagagctggaggagatagacatggaactgaccattgcagaaactagggctttttgtgcccgtgagtaggcaaagagctccctgtggatttgccataaaaaggtctatcaaggtggaagaaagtgagattctagagaaattaatacaagtgaaaagtgggcaggagtgttcttggaagtagaaatgctgttggaagtctaatagacttgggaagaagataacgtatggtgaataccagttgcttcgggggttggggggatccacattttactctgtactcagaagatgcttttccccgtgcaaaaagtgaaagtgagtgggccagtttttcttctgtcacaaggtgtatgactgttcccaaaataatagccctgggggatggggattgcttctcagaccattcaatttttgtaccctgtagacttttggtgttatgtgagaactttaagcacctgataggaattagtaacagagctacgctaatgcctgaggaaatttcagacaattggtgggagagacttggcatttggaatgtgatagctggtaggctaccatacagtaatgcaggattgccagacatttctttccaaatggctacccttgattacatttaactcccctcctttcaagctccagattttgaaggacctgttaattctctttcaagattgaagacagacaccttctttttcttctaaagaggaacctaggcggggtgcggtggctcccgcctgtaatcccagcactttgggaggccagggctggtcttgacctccttacctgaggtcaggaggcctggccaccatggcgaaaccccatctctactaaaaatacaaaaagtagccaggcatagtggcgcatgcctataatcccagctactcgggaggctgaggcaggagaatagctcgaacctgggaggtggaggttgcagtgagcctagatcgcgccactgcactccagcctgggtgacacagcgagactcaatctcaaaataaataaataaataaatatgaacctaaaccatcagaatcttccccttgcagccacaacagaaacactgccggggaggccgagccccgacctgggaagcagggtgatacactgggtgccacgggccttccctctgcctggcagctgtcgctactcagatccctgcagccctgttgccagtgaaggagctggagtctctgttatgatgtgttcatccagctggtgagtttttttttttttgttttgttttttttgtttttgtttttgttttttttttagacagagttttcacttgttgcccaggctggagtgcaatggcacgatctcggctcaaggcaacctctgcctcccaggttcaagcgattttcctgcctcagcctcctgagtagctgggactacaggcatgtgccaccatgcccagctaattctgtatttttagtagtgatggggtttctccatgttggtcaggctggtcttgaactcctgacctcaggtgatccgcctgcctcggcctcccaaagtgttgggattacaggcgtgagccactgcacccggcccagctggtgattttttttttttttttttttttttttgagacggagtctcgctgtcgcccaggctggaatgcagtggtgcgatctcagctcactgcagactccaccccccgggttcgcgccattctcctgcctcagcctaccgagtagctgggactacaggcgcccgccaccttgcccagctaactttttgtatttttagtagagagggggtttcaccgtgttaaccaggatggtctcgatctcctgacctcgtgatccgcccgcctcggcctcccaaagtgctgggattacaggcgtgagccaccacgcccggccccgtagctggtgatttttaaagttaacaaaatacaattatgagaaatcagaattcagaaagtaatgacagagagggccttgtcgggaggggctctgacaccctgctttgggccctcatagagatctggggagggagcaggagtgttttaaggggtgtgcgtcttcagccttccatttgtcttcagaacccaaagccctaaatttagcaaacagctggagagtgctttctgaagagggaggctctggacctgaatcagagatgggaacccatgtaaccaccctcagctgggctcttcagtgtaatcacaggtttgggaaggtaactgaggagagcccatgccaaatatcagaactttgcatttggtgcctggattttaaatcccaggggccctctgagaactctagtacttgtgtttgtgcttgaccatggaaggccattagagcctgggggtgctagatactcaagctgcaatcccaggcaagttgcacggtgaccagggcttagtaggggctaagtaaatgttgttggcttgacaatgatgagcattatgtgcaatttcaaaaacacttaaagcattatggaaggctaggtctggaaaaaccttttgacaggtatgtggaaaatattcgctgggcgcggtgactcacgcctgtaatcccagcactttgggaggccaaggcgggccgatcacctgaggtcgggagtttgagaccagcctgaccaacatggagaaaccccgtctctaccaaaaatacaaaattagttgggcatggtggtatgcacctgtagtcccagctacttgggaggctgaggcaggagaatcacttgaacccgggaggcagaggctgcaatgagccgagatcgtgccactgtactacagcctgggcaacaagagcgagactccatgtcaaaaaaaaaaaaaaaatttgtggttacaaatatgtatttttttatctagttcagtctgatttcagtttccccaaaaacccttcttgaccatctccacttgcttaacactgagctcatttttatatagctggagttccctttattatctttacatgtttcatgtaggcatttttttgggaatattttaattatttgtgtttgtccttttgaccttgattccactctaagcttcatgagacagaatttgttttctcttttatttgtgactttcaaaatactggacagaaagcagtatttgtatttgctctccgactgaattttttttttttctgtctccttgctactgactgttctactgaggcttctctattagagagtaaagttgaaagcaaactcttagtgcttaaaacttgcgaagaaaaccttccattgcatcctcattgctcttcctaacacttgtcctcttctttgttgtgttgcaagataaagccaccaatccttccaaccgccaggaggactgggaatacataattggcttctgtgatcagatcaacaaggagctggaagggtgagtctcagcactgtgggggcagctgagagggagcggactgggaaggggaacaaccatggccaaggagggccagccaggtagccccaggcttagtgcactggagtgtgttctgcttgtcccccaggccacagatcgccgtccgactgctggcccacaagatccagtccccacaggaatgggaggcgctccaggccctgacggtaggtccttcactctccggaggtggaaaccgcagcccttcacctgcccacgccattcctcgtgtccccatagcggttcttagggctcctgccaaaagccaacagaaagtccttgatacagactagatagatctcgaatctgttcagccagctgttccacaaatctgtgtgcattgtgccaggccctgaggcctcagaggtgactgcagtgccgtccctgccagcatggccacatggttagtgtgtgaggcagaggggctaaggaaagcagcccagagtcagggccctgagccccatgtggcgcaagagaaggcttggtgaagagatgctgacagggctgtgttgatagttcagagctggccagctgaagaaaagaggggtcggtccagttcattctgtagttaaacaatgccagtcactagcgaaggtgtcgcactgatggctgaggcccctagggcagatcctggtgtctgttcagactgagggaatttaaggtgtggaatggtgcctggccctcagtgcctccacatgctccgaaaacaaagagcagccgagatctgaggaatccggggctctagcctgactgcattcaggtcctggaaagcgaaaagaggaaatatcatctggttcacatgcacccctcagtcatatttgctgtagaacgaattccttaaaacagtgattctcagcagggcacggtggcttgtacctatagtcccagcaccctgtggggcctaggccgggaggatcgcttaagggaattcaagaccagcctaggcaacgtagtgagacattgtctctacaaaaaataaaaaaatcagccaggcacggtggcacacacctgtggtcccagctcctcgggaggctgaggttgaaggatggcttgagcctgggaagttgaggcgaaagtgagtggtgatcacaccgttgcactctagcctgaccaacatagcgagattctgtgtcaaaaaacaaaaaaaaaacgtaacaaaacccagtgattctcaacagggccctccagggaacatttggcagtgtctggaaacatttttagttgtcacacatcggggtgggggtcctcctggcatcaagtaggcagaggccagggatgctgttcgacaccctataaagtgcagagtggccccccacaacgaagaatgaccagcccaaaatgtcagccaggcctcacctgagaaaccttgctttaaaatgcagaagccaagaaagagagcctggacagtgcactcccccttagaaaccgcagtgccagggaccacaggcagcacaggaaagccaaagcgtgagttagggagataagcggagggaggagaaatatcctgtcatctttctcacagataataggatttaaacatccctcccattccctgcacaattgttggtgagcttgtggaaaaaacccaggacaccaagtcagagaaactttgtccctggacctcacctccctcattgtaaaacacgaggccagaatctttaaggaaggcaccttccaggactggcatccaggccttcttggggtcggggtctcggggtttcttgctttagtccctgcccagcttccccagcagaggtttgcagttggagggacatggtctgtgagtgatctcgttgcttaattacactgtccccgggcagtgcacactgcttttcgtgatgagctccttcctgtgggcgtgtttattcagtactctctgggtgccagggatcttgccagtgccaggttccagccccgagcacgccctcactgagcgcctctcctctgtgcggctacaggtgctggaggcatgcatgaagaactgtgggaggagatttcataacgaagtggggaagttccgctttttgaatgagttaatcaaagtcgtctctccaaaggtcagtcagcggcagattcctcgcttttagggacttcttttgtgttcattcccatctcccatcatactggctttcactgcccatccaacatctccagggagctgagattatttgtgtcttgtccttagagagctaggccctggaggtaacgggatgaccaaacaggccacagggaccggcagctttttctgaagcgccctcagcccaaatctgacaggtgatgtggtagtggctgtgtgtttgtccagggtgagggcccatgtagtgtgggactctaggcacctggcacatggcagttgtgggttttgtgggttttcttggcctgtgtcacgtggatacggggagctggcctccgtcattgctccgatgctcagctggccgtgttctgttgcacgctggtgtggcgcagctctgggcccccacttaaagcagagggaatactttaccatgctaaagacattctcatggacacccccaagataaaatgcagttgtgtttctggcaacttgtgcgtgaaaatgcactttcctcagaactcaaaatatccacccaaccatggcctgcaccacatgggcatcagggtcacaaggaagcctctctgtcttgatgtccccaaggtagtaaggaaaggcagagagcaggggtgagcaccgagggcatggtctctggtgtcagactcaggtttccatccggcccttacaccctgggcaagttagatgatcccaggcggcaaatggggacgccacccctactgacgtggctgctgtgcagatgagtaaggtcatgaatacacttacaggacacttcctggacaggaggtgatgacctcctggccccctgcctatccacagactgtatccagatggacacagccacaccacagggagtcgttcccctccccacgctgtctcacacacacttggacacctgcagattttgagtaggaccatagctgctgagcagccacgccattgctgtggagggagccttacactttctctgcctccgaactgcacttactaggtcctcattttcttttgccatgtagtacctgggggacagggtgtctgagaaagtgaagaccaaggttattgagctgctgtacagctggaccatggccctgccagaagaagcaaagatcaaagacgcctaccacatgctgaagagacagggtacgtgtctgcctgcccgcagcctccaggcagccctcgaaggctggcccaggcaaggagagaagggaaggtttgggatccccagagtccctcctgaagagaacagcatttgtccccaggcaaggctgagtcggagttggatgggataaggtgtagcagcctgccctccaccctgctaccctttgcaggtcttgatcacagggacgtggcccttggtgtatgaggaggggtgacaaggcaaccacagcctgagtgcacgtgctgccatgtcccctttcaggcatagtgcagtctgacccaccaattcctgtggataggacgctgatcccctctccaccacctcgtcccaaaaaccctgtttttgatgatgaggagaagtccaaggtaaaggacaccctgggcctgggattttctcatacgagagtgggtggcagcaggggaatgtggtttgcactgtgctgcggggagcctctggggtttccctggggtacgggtgctgcctcttcccttcacctctgatttcctcctctctcagcttttagccaagctgctgaaaagcaaaaacccagatgacctgcaggaggccaacaagctcatcaagtccatggtgaaggaagtgagtgggccccggtccttcaggcacggggtggaggagcccatggccacacagcagaagccgctttgccccggacacgggcctgttttgttctcccctgctgccagctgccctacctgtgccccggtggctgagagtgggaggaggagcacaatagcttccgcgggagcacggaagagaggagtgggttgggagcagtgttgtgaaagcagaagtatagactgggccccaggcaccccacactgaaaggagcttccgagcgtctgtacttgtgttgtggggtaaggtgtgacctggtggaagtggaaagacagtcaagtgacgctctctttctcttgaacttcttcactggggcaggacgaggcacggatccagaaggtgaccaagcgtctgcacacgttagaggaagttaacaacaacgtgagactgctcagtgagatgctgcttcattacagccaggaggactcttcggacggggacagagagctgatgaaggtgggaccgccgacggcaaaggctgcctcccggggctgcgctgcccttcaggagctcagccagcatttgctgagcacgtgccttgtcagagacacgggctgtgcacttggcagtgtattcatgaccttactcatctgcacagcagccacgtcagtagagggtggcgtccccatttgcctcctgggatcagctgacttgtccagggtgtaagggccagatggaaacctgagtctgactccagagaccacactctcggtgctcacccctgctctctccctttccttactaccttggggacatcaagacagagaggcttccttgtaaccctgatgcccatgtggtgcaggccatggttgggtggatattttgagttctgaggaacatgccagcctggaaggcaggaggggactgacttcccctgacccatcctggtgactgctacctagacaaacatcctgggtgatgtggtgtggtggtggtggctggtggcaagaagacgtgcgctgtgatcccagctttgctggtaattgaccgtggcaattggcatatcccggtcattttctgggcatgaaccctgaatgaatcagatgatctctaagggcctttgtggtttgatttttatgtccgagtctctttcaggagctgtttgatcagtgtgagaacaaga

SEQ ID NO: 12206 - DNA, 521 bp, Homo sapiens
tgcaatatggcggaggcggaaggggaaagcctggagtcctggctcatacctgggggacagggtgtctgagaaagtgaagaccaaggttattgagctgctgtacagctggaccatggccctgccagaagaagcaaagatcaaagacgcctaccacatgctgaagagacagggcatagtgcagtctgacccaccaattcctgtggataggacgctgatcccctctccaccacctcgtcccaaaaaccctgtttttgatgatgaggagaagtccaagcttttagccaagctgctgaaaagcaaaaacccagatgacctgcaggaggccaacaagctcatcaagtccatggtgaaggaagacgaggcacggatccagaaggtgaccaagcgtctgcacacgttagaggaagttaacaacaacgtgagactgctcagtgagatgctgcttcattacagccaggaggactcttcggacggggacagagagctgatgaaggagctgtttgatcagtgtgagaacaaga

SEQ ID NO: 12207 - DNA, 940 bp, Homo sapiens
ctttgtggtttgatttttatgtccgagtctctttcaggagctgtttgatcagtgtgagaacaagaggcggactttatttaaactcgccagtgagactgaggacaatgataacagtttgggtgagtgaaagagcgacggtcagggataagccaggcatttggatatgtgggtgggaactgtcacaacaggagtgagaagtctctctttcctgctccaggggacatcctgcaagccagtgacaacctctcccgggtcatcaactcttacaaaacaattattgaagggcaggtcatcaatggcgaggtggctaccttaaccctgcctgactcggaaggtgagatgctctggtccccaactctaggctcctccagaccagcctcaggcccctatcatgaagctgcgggtgtaggctggccagcgtggtggtgttgcacaaggcccaagggagttctttgccattccaagcaatcctccggcttcccggaggcctggagatgtgggtaggaatttccccacctgctttctcgggcttgctttgcagcatcccctggcagagatgccgttggattaggccagaggctgtagcagtgacctctgtgcctagggtgctgcctcctgccacacagccactagaagacccctaattattcctgttctgctctgttgacccatccaggaaacagtcagtgcagtaaccaaggcacgctcatcgaccttgcggagctggacacgaccaacagtttgtcctccgtgttggccccagcacctactccaccctcctcaggcatcccaatcctccctccaccaccccaggcctcaggacctccacggagccgctcctctagccaggccgaggccaccctggggcccagcagcacaagcaacgccctctcctggctggacgaggagctactctgcttgggtgcggcccacagggggc

SEQ ID NO: 12208 - DNA, 598 bp, Homo sapiens
ctttgtggtttgatttttatgtccgagtctctttcaggagctgtttgatcagtgtgagaacaagaggcggactttatttaaactcgccagtgagactgaggacaatgataacagtttgggtgagtgaaagagcgacggtcagggataagccaggcatttggatatgtgggtgggaactgtcacaacaggagtgagaagtctctctttcctgctccaggggacatcctgcaagccagtgacaacctctcccgggtcatcaactcttacaaaacaattattgaagggcaggtcatcaatggcgaggtggctaccttaaccctgcctgactcggaaggaaacagtcagtgcagtaaccaaggcacgctcatcgaccttgcggagctggacacgaccaacagtttgtcctccgtgttggccccagcacctactccaccctcctcaggcatcccaatcctccctccaccaccccaggcctcaggacctccacggagccgctcctctagccaggccgaggccaccctggggcccagcagcacaagcaacgccctctcctggctggacgaggagctactctgcttgggtgcggcccacagggggc

SEQ ID NO: 12209 - DNA, 18459 bp, Homo sapiens
tgcaatatggcggaggcggaaggggaaagcctggagtcctggctcagtgagtagccgcggccgtttctgcctgccctcgagccgctgggctgcccctgtcttcacccccacgtcccctccccgggctccacggcgtcgcctcttggcagcccacgcccggtctcgccctcgccgcgagcagcctgcgatcacgccccttccctatcagggcgccgggccccagtccggcccccgcttccctcgctgcggcgcgtcctcttgctctggcgcgcggcggcgtgaactcgggctcctgtcgggcaccgcaggctcggggaaaggcgacagccaagatcttcgggctgacatgcttcggcgctttggggagattgtggtggggtcgccgcccggcggtgacaccaggaacccagcgccccaatccctgactaagggagaagcttcggattggggctgagtctccggtagtggtgggtgctgccgactgcgttcagtcgcctggcagcttcagaattgtgaccatgtgttggagaagtgacggcttcgctcaggcagaatgcttgaagtgagaataatattccaaagagagcgatgatagagaacagagagctctacctttttcctgcagtgaccacagaagcatggtgaaatcggtgtcgggaattccccccccacacacatacatatacccccttgaatatcctaacgagtcagtgttgatagcctattctgagtaaggctgaggagcacagtctgaagctgtagttatagaagcgtattgctgtcattgcactgtgaattacagtgctacgaaggaaatgtgtgttaacctggttagcaggtagtactctgcctgagggttaataagtgaactttcctgtaggctagacctggaagcctcctttaagtggagagagaaattggactggtaatgggataggtgagatacctagtattgccttgttctgaggtctcttatttagtactgcttccgggatcttggaggtgatagctatttcctcaaattgtctgatttttcctagtaagaaacccccttcaggaggttgagcttcagtttaaaggggagcatatcccaaaagagagaaaaagtaagatcacgtttgcaaaatctgcagttgcaggcaggtcataaggcttctttatatatggaagtgttctccaaggagctcaaagtactttacagatattcattaaattagtttaccaagtattctagcaaagcaggcactactgccataatttcacaaaaagaggacatcctgactccagtcaaaccacttgcccagaaatgcccaacttgctataaccagagtggaattagtttgctttgaaggtattaatatgggtattgaataatttaaatgacctaagctgagtttaataggctacatttagagttacattttgtttttgttacttgtttttgagacagagtctcgcgcgctgttgtctaggctggagtgcaggggtgcgatcatagctcactgcagccttgaacccctgtgctcaaataagtcttctacctcagcctcctgagtagctgggactataggcacacgccaccatgcttggctaattcttttgatttttagtagagatgaggtcttgctgtgttgcccaggatggtctcaaactcgagttcaagtgatcctcccacctttcccttacaaagcgctgggattacacacgtgagctaccgcacccagcctagagtcacattatgaaatgagagggacacacttggtgggggggagtcacatggtatctgtagagacataagcttcacagttgttacgacttaatgtgaactgtaccagttgaacaaaccagcagttggggttcagcatcgtctcagtcagcgtccttgtcaccccacgtttgcctgaattgttgcagaagcctctgcttggcccagagacccaggtctctcccgtcctcacctctcctcagtccattctgctcccagaagcgcacttgtgttgaatcaaatcattccactgttgcctgtaatctggccttggttgttccaggcctttttctctgtggcttctacgttttcctgctctactcagtctgatgttcttggtttaccaatacacgttgctctccttacctggaagccctgctcccgtttcctcaactaaatgcttgaaaacccatctcagattctcttttctcacaaaccatctcttgatgacttcagtcttctttcaagtcccaccatgatcaatcaatcaatgtttaatgagtacctgctacgtggggtgttataggagttaggaagtttaagaagattttgcctttagttggatggaggtgatgctggagtggatgaagaactctcctgtaatcccagcacgttgggaggccgaggcgggtggatcacgaggtcaggagatcgagaccatcctggctaacacagtgaaaccccgtctctactaaaaaatacaaaaaaatagccaggcgtagtggcgggcgcctgtagtcccagctacacgggaggctgaggcaggagaatggtgtgaacccgagaggtggagcttgcagtgagctgggattgtgccactgcactccagcctcggtgacagagcgagactccgtctccaaaaaaaaaaaaaaaaaagatacaaggcagtgctaaaacgccggcattctctttagggaactggggatgggggaagagatgattcattgaggatactccatttgagctagccattaaataatgggaaaagttggaaaaaaaaaaacactagatggtgatgtggagagagcaaacctgtttggggcacacagtaacagaggtgtttgggaatgagggaagataaggctgggaagttaagaccagattctaccaagtctccaatttccagcccaagaagtttattttatttatttatttatttgagacagagtcttgcactgtcacccaggctggaatgcagtggcacaatctcggctcactgcaacttccgttgcttaggtgcaagcaattctccatcctcagcctcccaagtagctgggactactggtatgtgccactacacctggctcatttttgtatttttagtagagatggggtttcaccatgttggccaggctgttgtcaaactcttgacctcaagtgagccacctgcctcagctccctccaaagtgttgggattacaggcttgagctaccacgcccagcccagccgaagaagtttaaatttctgcagttatcaggccctcattccttctgtactaggtgaaatcggtgttttggtgtcttaagaggcttgatttgatataggtttcatgcgcgtccgtgtgaagagactaccaaacaggctttgtgtgagcaacatggctgtttatttcacctggatgcaggcaggctgagtccgaaaagagagtcagcaaagggtggtggattatcattagttcttacaggttttgggataggcggtgaagttaagagcaatgttttgcgggcagggatggatctcacaaagtacattctcaagggtggggagaattacgaagaaccttcttaagggtgggggagattacaaagtacattgatcagttagggtggggcagaaacaaatcacaatggtggaatgtcatcagttaaggctatttttacttcttttgtggatcttcagttacgtcaggccatctggatgtgtacgtgcaagtcataggggatgcgatggcttggcttgggctcaggcctgacattcctgccttcttatattaataagaaaaataaaacaaaatagtgttgaagtgttggggcagcgaaaatttttgtggggtggtatggagagagaatgggcgatgtttctcagggctgcttcaagtgggattaggggcggcgtgggaacctagagtgggagagattaagccgaagggagatcttgtggggatgttagaagaaacatttgtcgtatagaatgattggtgatggcctggatatggttttgtatgaattgaaaaactaagtggaataagagaaggagaaaaacaggtataaaaggtctaagaattgggaggacctaggacatctgattagagagtgcctaaggagattcagcatagtcctgccagcaaagattatttatttacttcaagagttaagagtggcagtttggggatagcacgaggagatatcacctgtgatggcttggagaaacagtgtaaaccagcagtgtaaacaagagcagggcatgtatgagtagttgagaacgttgaataggagtatgactagacagaagatagtagggatgatgacaggttttttttgggggggggggcacagtctaagttggtctggtgtctggaatgagactggggcctaataaaaaggagcatctatacaggagcttaaatgggctgtaccttgtagcattctgaggacaggtctgacttctgagaagggaaagtggtaaaagtattgtccagtcctttttaagttggtggctgagcttggtgaagtgtttttaaaagacctttagtccgttctgcttttcttgaagacggaggaccgtaagggatataaaggtttcactgaatactaagagcctgagaaactgcttggctgatttgactaataagggctggtctgttagactgtatagaggtgggaaggctaaactgaggaattgtgtctgaccgaagggaagaaatgactgcggtggccttctcagaccctgtaggaaaggcctctacttacctagtgaaagtgtctacttagactaagaggtattttagttatctgactcggggcatgttgagtaaagctaatttgccagtcctgggtgggggcaaatcttcaagcttgatgtgtagggaagggagggggcctgaataatccctgaggagtagtagaatagcagatggaacactgagaagttatttccttgaggatagatttccacaatggaaaggaaatgaggttctaagaggcgggctagtggcttgtactatagcatagcctgcctttgctgctgtgtggcgattaggcctgctggaactgccatcaataaatcaagcgtgatcagggtgaggaacaggaaagaaggaaatatggggaaatggggtgaatgtcaggtggatcagagagatacagtcatgggggtcaggtgtggtatcaggaataatgtgggaggccagattgaggtccgggccaggaacagtggtaattgtgggacttaacaaagagtgagtacagctgaaggagccggggagcagaaagtatatgcatcaggtatgaggaagaaaataatattggaagttatgagaaatgtagagagtgagttgagcatagtttgttatttttagggcctctaaaagtattaaagcagcggcagccactgcaagcagacatgagggctaggctaaaacagtaaggtcaagttgtttgggcagaaagactacagggtgcggtcctggctcttgtgtaagaattctgacacactaaccatgcctaggaaggaaaggagttgttgttttgtaagggattgaggtttgggagattaatcggacacgatcagcagggagagcacgtgtgttttcatgagaattatgccgagataggtaacagatgaggatgaaatttgggcttgactgaagtaatgggggctgtctgtgaagccttgcagcagtacagcccaggtaatttgctgagcctaatggatgtcagggtcagtccaagtgaaagcaaagagaggctgggatgacgggtgcaaaggaattgtaaagaaagcatgtttgagatccagaacagaataatggattgtggagggaggtattgaggataggagagtatatggtttggtaccatggggtggataggcaaaacaatttggttgataaggcatagatcctgaactaacttgtaaggcttgtctggttttaggacaggtaaaatgggggaattgtaaggagagtttataggctttaaaaggccatgctgtagcaggcatgtgataacaggctttactcctttcaaagcatactgtgggatgggatattggcattgagcggggtaagggtgattaggttttaatgagatggtaaggggtgcatgatcggtcgccaaggagggagtagaggtatcttatacttgtgggttaaggtgggggggaatacaagaggaggacgcaaaggaggctttggattggaaagggcagcaatgagatgtagctgtaacccaggaatagtcagggaagcagataatttagttaaagtgtctcggcctaataagggaactgggcaggtggggataactaaaaacgagtgcttaaaagagtattgtctaagttggcaccagagttggggagttttaagaggtttagaagcctggctgtcaatacccacaacagttatggaggcaagggaaacaggcccttgaaaagaaggtaatgtggagtgggtagcctccgtattgattaagaagaggacggacttactctccactgtgagagttacctaaagctcggcatctgtgatggtctatggggcttccgaggcgatcgggcagcgtcagtcttcagccgttaagccgagaagatctgggaaggagtcagagagccttgggccagagttccaggggctctgggagtggctgtcaggtgagttgaacagtccaattttcagtggggtcccacacagatgggactcgcttaggaggaatcccgggctgcgggcattccttggctcggtggccagatttctggcacttgtagcaagctcctgggggaggcagttatggaggaatgcctggccactgcggtttaggcgtttggaagttcttgtgtgctggagatgtagctggggtttgtctcacagtggaggtaaggaattgcaactcagaaatatgttgttacttggctgcctctactctattattgtacaccttgaaggcgaggttaattaagtcctgttgtggggtttgagggccggaatttaatttttggagttttatttaatgtcgggagcagattgggtaataaaacgtatattgagaataagacggccctttgacctcttagggtctagggctgtaaagcgtctcagggttgctgccgaacgagccatgaactgggctggatttttatatttgatgaaaaagagcctaaacgcttctgatttgggataaagaaaaaggagcattaaccttgactatgcctttagctccagccacctttttaagagtaaattgctgggcaggtgggggagggccagtcactgaacgaaactgtaagctggaccaggtgtgaggaggggaggtgataaaaggattctagggtggaggagcagaggctgaggaagaattgggacctagatggcctggcgacgagcagcctgaggagaaggggaaaggtcagatgggtctgtagaaaagactggaaagacccagcgacacttggggttgggactgaggggacaggcgggagggaaagaaggaggatttgggaggaatcgcattgggaacagagacttgagagggaacgaagtgtgaaaaatgcctggatgtgaggcacctcagaccatttgcccattttttgacaaaaattatttaggtcttataggatggagaaatcgaaagtgccgttttctggccatttagagccattgtcaagtttgtactggggccaagcggtgttgcagaagaaaataaggcatttaggttttaggtcaggtgcgagttgacgaggttttaagttcttgagaacacaggctaagggagaaggaggaatggaggctggaaggttgcccatagtaaaggaggcaagcccagagaaaagagagagtagagacacggagggaaggggttcgagggttcttaccctccagaaaagcaggaaaggggtcagggtgtggaaataagggattggggcacacagataagaggtcggggtgcggaaataagggattgggggttcttgccccctagaaaagcgggacttaccgctaagggtgaaggagaaggggttgaggggtacttgcccctcccccagaaatgcagagaaggggtagagacacggagagaaggggttgtggtacttgcccctcccccagaaaagcaggacttgccgctaagggtgaaggaccaaggcaggcgtccctgagtggtctgacacctttgaaacgtgagtgaataatcagagaggtgtccctgcaatgattaaacaccaaggaaaggctgccttcccagtctgtgaccagcgccagagttttgggtccacggataaaacgtgtctcgtttgtctctaccagaaaatgaaaggaattgaaattaagagaagggagagattgaagagtggaaaggagaaagtggttgagggatagtgagagaggttggagaagagagtaagaagaggccgcctacctgatttaaaattggtgagatgttccttgggctggtgggtctgaggacctgaggtcgtaggtggatctttttcacggagcaaagaacaggaggacaggggattgatctcccaagggaggtcccgcgatccgagtcatggcaccaaatttcatgcgcgtccatgtgaagagaccaccaaacaggctttgtgtgagcaacatggctgtttatttcacctggatgcaggcgggctgagtccgaaaagagagtcagcaaatggtgtggtggattatcattagttcttataggttttgggataggcggtgaagttaagagcaatgttttgcgggcagggatggatctcacaaagtacattctcaagggtggggagaattacgaagaaccttcttaagggtgggggagattacaaagtacattgatcagttagggtggggcagaaacaaatcacaatgctggaatgtcatcaggtaaggctatttttacatcttttgtggatcttcagttacttcaggccatctggatgtatacgtgcaagtcataggggatgccatggcttggcttgggctcagaggcctgacaatagggactttacataggattaggatggattagaacagaagttctagaagcaggtgagaaggagtggagggtagggataaggaaggaagggatttaagaagacattgagaaggaaaggaccacaagactgagaggaatggatgaggagagagggaagaaggagtcaaaaaagaggtgggggaataggggacttttggaaggtgcagcatttataggaatagtgacttaatagaccacatgcagtggctcattcctgtggtcccagctactcaggaggctgaggtgggagcatcgcctgagcccaggagttggaggctacagtgagccatgatcgcctactgcagcccggggcaatagagtgagacccccatctctaaaaaaagaacaagcacacgcctgtgggtggtcccagctactcaggaggttgaggtgggaggatcacttgagcctgggaggcagagactgcagtgagctgtaagagccactgcactccaacctgggtgacagagtgagaccccgtctcaaacaacaaaaaagaaaaaaaaaaacgaaagacgccaggcactgggactcacacctgtaatcctagcaccttgggagttaaaggcaggcagattgcttgagcctaggagttcaagaccagcctgagcaacatggcaaaattctgtctctaccaaaagtacaaaaaattagctaggtgtgatgtgagtgtctgtggtcccagctaggctgaggtagaagaatcatctgagcctgggaagttgaggctacagtgaagccatgatcgcaccactgcactcttgcctgagtgacagagtgagaccctgtctcaaaaaagaaaaaaaaaggaagaagaaaaagaaatggggaagtcaggaaaaagaagtgatgcttttttttttttttttttttttgagaaggagtctcactctagtcgcccaggctagagtgcagtggcacaatctcagctcattgcaacctctgccgcctgggttaaagcgattctcctgcctcagcctcccaagtagctgggattacaggcgcctgccacttcgcctggctaatttttgtagttttagtagagacagggtttcactatcttagccaggctggtcttgaactcctgacctcgcgatccacccacctcagcctctcaaaatgctgggattgcgggtgtgagccaccgtgcctgggccatacatttgtttttacactcatttctgtaccaaattagcccaattatctactgtcttgttttttgaactgattttttttttttttcatgtattgaaccaggagagcacagcctccttgagggtaaaatctgtgtctggaactttttctgtagtccctccagggtctggcatgctgacatgctgtttacttcattgtctgcgggtgcttaacaaagacttggtgattgactaagtttgtgtttccattcaggaccctagtgaaggttgacctttattccctttccagcccatgttcttgcttctgcttgtttgtaagtcatttgttacgtagatttttctttttggagatggagcctcactctgtggcccaggctggagtgcaatggcctgatctcagctcactgcagcctctgcctcctgggttcaagtggttctcctgccttagcctcctgagtagctgggatcacaggtgcgcggaaccatgcccagctaattttgtgtttttagtagagatggggtttcaccatgttggtcaggctggtctcgaactcctaacctcacgcaggtgatccgcctgcctcggcctcccaaagtgctgggattacaggcgtgagccaccgtgcccagaccatatgtatataattttttttttttttttttttggagatggagtctcactctgttgcccaggctggagtgcagtggtacaatcatggctcactgcaacctctgcctcctgggttcaagcagttctccagcctcagccttcaagtagctgagattacaggtgtgtgctaccgtgcctagctaattttagtatttttagtagagacaggatttcaccatgttgaacaggctggtcttgaactcctgacctcaaatgatccacctgccttggcctcccaaagtgctgagattacgggcgtgagccaccgcatccagcctgctatgtagatcttgttttctctggaatgtttgagccgtgctggaatggggtacccaatgctgctgtttccatccccacatgacgttttaagtcccacgagagtaggctagcgatggagtgaagctgaaaaatgaaagcaggaaatccagagacacagaaacagatgaggctttcaacagagactcgaaaatagacagaaaccatgagtcagagcagagcccggaggggcggttcgggaaggcaaggtctataggggaagctcgggtgtcacctctatgccaggtgaaggaaatgttgagtgggtgggaggctgtgtgcatctgctggggaggcagtaggcagatggaaagatcaagtcacccagaattatccccagaggttccttcccgttcctgtgggcgggtgagctctgctttctgagctgcccagagagctggaggagatagacatggaactgaccattgcagaaactagggctttttgtgcccgtgagtaggcaaagagctccctgtggatttgccataaaaaggtctatcaaggtggaagaaagtgagattctagagaaattaatacaagtgaaaagtgggcaggagtgttcttggaagtagaaatgctgttggaagtctaatagacttgggaagaagataacgtatggtgaataccagttgcttcgggggttggggggatccacattttactctgtactcagaagatgcttttccccgtgcaaaaagtgaaagtgagtgggccagtttttcttctgtcacaaggtgtatgactgttcccaaaataatagccctgggggatggggattgcttctcagaccattcaatttttgtaccctgtagacttttggtgttatgtgagaactttaagcacctgataggaattagtaacagagctacgctaatgcctgaggaaatttcagacaattggtgggagagacttggcatttggaatgtgatagctggtaggctaccatacagtaatgcaggattgccagacatttctttccaaatggctacccttgattacatttaactcccctcctttcaagctccagattttgaaggacctgttaattctctttcaagattgaagacagacaccttctttttcttctaaagaggaacctaggcggggtgcggtggctcccgcctgtaatcccagcactttgggaggccagggctggtcttgacctccttacctgaggtcaggaggcctggccaccatggcgaaaccccatctctactaaaaatacaaaaagtagccaggcatagtggcgcatgcctataatcccagctactcgggaggctgaggcaggagaatagctcgaacctgggaggtggaggttgcagtgagcctagatcgcgccactgcactccagcctgggtgacacagcgagactcaatctcaaaataaataaataaataaatatgaacctaaaccatcagaatcttccccttgcagccacaacagaaacactgccggggaggccgagccccgacctgggaagcagggtgatacactgggtgccacgggccttccctctgcctggcagctgtcgctactcagatccctgcagccctgttgccagtgaaggagctggagtctctgttatgatgtgttcatccagctggtgagtttttttttttttgttttgttttttttgtttttgtttttgttttttttttagacagagttttcacttgttgcccaggctggagtgcaatggcacgatctcggctcaaggcaacctctgcctcccaggttcaagcgattttcctgcctcagcctcctgagtagctgggactacaggcatgtgccaccatgcccagctaattctgtatttttagtagtgatggggtttctccatgttggtcaggctggtcttgaactcctgacctcaggtgatccgcctgcctcggcctcccaaagtgttgggattacaggcgtgagccactgcacccggcccagctggtgattttttttttttttttttttttttttgagacggagtctcgctgtcgcccaggctggaatgcagtggtgcgatctcagctcactgcagactccaccccccgggttcgcgccattctcctgcctcagcctaccgagtagctgggactacaggcgcccgccaccttgcccagctaactttttgtatttttagtagagagggggtttcaccgtgttaaccaggatggtctcgatctcctgacctcgtgatccgcccgcctcggcctcccaaagtgctgggattacaggcgtgagccaccacgcccggccccgtagctggtgatttttaaagttaacaaaatacaattatgagaaatcagaattcagaaagtaatgacagagagggccttgtcgggaggggctctgacaccctgctttgggccctcatagagatctggggagggagcaggagtgttttaaggggtgtgcgtcttcagccttccatttgtcttcagaacccaaagccctaaatttagcaaacagctggagagtgctttctgaagagggaggctctggacctgaatcagagatgggaacccatgtaaccaccctcagctgggctcttcagtgtaatcacaggtttgggaaggtaactgaggagagcccatgccaaatatcagaactttgcatttggtgcctggattttaaatcccaggggccctctgagaactctagtacttgtgtttgtgcttgaccatggaaggccattagagcctgggggtgctagatactcaagctgcaatcccaggcaagttgcacggtgaccagggcttagtaggggctaagtaaatgttgttggcttgacaatgatgagcattatgtgcaatttcaaaaacacttaaagcattatggaaggctaggtctggaaaaaccttttgacaggtatgtggaaaatattcgctgggcgcggtgactcacgcctgtaatcccagcactttgggaggccaaggcgggccgatcacctgaggtcgggagtttgagaccagcctgaccaacatggagaaaccccgtctctaccaaaaatacaaaattagttgggcatggtggtatgcacctgtagtcccagctacttgggaggctgaggcaggagaatcacttgaacccgggaggcagaggctgcaatgagccgagatcgtgccactgtactacagcctgggcaacaagagcgagactccatgtcaaaaaaaaaaaaaaaatttgtggttacaaatatgtatttttttatctagttcagtctgatttcagtttccccaaaaacccttcttgaccatctccacttgcttaacactgagctcatttttatatagctggagttccctttattatctttacatgtttcatgtaggcatttttttgggaatattttaattatttgtgtttgtccttttgaccttgattccactctaagcttcatgagacagaatttgttttctcttttatttgtgactttcaaaatactggacagaaagcagtatttgtatttgctctccgactgaattttttttttttctgtctccttgctactgactgttctactgaggcttctctattagagagtaaagttgaaagcaaactcttagtgcttaaaacttgcgaagaaaaccttccattgcatcctcattgctcttcctaacacttgtcctcttctttgttgtgttgcaagataaagccaccaatccttccaaccgccaggaggactgggaatacataattggcttctgtgatcagatcaacaaggagctggaagggtgagtctcagcactgtgggggcagctgagagggagcggactgggaaggggaacaaccatggccaaggagggccagccaggtagccccaggcttagtgcactggagtgtgttctgcttgtcccccaggccacagatcgccgtccgactgctggcccacaagatccagtccccacaggaatgggaggcgctccaggccctgacggtaggtccttcactctccggaggtggaaaccgcagcccttcacctgcccacgccattcctcgtgtccccatagcggttcttagggctcctgccaaaagccaacagaaagtccttgatacagactagatagatctcgaatctgttcagccagctgttccacaaatctgtgtgcattgtgccaggccctgaggcctcagaggtgactgcagtgccgtccctgccagcatggccacatggttagtgtgtgaggcagaggggctaaggaaagcagcccagagtcagggccctgagccccatgtggcgcaagagaaggcttggtgaagagatgctgacagggctgtgttgatagttcagagctggccagctgaagaaaagaggggtcggtccagttcattctgtagttaaacaatgccagtcactagcgaaggtgtcgcactgatggctgaggcccctagggcagatcctggtgtctgttcagactgagggaatttaaggtgtggaatggtgcctggccctcagtgcctccacatgctccgaaaacaaagagcagccgagatctgaggaatccggggctctagcctgactgcattcaggtcctggaaagcgaaaagaggaaatatcatctggttcacatgcacccctcagtcatatttgctgtagaacgaattccttaaaacagtgattctcagcagggcacggtggcttgtacctatagtcccagcaccctgtggggcctaggccgggaggatcgcttaagggaattcaagaccagcctaggcaacgtagtgagacattgtctctacaaaaaataaaaaaatcagccaggcacggtggcacacacctgtggtcccagctcctcgggaggctgaggttgaaggatggcttgagcctgggaagttgaggcgaaagtgagtggtgatcacaccgttgcactctagcctgaccaacatagcgagattctgtgtcaaaaaacaaaaaaaaaacgtaacaaaacccagtgattctcaacagggccctccagggaacatttggcagtgtctggaaacatttttagttgtcacacatcggggtgggggtcctcctggcatcaagtaggcagaggccagggatgctgttcgacaccctataaagtgcagagtggccccccacaacgaagaatgaccagcccaaaatgtcagccaggcctcacctgagaaaccttgctttaaaatgcagaagccaagaaagagagcctggacagtgcactcccccttagaaaccgcagtgccagggaccacaggcagcacaggaaagccaaagcgtgagttagggagataagcggagggaggagaaatatcctgtcatctttctcacagataataggatttaaacatccctcccattccctgcacaattgttggtgagcttgtggaaaaaacccaggacaccaagtcagagaaactttgtccctggacctcacctccctcattgtaaaacacgaggccagaatctttaaggaaggcaccttccaggactggcatccaggccttcttggggtcggggtctcggggtttcttgctttagtccctgcccagcttccccagcagaggtttgcagttggagggacatggtctgtgagtgatctcgttgcttaattacactgtccccgggcagtgcacactgcttttcgtgatgagctccttcctgtgggcgtgtttattcagtactctctgggtgccagggatcttgccagtgccaggttccagccccgagcacgccctcactgagcgcctctcctctgtgcggctacaggtgctggaggcatgcatgaagaactgtgggaggagatttcataacgaagtggggaagttccgctttttgaatgagttaatcaaagtcgtctctccaaaggtcagtcagcggcagattcctcgcttttagggacttcttttgtgttcattcccatctcccatcatactggctttcactgcccatccaacatctccagggagctgagattatttgtgtcttgtccttagagagctaggccctggaggtaacgggatgaccaaacaggccacagggaccggcagctttttctgaagcgccctcagcccaaatctgacaggtgatgtggtagtggctgtgtgtttgtccagggtgagggcccatgtagtgtgggactctaggcacctggcacatggcagttgtgggttttgtgggttttcttggcctgtgtcacgtggatacggggagctggcctccgtcattgctccgatgctcagctggccgtgttctgttgcacgctggtgtggcgcagctctgggcccccacttaaagcagagggaatactttaccatgctaaagacattctcatggacacccccaagataaaatgcagttgtgtttctggcaacttgtgcgtgaaaatgcactttcctcagaactcaaaatatccacccaaccatggcctgcaccacatgggcatcagggtcacaaggaagcctctctgtcttgatgtccccaaggtagtaaggaaaggcagagagcaggggtgagcaccgagggcatggtctctggtgtcagactcaggtttccatccggcccttacaccctgggcaagttagatgatcccaggcggcaaatggggacgccacccctactgacgtggctgctgtgcagatgagtaaggtcatgaatacacttacaggacacttcctggacaggaggtgatgacctcctggccccctgcctatccacagactgtatccagatggacacagccacaccacagggagtcgttcccctccccacgctgtctcacacacacttggacacctgcagattttgagtaggaccatagctgctgagcagccacgccattgctgtggagggagccttacactttctctgcctccgaactgcacttactaggtcctcattttcttttgccatgtagtacctgggggacagggtgtctgagaaagtgaagaccaaggttattgagctgctgtacagctggaccatggccctgccagaagaagcaaagatcaaagacgcctaccacatgctgaagagacagggtacgtgtctgcctgcccgcagcctccaggcagccctcgaaggctggcccaggcaaggagagaagggaaggtttgggatccccagagtccctcctgaagagaacagcatttgtccccaggcaaggctgagtcggagttggatgggataaggtgtagcagcctgccctccaccctgctaccctttgcaggtcttgatcacagggacgtggcccttggtgtatgaggaggggtgacaaggcaaccacagcctgagtgcacgtgctgccatgtcccctttcaggcatagtgcagtctgacccaccaattcctgtg

SEQ ID NO: 12210 - DNA, 551 bp, Homo sapiens
tgcaatatggcggaggcggaaggggaaagcctggagtcctggctcaataaagccaccaatccttccaaccgccaggaggactgggaatacataattggcttctgtgatcagatcaacaaggagctggaagggccacagatcgccgtccgactgctggcccacaagatccagtccccacaggaatgggaggcgctccaggccctgacggtgctggaggcatgcatgaagaactgtgggaggagatttcataacgaagtggggaagttccgctttttgaatgagttaatcaaagtcgtctctccaaagagagctaggccctggaggtaacgggatgaccaaacaggccacagggaccggcagctttttctgaagcgccctcagcccaaatctgacagtacctgggggacagggtgtctgagaaagtgaagaccaaggttattgagctgctgtacagctggaccatggccctgccagaagaagcaaagatcaaagacgcctaccacatgctgaagagacagggcatagtgcagtctgacccaccaattcctgtg

SEQ ID NO: 12211 - DNA, 24935 bp, Homo sapiens
aacaattcaggcccttgtcccaagtaggaggacattccccaagcaggcgggtaaagtctcctcctggtcaagtgctaacggtaaggatgggcttggcgcctacacacccatcccaattcacaggcgatcccagatctgagctctttagctgaaccgcactttcagctccgcgttagaaccctagatcagccagactccttaggcgagaggtagtcactaaaccttcggattggcgcagggtcacgcagctaacttagaagcttgaatccagatactccggcccccagggcaatgctctctctaggggcccacgcggcctgcctgtggcccccttccttcctcgcagcgcccccccgccgctgctcgccaccctctcaccctggaagctgcaagacagcccgccgcacgcccaacgccaggcccgaccatcctcgggcaaccttcactgcgggggcagccatcttggctggccacgaggaccccacaaggactgccctcggcgcgcctgagcgagtgacgggaaacgggtgaaaaagactcctcagggtcctaaatctgcgtttctctccactgatctggacgttagagtttttcactccggggtccaaaggggagcgccaaaaggaaacccttgccctccctgtatccgtcgcagtctggcgcggccctcggtgacggcactcactcctctcaggaccccatgcaggccccgccccgtctcagctcgtgcagactctcgcgagttttgaagccgcggggccgggcggctgcaatatggcggaggcggaaggggaaagcctggagtcctggctcagtgagtagccgcggccgtttctgcctgccctcgagccgctgggctgcccctgtcttcacccccacgtcccctccccgggctccacggcgtcgcctcttggcagcccacgcccggtctcgccctcgccgcgagcagcctgcgatcacgccccttccctatcagggcgccgggccccagtccggcccccgcttccctcgctgcggcgcgtcctcttgctctggcgcgcggcggcgtgaactcgggctcctgtcgggcaccgcaggctcggggaaaggcgacagccaagatcttcgggctgacatgcttcggcgctttggggagattgtggtggggtcgccgcccggcggtgacaccaggaacccagcgccccaatccctgactaagggagaagcttcggattggggctgagtctccggtagtggtgggtgctgccgactgcgttcagtcgcctggcagcttcagaattgtgaccatgtgttggagaagtgacggcttcgctcaggcagaatgcttgaagtgagaataatattccaaagagagcgatgatagagaacagagagctctacctttttcctgcagtgaccacagaagcatggtgaaatcggtgtcgggaattccccccccacacacatacatatacccccttgaatatcctaacgagtcagtgttgatagcctattctgagtaaggctgaggagcacagtctgaagctgtagttatagaagcgtattgctgtcattgcactgtgaattacagtgctacgaaggaaatgtgtgttaacctggttagcaggtagtactctgcctgagggttaataagtgaactttcctgtaggctagacctggaagcctcctttaagtggagagagaaattggactggtaatgggataggtgagatacctagtattgccttgttctgaggtctcttatttagtactgcttccgggatcttggaggtgatagctatttcctcaaattgtctgatttttcctagtaagaaacccccttcaggaggttgagcttcagtttaaaggggagcatatcccaaaagagagaaaaagtaagatcacgtttgcaaaatctgcagttgcaggcaggtcataaggcttctttatatatggaagtgttctccaaggagctcaaagtactttacagatattcattaaattagtttaccaagtattctagcaaagcaggcactactgccataatttcacaaaaagaggacatcctgactccagtcaaaccacttgcccagaaatgcccaacttgctataaccagagtggaattagtttgctttgaaggtattaatatgggtattgaataatttaaatgacctaagctgagtttaataggctacatttagagttacattttgtttttgttacttgtttttgagacagagtctcgcgcgctgttgtctaggctggagtgcaggggtgcgatcatagctcactgcagccttgaacccctgtgctcaaataagtcttctacctcagcctcctgagtagctgggactataggcacacgccaccatgcttggctaattcttttgatttttagtagagatgaggtcttgctgtgttgcccaggatggtctcaaactcgagttcaagtgatcctcccacctttcccttacaaagcgctgggattacacacgtgagctaccgcacccagcctagagtcacattatgaaatgagagggacacacttggtgggggggagtcacatggtatctgtagagacataagcttcacagttgttacgacttaatgtgaactgtaccagttgaacaaaccagcagttggggttcagcatcgtctcagtcagcgtccttgtcaccccacgtttgcctgaattgttgcagaagcctctgcttggcccagagacccaggtctctcccgtcctcacctctcctcagtccattctgctcccagaagcgcacttgtgttgaatcaaatcattccactgttgcctgtaatctggccttggttgttccaggcctttttctctgtggcttctacgttttcctgctctactcagtctgatgttcttggtttaccaatacacgttgctctccttacctggaagccctgctcccgtttcctcaactaaatgcttgaaaacccatctcagattctcttttctcacaaaccatctcttgatgacttcagtcttctttcaagtcccaccatgatcaatcaatcaatgtttaatgagtacctgctacgtggggtgttataggagttaggaagtttaagaagattttgcctttagttggatggaggtgatgctggagtggatgaagaactctcctgtaatcccagcacgttgggaggccgaggcgggtggatcacgaggtcaggagatcgagaccatcctggctaacacagtgaaaccccgtctctactaaaaaatacaaaaaaatagccaggcgtagtggcgggcgcctgtagtcccagctacacgggaggctgaggcaggagaatggtgtgaacccgagaggtggagcttgcagtgagctgggattgtgccactgcactccagcctcggtgacagagcgagactccgtctccaaaaaaaaaaaaaaaaaagatacaaggcagtgctaaaacgccggcattctctttagggaactggggatgggggaagagatgattcattgaggatactccatttgagctagccattaaataatgggaaaagttggaaaaaaaaaaacactagatggtgatgtggagagagcaaacctgtttggggcacacagtaacagaggtgtttgggaatgagggaagataaggctgggaagttaagaccagattctaccaagtctccaatttccagcccaagaagtttattttatttatttatttatttgagacagagtcttgcactgtcacccaggctggaatgcagtggcacaatctcggctcactgcaacttccgttgcttaggtgcaagcaattctccatcctcagcctcccaagtagctgggactactggtatgtgccactacacctggctcatttttgtatttttagtagagatggggtttcaccatgttggccaggctgttgtcaaactcttgacctcaagtgagccacctgcctcagctccctccaaagtgttgggattacaggcttgagctaccacgcccagcccagccgaagaagtttaaatttctgcagttatcaggccctcattccttctgtactaggtgaaatcggtgttttggtgtcttaagaggcttgatttgatataggtttcatgcgcgtccgtgtgaagagactaccaaacaggctttgtgtgagcaacatggctgtttatttcacctggatgcaggcaggctgagtccgaaaagagagtcagcaaagggtggtggattatcattagttcttacaggttttgggataggcggtgaagttaagagcaatgttttgcgggcagggatggatctcacaaagtacattctcaagggtggggagaattacgaagaaccttcttaagggtgggggagattacaaagtacattgatcagttagggtggggcagaaacaaatcacaatggtggaatgtcatcagttaaggctatttttacttcttttgtggatcttcagttacgtcaggccatctggatgtgtacgtgcaagtcataggggatgcgatggcttggcttgggctcaggcctgacattcctgccttcttatattaataagaaaaataaaacaaaatagtgttgaagtgttggggcagcgaaaatttttgtggggtggtatggagagagaatgggcgatgtttctcagggctgcttcaagtgggattaggggcggcgtgggaacctagagtgggagagattaagccgaagggagatcttgtggggatgttagaagaaacatttgtcgtatagaatgattggtgatggcctggatatggttttgtatgaattgaaaaactaagtggaataagagaaggagaaaaacaggtataaaaggtctaagaattgggaggacctaggacatctgattagagagtgcctaaggagattcagcatagtcctgccagcaaagattatttatttacttcaagagttaagagtggcagtttggggatagcacgaggagatatcacctgtgatggcttggagaaacagtgtaaaccagcagtgtaaacaagagcagggcatgtatgagtagttgagaacgttgaataggagtatgactagacagaagatagtagggatgatgacaggttttttttgggggggggggcacagtctaagttggtctggtgtctggaatgagactggggcctaataaaaaggagcatctatacaggagcttaaatgggctgtaccttgtagcattctgaggacaggtctgacttctgagaagggaaagtggtaaaagtattgtccagtcctttttaagttggtggctgagcttggtgaagtgtttttaaaagacctttagtccgttctgcttttcttgaagacggaggaccgtaagggatataaaggtttcactgaatactaagagcctgagaaactgcttggctgatttgactaataagggctggtctgttagactgtatagaggtgggaaggctaaactgaggaattgtgtctgaccgaagggaagaaatgactgcggtggccttctcagaccctgtaggaaaggcctctacttacctagtgaaagtgtctacttagactaagaggtattttagttatctgactcggggcatgttgagtaaagctaatttgccagtcctgggtgggggcaaatcttcaagcttgatgtgtagggaagggagggggcctgaataatccctgaggagtagtagaatagcagatggaacactgagaagttatttccttgaggatagatttccacaatggaaaggaaatgaggttctaagaggcgggctagtggcttgtactatagcatagcctgcctttgctgctgtgtggcgattaggcctgctggaactgccatcaataaatcaagcgtgatcagggtgaggaacaggaaagaaggaaatatggggaaatggggtgaatgtcaggtggatcagagagatacagtcatgggggtcaggtgtggtatcaggaataatgtgggaggccagattgaggtccgggccaggaacagtggtaattgtgggacttaacaaagagtgagtacagctgaaggagccggggagcagaaagtatatgcatcaggtatgaggaagaaaataatattggaagttatgagaaatgtagagagtgagttgagcatagtttgttatttttagggcctctaaaagtattaaagcagcggcagccactgcaagcagacatgagggctaggctaaaacagtaaggtcaagttgtttgggcagaaagactacagggtgcggtcctggctcttgtgtaagaattctgacacactaaccatgcctaggaaggaaaggagttgttgttttgtaagggattgaggtttgggagattaatcggacacgatcagcagggagagcacgtgtgttttcatgagaattatgccgagataggtaacagatgaggatgaaatttgggcttgactgaagtaatgggggctgtctgtgaagccttgcagcagtacagcccaggtaatttgctgagcctaatggatgtcagggtcagtccaagtgaaagcaaagagaggctgggatgacgggtgcaaaggaattgtaaagaaagcatgtttgagatccagaacagaataatggattgtggagggaggtattgaggataggagagtatatggtttggtaccatggggtggataggcaaaacaatttggttgataaggcatagatcctgaactaacttgtaaggcttgtctggttttaggacaggtaaaatgggggaattgtaaggagagtttataggctttaaaaggccatgctgtagcaggcatgtgataacaggctttactcctttcaaagcatactgtgggatgggatattggcattgagcggggtaagggtgattaggttttaatgagatggtaaggggtgcatgatcggtcgccaaggagggagtagaggtatcttatacttgtgggttaaggtgggggggaatacaagaggaggacgcaaaggaggctttggattggaaagggcagcaatgagatgtagctgtaacccaggaatagtcagggaagcagataatttagttaaagtgtctcggcctaataagggaactgggcaggtggggataactaaaaacgagtgcttaaaagagtattgtctaagttggcaccagagttggggagttttaagaggtttagaagcctggctgtcaatacccacaacagttatggaggcaagggaaacaggcccttgaaaagaaggtaatgtggagtgggtagcctccgtattgattaagaagaggacggacttactctccactgtgagagttacctaaagctcggcatctgtgatggtctatggggcttccgaggcgatcgggcagcgtcagtcttcagccgttaagccgagaagatctgggaaggagtcagagagccttgggccagagttccaggggctctgggagtggctgtcaggtgagttgaacagtccaattttcagtggggtcccacacagatgggactcgcttaggaggaatcccgggctgcgggcattccttggctcggtggccagatttctggcacttgtagcaagctcctgggggaggcagttatggaggaatgcctggccactgcggtttaggcgtttggaagttcttgtgtgctggagatgtagctggggtttgtctcacagtggaggtaaggaattgcaactcagaaatatgttgttacttggctgcctctactctattattgtacaccttgaaggcgaggttaattaagtcctgttgtggggtttgagggccggaatttaatttttggagttttatttaatgtcgggagcagattgggtaataaaacgtatattgagaataagacggccctttgacctcttagggtctagggctgtaaagcgtctcagggttgctgccgaacgagccatgaactgggctggatttttatatttgatgaaaaagagcctaaacgcttctgatttgggataaagaaaaaggagcattaaccttgactatgcctttagctccagccacctttttaagagtaaattgctgggcaggtgggggagggccagtcactgaacgaaactgtaagctggaccaggtgtgaggaggggaggtgataaaaggattctagggtggaggagcagaggctgaggaagaattgggacctagatggcctggcgacgagcagcctgaggagaaggggaaaggtcagatgggtctgtagaaaagactggaaagacccagcgacacttggggttgggactgaggggacaggcgggagggaaagaaggaggatttgggaggaatcgcattgggaacagagacttgagagggaacgaagtgtgaaaaatgcctggatgtgaggcacctcagaccatttgcccattttttgacaaaaattatttaggtcttataggatggagaaatcgaaagtgccgttttctggccatttagagccattgtcaagtttgtactggggccaagcggtgttgcagaagaaaataaggcatttaggttttaggtcaggtgcgagttgacgaggttttaagttcttgagaacacaggctaagggagaaggaggaatggaggctggaaggttgcccatagtaaaggaggcaagcccagagaaaagagagagtagagacacggagggaaggggttcgagggttcttaccctccagaaaagcaggaaaggggtcagggtgtggaaataagggattggggcacacagataagaggtcggggtgcggaaataagggattgggggttcttgccccctagaaaagcgggacttaccgctaagggtgaaggagaaggggttgaggggtacttgcccctcccccagaaatgcagagaaggggtagagacacggagagaaggggttgtggtacttgcccctcccccagaaaagcaggacttgccgctaagggtgaaggaccaaggcaggcgtccctgagtggtctgacacctttgaaacgtgagtgaataatcagagaggtgtccctgcaatgattaaacaccaaggaaaggctgccttcccagtctgtgaccagcgccagagttttgggtccacggataaaacgtgtctcgtttgtctctaccagaaaatgaaaggaattgaaattaagagaagggagagattgaagagtggaaaggagaaagtggttgagggatagtgagagaggttggagaagagagtaagaagaggccgcctacctgatttaaaattggtgagatgttccttgggctggtgggtctgaggacctgaggtcgtaggtggatctttttcacggagcaaagaacaggaggacaggggattgatctcccaagggaggtcccgcgatccgagtcatggcaccaaatttcatgcgcgtccatgtgaagagaccaccaaacaggctttgtgtgagcaacatggctgtttatttcacctggatgcaggcgggctgagtccgaaaagagagtcagcaaatggtgtggtggattatcattagttcttataggttttgggataggcggtgaagttaagagcaatgttttgcgggcagggatggatctcacaaagtacattctcaagggtggggagaattacgaagaaccttcttaagggtgggggagattacaaagtacattgatcagttagggtggggcagaaacaaatcacaatgctggaatgtcatcaggtaaggctatttttacatcttttgtggatcttcagttacttcaggccatctggatgtatacgtgcaagtcataggggatgccatggcttggcttgggctcagaggcctgacaatagggactttacataggattaggatggattagaacagaagttctagaagcaggtgagaaggagtggagggtagggataaggaaggaagggatttaagaagacattgagaaggaaaggaccacaagactgagaggaatggatgaggagagagggaagaaggagtcaaaaaagaggtgggggaataggggacttttggaaggtgcagcatttataggaatagtgacttaatagaccacatgcagtggctcattcctgtggtcccagctactcaggaggctgaggtgggagcatcgcctgagcccaggagttggaggctacagtgagccatgatcgcctactgcagcccggggcaatagagtgagacccccatctctaaaaaaagaacaagcacacgcctgtgggtggtcccagctactcaggaggttgaggtgggaggatcacttgagcctgggaggcagagactgcagtgagctgtaagagccactgcactccaacctgggtgacagagtgagaccccgtctcaaacaacaaaaaagaaaaaaaaaaacgaaagacgccaggcactgggactcacacctgtaatcctagcaccttgggagttaaaggcaggcagattgcttgagcctaggagttcaagaccagcctgagcaacatggcaaaattctgtctctaccaaaagtacaaaaaattagctaggtgtgatgtgagtgtctgtggtcccagctaggctgaggtagaagaatcatctgagcctgggaagttgaggctacagtgaagccatgatcgcaccactgcactcttgcctgagtgacagagtgagaccctgtctcaaaaaagaaaaaaaaaggaagaagaaaaagaaatggggaagtcaggaaaaagaagtgatgcttttttttttttttttttttttgagaaggagtctcactctagtcgcccaggctagagtgcagtggcacaatctcagctcattgcaacctctgccgcctgggttaaagcgattctcctgcctcagcctcccaagtagctgggattacaggcgcctgccacttcgcctggctaatttttgtagttttagtagagacagggtttcactatcttagccaggctggtcttgaactcctgacctcgcgatccacccacctcagcctctcaaaatgctgggattgcgggtgtgagccaccgtgcctgggccatacatttgtttttacactcatttctgtaccaaattagcccaattatctactgtcttgttttttgaactgattttttttttttttcatgtattgaaccaggagagcacagcctccttgagggtaaaatctgtgtctggaactttttctgtagtccctccagggtctggcatgctgacatgctgtttacttcattgtctgcgggtgcttaacaaagacttggtgattgactaagtttgtgtttccattcaggaccctagtgaaggttgacctttattccctttccagcccatgttcttgcttctgcttgtttgtaagtcatttgttacgtagatttttctttttggagatggagcctcactctgtggcccaggctggagtgcaatggcctgatctcagctcactgcagcctctgcctcctgggttcaagtggttctcctgccttagcctcctgagtagctgggatcacaggtgcgcggaaccatgcccagctaattttgtgtttttagtagagatggggtttcaccatgttggtcaggctggtctcgaactcctaacctcacgcaggtgatccgcctgcctcggcctcccaaagtgctgggattacaggcgtgagccaccgtgcccagaccatatgtatataattttttttttttttttttttggagatggagtctcactctgttgcccaggctggagtgcagtggtacaatcatggctcactgcaacctctgcctcctgggttcaagcagttctccagcctcagccttcaagtagctgagattacaggtgtgtgctaccgtgcctagctaattttagtatttttagtagagacaggatttcaccatgttgaacaggctggtcttgaactcctgacctcaaatgatccacctgccttggcctcccaaagtgctgagattacgggcgtgagccaccgcatccagcctgctatgtagatcttgttttctctggaatgtttgagccgtgctggaatggggtacccaatgctgctgtttccatccccacatgacgttttaagtcccacgagagtaggctagcgatggagtgaagctgaaaaatgaaagcaggaaatccagagacacagaaacagatgaggctttcaacagagactcgaaaatagacagaaaccatgagtcagagcagagcccggaggggcggttcgggaaggcaaggtctataggggaagctcgggtgtcacctctatgccaggtgaaggaaatgttgagtgggtgggaggctgtgtgcatctgctggggaggcagtaggcagatggaaagatcaagtcacccagaattatccccagaggttccttcccgttcctgtgggcgggtgagctctgctttctgagctgcccagagagctggaggagatagacatggaactgaccattgcagaaactagggctttttgtgcccgtgagtaggcaaagagctccctgtggatttgccataaaaaggtctatcaaggtggaagaaagtgagattctagagaaattaatacaagtgaaaagtgggcaggagtgttcttggaagtagaaatgctgttggaagtctaatagacttgggaagaagataacgtatggtgaataccagttgcttcgggggttggggggatccacattttactctgtactcagaagatgcttttccccgtgcaaaaagtgaaagtgagtgggccagtttttcttctgtcacaaggtgtatgactgttcccaaaataatagccctgggggatggggattgcttctcagaccattcaatttttgtaccctgtagacttttggtgttatgtgagaactttaagcacctgataggaattagtaacagagctacgctaatgcctgaggaaatttcagacaattggtgggagagacttggcatttggaatgtgatagctggtaggctaccatacagtaatgcaggattgccagacatttctttccaaatggctacccttgattacatttaactcccctcctttcaagctccagattttgaaggacctgttaattctctttcaagattgaagacagacaccttctttttcttctaaagaggaacctaggcggggtgcggtggctcccgcctgtaatcccagcactttgggaggccagggctggtcttgacctccttacctgaggtcaggaggcctggccaccatggcgaaaccccatctctactaaaaatacaaaaagtagccaggcatagtggcgcatgcctataatcccagctactcgggaggctgaggcaggagaatagctcgaacctgggaggtggaggttgcagtgagcctagatcgcgccactgcactccagcctgggtgacacagcgagactcaatctcaaaataaataaataaataaatatgaacctaaaccatcagaatcttccccttgcagccacaacagaaacactgccggggaggccgagccccgacctgggaagcagggtgatacactgggtgccacgggccttccctctgcctggcagctgtcgctactcagatccctgcagccctgttgccagtgaaggagctggagtctctgttatgatgtgttcatccagctggtgagtttttttttttttgttttgttttttttgtttttgtttttgttttttttttagacagagttttcacttgttgcccaggctggagtgcaatggcacgatctcggctcaaggcaacctctgcctcccaggttcaagcgattttcctgcctcagcctcctgagtagctgggactacaggcatgtgccaccatgcccagctaattctgtatttttagtagtgatggggtttctccatgttggtcaggctggtcttgaactcctgacctcaggtgatccgcctgcctcggcctcccaaagtgttgggattacaggcgtgagccactgcacccggcccagctggtgattttttttttttttttttttttttttgagacggagtctcgctgtcgcccaggctggaatgcagtggtgcgatctcagctcactgcagactccaccccccgggttcgcgccattctcctgcctcagcctaccgagtagctgggactacaggcgcccgccaccttgcccagctaactttttgtatttttagtagagagggggtttcaccgtgttaaccaggatggtctcgatctcctgacctcgtgatccgcccgcctcggcctcccaaagtgctgggattacaggcgtgagccaccacgcccggccccgtagctggtgatttttaaagttaacaaaatacaattatgagaaatcagaattcagaaagtaatgacagagagggccttgtcgggaggggctctgacaccctgctttgggccctcatagagatctggggagggagcaggagtgttttaaggggtgtgcgtcttcagccttccatttgtcttcagaacccaaagccctaaatttagcaaacagctggagagtgctttctgaagagggaggctctggacctgaatcagagatgggaacccatgtaaccaccctcagctgggctcttcagtgtaatcacaggtttgggaaggtaactgaggagagcccatgccaaatatcagaactttgcatttggtgcctggattttaaatcccaggggccctctgagaactctagtacttgtgtttgtgcttgaccatggaaggccattagagcctgggggtgctagatactcaagctgcaatcccaggcaagttgcacggtgaccagggcttagtaggggctaagtaaatgttgttggcttgacaatgatgagcattatgtgcaatttcaaaaacacttaaagcattatggaaggctaggtctggaaaaaccttttgacaggtatgtggaaaatattcgctgggcgcggtgactcacgcctgtaatcccagcactttgggaggccaaggcgggccgatcacctgaggtcgggagtttgagaccagcctgaccaacatggagaaaccccgtctctaccaaaaatacaaaattagttgggcatggtggtatgcacctgtagtcccagctacttgggaggctgaggcaggagaatcacttgaacccgggaggcagaggctgcaatgagccgagatcgtgccactgtactacagcctgggcaacaagagcgagactccatgtcaaaaaaaaaaaaaaaatttgtggttacaaatatgtatttttttatctagttcagtctgatttcagtttccccaaaaacccttcttgaccatctccacttgcttaacactgagctcatttttatatagctggagttccctttattatctttacatgtttcatgtaggcatttttttgggaatattttaattatttgtgtttgtccttttgaccttgattccactctaagcttcatgagacagaatttgttttctcttttatttgtgactttcaaaatactggacagaaagcagtatttgtatttgctctccgactgaattttttttttttctgtctccttgctactgactgttctactgaggcttctctattagagagtaaagttgaaagcaaactcttagtgcttaaaacttgcgaagaaaaccttccattgcatcctcattgctcttcctaacacttgtcctcttctttgttgtgttgcaagataaagccaccaatccttccaaccgccaggaggactgggaatacataattggcttctgtgatcagatcaacaaggagctggaagggtgagtctcagcactgtgggggcagctgagagggagcggactgggaaggggaacaaccatggccaaggagggccagccaggtagccccaggcttagtgcactggagtgtgttctgcttgtcccccaggccacagatcgccgtccgactgctggcccacaagatccagtccccacaggaatgggaggcgctccaggccctgacggtaggtccttcactctccggaggtggaaaccgcagcccttcacctgcccacgccattcctcgtgtccccatagcggttcttagggctcctgccaaaagccaacagaaagtccttgatacagactagatagatctcgaatctgttcagccagctgttccacaaatctgtgtgcattgtgccaggccctgaggcctcagaggtgactgcagtgccgtccctgccagcatggccacatggttagtgtgtgaggcagaggggctaaggaaagcagcccagagtcagggccctgagccccatgtggcgcaagagaaggcttggtgaagagatgctgacagggctgtgttgatagttcagagctggccagctgaagaaaagaggggtcggtccagttcattctgtagttaaacaatgccagtcactagcgaaggtgtcgcactgatggctgaggcccctagggcagatcctggtgtctgttcagactgagggaatttaaggtgtggaatggtgcctggccctcagtgcctccacatgctccgaaaacaaagagcagccgagatctgaggaatccggggctctagcctgactgcattcaggtcctggaaagcgaaaagaggaaatatcatctggttcacatgcacccctcagtcatatttgctgtagaacgaattccttaaaacagtgattctcagcagggcacggtggcttgtacctatagtcccagcaccctgtggggcctaggccgggaggatcgcttaagggaattcaagaccagcctaggcaacgtagtgagacattgtctctacaaaaaataaaaaaatcagccaggcacggtggcacacacctgtggtcccagctcctcgggaggctgaggttgaaggatggcttgagcctgggaagttgaggcgaaagtgagtggtgatcacaccgttgcactctagcctgaccaacatagcgagattctgtgtcaaaaaacaaaaaaaaaacgtaacaaaacccagtgattctcaacagggccctccagggaacatttggcagtgtctggaaacatttttagttgtcacacatcggggtgggggtcctcctggcatcaagtaggcagaggccagggatgctgttcgacaccctataaagtgcagagtggccccccacaacgaagaatgaccagcccaaaatgtcagccaggcctcacctgagaaaccttgctttaaaatgcagaagccaagaaagagagcctggacagtgcactcccccttagaaaccgcagtgccagggaccacaggcagcacaggaaagccaaagcgtgagttagggagataagcggagggaggagaaatatcctgtcatctttctcacagataataggatttaaacatccctcccattccctgcacaattgttggtgagcttgtggaaaaaacccaggacaccaagtcagagaaactttgtccctggacctcacctccctcattgtaaaacacgaggccagaatctttaaggaaggcaccttccaggactggcatccaggccttcttggggtcggggtctcggggtttcttgctttagtccctgcccagcttccccagcagaggtttgcagttggagggacatggtctgtgagtgatctcgttgcttaattacactgtccccgggcagtgcacactgcttttcgtgatgagctccttcctgtgggcgtgtttattcagtactctctgggtgccagggatcttgccagtgccaggttccagccccgagcacgccctcactgagcgcctctcctctgtgcggctacaggtgctggaggcatgcatgaagaactgtgggaggagatttcataacgaagtggggaagttccgctttttgaatgagttaatcaaagtcgtctctccaaaggtcagtcagcggcagattcctcgcttttagggacttcttttgtgttcattcccatctcccatcatactggctttcactgcccatccaacatctccagggagctgagattatttgtgtcttgtccttagagagctaggccctggaggtaacgggatgaccaaacaggccacagggaccggcagctttttctgaagcgccctcagcccaaatctgacaggtgatgtggtagtggctgtgtgtttgtccagggtgagggcccatgtagtgtgggactctaggcacctggcacatggcagttgtgggttttgtgggttttcttggcctgtgtcacgtggatacggggagctggcctccgtcattgctccgatgctcagctggccgtgttctgttgcacgctggtgtggcgcagctctgggcccccacttaaagcagagggaatactttaccatgctaaagacattctcatggacacccccaagataaaatgcagttgtgtttctggcaacttgtgcgtgaaaatgcactttcctcagaactcaaaatatccacccaaccatggcctgcaccacatgggcatcagggtcacaaggaagcctctctgtcttgatgtccccaaggtagtaaggaaaggcagagagcaggggtgagcaccgagggcatggtctctggtgtcagactcaggtttccatccggcccttacaccctgggcaagttagatgatcccaggcggcaaatggggacgccacccctactgacgtggctgctgtgcagatgagtaaggtcatgaatacacttacaggacacttcctggacaggaggtgatgacctcctggccccctgcctatccacagactgtatccagatggacacagccacaccacagggagtcgttcccctccccacgctgtctcacacacacttggacacctgcagattttgagtaggaccatagctgctgagcagccacgccattgctgtggagggagccttacactttctctgcctccgaactgcacttactaggtcctcattttcttttgccatgtagtacctgggggacagggtgtctgagaaagtgaagaccaaggttattgagctgctgtacagctggaccatggccctgccagaagaagcaaagatcaaagacgcctaccacatgctgaagagacagggtacgtgtctgcctgcccgcagcctccaggcagccctcgaaggctggcccaggcaaggagagaagggaaggtttgggatccccagagtccctcctgaagagaacagcatttgtccccaggcaaggctgagtcggagttggatgggataaggtgtagcagcctgccctccaccctgctaccctttgcaggtcttgatcacagggacgtggcccttggtgtatgaggaggggtgacaaggcaaccacagcctgagtgcacgtgctgccatgtcccctttcaggcatagtgcagtctgacccaccaattcctgtggataggacgctgatcccctctccaccacctcgtcccaaaaaccctgtttttgatgatgaggagaagtccaaggtaaaggacaccctgggcctgggattttctcatacgagagtgggtggcagcaggggaatgtggtttgcactgtgctgcggggagcctctggggtttccctggggtacgggtgctgcctcttcccttcacctctgatttcctcctctctcagcttttagccaagctgctgaaaagcaaaaacccagatgacctgcaggaggccaacaagctcatcaagtccatggtgaaggaagtgagtgggccccggtccttcaggcacggggtggaggagcccatggccacacagcagaagccgctttgccccggacacgggcctgttttgttctcccctgctgccagctgccctacctgtgccccggtggctgagagtgggaggaggagcacaatagcttccgcgggagcacggaagagaggagtgggttgggagcagtgttgtgaaagcagaagtatagactgggccccaggcaccccacactgaaaggagcttccgagcgtctgtacttgtgttgtggggtaaggtgtgacctggtggaagtggaaagacagtcaagtgacgctctctttctcttgaacttcttcactggggcaggacgaggcacggatccagaaggtgaccaagcgtctgcacacgttagaggaagttaacaacaacgtgagactgctcagtgagatgctgcttcattacagccaggaggactcttcggacggggacagagagctgatgaaggtgggaccgccgacggcaaaggctgcctcccggggctgcgctgcccttcaggagctcagccagcatttgctgagcacgtgccttgtcagagacacgggctgtgcacttggcagtgtattcatgaccttactcatctgcacagcagccacgtcagtagagggtggcgtccccatttgcctcctgggatcagctgacttgtccagggtgtaagggccagatggaaacctgagtctgactccagagaccacactctcggtgctcacccctgctctctccctttccttactaccttggggacatcaagacagagaggcttccttgtaaccctgatgcccatgtggtgcaggccatggttgggtggatattttgagttctgaggaacatgccagcctggaaggcaggaggggactgacttcccctgacccatcctggtgactgctacctagacaaacatcctgggtgatgtggtgtggtggtggtggctggtggcaagaagacgtgcgctgtgatcccagctttgctggtaattgaccgtggcaattggcatatcccggtcattttctgggcatgaaccctgaatgaatcagatgatctctaagggcctttgtggtttgatttttatgtccgagtctctttcaggagctgtttgatcagtgtgagaacaagaggcggactttatttaaactcgccagtgagactgaggacaatgataacagtttgggtgagtgaaagagcgacggtcagggataagccaggcatttggatatgtgggtgggaactgtcacaacaggagtgagaagtctctctttcctgctccaggggacatcctgcaagccagtgacaacctctcccgggtcatcaactcttacaaaacaattattgaagggcaggtcatcaatggcgaggtggctaccttaaccctgcctgactcggaaggtgagatgctctggtccccaactctaggctcctccagaccagcctcaggcccctatcatgaagctgcgggtgtaggctggccagcgtggtggtgttgcacaaggcccaagggagttctttgccattccaagcaatcctccggcttcccggaggcctggagatgtgggtaggaatttccccacctgctttctcgggcttgctttgcagcatcccctggcagagatgccgttggattaggccagaggctgtagcagtgacctctgtgcctagggtgctgcctcctgccacacagccactagaagacccctaattattcctgttctgctctgttgacccatccaggaaacagtcagtgcagtaaccaaggcacgctcatcgaccttgcggagctggacacgaccaacagtttgtcctccgtgttggccccagcacctactccaccctcctcaggcatcccaatcctccctccaccaccccaggcctcaggacctccacggagccgctcctctagccaggccgaggccaccctggggcccagcagcacaagcaacgccctctcctggctggacgaggagctactctgcttgggtgcggcccacagggggcgtcaggggcatcccctgacagggctctgggaggaagggtgtgtggaattaggagccctgagcggggccccagtgtgactgttggggtgggcaaagaaccctgagttggaggtactcagtgaagttcagcgaccctgagggccccagggccatcctcccggtggactctgcctcctgccctgcaccccgccccacaggccccccgcttctgcatcatggactggagcgctccattcccctctggaggctgcctgcagaacagcttctcccggcgccttcacccattgatgtcacttgtcacctgacccctcctcaggcaaggcggggctagggctgcctagctcagagcctcttctcatcctgttttcttctctattgtcaggcctcgccgacccagcccctaatgttcctcccaaagagtcagctgggaacagccagtggcacctgctccaggtaggggcacaggatcggtgacagcactactgtgccaaggacctccactttccagcgtcatgtctcctgggctgcagttagctgtccttccctccagagcgtgccagctgcagcggggaacaatgagtgcctccggggctgtcttccgtgcagtccttggagggctgcgccccgttccagcggcaggccctccccacccgccctcggctcaccaccctttctgttgttcatagagggaacagtccgacctggacttcttcagccccaggccggggaccgctgcctgtggcgcctccgatgctcctctgctccagccctcagccccctcctcaagcagctcccaagctccactgccgcctcccttcccagctcctgtggtcccagccagtgttcctgcccccagtgcgggctcctccttgttttctactggagtggccccagccttggccccaaaagttgagcccgcagtccctgggcaccatggcttggcgttgggcaacagcgcgctgcaccacctggatgccctcgatcagcttctagaagaggccaaagtgtaatgagtgggaggagatgtggggttgctgagggttgggcctgaatgtgtcagaaccagagctaactttgaaggggtgggggtgccttgtagtcccatcagtcaggctggaaggcaaggggtgggcctgggtaagagcatggtcaggggccttgggtgagagtcctgcagctctggctggctctctgacgtgctttccatccttcccacctcccaggacctcgggcttggtgaaacccactacctcccctctcatccccaccaccaccccagccaggcccctcctgcccttctccacggggcccggcagcccgctcttccagccactgagtttccagtcccagggcagccccccgaaggggcctgagctctccctggccagcatccacgtgcccctggaatcgatcaagcctagtaggtgttggaggattgaggtgggtggggcggtggggcctatagccacggagctgtaggacatgcgacagggatggatccaggcactctttgcagggggtcccttaaagccaggcaggcctccctgcctgcattctcagtcttaagctcctcactgagcgcctctcccagattccgttaggaagcactggactcatcatgaccacggagtagcccttttctcctcaccgccggggctctgttgggtgtctctggtgctgctcctcccacactcacgtcacgttcttacaggcagtgcccttcctgtgacagcctacgataaaaacggcttccgcatcctcttccactttgccaaggagtgtcccccaggacgacctgacgtgctggtggtggtggtgtccatgctgaacacggctcccttacctgtcaagagcatcgtgctgcaggctgcagtgcccaaggtaccagtgtctccctggggccaaaacggccttatcttgaccctgttgtgtagaggcctttgcagccagcaggtggcagtgtgtgtgtgcactgcaggttccatctgggggcacctaccagttctcttcaaaggagtttctctctctttagtcaatgaaagtgaagttgcagccaccttctgggacagaactctctccatttagccccatccagccacctgcagccatcacccaggtcatgttgctggccaatccactgaaggtgagcagcaaagaacccaggggtcccagcctgaggccccagctgccccagattaggacgtcaggcccaccacctcccagctggaagtgttttgactgtaggattgacacatccctttgctgccttaggttaagtgtctgagcatggttgggggttgcggggaaaagggaccattcctctagcacagagagggtagcagaatagagggcgtcctgccaaggggccgcctgggctggatctcacttgctgccctctgtcacaggagaaggtgcggcttcggtataagctgaccttcgccctgggggagcagctgagcacagaggtgggcgaggtggaccagttccctcctgtggaacagtgggggaacctatgaccccagaggacgctgtgatctccaccttgaagccaggcaggctgccctgagacgaggagggctctggtcccgtcactctccatgccctgacaacagtgcttgtagctttgatgtggaacaggggccctgggcatttctgctgagaaccaaactgctgctgtgataacctctcctttggcccctaaaaggacctgtttttatctacctgtgtgacttgaagtggccatatgctgtcaggggtgcggagtggcccctgacttcactgctgtcccgggaacatggacccccaggcttggcgtaggtgtttgcttccttctactggcattcactgaagccactggggtggggggtggggggtgggagtctctaaagagagactgtcatgggtcattccccacaagagccacatcctcacacctgacagatgcacggcccaaggggctgcagccctgttgcaattccatgcttcccccgccaaccagctcctgctgccatccccagggaggtggcccaggaaggtgcctggcccagaataaggaactggcatactgcaaagtccccagccctgcctctggtggacagcatcgtcctggaatggccacggagtgatgagttgtgtgcttgtccctggcagtggcaggctgtgtcctatggacatcttggcaggacatggaatttggcctcatgacaggcccaactagggataggaaggaaaatgaagagagccagtatttccccttctccagaagcaggtactcagctttctgggaaaagcgtgcctccagccgtggggacaggccatcctactgactacctcttgcttggcatgaaataaactgctatcctcccctt

SEQ ID NO: 12212 - DNA, 2319 bp, Homo sapiens
aacaattcaggcccttgtcccaagtaggaggacattccccaagcaggcgggtaaagtctcctcctggtcaagtgctaacgataaagccaccaatccttccaaccgccaggaggactgggaatacataattggcttctgtgatcagatcaacaaggagctggaagggccacagatcgccgtccgactgctggcccacaagatccagtccccacaggaatgggaggcgctccaggccctgacggtgctggaggcatgcatgaagaactgtgggaggagatttcataacgaagtggggaagttccgctttttgaatgagttaatcaaagtcgtctctccaaagtacctgggggacagggtgtctgagaaagtgaagaccaaggttattgagctgctgtacagctggaccatggccctgccagaagaagcaaagatcaaagacgcctaccacatgctgaagagacagggcatagtgcagtctgacccaccaattcctgtggataggacgctgatcccctctccaccacctcgtcccaaaaaccctgtttttgatgatgaggagaagtccaagcttttagccaagctgctgaaaagcaaaaacccagatgacctgcaggaggccaacaagctcatcaagtccatggtgaaggaagacgaggcacggatccagaaggtgaccaagcgtctgcacacgttagaggaagttaacaacaacgtgagactgctcagtgagatgctgcttcattacagccaggaggactcttcggacggggacagagagctgatgaaggagctgtttgatcagtgtgagaacaagaggcggactttatttaaactcgccagtgagactgaggacaatgataacagtttgggggacatcctgcaagccagtgacaacctctcccgggtcatcaactcttacaaaacaattattgaagggcaggtcatcaatggcgaggtggctaccttaaccctgcctgactcggaaggaaacagtcagtgcagtaaccaaggcacgctcatcgaccttgcggagctggacacgaccaacagtttgtcctccgtgttggccccagcacctactccaccctcctcaggcatcccaatcctccctccaccaccccaggcctcaggacctccacggagccgctcctctagccaggccgaggccaccctggggcccagcagcacaagcaacgccctctcctggctggacgaggagctactctgcttgggcctcgccgacccagcccctaatgttcctcccaaagagtcagctgggaacagccagtggcacctgctccagagggaacagtccgacctggacttcttcagccccaggccggggaccgctgcctgtggcgcctccgatgctcctctgctccagccctcagccccctcctcaagcagctcccaagctccactgccgcctcccttcccagctcctgtggtcccagccagtgttcctgcccccagtgcgggctcctccttgttttctactggagtggccccagccttggccccaaaagttgagcccgcagtccctgggcaccatggcttggcgttgggcaacagcgcgctgcaccacctggatgccctcgatcagcttctagaagaggccaaagtgacctcgggcttggtgaaacccactacctcccctctcatccccaccaccaccccagccaggcccctcctgcccttctccacggggcccggcagcccgctcttccagccactgagtttccagtcccagggcagccccccgaaggggcctgagctctccctggccagcatccacgtgcccctggaatcgatcaagcctagcagtgcccttcctgtgacagcctacgataaaaacggcttccgcatcctcttccactttgccaaggagtgtcccccaggacgacctgacgtgctggtggtggtggtgtccatgctgaacacggctcccttacctgtcaagagcatcgtgctgcaggctgcagtgcccaagtcaatgaaagtgaagttgcagccaccttctgggacagaactctctccatttagccccatccagccacctgcagccatcacccaggtcatgttgctggccaatccactgaagtggcaggctgtgtcctatggacatcttggcaggacatggaatttggcctcatgacaggcccaactagggataggaaggaaaatgaagagagccagtatttccccttctccagaagcaggtactcagctttctgggaaaagcgtgcctccagccgtggggacaggccatcctactgactacctcttgcttggcatgaaataaactgctatcctcccctt

SEQ ID NO: 12213 - DNA, 24126 bp, Homo sapiens
acaacaattcaggcccttgtcccaagtaggaggacattccccaagcaggcgggtaaagtctcctcctggtcaagtgctaacggtaaggatgggcttggcgcctacacacccatcccaattcacaggcgatcccagatctgagctctttagctgaaccgcactttcagctccgcgttagaaccctagatcagccagactccttaggcgagaggtagtcactaaaccttcggattggcgcagggtcacgcagctaacttagaagcttgaatccagatactccggcccccagggcaatgctctctctaggggcccacgcggcctgcctgtggcccccttccttcctcgcagcgcccccccgccgctgctcgccaccctctcaccctggaagctgcaagacagcccgccgcacgcccaacgccaggcccgaccatcctcgggcaaccttcactgcgggggcagccatcttggctggccacgaggaccccacaaggactgccctcggcgcgcctgagcgagtgacgggaaacgggtgaaaaagactcctcagggtcctaaatctgcgtttctctccactgatctggacgttagagtttttcactccggggtccaaaggggagcgccaaaaggaaacccttgccctccctgtatccgtcgcagtctggcgcggccctcggtgacggcactcactcctctcaggaccccatgcaggccccgccccgtctcagctcgtgcagactctcgcgagttttgaagccgcggggccgggcggctgcaatatggcggaggcggaaggggaaagcctggagtcctggctcagtgagtagccgcggccgtttctgcctgccctcgagccgctgggctgcccctgtcttcacccccacgtcccctccccgggctccacggcgtcgcctcttggcagcccacgcccggtctcgccctcgccgcgagcagcctgcgatcacgccccttccctatcagggcgccgggccccagtccggcccccgcttccctcgctgcggcgcgtcctcttgctctggcgcgcggcggcgtgaactcgggctcctgtcgggcaccgcaggctcggggaaaggcgacagccaagatcttcgggctgacatgcttcggcgctttggggagattgtggtggggtcgccgcccggcggtgacaccaggaacccagcgccccaatccctgactaagggagaagcttcggattggggctgagtctccggtagtggtgggtgctgccgactgcgttcagtcgcctggcagcttcagaattgtgaccatgtgttggagaagtgacggcttcgctcaggcagaatgcttgaagtgagaataatattccaaagagagcgatgatagagaacagagagctctacctttttcctgcagtgaccacagaagcatggtgaaatcggtgtcgggaattccccccccacacacatacatatacccccttgaatatcctaacgagtcagtgttgatagcctattctgagtaaggctgaggagcacagtctgaagctgtagttatagaagcgtattgctgtcattgcactgtgaattacagtgctacgaaggaaatgtgtgttaacctggttagcaggtagtactctgcctgagggttaataagtgaactttcctgtaggctagacctggaagcctcctttaagtggagagagaaattggactggtaatgggataggtgagatacctagtattgccttgttctgaggtctcttatttagtactgcttccgggatcttggaggtgatagctatttcctcaaattgtctgatttttcctagtaagaaacccccttcaggaggttgagcttcagtttaaaggggagcatatcccaaaagagagaaaaagtaagatcacgtttgcaaaatctgcagttgcaggcaggtcataaggcttctttatatatggaagtgttctccaaggagctcaaagtactttacagatattcattaaattagtttaccaagtattctagcaaagcaggcactactgccataatttcacaaaaagaggacatcctgactccagtcaaaccacttgcccagaaatgcccaacttgctataaccagagtggaattagtttgctttgaaggtattaatatgggtattgaataatttaaatgacctaagctgagtttaataggctacatttagagttacattttgtttttgttacttgtttttgagacagagtctcgcgcgctgttgtctaggctggagtgcaggggtgcgatcatagctcactgcagccttgaacccctgtgctcaaataagtcttctacctcagcctcctgagtagctgggactataggcacacgccaccatgcttggctaattcttttgatttttagtagagatgaggtcttgctgtgttgcccaggatggtctcaaactcgagttcaagtgatcctcccacctttcccttacaaagcgctgggattacacacgtgagctaccgcacccagcctagagtcacattatgaaatgagagggacacacttggtgggggggagtcacatggtatctgtagagacataagcttcacagttgttacgacttaatgtgaactgtaccagttgaacaaaccagcagttggggttcagcatcgtctcagtcagcgtccttgtcaccccacgtttgcctgaattgttgcagaagcctctgcttggcccagagacccaggtctctcccgtcctcacctctcctcagtccattctgctcccagaagcgcacttgtgttgaatcaaatcattccactgttgcctgtaatctggccttggttgttccaggcctttttctctgtggcttctacgttttcctgctctactcagtctgatgttcttggtttaccaatacacgttgctctccttacctggaagccctgctcccgtttcctcaactaaatgcttgaaaacccatctcagattctcttttctcacaaaccatctcttgatgacttcagtcttctttcaagtcccaccatgatcaatcaatcaatgtttaatgagtacctgctacgtggggtgttataggagttaggaagtttaagaagattttgcctttagttggatggaggtgatgctggagtggatgaagaactctcctgtaatcccagcacgttgggaggccgaggcgggtggatcacgaggtcaggagatcgagaccatcctggctaacacagtgaaaccccgtctctactaaaaaatacaaaaaaatagccaggcgtagtggcgggcgcctgtagtcccagctacacgggaggctgaggcaggagaatggtgtgaacccgagaggtggagcttgcagtgagctgggattgtgccactgcactccagcctcggtgacagagcgagactccgtctccaaaaaaaaaaaaaaaaaagatacaaggcagtgctaaaacgccggcattctctttagggaactggggatgggggaagagatgattcattgaggatactccatttgagctagccattaaataatgggaaaagttggaaaaaaaaaaacactagatggtgatgtggagagagcaaacctgtttggggcacacagtaacagaggtgtttgggaatgagggaagataaggctgggaagttaagaccagattctaccaagtctccaatttccagcccaagaagtttattttatttatttatttatttgagacagagtcttgcactgtcacccaggctggaatgcagtggcacaatctcggctcactgcaacttccgttgcttaggtgcaagcaattctccatcctcagcctcccaagtagctgggactactggtatgtgccactacacctggctcatttttgtatttttagtagagatggggtttcaccatgttggccaggctgttgtcaaactcttgacctcaagtgagccacctgcctcagctccctccaaagtgttgggattacaggcttgagctaccacgcccagcccagccgaagaagtttaaatttctgcagttatcaggccctcattccttctgtactaggtgaaatcggtgttttggtgtcttaagaggcttgatttgatataggtttcatgcgcgtccgtgtgaagagactaccaaacaggctttgtgtgagcaacatggctgtttatttcacctggatgcaggcaggctgagtccgaaaagagagtcagcaaagggtggtggattatcattagttcttacaggttttgggataggcggtgaagttaagagcaatgttttgcgggcagggatggatctcacaaagtacattctcaagggtggggagaattacgaagaaccttcttaagggtgggggagattacaaagtacattgatcagttagggtggggcagaaacaaatcacaatggtggaatgtcatcagttaaggctatttttacttcttttgtggatcttcagttacgtcaggccatctggatgtgtacgtgcaagtcataggggatgcgatggcttggcttgggctcaggcctgacattcctgccttcttatattaataagaaaaataaaacaaaatagtgttgaagtgttggggcagcgaaaatttttgtggggtggtatggagagagaatgggcgatgtttctcagggctgcttcaagtgggattaggggcggcgtgggaacctagagtgggagagattaagccgaagggagatcttgtggggatgttagaagaaacatttgtcgtatagaatgattggtgatggcctggatatggttttgtatgaattgaaaaactaagtggaataagagaaggagaaaaacaggtataaaaggtctaagaattgggaggacctaggacatctgattagagagtgcctaaggagattcagcatagtcctgccagcaaagattatttatttacttcaagagttaagagtggcagtttggggatagcacgaggagatatcacctgtgatggcttggagaaacagtgtaaaccagcagtgtaaacaagagcagggcatgtatgagtagttgagaacgttgaataggagtatgactagacagaagatagtagggatgatgacaggttttttttgggggggggggcacagtctaagttggtctggtgtctggaatgagactggggcctaataaaaaggagcatctatacaggagcttaaatgggctgtaccttgtagcattctgaggacaggtctgacttctgagaagggaaagtggtaaaagtattgtccagtcctttttaagttggtggctgagcttggtgaagtgtttttaaaagacctttagtccgttctgcttttcttgaagacggaggaccgtaagggatataaaggtttcactgaatactaagagcctgagaaactgcttggctgatttgactaataagggctggtctgttagactgtatagaggtgggaaggctaaactgaggaattgtgtctgaccgaagggaagaaatgactgcggtggccttctcagaccctgtaggaaaggcctctacttacctagtgaaagtgtctacttagactaagaggtattttagttatctgactcggggcatgttgagtaaagctaatttgccagtcctgggtgggggcaaatcttcaagcttgatgtgtagggaagggagggggcctgaataatccctgaggagtagtagaatagcagatggaacactgagaagttatttccttgaggatagatttccacaatggaaaggaaatgaggttctaagaggcgggctagtggcttgtactatagcatagcctgcctttgctgctgtgtggcgattaggcctgctggaactgccatcaataaatcaagcgtgatcagggtgaggaacaggaaagaaggaaatatggggaaatggggtgaatgtcaggtggatcagagagatacagtcatgggggtcaggtgtggtatcaggaataatgtgggaggccagattgaggtccgggccaggaacagtggtaattgtgggacttaacaaagagtgagtacagctgaaggagccggggagcagaaagtatatgcatcaggtatgaggaagaaaataatattggaagttatgagaaatgtagagagtgagttgagcatagtttgttatttttagggcctctaaaagtattaaagcagcggcagccactgcaagcagacatgagggctaggctaaaacagtaaggtcaagttgtttgggcagaaagactacagggtgcggtcctggctcttgtgtaagaattctgacacactaaccatgcctaggaaggaaaggagttgttgttttgtaagggattgaggtttgggagattaatcggacacgatcagcagggagagcacgtgtgttttcatgagaattatgccgagataggtaacagatgaggatgaaatttgggcttgactgaagtaatgggggctgtctgtgaagccttgcagcagtacagcccaggtaatttgctgagcctaatggatgtcagggtcagtccaagtgaaagcaaagagaggctgggatgacgggtgcaaaggaattgtaaagaaagcatgtttgagatccagaacagaataatggattgtggagggaggtattgaggataggagagtatatggtttggtaccatggggtggataggcaaaacaatttggttgataaggcatagatcctgaactaacttgtaaggcttgtctggttttaggacaggtaaaatgggggaattgtaaggagagtttataggctttaaaaggccatgctgtagcaggcatgtgataacaggctttactcctttcaaagcatactgtgggatgggatattggcattgagcggggtaagggtgattaggttttaatgagatggtaaggggtgcatgatcggtcgccaaggagggagtagaggtatcttatacttgtgggttaaggtgggggggaatacaagaggaggacgcaaaggaggctttggattggaaagggcagcaatgagatgtagctgtaacccaggaatagtcagggaagcagataatttagttaaagtgtctcggcctaataagggaactgggcaggtggggataactaaaaacgagtgcttaaaagagtattgtctaagttggcaccagagttggggagttttaagaggtttagaagcctggctgtcaatacccacaacagttatggaggcaagggaaacaggcccttgaaaagaaggtaatgtggagtgggtagcctccgtattgattaagaagaggacggacttactctccactgtgagagttacctaaagctcggcatctgtgatggtctatggggcttccgaggcgatcgggcagcgtcagtcttcagccgttaagccgagaagatctgggaaggagtcagagagccttgggccagagttccaggggctctgggagtggctgtcaggtgagttgaacagtccaattttcagtggggtcccacacagatgggactcgcttaggaggaatcccgggctgcgggcattccttggctcggtggccagatttctggcacttgtagcaagctcctgggggaggcagttatggaggaatgcctggccactgcggtttaggcgtttggaagttcttgtgtgctggagatgtagctggggtttgtctcacagtggaggtaaggaattgcaactcagaaatatgttgttacttggctgcctctactctattattgtacaccttgaaggcgaggttaattaagtcctgttgtggggtttgagggccggaatttaatttttggagttttatttaatgtcgggagcagattgggtaataaaacgtatattgagaataagacggccctttgacctcttagggtctagggctgtaaagcgtctcagggttgctgccgaacgagccatgaactgggctggatttttatatttgatgaaaaagagcctaaacgcttctgatttgggataaagaaaaaggagcattaaccttgactatgcctttagctccagccacctttttaagagtaaattgctgggcaggtgggggagggccagtcactgaacgaaactgtaagctggaccaggtgtgaggaggggaggtgataaaaggattctagggtggaggagcagaggctgaggaagaattgggacctagatggcctggcgacgagcagcctgaggagaaggggaaaggtcagatgggtctgtagaaaagactggaaagacccagcgacacttggggttgggactgaggggacaggcgggagggaaagaaggaggatttgggaggaatcgcattgggaacagagacttgagagggaacgaagtgtgaaaaatgcctggatgtgaggcacctcagaccatttgcccattttttgacaaaaattatttaggtcttataggatggagaaatcgaaagtgccgttttctggccatttagagccattgtcaagtttgtactggggccaagcggtgttgcagaagaaaataaggcatttaggttttaggtcaggtgcgagttgacgaggttttaagttcttgagaacacaggctaagggagaaggaggaatggaggctggaaggttgcccatagtaaaggaggcaagcccagagaaaagagagagtagagacacggagggaaggggttcgagggttcttaccctccagaaaagcaggaaaggggtcagggtgtggaaataagggattggggcacacagataagaggtcggggtgcggaaataagggattgggggttcttgccccctagaaaagcgggacttaccgctaagggtgaaggagaaggggttgaggggtacttgcccctcccccagaaatgcagagaaggggtagagacacggagagaaggggttgtggtacttgcccctcccccagaaaagcaggacttgccgctaagggtgaaggaccaaggcaggcgtccctgagtggtctgacacctttgaaacgtgagtgaataatcagagaggtgtccctgcaatgattaaacaccaaggaaaggctgccttcccagtctgtgaccagcgccagagttttgggtccacggataaaacgtgtctcgtttgtctctaccagaaaatgaaaggaattgaaattaagagaagggagagattgaagagtggaaaggagaaagtggttgagggatagtgagagaggttggagaagagagtaagaagaggccgcctacctgatttaaaattggtgagatgttccttgggctggtgggtctgaggacctgaggtcgtaggtggatctttttcacggagcaaagaacaggaggacaggggattgatctcccaagggaggtcccgcgatccgagtcatggcaccaaatttcatgcgcgtccatgtgaagagaccaccaaacaggctttgtgtgagcaacatggctgtttatttcacctggatgcaggcgggctgagtccgaaaagagagtcagcaaatggtgtggtggattatcattagttcttataggttttgggataggcggtgaagttaagagcaatgttttgcgggcagggatggatctcacaaagtacattctcaagggtggggagaattacgaagaaccttcttaagggtgggggagattacaaagtacattgatcagttagggtggggcagaaacaaatcacaatgctggaatgtcatcaggtaaggctatttttacatcttttgtggatcttcagttacttcaggccatctggatgtatacgtgcaagtcataggggatgccatggcttggcttgggctcagaggcctgacaatagggactttacataggattaggatggattagaacagaagttctagaagcaggtgagaaggagtggagggtagggataaggaaggaagggatttaagaagacattgagaaggaaaggaccacaagactgagaggaatggatgaggagagagggaagaaggagtcaaaaaagaggtgggggaataggggacttttggaaggtgcagcatttataggaatagtgacttaatagaccacatgcagtggctcattcctgtggtcccagctactcaggaggctgaggtgggagcatcgcctgagcccaggagttggaggctacagtgagccatgatcgcctactgcagcccggggcaatagagtgagacccccatctctaaaaaaagaacaagcacacgcctgtgggtggtcccagctactcaggaggttgaggtgggaggatcacttgagcctgggaggcagagactgcagtgagctgtaagagccactgcactccaacctgggtgacagagtgagaccccgtctcaaacaacaaaaaagaaaaaaaaaaacgaaagacgccaggcactgggactcacacctgtaatcctagcaccttgggagttaaaggcaggcagattgcttgagcctaggagttcaagaccagcctgagcaacatggcaaaattctgtctctaccaaaagtacaaaaaattagctaggtgtgatgtgagtgtctgtggtcccagctaggctgaggtagaagaatcatctgagcctgggaagttgaggctacagtgaagccatgatcgcaccactgcactcttgcctgagtgacagagtgagaccctgtctcaaaaaagaaaaaaaaaggaagaagaaaaagaaatggggaagtcaggaaaaagaagtgatgcttttttttttttttttttttttgagaaggagtctcactctagtcgcccaggctagagtgcagtggcacaatctcagctcattgcaacctctgccgcctgggttaaagcgattctcctgcctcagcctcccaagtagctgggattacaggcgcctgccacttcgcctggctaatttttgtagttttagtagagacagggtttcactatcttagccaggctggtcttgaactcctgacctcgcgatccacccacctcagcctctcaaaatgctgggattgcgggtgtgagccaccgtgcctgggccatacatttgtttttacactcatttctgtaccaaattagcccaattatctactgtcttgttttttgaactgattttttttttttttcatgtattgaaccaggagagcacagcctccttgagggtaaaatctgtgtctggaactttttctgtagtccctccagggtctggcatgctgacatgctgtttacttcattgtctgcgggtgcttaacaaagacttggtgattgactaagtttgtgtttccattcaggaccctagtgaaggttgacctttattccctttccagcccatgttcttgcttctgcttgtttgtaagtcatttgttacgtagatttttctttttggagatggagcctcactctgtggcccaggctggagtgcaatggcctgatctcagctcactgcagcctctgcctcctgggttcaagtggttctcctgccttagcctcctgagtagctgggatcacaggtgcgcggaaccatgcccagctaattttgtgtttttagtagagatggggtttcaccatgttggtcaggctggtctcgaactcctaacctcacgcaggtgatccgcctgcctcggcctcccaaagtgctgggattacaggcgtgagccaccgtgcccagaccatatgtatataattttttttttttttttttttggagatggagtctcactctgttgcccaggctggagtgcagtggtacaatcatggctcactgcaacctctgcctcctgggttcaagcagttctccagcctcagccttcaagtagctgagattacaggtgtgtgctaccgtgcctagctaattttagtatttttagtagagacaggatttcaccatgttgaacaggctggtcttgaactcctgacctcaaatgatccacctgccttggcctcccaaagtgctgagattacgggcgtgagccaccgcatccagcctgctatgtagatcttgttttctctggaatgtttgagccgtgctggaatggggtacccaatgctgctgtttccatccccacatgacgttttaagtcccacgagagtaggctagcgatggagtgaagctgaaaaatgaaagcaggaaatccagagacacagaaacagatgaggctttcaacagagactcgaaaatagacagaaaccatgagtcagagcagagcccggaggggcggttcgggaaggcaaggtctataggggaagctcgggtgtcacctctatgccaggtgaaggaaatgttgagtgggtgggaggctgtgtgcatctgctggggaggcagtaggcagatggaaagatcaagtcacccagaattatccccagaggttccttcccgttcctgtgggcgggtgagctctgctttctgagctgcccagagagctggaggagatagacatggaactgaccattgcagaaactagggctttttgtgcccgtgagtaggcaaagagctccctgtggatttgccataaaaaggtctatcaaggtggaagaaagtgagattctagagaaattaatacaagtgaaaagtgggcaggagtgttcttggaagtagaaatgctgttggaagtctaatagacttgggaagaagataacgtatggtgaataccagttgcttcgggggttggggggatccacattttactctgtactcagaagatgcttttccccgtgcaaaaagtgaaagtgagtgggccagtttttcttctgtcacaaggtgtatgactgttcccaaaataatagccctgggggatggggattgcttctcagaccattcaatttttgtaccctgtagacttttggtgttatgtgagaactttaagcacctgataggaattagtaacagagctacgctaatgcctgaggaaatttcagacaattggtgggagagacttggcatttggaatgtgatagctggtaggctaccatacagtaatgcaggattgccagacatttctttccaaatggctacccttgattacatttaactcccctcctttcaagctccagattttgaaggacctgttaattctctttcaagattgaagacagacaccttctttttcttctaaagaggaacctaggcggggtgcggtggctcccgcctgtaatcccagcactttgggaggccagggctggtcttgacctccttacctgaggtcaggaggcctggccaccatggcgaaaccccatctctactaaaaatacaaaaagtagccaggcatagtggcgcatgcctataatcccagctactcgggaggctgaggcaggagaatagctcgaacctgggaggtggaggttgcagtgagcctagatcgcgccactgcactccagcctgggtgacacagcgagactcaatctcaaaataaataaataaataaatatgaacctaaaccatcagaatcttccccttgcagccacaacagaaacactgccggggaggccgagccccgacctgggaagcagggtgatacactgggtgccacgggccttccctctgcctggcagctgtcgctactcagatccctgcagccctgttgccagtgaaggagctggagtctctgttatgatgtgttcatccagctggtgagtttttttttttttgttttgttttttttgtttttgtttttgttttttttttagacagagttttcacttgttgcccaggctggagtgcaatggcacgatctcggctcaaggcaacctctgcctcccaggttcaagcgattttcctgcctcagcctcctgagtagctgggactacaggcatgtgccaccatgcccagctaattctgtatttttagtagtgatggggtttctccatgttggtcaggctggtcttgaactcctgacctcaggtgatccgcctgcctcggcctcccaaagtgttgggattacaggcgtgagccactgcacccggcccagctggtgattttttttttttttttttttttttttgagacggagtctcgctgtcgcccaggctggaatgcagtggtgcgatctcagctcactgcagactccaccccccgggttcgcgccattctcctgcctcagcctaccgagtagctgggactacaggcgcccgccaccttgcccagctaactttttgtatttttagtagagagggggtttcaccgtgttaaccaggatggtctcgatctcctgacctcgtgatccgcccgcctcggcctcccaaagtgctgggattacaggcgtgagccaccacgcccggccccgtagctggtgatttttaaagttaacaaaatacaattatgagaaatcagaattcagaaagtaatgacagagagggccttgtcgggaggggctctgacaccctgctttgggccctcatagagatctggggagggagcaggagtgttttaaggggtgtgcgtcttcagccttccatttgtcttcagaacccaaagccctaaatttagcaaacagctggagagtgctttctgaagagggaggctctggacctgaatcagagatgggaacccatgtaaccaccctcagctgggctcttcagtgtaatcacaggtttgggaaggtaactgaggagagcccatgccaaatatcagaactttgcatttggtgcctggattttaaatcccaggggccctctgagaactctagtacttgtgtttgtgcttgaccatggaaggccattagagcctgggggtgctagatactcaagctgcaatcccaggcaagttgcacggtgaccagggcttagtaggggctaagtaaatgttgttggcttgacaatgatgagcattatgtgcaatttcaaaaacacttaaagcattatggaaggctaggtctggaaaaaccttttgacaggtatgtggaaaatattcgctgggcgcggtgactcacgcctgtaatcccagcactttgggaggccaaggcgggccgatcacctgaggtcgggagtttgagaccagcctgaccaacatggagaaaccccgtctctaccaaaaatacaaaattagttgggcatggtggtatgcacctgtagtcccagctacttgggaggctgaggcaggagaatcacttgaacccgggaggcagaggctgcaatgagccgagatcgtgccactgtactacagcctgggcaacaagagcgagactccatgtcaaaaaaaaaaaaaaaatttgtggttacaaatatgtatttttttatctagttcagtctgatttcagtttccccaaaaacccttcttgaccatctccacttgcttaacactgagctcatttttatatagctggagttccctttattatctttacatgtttcatgtaggcatttttttgggaatattttaattatttgtgtttgtccttttgaccttgattccactctaagcttcatgagacagaatttgttttctcttttatttgtgactttcaaaatactggacagaaagcagtatttgtatttgctctccgactgaattttttttttttctgtctccttgctactgactgttctactgaggcttctctattagagagtaaagttgaaagcaaactcttagtgcttaaaacttgcgaagaaaaccttccattgcatcctcattgctcttcctaacacttgtcctcttctttgttgtgttgcaagataaagccaccaatccttccaaccgccaggaggactgggaatacataattggcttctgtgatcagatcaacaaggagctggaagggtgagtctcagcactgtgggggcagctgagagggagcggactgggaaggggaacaaccatggccaaggagggccagccaggtagccccaggcttagtgcactggagtgtgttctgcttgtcccccaggccacagatcgccgtccgactgctggcccacaagatccagtccccacaggaatgggaggcgctccaggccctgacggtaggtccttcactctccggaggtggaaaccgcagcccttcacctgcccacgccattcctcgtgtccccatagcggttcttagggctcctgccaaaagccaacagaaagtccttgatacagactagatagatctcgaatctgttcagccagctgttccacaaatctgtgtgcattgtgccaggccctgaggcctcagaggtgactgcagtgccgtccctgccagcatggccacatggttagtgtgtgaggcagaggggctaaggaaagcagcccagagtcagggccctgagccccatgtggcgcaagagaaggcttggtgaagagatgctgacagggctgtgttgatagttcagagctggccagctgaagaaaagaggggtcggtccagttcattctgtagttaaacaatgccagtcactagcgaaggtgtcgcactgatggctgaggcccctagggcagatcctggtgtctgttcagactgagggaatttaaggtgtggaatggtgcctggccctcagtgcctccacatgctccgaaaacaaagagcagccgagatctgaggaatccggggctctagcctgactgcattcaggtcctggaaagcgaaaagaggaaatatcatctggttcacatgcacccctcagtcatatttgctgtagaacgaattccttaaaacagtgattctcagcagggcacggtggcttgtacctatagtcccagcaccctgtggggcctaggccgggaggatcgcttaagggaattcaagaccagcctaggcaacgtagtgagacattgtctctacaaaaaataaaaaaatcagccaggcacggtggcacacacctgtggtcccagctcctcgggaggctgaggttgaaggatggcttgagcctgggaagttgaggcgaaagtgagtggtgatcacaccgttgcactctagcctgaccaacatagcgagattctgtgtcaaaaaacaaaaaaaaaacgtaacaaaacccagtgattctcaacagggccctccagggaacatttggcagtgtctggaaacatttttagttgtcacacatcggggtgggggtcctcctggcatcaagtaggcagaggccagggatgctgttcgacaccctataaagtgcagagtggccccccacaacgaagaatgaccagcccaaaatgtcagccaggcctcacctgagaaaccttgctttaaaatgcagaagccaagaaagagagcctggacagtgcactcccccttagaaaccgcagtgccagggaccacaggcagcacaggaaagccaaagcgtgagttagggagataagcggagggaggagaaatatcctgtcatctttctcacagataataggatttaaacatccctcccattccctgcacaattgttggtgagcttgtggaaaaaacccaggacaccaagtcagagaaactttgtccctggacctcacctccctcattgtaaaacacgaggccagaatctttaaggaaggcaccttccaggactggcatccaggccttcttggggtcggggtctcggggtttcttgctttagtccctgcccagcttccccagcagaggtttgcagttggagggacatggtctgtgagtgatctcgttgcttaattacactgtccccgggcagtgcacactgcttttcgtgatgagctccttcctgtgggcgtgtttattcagtactctctgggtgccagggatcttgccagtgccaggttccagccccgagcacgccctcactgagcgcctctcctctgtgcggctacaggtgctggaggcatgcatgaagaactgtgggaggagatttcataacgaagtggggaagttccgctttttgaatgagttaatcaaagtcgtctctccaaaggtcagtcagcggcagattcctcgcttttagggacttcttttgtgttcattcccatctcccatcatactggctttcactgcccatccaacatctccagggagctgagattatttgtgtcttgtccttagagagctaggccctggaggtaacgggatgaccaaacaggccacagggaccggcagctttttctgaagcgccctcagcccaaatctgacaggtgatgtggtagtggctgtgtgtttgtccagggtgagggcccatgtagtgtgggactctaggcacctggcacatggcagttgtgggttttgtgggttttcttggcctgtgtcacgtggatacggggagctggcctccgtcattgctccgatgctcagctggccgtgttctgttgcacgctggtgtggcgcagctctgggcccccacttaaagcagagggaatactttaccatgctaaagacattctcatggacacccccaagataaaatgcagttgtgtttctggcaacttgtgcgtgaaaatgcactttcctcagaactcaaaatatccacccaaccatggcctgcaccacatgggcatcagggtcacaaggaagcctctctgtcttgatgtccccaaggtagtaaggaaaggcagagagcaggggtgagcaccgagggcatggtctctggtgtcagactcaggtttccatccggcccttacaccctgggcaagttagatgatcccaggcggcaaatggggacgccacccctactgacgtggctgctgtgcagatgagtaaggtcatgaatacacttacaggacacttcctggacaggaggtgatgacctcctggccccctgcctatccacagactgtatccagatggacacagccacaccacagggagtcgttcccctccccacgctgtctcacacacacttggacacctgcagattttgagtaggaccatagctgctgagcagccacgccattgctgtggagggagccttacactttctctgcctccgaactgcacttactaggtcctcattttcttttgccatgtagtacctgggggacagggtgtctgagaaagtgaagaccaaggttattgagctgctgtacagctggaccatggccctgccagaagaagcaaagatcaaagacgcctaccacatgctgaagagacagggtacgtgtctgcctgcccgcagcctccaggcagccctcgaaggctggcccaggcaaggagagaagggaaggtttgggatccccagagtccctcctgaagagaacagcatttgtccccaggcaaggctgagtcggagttggatgggataaggtgtagcagcctgccctccaccctgctaccctttgcaggtcttgatcacagggacgtggcccttggtgtatgaggaggggtgacaaggcaaccacagcctgagtgcacgtgctgccatgtcccctttcaggcatagtgcagtctgacccaccaattcctgtggataggacgctgatcccctctccaccacctcgtcccaaaaaccctgtttttgatgatgaggagaagtccaaggtaaaggacaccctgggcctgggattttctcatacgagagtgggtggcagcaggggaatgtggtttgcactgtgctgcggggagcctctggggtttccctggggtacgggtgctgcctcttcccttcacctctgatttcctcctctctcagcttttagccaagctgctgaaaagcaaaaacccagatgacctgcaggaggccaacaagctcatcaagtccatggtgaaggaagtgagtgggccccggtccttcaggcacggggtggaggagcccatggccacacagcagaagccgctttgccccggacacgggcctgttttgttctcccctgctgccagctgccctacctgtgccccggtggctgagagtgggaggaggagcacaatagcttccgcgggagcacggaagagaggagtgggttgggagcagtgttgtgaaagcagaagtatagactgggccccaggcaccccacactgaaaggagcttccgagcgtctgtacttgtgttgtggggtaaggtgtgacctggtggaagtggaaagacagtcaagtgacgctctctttctcttgaacttcttcactggggcaggacgaggcacggatccagaaggtgaccaagcgtctgcacacgttagaggaagttaacaacaacgtgagactgctcagtgagatgctgcttcattacagccaggaggactcttcggacggggacagagagctgatgaaggtgggaccgccgacggcaaaggctgcctcccggggctgcgctgcccttcaggagctcagccagcatttgctgagcacgtgccttgtcagagacacgggctgtgcacttggcagtgtattcatgaccttactcatctgcacagcagccacgtcagtagagggtggcgtccccatttgcctcctgggatcagctgacttgtccagggtgtaagggccagatggaaacctgagtctgactccagagaccacactctcggtgctcacccctgctctctccctttccttactaccttggggacatcaagacagagaggcttccttgtaaccctgatgcccatgtggtgcaggccatggttgggtggatattttgagttctgaggaacatgccagcctggaaggcaggaggggactgacttcccctgacccatcctggtgactgctacctagacaaacatcctgggtgatgtggtgtggtggtggtggctggtggcaagaagacgtgcgctgtgatcccagctttgctggtaattgaccgtggcaattggcatatcccggtcattttctgggcatgaaccctgaatgaatcagatgatctctaagggcctttgtggtttgatttttatgtccgagtctctttcaggagctgtttgatcagtgtgagaacaagaggcggactttatttaaactcgccagtgagactgaggacaatgataacagtttgggtgagtgaaagagcgacggtcagggataagccaggcatttggatatgtgggtgggaactgtcacaacaggagtgagaagtctctctttcctgctccaggggacatcctgcaagccagtgacaacctctcccgggtcatcaactcttacaaaacaattattgaagggcaggtcatcaatggcgaggtggctaccttaaccctgcctgactcggaaggtgagatgctctggtccccaactctaggctcctccagaccagcctcaggcccctatcatgaagctgcgggtgtaggctggccagcgtggtggtgttgcacaaggcccaagggagttctttgccattccaagcaatcctccggcttcccggaggcctggagatgtgggtaggaatttccccacctgctttctcgggcttgctttgcagcatcccctggcagagatgccgttggattaggccagaggctgtagcagtgacctctgtgcctagggtgctgcctcctgccacacagccactagaagacccctaattattcctgttctgctctgttgacccatccaggaaacagtcagtgcagtaaccaaggcacgctcatcgaccttgcggagctggacacgaccaacagtttgtcctccgtgttggccccagcacctactccaccctcctcaggcatcccaatcctccctccaccaccccaggcctcaggacctccacggagccgctcctctagccaggccgaggccaccctggggcccagcagcacaagcaacgccctctcctggctggacgaggagctactctgcttgggtgcggcccacagggggcgtcaggggcatcccctgacagggctctgggaggaagggtgtgtggaattaggagccctgagcggggccccagtgtgactgttggggtgggcaaagaaccctgagttggaggtactcagtgaagttcagcgaccctgagggccccagggccatcctcccggtggactctgcctcctgccctgcaccccgccccacaggccccccgcttctgcatcatggactggagcgctccattcccctctggaggctgcctgcagaacagcttctcccggcgccttcacccattgatgtcacttgtcacctgacccctcctcaggcaaggcggggctagggctgcctagctcagagcctcttctcatcctgttttcttctctattgtcaggcctcgccgacccagcccctaatgttcctcccaaagagtcagctgggaacagccagtggcacctgctccaggtaggggcacaggatcggtgacagcactactgtgccaaggacctccactttccagcgtcatgtctcctgggctgcagttagctgtccttccctccagagcgtgccagctgcagcggggaacaatgagtgcctccggggctgtcttccgtgcagtccttggagggctgcgccccgttccagcggcaggccctccccacccgccctcggctcaccaccctttctgttgttcatagagggaacagtccgacctggacttcttcagccccaggccggggaccgctgcctgtggcgcctccgatgctcctctgctccagccctcagccccctcctcaagcagctcccaagctccactgccgcctcccttcccagctcctgtggtcccagccagtgttcctgcccccagtgcgggctcctccttgttttctactggagtggccccagccttggccccaaaagttgagcccgcagtccctgggcaccatggcttggcgttgggcaacagcgcgctgcaccacctggatgccctcgatcagcttctagaagaggccaaagtgtaatgagtgggaggagatgtggggttgctgagggttgggcctgaatgtgtcagaaccagagctaactttgaaggggtgggggtgccttgtagtcccatcagtcaggctggaaggcaaggggtgggcctgggtaagagcatggtcaggggccttgggtgagagtcctgcagctctggctggctctctgacgtgctttccatccttcccacctcccaggacctcgggcttggtgaaacccactacctcccctctcatccccaccaccaccccagccaggcccctcctgcccttctccacggggcccggcagcccgctcttccagccactgagtttccagtcccagggcagccccccgaaggggcctgagctctccctggccagcatccacgtgcccctggaatcgatcaagcctagtaggtgttggaggattgaggtgggtggggcggtggggcctatagccacggagctgtaggacatgcgacagggatggatccaggcactctttgcagggggtcccttaaagccaggcaggcctccctgcctgcattctcagtcttaagctcctcactgagcgcctctcccagattccgttaggaagcactggactcatcatgaccacggagtagcccttttctcctcaccgccggggctctgttgggtgtctctggtgctgctcctcccacactcacgtcacgttcttacaggcagtgcccttcctgtgacagcctacgataaaaacggcttccgcatcctcttccactttgccaaggagtgtcccccaggacgacctgacgtgctggtggtggtggtgtccatgctgaacacggctcccttacctgtcaagagcatcgtgctgcaggctgcagtgcccaaggtaccagtgtctccctggggccaaaacggccttatcttgaccctgttgtgtagaggcctttgcagccagcaggtggcagtgtgtgtgtgcactgcaggttccatctgggggcacctaccagttctcttcaaaggagtttctctctctttagtcaatgaaagtgaagttgcagccaccttctgggacagaactctctccatttagccccatccagccacctgcagccatcacccaggtcatgttgctggccaatccactgaaggtgagcagcaaagaacccaggggtcccagcctgaggccccagctgccccagattaggacgtcaggcccaccacctcccagctggaagtgttttgactgtaggattgacacatccctttgctgccttaggttaagtgtctgagcatggttgggggttgcggggaaaagggaccattcctctagcacagagagggtagcagaatagagggcgtcctgccaaggggccgcctgggctggatctcacttgctgccctctgtcacaggagaaggtgcggcttcggtataagctgaccttcgccctgggggagcagctgagcacagaggtgggcgaggtggaccagttccctcctgtggaacagtgggggaacctatgaccccagaggacgctgtgatctccaccttgaagccaggcagg

SEQ ID NO: 12214 - DNA, 2255 bp, Homo sapiens
acaacaattcaggcccttgtcccaagtaggaggacattccccaagcaggcgggtaaagtctcctcctggtcaagtgctaacgataaagccaccaatccttccaaccgccaggaggactgggaatacataattggcttctgtgatcagatcaacaaggagctggaagggccacagatcgccgtccgactgctggcccacaagatccagtccccacaggaatgggaggcgctccaggccctgacggtgctggaggcatgcatgaagaactgtgggaggagatttcataacgaagtggggaagttccgctttttgaatgagttaatcaaagtcgtctctccaaagtacctgggggacagggtgtctgagaaagtgaagaccaaggttattgagctgctgtacagctggaccatggccctgccagaagaagcaaagatcaaagacgcctaccacatgctgaagagacagggcatagtgcagtctgacccaccaattcctgtggataggacgctgatcccctctccaccacctcgtcccaaaaaccctgtttttgatgatgaggagaagtccaagcttttagccaagctgctgaaaagcaaaaacccagatgacctgcaggaggccaacaagctcatcaagtccatggtgaaggaagacgaggcacggatccagaaggtgaccaagcgtctgcacacgttagaggaagttaacaacaacgtgagactgctcagtgagatgctgcttcattacagccaggaggactcttcggacggggacagagagctgatgaaggagctgtttgatcagtgtgagaacaagaggcggactttatttaaactcgccagtgagactgaggacaatgataacagtttgggggacatcctgcaagccagtgacaacctctcccgggtcatcaactcttacaaaacaattattgaagggcaggtcatcaatggcgaggtggctaccttaaccctgcctgactcggaaggaaacagtcagtgcagtaaccaaggcacgctcatcgaccttgcggagctggacacgaccaacagtttgtcctccgtgttggccccagcacctactccaccctcctcaggcatcccaatcctccctccaccaccccaggcctcaggacctccacggagccgctcctctagccaggccgaggccaccctggggcccagcagcacaagcaacgccctctcctggctggacgaggagctactctgcttgggcctcgccgacccagcccctaatgttcctcccaaagagtcagctgggaacagccagtggcacctgctccagagggaacagtccgacctggacttcttcagccccaggccggggaccgctgcctgtggcgcctccgatgctcctctgctccagccctcagccccctcctcaagcagctcccaagctccactgccgcctcccttcccagctcctgtggtcccagccagtgttcctgcccccagtgcgggctcctccttgttttctactggagtggccccagccttggccccaaaagttgagcccgcagtccctgggcaccatggcttggcgttgggcaacagcgcgctgcaccacctggatgccctcgatcagcttctagaagaggccaaagtgacctcgggcttggtgaaacccactacctcccctctcatccccaccaccaccccagccaggcccctcctgcccttctccacggggcccggcagcccgctcttccagccactgagtttccagtcccagggcagccccccgaaggggcctgagctctccctggccagcatccacgtgcccctggaatcgatcaagcctagcagtgcccttcctgtgacagcctacgataaaaacggcttccgcatcctcttccactttgccaaggagtgtcccccaggacgacctgacgtgctggtggtggtggtgtccatgctgaacacggctcccttacctgtcaagagcatcgtgctgcaggctgcagtgcccaagtcaatgaaagtgaagttgcagccaccttctgggacagaactctctccatttagccccatccagccacctgcagccatcacccaggtcatgttgctggccaatccactgaaggagaaggtgcggcttcggtataagctgaccttcgccctgggggagcagctgagcacagaggtgggcgaggtggaccagttccctcctgtggaacagtgggggaacctatgaccccagaggacgctgtgatctccaccttgaagccaggcagg

SEQ ID NO: 12215 - DNA, 19726 bp, Homo sapiens
aatatggcggaggcggaaggggaaagcctggagtcctggctcagtgagtagccgcggccgtttctgcctgccctcgagccgctgggctgcccctgtcttcacccccacgtcccctccccgggctccacggcgtcgcctcttggcagcccacgcccggtctcgccctcgccgcgagcagcctgcgatcacgccccttccctatcagggcgccgggccccagtccggcccccgcttccctcgctgcggcgcgtcctcttgctctggcgcgcggcggcgtgaactcgggctcctgtcgggcaccgcaggctcggggaaaggcgacagccaagatcttcgggctgacatgcttcggcgctttggggagattgtggtggggtcgccgcccggcggtgacaccaggaacccagcgccccaatccctgactaagggagaagcttcggattggggctgagtctccggtagtggtgggtgctgccgactgcgttcagtcgcctggcagcttcagaattgtgaccatgtgttggagaagtgacggcttcgctcaggcagaatgcttgaagtgagaataatattccaaagagagcgatgatagagaacagagagctctacctttttcctgcagtgaccacagaagcatggtgaaatcggtgtcgggaattccccccccacacacatacatatacccccttgaatatcctaacgagtcagtgttgatagcctattctgagtaaggctgaggagcacagtctgaagctgtagttatagaagcgtattgctgtcattgcactgtgaattacagtgctacgaaggaaatgtgtgttaacctggttagcaggtagtactctgcctgagggttaataagtgaactttcctgtaggctagacctggaagcctcctttaagtggagagagaaattggactggtaatgggataggtgagatacctagtattgccttgttctgaggtctcttatttagtactgcttccgggatcttggaggtgatagctatttcctcaaattgtctgatttttcctagtaagaaacccccttcaggaggttgagcttcagtttaaaggggagcatatcccaaaagagagaaaaagtaagatcacgtttgcaaaatctgcagttgcaggcaggtcataaggcttctttatatatggaagtgttctccaaggagctcaaagtactttacagatattcattaaattagtttaccaagtattctagcaaagcaggcactactgccataatttcacaaaaagaggacatcctgactccagtcaaaccacttgcccagaaatgcccaacttgctataaccagagtggaattagtttgctttgaaggtattaatatgggtattgaataatttaaatgacctaagctgagtttaataggctacatttagagttacattttgtttttgttacttgtttttgagacagagtctcgcgcgctgttgtctaggctggagtgcaggggtgcgatcatagctcactgcagccttgaacccctgtgctcaaataagtcttctacctcagcctcctgagtagctgggactataggcacacgccaccatgcttggctaattcttttgatttttagtagagatgaggtcttgctgtgttgcccaggatggtctcaaactcgagttcaagtgatcctcccacctttcccttacaaagcgctgggattacacacgtgagctaccgcacccagcctagagtcacattatgaaatgagagggacacacttggtgggggggagtcacatggtatctgtagagacataagcttcacagttgttacgacttaatgtgaactgtaccagttgaacaaaccagcagttggggttcagcatcgtctcagtcagcgtccttgtcaccccacgtttgcctgaattgttgcagaagcctctgcttggcccagagacccaggtctctcccgtcctcacctctcctcagtccattctgctcccagaagcgcacttgtgttgaatcaaatcattccactgttgcctgtaatctggccttggttgttccaggcctttttctctgtggcttctacgttttcctgctctactcagtctgatgttcttggtttaccaatacacgttgctctccttacctggaagccctgctcccgtttcctcaactaaatgcttgaaaacccatctcagattctcttttctcacaaaccatctcttgatgacttcagtcttctttcaagtcccaccatgatcaatcaatcaatgtttaatgagtacctgctacgtggggtgttataggagttaggaagtttaagaagattttgcctttagttggatggaggtgatgctggagtggatgaagaactctcctgtaatcccagcacgttgggaggccgaggcgggtggatcacgaggtcaggagatcgagaccatcctggctaacacagtgaaaccccgtctctactaaaaaatacaaaaaaatagccaggcgtagtggcgggcgcctgtagtcccagctacacgggaggctgaggcaggagaatggtgtgaacccgagaggtggagcttgcagtgagctgggattgtgccactgcactccagcctcggtgacagagcgagactccgtctccaaaaaaaaaaaaaaaaaagatacaaggcagtgctaaaacgccggcattctctttagggaactggggatgggggaagagatgattcattgaggatactccatttgagctagccattaaataatgggaaaagttggaaaaaaaaaaacactagatggtgatgtggagagagcaaacctgtttggggcacacagtaacagaggtgtttgggaatgagggaagataaggctgggaagttaagaccagattctaccaagtctccaatttccagcccaagaagtttattttatttatttatttatttgagacagagtcttgcactgtcacccaggctggaatgcagtggcacaatctcggctcactgcaacttccgttgcttaggtgcaagcaattctccatcctcagcctcccaagtagctgggactactggtatgtgccactacacctggctcatttttgtatttttagtagagatggggtttcaccatgttggccaggctgttgtcaaactcttgacctcaagtgagccacctgcctcagctccctccaaagtgttgggattacaggcttgagctaccacgcccagcccagccgaagaagtttaaatttctgcagttatcaggccctcattccttctgtactaggtgaaatcggtgttttggtgtcttaagaggcttgatttgatataggtttcatgcgcgtccgtgtgaagagactaccaaacaggctttgtgtgagcaacatggctgtttatttcacctggatgcaggcaggctgagtccgaaaagagagtcagcaaagggtggtggattatcattagttcttacaggttttgggataggcggtgaagttaagagcaatgttttgcgggcagggatggatctcacaaagtacattctcaagggtggggagaattacgaagaaccttcttaagggtgggggagattacaaagtacattgatcagttagggtggggcagaaacaaatcacaatggtggaatgtcatcagttaaggctatttttacttcttttgtggatcttcagttacgtcaggccatctggatgtgtacgtgcaagtcataggggatgcgatggcttggcttgggctcaggcctgacattcctgccttcttatattaataagaaaaataaaacaaaatagtgttgaagtgttggggcagcgaaaatttttgtggggtggtatggagagagaatgggcgatgtttctcagggctgcttcaagtgggattaggggcggcgtgggaacctagagtgggagagattaagccgaagggagatcttgtggggatgttagaagaaacatttgtcgtatagaatgattggtgatggcctggatatggttttgtatgaattgaaaaactaagtggaataagagaaggagaaaaacaggtataaaaggtctaagaattgggaggacctaggacatctgattagagagtgcctaaggagattcagcatagtcctgccagcaaagattatttatttacttcaagagttaagagtggcagtttggggatagcacgaggagatatcacctgtgatggcttggagaaacagtgtaaaccagcagtgtaaacaagagcagggcatgtatgagtagttgagaacgttgaataggagtatgactagacagaagatagtagggatgatgacaggttttttttgggggggggggcacagtctaagttggtctggtgtctggaatgagactggggcctaataaaaaggagcatctatacaggagcttaaatgggctgtaccttgtagcattctgaggacaggtctgacttctgagaagggaaagtggtaaaagtattgtccagtcctttttaagttggtggctgagcttggtgaagtgtttttaaaagacctttagtccgttctgcttttcttgaagacggaggaccgtaagggatataaaggtttcactgaatactaagagcctgagaaactgcttggctgatttgactaataagggctggtctgttagactgtatagaggtgggaaggctaaactgaggaattgtgtctgaccgaagggaagaaatgactgcggtggccttctcagaccctgtaggaaaggcctctacttacctagtgaaagtgtctacttagactaagaggtattttagttatctgactcggggcatgttgagtaaagctaatttgccagtcctgggtgggggcaaatcttcaagcttgatgtgtagggaagggagggggcctgaataatccctgaggagtagtagaatagcagatggaacactgagaagttatttccttgaggatagatttccacaatggaaaggaaatgaggttctaagaggcgggctagtggcttgtactatagcatagcctgcctttgctgctgtgtggcgattaggcctgctggaactgccatcaataaatcaagcgtgatcagggtgaggaacaggaaagaaggaaatatggggaaatggggtgaatgtcaggtggatcagagagatacagtcatgggggtcaggtgtggtatcaggaataatgtgggaggccagattgaggtccgggccaggaacagtggtaattgtgggacttaacaaagagtgagtacagctgaaggagccggggagcagaaagtatatgcatcaggtatgaggaagaaaataatattggaagttatgagaaatgtagagagtgagttgagcatagtttgttatttttagggcctctaaaagtattaaagcagcggcagccactgcaagcagacatgagggctaggctaaaacagtaaggtcaagttgtttgggcagaaagactacagggtgcggtcctggctcttgtgtaagaattctgacacactaaccatgcctaggaaggaaaggagttgttgttttgtaagggattgaggtttgggagattaatcggacacgatcagcagggagagcacgtgtgttttcatgagaattatgccgagataggtaacagatgaggatgaaatttgggcttgactgaagtaatgggggctgtctgtgaagccttgcagcagtacagcccaggtaatttgctgagcctaatggatgtcagggtcagtccaagtgaaagcaaagagaggctgggatgacgggtgcaaaggaattgtaaagaaagcatgtttgagatccagaacagaataatggattgtggagggaggtattgaggataggagagtatatggtttggtaccatggggtggataggcaaaacaatttggttgataaggcatagatcctgaactaacttgtaaggcttgtctggttttaggacaggtaaaatgggggaattgtaaggagagtttataggctttaaaaggccatgctgtagcaggcatgtgataacaggctttactcctttcaaagcatactgtgggatgggatattggcattgagcggggtaagggtgattaggttttaatgagatggtaaggggtgcatgatcggtcgccaaggagggagtagaggtatcttatacttgtgggttaaggtgggggggaatacaagaggaggacgcaaaggaggctttggattggaaagggcagcaatgagatgtagctgtaacccaggaatagtcagggaagcagataatttagttaaagtgtctcggcctaataagggaactgggcaggtggggataactaaaaacgagtgcttaaaagagtattgtctaagttggcaccagagttggggagttttaagaggtttagaagcctggctgtcaatacccacaacagttatggaggcaagggaaacaggcccttgaaaagaaggtaatgtggagtgggtagcctccgtattgattaagaagaggacggacttactctccactgtgagagttacctaaagctcggcatctgtgatggtctatggggcttccgaggcgatcgggcagcgtcagtcttcagccgttaagccgagaagatctgggaaggagtcagagagccttgggccagagttccaggggctctgggagtggctgtcaggtgagttgaacagtccaattttcagtggggtcccacacagatgggactcgcttaggaggaatcccgggctgcgggcattccttggctcggtggccagatttctggcacttgtagcaagctcctgggggaggcagttatggaggaatgcctggccactgcggtttaggcgtttggaagttcttgtgtgctggagatgtagctggggtttgtctcacagtggaggtaaggaattgcaactcagaaatatgttgttacttggctgcctctactctattattgtacaccttgaaggcgaggttaattaagtcctgttgtggggtttgagggccggaatttaatttttggagttttatttaatgtcgggagcagattgggtaataaaacgtatattgagaataagacggccctttgacctcttagggtctagggctgtaaagcgtctcagggttgctgccgaacgagccatgaactgggctggatttttatatttgatgaaaaagagcctaaacgcttctgatttgggataaagaaaaaggagcattaaccttgactatgcctttagctccagccacctttttaagagtaaattgctgggcaggtgggggagggccagtcactgaacgaaactgtaagctggaccaggtgtgaggaggggaggtgataaaaggattctagggtggaggagcagaggctgaggaagaattgggacctagatggcctggcgacgagcagcctgaggagaaggggaaaggtcagatgggtctgtagaaaagactggaaagacccagcgacacttggggttgggactgaggggacaggcgggagggaaagaaggaggatttgggaggaatcgcattgggaacagagacttgagagggaacgaagtgtgaaaaatgcctggatgtgaggcacctcagaccatttgcccattttttgacaaaaattatttaggtcttataggatggagaaatcgaaagtgccgttttctggccatttagagccattgtcaagtttgtactggggccaagcggtgttgcagaagaaaataaggcatttaggttttaggtcaggtgcgagttgacgaggttttaagttcttgagaacacaggctaagggagaaggaggaatggaggctggaaggttgcccatagtaaaggaggcaagcccagagaaaagagagagtagagacacggagggaaggggttcgagggttcttaccctccagaaaagcaggaaaggggtcagggtgtggaaataagggattggggcacacagataagaggtcggggtgcggaaataagggattgggggttcttgccccctagaaaagcgggacttaccgctaagggtgaaggagaaggggttgaggggtacttgcccctcccccagaaatgcagagaaggggtagagacacggagagaaggggttgtggtacttgcccctcccccagaaaagcaggacttgccgctaagggtgaaggaccaaggcaggcgtccctgagtggtctgacacctttgaaacgtgagtgaataatcagagaggtgtccctgcaatgattaaacaccaaggaaaggctgccttcccagtctgtgaccagcgccagagttttgggtccacggataaaacgtgtctcgtttgtctctaccagaaaatgaaaggaattgaaattaagagaagggagagattgaagagtggaaaggagaaagtggttgagggatagtgagagaggttggagaagagagtaagaagaggccgcctacctgatttaaaattggtgagatgttccttgggctggtgggtctgaggacctgaggtcgtaggtggatctttttcacggagcaaagaacaggaggacaggggattgatctcccaagggaggtcccgcgatccgagtcatggcaccaaatttcatgcgcgtccatgtgaagagaccaccaaacaggctttgtgtgagcaacatggctgtttatttcacctggatgcaggcgggctgagtccgaaaagagagtcagcaaatggtgtggtggattatcattagttcttataggttttgggataggcggtgaagttaagagcaatgttttgcgggcagggatggatctcacaaagtacattctcaagggtggggagaattacgaagaaccttcttaagggtgggggagattacaaagtacattgatcagttagggtggggcagaaacaaatcacaatgctggaatgtcatcaggtaaggctatttttacatcttttgtggatcttcagttacttcaggccatctggatgtatacgtgcaagtcataggggatgccatggcttggcttgggctcagaggcctgacaatagggactttacataggattaggatggattagaacagaagttctagaagcaggtgagaaggagtggagggtagggataaggaaggaagggatttaagaagacattgagaaggaaaggaccacaagactgagaggaatggatgaggagagagggaagaaggagtcaaaaaagaggtgggggaataggggacttttggaaggtgcagcatttataggaatagtgacttaatagaccacatgcagtggctcattcctgtggtcccagctactcaggaggctgaggtgggagcatcgcctgagcccaggagttggaggctacagtgagccatgatcgcctactgcagcccggggcaatagagtgagacccccatctctaaaaaaagaacaagcacacgcctgtgggtggtcccagctactcaggaggttgaggtgggaggatcacttgagcctgggaggcagagactgcagtgagctgtaagagccactgcactccaacctgggtgacagagtgagaccccgtctcaaacaacaaaaaagaaaaaaaaaaacgaaagacgccaggcactgggactcacacctgtaatcctagcaccttgggagttaaaggcaggcagattgcttgagcctaggagttcaagaccagcctgagcaacatggcaaaattctgtctctaccaaaagtacaaaaaattagctaggtgtgatgtgagtgtctgtggtcccagctaggctgaggtagaagaatcatctgagcctgggaagttgaggctacagtgaagccatgatcgcaccactgcactcttgcctgagtgacagagtgagaccctgtctcaaaaaagaaaaaaaaaggaagaagaaaaagaaatggggaagtcaggaaaaagaagtgatgcttttttttttttttttttttttgagaaggagtctcactctagtcgcccaggctagagtgcagtggcacaatctcagctcattgcaacctctgccgcctgggttaaagcgattctcctgcctcagcctcccaagtagctgggattacaggcgcctgccacttcgcctggctaatttttgtagttttagtagagacagggtttcactatcttagccaggctggtcttgaactcctgacctcgcgatccacccacctcagcctctcaaaatgctgggattgcgggtgtgagccaccgtgcctgggccatacatttgtttttacactcatttctgtaccaaattagcccaattatctactgtcttgttttttgaactgattttttttttttttcatgtattgaaccaggagagcacagcctccttgagggtaaaatctgtgtctggaactttttctgtagtccctccagggtctggcatgctgacatgctgtttacttcattgtctgcgggtgcttaacaaagacttggtgattgactaagtttgtgtttccattcaggaccctagtgaaggttgacctttattccctttccagcccatgttcttgcttctgcttgtttgtaagtcatttgttacgtagatttttctttttggagatggagcctcactctgtggcccaggctggagtgcaatggcctgatctcagctcactgcagcctctgcctcctgggttcaagtggttctcctgccttagcctcctgagtagctgggatcacaggtgcgcggaaccatgcccagctaattttgtgtttttagtagagatggggtttcaccatgttggtcaggctggtctcgaactcctaacctcacgcaggtgatccgcctgcctcggcctcccaaagtgctgggattacaggcgtgagccaccgtgcccagaccatatgtatataattttttttttttttttttttggagatggagtctcactctgttgcccaggctggagtgcagtggtacaatcatggctcactgcaacctctgcctcctgggttcaagcagttctccagcctcagccttcaagtagctgagattacaggtgtgtgctaccgtgcctagctaattttagtatttttagtagagacaggatttcaccatgttgaacaggctggtcttgaactcctgacctcaaatgatccacctgccttggcctcccaaagtgctgagattacgggcgtgagccaccgcatccagcctgctatgtagatcttgttttctctggaatgtttgagccgtgctggaatggggtacccaatgctgctgtttccatccccacatgacgttttaagtcccacgagagtaggctagcgatggagtgaagctgaaaaatgaaagcaggaaatccagagacacagaaacagatgaggctttcaacagagactcgaaaatagacagaaaccatgagtcagagcagagcccggaggggcggttcgggaaggcaaggtctataggggaagctcgggtgtcacctctatgccaggtgaaggaaatgttgagtgggtgggaggctgtgtgcatctgctggggaggcagtaggcagatggaaagatcaagtcacccagaattatccccagaggttccttcccgttcctgtgggcgggtgagctctgctttctgagctgcccagagagctggaggagatagacatggaactgaccattgcagaaactagggctttttgtgcccgtgagtaggcaaagagctccctgtggatttgccataaaaaggtctatcaaggtggaagaaagtgagattctagagaaattaatacaagtgaaaagtgggcaggagtgttcttggaagtagaaatgctgttggaagtctaatagacttgggaagaagataacgtatggtgaataccagttgcttcgggggttggggggatccacattttactctgtactcagaagatgcttttccccgtgcaaaaagtgaaagtgagtgggccagtttttcttctgtcacaaggtgtatgactgttcccaaaataatagccctgggggatggggattgcttctcagaccattcaatttttgtaccctgtagacttttggtgttatgtgagaactttaagcacctgataggaattagtaacagagctacgctaatgcctgaggaaatttcagacaattggtgggagagacttggcatttggaatgtgatagctggtaggctaccatacagtaatgcaggattgccagacatttctttccaaatggctacccttgattacatttaactcccctcctttcaagctccagattttgaaggacctgttaattctctttcaagattgaagacagacaccttctttttcttctaaagaggaacctaggcggggtgcggtggctcccgcctgtaatcccagcactttgggaggccagggctggtcttgacctccttacctgaggtcaggaggcctggccaccatggcgaaaccccatctctactaaaaatacaaaaagtagccaggcatagtggcgcatgcctataatcccagctactcgggaggctgaggcaggagaatagctcgaacctgggaggtggaggttgcagtgagcctagatcgcgccactgcactccagcctgggtgacacagcgagactcaatctcaaaataaataaataaataaatatgaacctaaaccatcagaatcttccccttgcagccacaacagaaacactgccggggaggccgagccccgacctgggaagcagggtgatacactgggtgccacgggccttccctctgcctggcagctgtcgctactcagatccctgcagccctgttgccagtgaaggagctggagtctctgttatgatgtgttcatccagctggtgagtttttttttttttgttttgttttttttgtttttgtttttgttttttttttagacagagttttcacttgttgcccaggctggagtgcaatggcacgatctcggctcaaggcaacctctgcctcccaggttcaagcgattttcctgcctcagcctcctgagtagctgggactacaggcatgtgccaccatgcccagctaattctgtatttttagtagtgatggggtttctccatgttggtcaggctggtcttgaactcctgacctcaggtgatccgcctgcctcggcctcccaaagtgttgggattacaggcgtgagccactgcacccggcccagctggtgattttttttttttttttttttttttttgagacggagtctcgctgtcgcccaggctggaatgcagtggtgcgatctcagctcactgcagactccaccccccgggttcgcgccattctcctgcctcagcctaccgagtagctgggactacaggcgcccgccaccttgcccagctaactttttgtatttttagtagagagggggtttcaccgtgttaaccaggatggtctcgatctcctgacctcgtgatccgcccgcctcggcctcccaaagtgctgggattacaggcgtgagccaccacgcccggccccgtagctggtgatttttaaagttaacaaaatacaattatgagaaatcagaattcagaaagtaatgacagagagggccttgtcgggaggggctctgacaccctgctttgggccctcatagagatctggggagggagcaggagtgttttaaggggtgtgcgtcttcagccttccatttgtcttcagaacccaaagccctaaatttagcaaacagctggagagtgctttctgaagagggaggctctggacctgaatcagagatgggaacccatgtaaccaccctcagctgggctcttcagtgtaatcacaggtttgggaaggtaactgaggagagcccatgccaaatatcagaactttgcatttggtgcctggattttaaatcccaggggccctctgagaactctagtacttgtgtttgtgcttgaccatggaaggccattagagcctgggggtgctagatactcaagctgcaatcccaggcaagttgcacggtgaccagggcttagtaggggctaagtaaatgttgttggcttgacaatgatgagcattatgtgcaatttcaaaaacacttaaagcattatggaaggctaggtctggaaaaaccttttgacaggtatgtggaaaatattcgctgggcgcggtgactcacgcctgtaatcccagcactttgggaggccaaggcgggccgatcacctgaggtcgggagtttgagaccagcctgaccaacatggagaaaccccgtctctaccaaaaatacaaaattagttgggcatggtggtatgcacctgtagtcccagctacttgggaggctgaggcaggagaatcacttgaacccgggaggcagaggctgcaatgagccgagatcgtgccactgtactacagcctgggcaacaagagcgagactccatgtcaaaaaaaaaaaaaaaatttgtggttacaaatatgtatttttttatctagttcagtctgatttcagtttccccaaaaacccttcttgaccatctccacttgcttaacactgagctcatttttatatagctggagttccctttattatctttacatgtttcatgtaggcatttttttgggaatattttaattatttgtgtttgtccttttgaccttgattccactctaagcttcatgagacagaatttgttttctcttttatttgtgactttcaaaatactggacagaaagcagtatttgtatttgctctccgactgaattttttttttttctgtctccttgctactgactgttctactgaggcttctctattagagagtaaagttgaaagcaaactcttagtgcttaaaacttgcgaagaaaaccttccattgcatcctcattgctcttcctaacacttgtcctcttctttgttgtgttgcaagataaagccaccaatccttccaaccgccaggaggactgggaatacataattggcttctgtgatcagatcaacaaggagctggaagggtgagtctcagcactgtgggggcagctgagagggagcggactgggaaggggaacaaccatggccaaggagggccagccaggtagccccaggcttagtgcactggagtgtgttctgcttgtcccccaggccacagatcgccgtccgactgctggcccacaagatccagtccccacaggaatgggaggcgctccaggccctgacggtaggtccttcactctccggaggtggaaaccgcagcccttcacctgcccacgccattcctcgtgtccccatagcggttcttagggctcctgccaaaagccaacagaaagtccttgatacagactagatagatctcgaatctgttcagccagctgttccacaaatctgtgtgcattgtgccaggccctgaggcctcagaggtgactgcagtgccgtccctgccagcatggccacatggttagtgtgtgaggcagaggggctaaggaaagcagcccagagtcagggccctgagccccatgtggcgcaagagaaggcttggtgaagagatgctgacagggctgtgttgatagttcagagctggccagctgaagaaaagaggggtcggtccagttcattctgtagttaaacaatgccagtcactagcgaaggtgtcgcactgatggctgaggcccctagggcagatcctggtgtctgttcagactgagggaatttaaggtgtggaatggtgcctggccctcagtgcctccacatgctccgaaaacaaagagcagccgagatctgaggaatccggggctctagcctgactgcattcaggtcctggaaagcgaaaagaggaaatatcatctggttcacatgcacccctcagtcatatttgctgtagaacgaattccttaaaacagtgattctcagcagggcacggtggcttgtacctatagtcccagcaccctgtggggcctaggccgggaggatcgcttaagggaattcaagaccagcctaggcaacgtagtgagacattgtctctacaaaaaataaaaaaatcagccaggcacggtggcacacacctgtggtcccagctcctcgggaggctgaggttgaaggatggcttgagcctgggaagttgaggcgaaagtgagtggtgatcacaccgttgcactctagcctgaccaacatagcgagattctgtgtcaaaaaacaaaaaaaaaacgtaacaaaacccagtgattctcaacagggccctccagggaacatttggcagtgtctggaaacatttttagttgtcacacatcggggtgggggtcctcctggcatcaagtaggcagaggccagggatgctgttcgacaccctataaagtgcagagtggccccccacaacgaagaatgaccagcccaaaatgtcagccaggcctcacctgagaaaccttgctttaaaatgcagaagccaagaaagagagcctggacagtgcactcccccttagaaaccgcagtgccagggaccacaggcagcacaggaaagccaaagcgtgagttagggagataagcggagggaggagaaatatcctgtcatctttctcacagataataggatttaaacatccctcccattccctgcacaattgttggtgagcttgtggaaaaaacccaggacaccaagtcagagaaactttgtccctggacctcacctccctcattgtaaaacacgaggccagaatctttaaggaaggcaccttccaggactggcatccaggccttcttggggtcggggtctcggggtttcttgctttagtccctgcccagcttccccagcagaggtttgcagttggagggacatggtctgtgagtgatctcgttgcttaattacactgtccccgggcagtgcacactgcttttcgtgatgagctccttcctgtgggcgtgtttattcagtactctctgggtgccagggatcttgccagtgccaggttccagccccgagcacgccctcactgagcgcctctcctctgtgcggctacaggtgctggaggcatgcatgaagaactgtgggaggagatttcataacgaagtggggaagttccgctttttgaatgagttaatcaaagtcgtctctccaaaggtcagtcagcggcagattcctcgcttttagggacttcttttgtgttcattcccatctcccatcatactggctttcactgcccatccaacatctccagggagctgagattatttgtgtcttgtccttagagagctaggccctggaggtaacgggatgaccaaacaggccacagggaccggcagctttttctgaagcgccctcagcccaaatctgacaggtgatgtggtagtggctgtgtgtttgtccagggtgagggcccatgtagtgtgggactctaggcacctggcacatggcagttgtgggttttgtgggttttcttggcctgtgtcacgtggatacggggagctggcctccgtcattgctccgatgctcagctggccgtgttctgttgcacgctggtgtggcgcagctctgggcccccacttaaagcagagggaatactttaccatgctaaagacattctcatggacacccccaagataaaatgcagttgtgtttctggcaacttgtgcgtgaaaatgcactttcctcagaactcaaaatatccacccaaccatggcctgcaccacatgggcatcagggtcacaaggaagcctctctgtcttgatgtccccaaggtagtaaggaaaggcagagagcaggggtgagcaccgagggcatggtctctggtgtcagactcaggtttccatccggcccttacaccctgggcaagttagatgatcccaggcggcaaatggggacgccacccctactgacgtggctgctgtgcagatgagtaaggtcatgaatacacttacaggacacttcctggacaggaggtgatgacctcctggccccctgcctatccacagactgtatccagatggacacagccacaccacagggagtcgttcccctccccacgctgtctcacacacacttggacacctgcagattttgagtaggaccatagctgctgagcagccacgccattgctgtggagggagccttacactttctctgcctccgaactgcacttactaggtcctcattttcttttgccatgtagtacctgggggacagggtgtctgagaaagtgaagaccaaggttattgagctgctgtacagctggaccatggccctgccagaagaagcaaagatcaaagacgcctaccacatgctgaagagacagggtacgtgtctgcctgcccgcagcctccaggcagccctcgaaggctggcccaggcaaggagagaagggaaggtttgggatccccagagtccctcctgaagagaacagcatttgtccccaggcaaggctgagtcggagttggatgggataaggtgtagcagcctgccctccaccctgctaccctttgcaggtcttgatcacagggacgtggcccttggtgtatgaggaggggtgacaaggcaaccacagcctgagtgcacgtgctgccatgtcccctttcaggcatagtgcagtctgacccaccaattcctgtggataggacgctgatcccctctccaccacctcgtcccaaaaaccctgtttttgatgatgaggagaagtccaaggtaaaggacaccctgggcctgggattttctcatacgagagtgggtggcagcaggggaatgtggtttgcactgtgctgcggggagcctctggggtttccctggggtacgggtgctgcctcttcccttcacctctgatttcctcctctctcagcttttagccaagctgctgaaaagcaaaaacccagatgacctgcaggaggccaacaagctcatcaagtccatggtgaaggaagtgagtgggccccggtccttcaggcacggggtggaggagcccatggccacacagcagaagccgctttgccccggacacgggcctgttttgttctcccctgctgccagctgccctacctgtgccccggtggctgagagtgggaggaggagcacaatagcttccgcgggagcacggaagagaggagtgggttgggagcagtgttgtgaaagcagaagtatagactgggccccaggcaccccacactgaaaggagcttccgagcgtctgtacttgtgttgtggggtaaggtgtgacctggtggaagtggaaagacagtcaagtgacgctctctttctcttgaacttcttcactggggcaggacgaggcacggatccagaaggtgaccaagcgtctgcacacgttagaggaagttaacaacaacgtgagactgctcagtgagatgctgcttcattacagccaggaggactcttcggacggggacagagagctgatgaaggtgggaccgccgacggcaaaggctgcctcccggggctgcgctgcccttcaggagctcagccagcatttgctgagcacgtgccttgtcagagacacgggctgtgcacttggcagtgtattcatgaccttactcatctgcacagcagccacgtcagtagagggtggcgtccccatttgcctcctgggatcagctgacttgtccagggtgtaagggccagatggaaacctgagtctgactccagagaccacactctcggtgctcacccctgctctctccctttccttactaccttggggacatcaagacagagaggcttccttgtaaccctgatgcccatgtggtgcaggccatggttgggtggatattttgagttctgaggaacatgccagcctggaaggcaggaggggactgacttcccctgacccatcctggtgactgctacctagacaaacatcctgggtgatgtggtgt

SEQ ID NO: 12216 - DNA, 1018 bp, Homo sapiens
aatatggcggaggcggaaggggaaagcctggagtcctggctcaataaagccaccaatccttccaaccgccaggaggactgggaatacataattggcttctgtgatcagatcaacaaggagctggaagggccacagatcgccgtccgactgctggcccacaagatccagtccccacaggaatgggaggcgctccaggccctgacgtacctgggggacagggtgtctgagaaagtgaagaccaaggttattgagctgctgtacagctggaccatggccctgccagaagaagcaaagatcaaagacgcctaccacatgctgaagagacaggcttttagccaagctgctgaaaagcaaaaacccagatgacctgcaggaggccaacaagctcatcaagtccatggtgaaggaagacgaggcacggatccagaaggtgaccaagcgtctgcacacgttagaggaagttaacaacaacgtgagactgctcagtgagatgctgcttcattacagccaggaggactcttcggacggggacagagagctgatgaaggtgggaccgccgacggcaaaggctgcctcccggggctgcgctgcccttcaggagctcagccagcatttgctgagcacgtgccttgtcagagacacgggctgtgcacttggcagtgtattcatgaccttactcatctgcacagcagccacgtcagtagagggtggcgtccccatttgcctcctgggatcagctgacttgtccagggtgtaagggccagatggaaacctgagtctgactccagagaccacactctcggtgctcacccctgctctctccctttccttactaccttggggacatcaagacagagaggcttccttgtaaccctgatgcccatgtggtgcaggccatggttgggtggatattttgagttctgaggaacatgccagcctggaaggcaggaggggactgacttcccctgacccatcctggtgactgctacctagacaaacatcctgggtgatgtggtgt

SEQ ID NO: 12217 - DNA, 1556 bp, Homo sapiens
agtgcccttcctgtgacagcctacgataaaaacggcttccgcatcctcttccactttgccaaggagtgtcccccaggacgacctgacgtgctggtggtggtggtgtccatgctgaacacggctcccttacctgtcaagagcatcgtgctgcaggctgcagtgcccaaggtaccagtgtctccctggggccaaaacggccttatcttgaccctgttgtgtagaggcctttgcagccagcaggtggcagtgtgtgtgtgcactgcaggttccatctgggggcacctaccagttctcttcaaaggagtttctctctctttagtcaatgaaagtgaagttgcagccaccttctgggacagaactctctccatttagccccatccagccacctgcagccatcacccaggtcatgttgctggccaatccactgaaggtgagcagcaaagaacccaggggtcccagcctgaggccccagctgccccagattaggacgtcaggcccaccacctcccagctggaagtgttttgactgtaggattgacacatccctttgctgccttaggttaagtgtctgagcatggttgggggttgcggggaaaagggaccattcctctagcacagagagggtagcagaatagagggcgtcctgccaaggggccgcctgggctggatctcacttgctgccctctgtcacaggagaaggtgcggcttcggtataagctgaccttcgccctgggggagcagctgagcacagaggtgggcgaggtggaccagttccctcctgtggaacagtgggggaacctatgaccccagaggacgctgtgatctccaccttgaagccaggcaggctgccctgagacgaggagggctctggtcccgtcactctccatgccctgacaacagtgcttgtagctttgatgtggaacaggggccctgggcatttctgctgagaaccaaactgctgctgtgataacctctcctttggcccctaaaaggacctgtttttatctacctgtgtgacttgaagtggccatatgctgtcaggggtgcggagtggcccctgacttcactgctgtcccgggaacatggacccccaggcttggcgtaggtgtttgcttccttctactggcattcactgaagccactggggtggggggtggggggtgggagtctctaaagagagactgtcatgggtcattccccacaagagccacatcctcacacctgacagatgcacggcccaaggggctgcagccctgttgcaattccatgcttcccccgccaaccagctcctgctgccatccccagggaggtggcccaggaaggtgcctggcccagaataaggaactggcatactgcaaagtccccagccctgcctctggtggacagcatcgtcctggaatggccacggagtgatgagttgtgtgcttgtccctggcagtggcaggctgtgtcctatggacatcttggcaggacatggaatttggcctcatgacaggcccaactagggataggaaggaaaatgaagagagccagtatttccccttctccagaagcagg

SEQ ID NO: 12218 - DNA, 550 bp, Homo sapiens
agtgcccttcctgtgacagcctacgataaaaacggcttccgcatcctcttccactttgccaaggagtgtcccccaggacgacctgacgtgctggtggtggtggtgtccatgctgaacacggctcccttacctgtcaagagcatcgtgctgcaggctgcagtgcccaagtcaatgaaagtgaagttgcagccaccttctgggacagaactctctccatttagccccatccagccacctgcagccatcacccaggtcatgttgctggccaatccactgaagctcctgctgccatccccagggaggtggcccaggaaggtgcctggcccagaataaggaactggcatactgcaaagtccccagccctgcctctggtggacagcatcgtcctggaatggccacggagtgatgagttgtgtgcttgtccctggcagtggcaggctgtgtcctatggacatcttggcaggacatggaatttggcctcatgacaggcccaactagggataggaaggaaaatgaagagagccagtatttccccttctccagaagcagg

SEQ ID NO: 12219 - DNA, 1473 bp, Homo sapiens
atcctgttttcttctctattgtcaggcctcgccgacccagcccctaatgttcctcccaaagagtcagctgggaacagccagtggcacctgctccaggtaggggcacaggatcggtgacagcactactgtgccaaggacctccactttccagcgtcatgtctcctgggctgcagttagctgtccttccctccagagcgtgccagctgcagcggggaacaatgagtgcctccggggctgtcttccgtgcagtccttggagggctgcgccccgttccagcggcaggccctccccacccgccctcggctcaccaccctttctgttgttcatagagggaacagtccgacctggacttcttcagccccaggccggggaccgctgcctgtggcgcctccgatgctcctctgctccagccctcagccccctcctcaagcagctcccaagctccactgccgcctcccttcccagctcctgtggtcccagccagtgttcctgcccccagtgcgggctcctccttgttttctactggagtggccccagccttggccccaaaagttgagcccgcagtccctgggcaccatggcttggcgttgggcaacagcgcgctgcaccacctggatgccctcgatcagcttctagaagaggccaaagtgtaatgagtgggaggagatgtggggttgctgagggttgggcctgaatgtgtcagaaccagagctaactttgaaggggtgggggtgccttgtagtcccatcagtcaggctggaaggcaaggggtgggcctgggtaagagcatggtcaggggccttgggtgagagtcctgcagctctggctggctctctgacgtgctttccatccttcccacctcccaggacctcgggcttggtgaaacccactacctcccctctcatccccaccaccaccccagccaggcccctcctgcccttctccacggggcccggcagcccgctcttccagccactgagtttccagtcccagggcagccccccgaaggggcctgagctctccctggccagcatccacgtgcccctggaatcgatcaagcctagtaggtgttggaggattgaggtgggtggggcggtggggcctatagccacggagctgtaggacatgcgacagggatggatccaggcactctttgcagggggtcccttaaagccaggcaggcctccctgcctgcattctcagtcttaagctcctcactgagcgcctctcccagattccgttaggaagcactggactcatcatgaccacggagtagcccttttctcctcaccgccggggctctgttgggtgtctctggtgctgctcctcccacactcacgtcacgttcttacaggcagtgcccttcctgtgacagcctacgataaaaacggcttccgcatcctcttccactttgccaaggagtgtcccccaggacgacctgacgtgctggtggtggtggtgtccatgctgaac

SEQ ID NO: 12220 - DNA, 531 bp, Homo sapiens
atcctgttttcttctctattgtcaggcctcgccgacccagcccctaatgttcctcccaaagagtcagctgggaacagccagtggcacctgctccagagggaacagtccgacctggacttcttcagccccaggccggggaccgctgcctgtggcgcctccgatgctcctctgctccagccctcagccccctcctcaagcagctcccaagctccactgccgcctcccttcccagctcctgtggtcccagccagtgttcctgcccccagtgcgggctcctccttgttttctactggagtggccccagccttggccccaaaagttgagcccgcagtccctgggcaccatggcttggcgttgggcaacagcgcgctgcaccacctggatgccctcgatcagcttctagaagaggccaaagttgcccttcctgtgacagcctacgataaaaacggcttccgcatcctcttccactttgccaaggagtgtcccccaggacgacctgacgtgctggtggtggtggtgtccatgctgaac

SEQ ID NO: 12221 - DNA, 18702 bp, Homo sapiens
ggcggaggcggaaggggaaagcctggagtcctggctcagtgagtagccgcggccgtttctgcctgccctcgagccgctgggctgcccctgtcttcacccccacgtcccctccccgggctccacggcgtcgcctcttggcagcccacgcccggtctcgccctcgccgcgagcagcctgcgatcacgccccttccctatcagggcgccgggccccagtccggcccccgcttccctcgctgcggcgcgtcctcttgctctggcgcgcggcggcgtgaactcgggctcctgtcgggcaccgcaggctcggggaaaggcgacagccaagatcttcgggctgacatgcttcggcgctttggggagattgtggtggggtcgccgcccggcggtgacaccaggaacccagcgccccaatccctgactaagggagaagcttcggattggggctgagtctccggtagtggtgggtgctgccgactgcgttcagtcgcctggcagcttcagaattgtgaccatgtgttggagaagtgacggcttcgctcaggcagaatgcttgaagtgagaataatattccaaagagagcgatgatagagaacagagagctctacctttttcctgcagtgaccacagaagcatggtgaaatcggtgtcgggaattccccccccacacacatacatatacccccttgaatatcctaacgagtcagtgttgatagcctattctgagtaaggctgaggagcacagtctgaagctgtagttatagaagcgtattgctgtcattgcactgtgaattacagtgctacgaaggaaatgtgtgttaacctggttagcaggtagtactctgcctgagggttaataagtgaactttcctgtaggctagacctggaagcctcctttaagtggagagagaaattggactggtaatgggataggtgagatacctagtattgccttgttctgaggtctcttatttagtactgcttccgggatcttggaggtgatagctatttcctcaaattgtctgatttttcctagtaagaaacccccttcaggaggttgagcttcagtttaaaggggagcatatcccaaaagagagaaaaagtaagatcacgtttgcaaaatctgcagttgcaggcaggtcataaggcttctttatatatggaagtgttctccaaggagctcaaagtactttacagatattcattaaattagtttaccaagtattctagcaaagcaggcactactgccataatttcacaaaaagaggacatcctgactccagtcaaaccacttgcccagaaatgcccaacttgctataaccagagtggaattagtttgctttgaaggtattaatatgggtattgaataatttaaatgacctaagctgagtttaataggctacatttagagttacattttgtttttgttacttgtttttgagacagagtctcgcgcgctgttgtctaggctggagtgcaggggtgcgatcatagctcactgcagccttgaacccctgtgctcaaataagtcttctacctcagcctcctgagtagctgggactataggcacacgccaccatgcttggctaattcttttgatttttagtagagatgaggtcttgctgtgttgcccaggatggtctcaaactcgagttcaagtgatcctcccacctttcccttacaaagcgctgggattacacacgtgagctaccgcacccagcctagagtcacattatgaaatgagagggacacacttggtgggggggagtcacatggtatctgtagagacataagcttcacagttgttacgacttaatgtgaactgtaccagttgaacaaaccagcagttggggttcagcatcgtctcagtcagcgtccttgtcaccccacgtttgcctgaattgttgcagaagcctctgcttggcccagagacccaggtctctcccgtcctcacctctcctcagtccattctgctcccagaagcgcacttgtgttgaatcaaatcattccactgttgcctgtaatctggccttggttgttccaggcctttttctctgtggcttctacgttttcctgctctactcagtctgatgttcttggtttaccaatacacgttgctctccttacctggaagccctgctcccgtttcctcaactaaatgcttgaaaacccatctcagattctcttttctcacaaaccatctcttgatgacttcagtcttctttcaagtcccaccatgatcaatcaatcaatgtttaatgagtacctgctacgtggggtgttataggagttaggaagtttaagaagattttgcctttagttggatggaggtgatgctggagtggatgaagaactctcctgtaatcccagcacgttgggaggccgaggcgggtggatcacgaggtcaggagatcgagaccatcctggctaacacagtgaaaccccgtctctactaaaaaatacaaaaaaatagccaggcgtagtggcgggcgcctgtagtcccagctacacgggaggctgaggcaggagaatggtgtgaacccgagaggtggagcttgcagtgagctgggattgtgccactgcactccagcctcggtgacagagcgagactccgtctccaaaaaaaaaaaaaaaaaagatacaaggcagtgctaaaacgccggcattctctttagggaactggggatgggggaagagatgattcattgaggatactccatttgagctagccattaaataatgggaaaagttggaaaaaaaaaaacactagatggtgatgtggagagagcaaacctgtttggggcacacagtaacagaggtgtttgggaatgagggaagataaggctgggaagttaagaccagattctaccaagtctccaatttccagcccaagaagtttattttatttatttatttatttgagacagagtcttgcactgtcacccaggctggaatgcagtggcacaatctcggctcactgcaacttccgttgcttaggtgcaagcaattctccatcctcagcctcccaagtagctgggactactggtatgtgccactacacctggctcatttttgtatttttagtagagatggggtttcaccatgttggccaggctgttgtcaaactcttgacctcaagtgagccacctgcctcagctccctccaaagtgttgggattacaggcttgagctaccacgcccagcccagccgaagaagtttaaatttctgcagttatcaggccctcattccttctgtactaggtgaaatcggtgttttggtgtcttaagaggcttgatttgatataggtttcatgcgcgtccgtgtgaagagactaccaaacaggctttgtgtgagcaacatggctgtttatttcacctggatgcaggcaggctgagtccgaaaagagagtcagcaaagggtggtggattatcattagttcttacaggttttgggataggcggtgaagttaagagcaatgttttgcgggcagggatggatctcacaaagtacattctcaagggtggggagaattacgaagaaccttcttaagggtgggggagattacaaagtacattgatcagttagggtggggcagaaacaaatcacaatggtggaatgtcatcagttaaggctatttttacttcttttgtggatcttcagttacgtcaggccatctggatgtgtacgtgcaagtcataggggatgcgatggcttggcttgggctcaggcctgacattcctgccttcttatattaataagaaaaataaaacaaaatagtgttgaagtgttggggcagcgaaaatttttgtggggtggtatggagagagaatgggcgatgtttctcagggctgcttcaagtgggattaggggcggcgtgggaacctagagtgggagagattaagccgaagggagatcttgtggggatgttagaagaaacatttgtcgtatagaatgattggtgatggcctggatatggttttgtatgaattgaaaaactaagtggaataagagaaggagaaaaacaggtataaaaggtctaagaattgggaggacctaggacatctgattagagagtgcctaaggagattcagcatagtcctgccagcaaagattatttatttacttcaagagttaagagtggcagtttggggatagcacgaggagatatcacctgtgatggcttggagaaacagtgtaaaccagcagtgtaaacaagagcagggcatgtatgagtagttgagaacgttgaataggagtatgactagacagaagatagtagggatgatgacaggttttttttgggggggggggcacagtctaagttggtctggtgtctggaatgagactggggcctaataaaaaggagcatctatacaggagcttaaatgggctgtaccttgtagcattctgaggacaggtctgacttctgagaagggaaagtggtaaaagtattgtccagtcctttttaagttggtggctgagcttggtgaagtgtttttaaaagacctttagtccgttctgcttttcttgaagacggaggaccgtaagggatataaaggtttcactgaatactaagagcctgagaaactgcttggctgatttgactaataagggctggtctgttagactgtatagaggtgggaaggctaaactgaggaattgtgtctgaccgaagggaagaaatgactgcggtggccttctcagaccctgtaggaaaggcctctacttacctagtgaaagtgtctacttagactaagaggtattttagttatctgactcggggcatgttgagtaaagctaatttgccagtcctgggtgggggcaaatcttcaagcttgatgtgtagggaagggagggggcctgaataatccctgaggagtagtagaatagcagatggaacactgagaagttatttccttgaggatagatttccacaatggaaaggaaatgaggttctaagaggcgggctagtggcttgtactatagcatagcctgcctttgctgctgtgtggcgattaggcctgctggaactgccatcaataaatcaagcgtgatcagggtgaggaacaggaaagaaggaaatatggggaaatggggtgaatgtcaggtggatcagagagatacagtcatgggggtcaggtgtggtatcaggaataatgtgggaggccagattgaggtccgggccaggaacagtggtaattgtgggacttaacaaagagtgagtacagctgaaggagccggggagcagaaagtatatgcatcaggtatgaggaagaaaataatattggaagttatgagaaatgtagagagtgagttgagcatagtttgttatttttagggcctctaaaagtattaaagcagcggcagccactgcaagcagacatgagggctaggctaaaacagtaaggtcaagttgtttgggcagaaagactacagggtgcggtcctggctcttgtgtaagaattctgacacactaaccatgcctaggaaggaaaggagttgttgttttgtaagggattgaggtttgggagattaatcggacacgatcagcagggagagcacgtgtgttttcatgagaattatgccgagataggtaacagatgaggatgaaatttgggcttgactgaagtaatgggggctgtctgtgaagccttgcagcagtacagcccaggtaatttgctgagcctaatggatgtcagggtcagtccaagtgaaagcaaagagaggctgggatgacgggtgcaaaggaattgtaaagaaagcatgtttgagatccagaacagaataatggattgtggagggaggtattgaggataggagagtatatggtttggtaccatggggtggataggcaaaacaatttggttgataaggcatagatcctgaactaacttgtaaggcttgtctggttttaggacaggtaaaatgggggaattgtaaggagagtttataggctttaaaaggccatgctgtagcaggcatgtgataacaggctttactcctttcaaagcatactgtgggatgggatattggcattgagcggggtaagggtgattaggttttaatgagatggtaaggggtgcatgatcggtcgccaaggagggagtagaggtatcttatacttgtgggttaaggtgggggggaatacaagaggaggacgcaaaggaggctttggattggaaagggcagcaatgagatgtagctgtaacccaggaatagtcagggaagcagataatttagttaaagtgtctcggcctaataagggaactgggcaggtggggataactaaaaacgagtgcttaaaagagtattgtctaagttggcaccagagttggggagttttaagaggtttagaagcctggctgtcaatacccacaacagttatggaggcaagggaaacaggcccttgaaaagaaggtaatgtggagtgggtagcctccgtattgattaagaagaggacggacttactctccactgtgagagttacctaaagctcggcatctgtgatggtctatggggcttccgaggcgatcgggcagcgtcagtcttcagccgttaagccgagaagatctgggaaggagtcagagagccttgggccagagttccaggggctctgggagtggctgtcaggtgagttgaacagtccaattttcagtggggtcccacacagatgggactcgcttaggaggaatcccgggctgcgggcattccttggctcggtggccagatttctggcacttgtagcaagctcctgggggaggcagttatggaggaatgcctggccactgcggtttaggcgtttggaagttcttgtgtgctggagatgtagctggggtttgtctcacagtggaggtaaggaattgcaactcagaaatatgttgttacttggctgcctctactctattattgtacaccttgaaggcgaggttaattaagtcctgttgtggggtttgagggccggaatttaatttttggagttttatttaatgtcgggagcagattgggtaataaaacgtatattgagaataagacggccctttgacctcttagggtctagggctgtaaagcgtctcagggttgctgccgaacgagccatgaactgggctggatttttatatttgatgaaaaagagcctaaacgcttctgatttgggataaagaaaaaggagcattaaccttgactatgcctttagctccagccacctttttaagagtaaattgctgggcaggtgggggagggccagtcactgaacgaaactgtaagctggaccaggtgtgaggaggggaggtgataaaaggattctagggtggaggagcagaggctgaggaagaattgggacctagatggcctggcgacgagcagcctgaggagaaggggaaaggtcagatgggtctgtagaaaagactggaaagacccagcgacacttggggttgggactgaggggacaggcgggagggaaagaaggaggatttgggaggaatcgcattgggaacagagacttgagagggaacgaagtgtgaaaaatgcctggatgtgaggcacctcagaccatttgcccattttttgacaaaaattatttaggtcttataggatggagaaatcgaaagtgccgttttctggccatttagagccattgtcaagtttgtactggggccaagcggtgttgcagaagaaaataaggcatttaggttttaggtcaggtgcgagttgacgaggttttaagttcttgagaacacaggctaagggagaaggaggaatggaggctggaaggttgcccatagtaaaggaggcaagcccagagaaaagagagagtagagacacggagggaaggggttcgagggttcttaccctccagaaaagcaggaaaggggtcagggtgtggaaataagggattggggcacacagataagaggtcggggtgcggaaataagggattgggggttcttgccccctagaaaagcgggacttaccgctaagggtgaaggagaaggggttgaggggtacttgcccctcccccagaaatgcagagaaggggtagagacacggagagaaggggttgtggtacttgcccctcccccagaaaagcaggacttgccgctaagggtgaaggaccaaggcaggcgtccctgagtggtctgacacctttgaaacgtgagtgaataatcagagaggtgtccctgcaatgattaaacaccaaggaaaggctgccttcccagtctgtgaccagcgccagagttttgggtccacggataaaacgtgtctcgtttgtctctaccagaaaatgaaaggaattgaaattaagagaagggagagattgaagagtggaaaggagaaagtggttgagggatagtgagagaggttggagaagagagtaagaagaggccgcctacctgatttaaaattggtgagatgttccttgggctggtgggtctgaggacctgaggtcgtaggtggatctttttcacggagcaaagaacaggaggacaggggattgatctcccaagggaggtcccgcgatccgagtcatggcaccaaatttcatgcgcgtccatgtgaagagaccaccaaacaggctttgtgtgagcaacatggctgtttatttcacctggatgcaggcgggctgagtccgaaaagagagtcagcaaatggtgtggtggattatcattagttcttataggttttgggataggcggtgaagttaagagcaatgttttgcgggcagggatggatctcacaaagtacattctcaagggtggggagaattacgaagaaccttcttaagggtgggggagattacaaagtacattgatcagttagggtggggcagaaacaaatcacaatgctggaatgtcatcaggtaaggctatttttacatcttttgtggatcttcagttacttcaggccatctggatgtatacgtgcaagtcataggggatgccatggcttggcttgggctcagaggcctgacaatagggactttacataggattaggatggattagaacagaagttctagaagcaggtgagaaggagtggagggtagggataaggaaggaagggatttaagaagacattgagaaggaaaggaccacaagactgagaggaatggatgaggagagagggaagaaggagtcaaaaaagaggtgggggaataggggacttttggaaggtgcagcatttataggaatagtgacttaatagaccacatgcagtggctcattcctgtggtcccagctactcaggaggctgaggtgggagcatcgcctgagcccaggagttggaggctacagtgagccatgatcgcctactgcagcccggggcaatagagtgagacccccatctctaaaaaaagaacaagcacacgcctgtgggtggtcccagctactcaggaggttgaggtgggaggatcacttgagcctgggaggcagagactgcagtgagctgtaagagccactgcactccaacctgggtgacagagtgagaccccgtctcaaacaacaaaaaagaaaaaaaaaaacgaaagacgccaggcactgggactcacacctgtaatcctagcaccttgggagttaaaggcaggcagattgcttgagcctaggagttcaagaccagcctgagcaacatggcaaaattctgtctctaccaaaagtacaaaaaattagctaggtgtgatgtgagtgtctgtggtcccagctaggctgaggtagaagaatcatctgagcctgggaagttgaggctacagtgaagccatgatcgcaccactgcactcttgcctgagtgacagagtgagaccctgtctcaaaaaagaaaaaaaaaggaagaagaaaaagaaatggggaagtcaggaaaaagaagtgatgcttttttttttttttttttttttgagaaggagtctcactctagtcgcccaggctagagtgcagtggcacaatctcagctcattgcaacctctgccgcctgggttaaagcgattctcctgcctcagcctcccaagtagctgggattacaggcgcctgccacttcgcctggctaatttttgtagttttagtagagacagggtttcactatcttagccaggctggtcttgaactcctgacctcgcgatccacccacctcagcctctcaaaatgctgggattgcgggtgtgagccaccgtgcctgggccatacatttgtttttacactcatttctgtaccaaattagcccaattatctactgtcttgttttttgaactgattttttttttttttcatgtattgaaccaggagagcacagcctccttgagggtaaaatctgtgtctggaactttttctgtagtccctccagggtctggcatgctgacatgctgtttacttcattgtctgcgggtgcttaacaaagacttggtgattgactaagtttgtgtttccattcaggaccctagtgaaggttgacctttattccctttccagcccatgttcttgcttctgcttgtttgtaagtcatttgttacgtagatttttctttttggagatggagcctcactctgtggcccaggctggagtgcaatggcctgatctcagctcactgcagcctctgcctcctgggttcaagtggttctcctgccttagcctcctgagtagctgggatcacaggtgcgcggaaccatgcccagctaattttgtgtttttagtagagatggggtttcaccatgttggtcaggctggtctcgaactcctaacctcacgcaggtgatccgcctgcctcggcctcccaaagtgctgggattacaggcgtgagccaccgtgcccagaccatatgtatataattttttttttttttttttttggagatggagtctcactctgttgcccaggctggagtgcagtggtacaatcatggctcactgcaacctctgcctcctgggttcaagcagttctccagcctcagccttcaagtagctgagattacaggtgtgtgctaccgtgcctagctaattttagtatttttagtagagacaggatttcaccatgttgaacaggctggtcttgaactcctgacctcaaatgatccacctgccttggcctcccaaagtgctgagattacgggcgtgagccaccgcatccagcctgctatgtagatcttgttttctctggaatgtttgagccgtgctggaatggggtacccaatgctgctgtttccatccccacatgacgttttaagtcccacgagagtaggctagcgatggagtgaagctgaaaaatgaaagcaggaaatccagagacacagaaacagatgaggctttcaacagagactcgaaaatagacagaaaccatgagtcagagcagagcccggaggggcggttcgggaaggcaaggtctataggggaagctcgggtgtcacctctatgccaggtgaaggaaatgttgagtgggtgggaggctgtgtgcatctgctggggaggcagtaggcagatggaaagatcaagtcacccagaattatccccagaggttccttcccgttcctgtgggcgggtgagctctgctttctgagctgcccagagagctggaggagatagacatggaactgaccattgcagaaactagggctttttgtgcccgtgagtaggcaaagagctccctgtggatttgccataaaaaggtctatcaaggtggaagaaagtgagattctagagaaattaatacaagtgaaaagtgggcaggagtgttcttggaagtagaaatgctgttggaagtctaatagacttgggaagaagataacgtatggtgaataccagttgcttcgggggttggggggatccacattttactctgtactcagaagatgcttttccccgtgcaaaaagtgaaagtgagtgggccagtttttcttctgtcacaaggtgtatgactgttcccaaaataatagccctgggggatggggattgcttctcagaccattcaatttttgtaccctgtagacttttggtgttatgtgagaactttaagcacctgataggaattagtaacagagctacgctaatgcctgaggaaatttcagacaattggtgggagagacttggcatttggaatgtgatagctggtaggctaccatacagtaatgcaggattgccagacatttctttccaaatggctacccttgattacatttaactcccctcctttcaagctccagattttgaaggacctgttaattctctttcaagattgaagacagacaccttctttttcttctaaagaggaacctaggcggggtgcggtggctcccgcctgtaatcccagcactttgggaggccagggctggtcttgacctccttacctgaggtcaggaggcctggccaccatggcgaaaccccatctctactaaaaatacaaaaagtagccaggcatagtggcgcatgcctataatcccagctactcgggaggctgaggcaggagaatagctcgaacctgggaggtggaggttgcagtgagcctagatcgcgccactgcactccagcctgggtgacacagcgagactcaatctcaaaataaataaataaataaatatgaacctaaaccatcagaatcttccccttgcagccacaacagaaacactgccggggaggccgagccccgacctgggaagcagggtgatacactgggtgccacgggccttccctctgcctggcagctgtcgctactcagatccctgcagccctgttgccagtgaaggagctggagtctctgttatgatgtgttcatccagctggtgagtttttttttttttgttttgttttttttgtttttgtttttgttttttttttagacagagttttcacttgttgcccaggctggagtgcaatggcacgatctcggctcaaggcaacctctgcctcccaggttcaagcgattttcctgcctcagcctcctgagtagctgggactacaggcatgtgccaccatgcccagctaattctgtatttttagtagtgatggggtttctccatgttggtcaggctggtcttgaactcctgacctcaggtgatccgcctgcctcggcctcccaaagtgttgggattacaggcgtgagccactgcacccggcccagctggtgattttttttttttttttttttttttttgagacggagtctcgctgtcgcccaggctggaatgcagtggtgcgatctcagctcactgcagactccaccccccgggttcgcgccattctcctgcctcagcctaccgagtagctgggactacaggcgcccgccaccttgcccagctaactttttgtatttttagtagagagggggtttcaccgtgttaaccaggatggtctcgatctcctgacctcgtgatccgcccgcctcggcctcccaaagtgctgggattacaggcgtgagccaccacgcccggccccgtagctggtgatttttaaagttaacaaaatacaattatgagaaatcagaattcagaaagtaatgacagagagggccttgtcgggaggggctctgacaccctgctttgggccctcatagagatctggggagggagcaggagtgttttaaggggtgtgcgtcttcagccttccatttgtcttcagaacccaaagccctaaatttagcaaacagctggagagtgctttctgaagagggaggctctggacctgaatcagagatgggaacccatgtaaccaccctcagctgggctcttcagtgtaatcacaggtttgggaaggtaactgaggagagcccatgccaaatatcagaactttgcatttggtgcctggattttaaatcccaggggccctctgagaactctagtacttgtgtttgtgcttgaccatggaaggccattagagcctgggggtgctagatactcaagctgcaatcccaggcaagttgcacggtgaccagggcttagtaggggctaagtaaatgttgttggcttgacaatgatgagcattatgtgcaatttcaaaaacacttaaagcattatggaaggctaggtctggaaaaaccttttgacaggtatgtggaaaatattcgctgggcgcggtgactcacgcctgtaatcccagcactttgggaggccaaggcgggccgatcacctgaggtcgggagtttgagaccagcctgaccaacatggagaaaccccgtctctaccaaaaatacaaaattagttgggcatggtggtatgcacctgtagtcccagctacttgggaggctgaggcaggagaatcacttgaacccgggaggcagaggctgcaatgagccgagatcgtgccactgtactacagcctgggcaacaagagcgagactccatgtcaaaaaaaaaaaaaaaatttgtggttacaaatatgtatttttttatctagttcagtctgatttcagtttccccaaaaacccttcttgaccatctccacttgcttaacactgagctcatttttatatagctggagttccctttattatctttacatgtttcatgtaggcatttttttgggaatattttaattatttgtgtttgtccttttgaccttgattccactctaagcttcatgagacagaatttgttttctcttttatttgtgactttcaaaatactggacagaaagcagtatttgtatttgctctccgactgaattttttttttttctgtctccttgctactgactgttctactgaggcttctctattagagagtaaagttgaaagcaaactcttagtgcttaaaacttgcgaagaaaaccttccattgcatcctcattgctcttcctaacacttgtcctcttctttgttgtgttgcaagataaagccaccaatccttccaaccgccaggaggactgggaatacataattggcttctgtgatcagatcaacaaggagctggaagggtgagtctcagcactgtgggggcagctgagagggagcggactgggaaggggaacaaccatggccaaggagggccagccaggtagccccaggcttagtgcactggagtgtgttctgcttgtcccccaggccacagatcgccgtccgactgctggcccacaagatccagtccccacaggaatgggaggcgctccaggccctgacggtaggtccttcactctccggaggtggaaaccgcagcccttcacctgcccacgccattcctcgtgtccccatagcggttcttagggctcctgccaaaagccaacagaaagtccttgatacagactagatagatctcgaatctgttcagccagctgttccacaaatctgtgtgcattgtgccaggccctgaggcctcagaggtgactgcagtgccgtccctgccagcatggccacatggttagtgtgtgaggcagaggggctaaggaaagcagcccagagtcagggccctgagccccatgtggcgcaagagaaggcttggtgaagagatgctgacagggctgtgttgatagttcagagctggccagctgaagaaaagaggggtcggtccagttcattctgtagttaaacaatgccagtcactagcgaaggtgtcgcactgatggctgaggcccctagggcagatcctggtgtctgttcagactgagggaatttaaggtgtggaatggtgcctggccctcagtgcctccacatgctccgaaaacaaagagcagccgagatctgaggaatccggggctctagcctgactgcattcaggtcctggaaagcgaaaagaggaaatatcatctggttcacatgcacccctcagtcatatttgctgtagaacgaattccttaaaacagtgattctcagcagggcacggtggcttgtacctatagtcccagcaccctgtggggcctaggccgggaggatcgcttaagggaattcaagaccagcctaggcaacgtagtgagacattgtctctacaaaaaataaaaaaatcagccaggcacggtggcacacacctgtggtcccagctcctcgggaggctgaggttgaaggatggcttgagcctgggaagttgaggcgaaagtgagtggtgatcacaccgttgcactctagcctgaccaacatagcgagattctgtgtcaaaaaacaaaaaaaaaacgtaacaaaacccagtgattctcaacagggccctccagggaacatttggcagtgtctggaaacatttttagttgtcacacatcggggtgggggtcctcctggcatcaagtaggcagaggccagggatgctgttcgacaccctataaagtgcagagtggccccccacaacgaagaatgaccagcccaaaatgtcagccaggcctcacctgagaaaccttgctttaaaatgcagaagccaagaaagagagcctggacagtgcactcccccttagaaaccgcagtgccagggaccacaggcagcacaggaaagccaaagcgtgagttagggagataagcggagggaggagaaatatcctgtcatctttctcacagataataggatttaaacatccctcccattccctgcacaattgttggtgagcttgtggaaaaaacccaggacaccaagtcagagaaactttgtccctggacctcacctccctcattgtaaaacacgaggccagaatctttaaggaaggcaccttccaggactggcatccaggccttcttggggtcggggtctcggggtttcttgctttagtccctgcccagcttccccagcagaggtttgcagttggagggacatggtctgtgagtgatctcgttgcttaattacactgtccccgggcagtgcacactgcttttcgtgatgagctccttcctgtgggcgtgtttattcagtactctctgggtgccagggatcttgccagtgccaggttccagccccgagcacgccctcactgagcgcctctcctctgtgcggctacaggtgctggaggcatgcatgaagaactgtgggaggagatttcataacgaagtggggaagttccgctttttgaatgagttaatcaaagtcgtctctccaaaggtcagtcagcggcagattcctcgcttttagggacttcttttgtgttcattcccatctcccatcatactggctttcactgcccatccaacatctccagggagctgagattatttgtgtcttgtccttagagagctaggccctggaggtaacgggatgaccaaacaggccacagggaccggcagctttttctgaagcgccctcagcccaaatctgacaggtgatgtggtagtggctgtgtgtttgtccagggtgagggcccatgtagtgtgggactctaggcacctggcacatggcagttgtgggttttgtgggttttcttggcctgtgtcacgtggatacggggagctggcctccgtcattgctccgatgctcagctggccgtgttctgttgcacgctggtgtggcgcagctctgggcccccacttaaagcagagggaatactttaccatgctaaagacattctcatggacacccccaagataaaatgcagttgtgtttctggcaacttgtgcgtgaaaatgcactttcctcagaactcaaaatatccacccaaccatggcctgcaccacatgggcatcagggtcacaaggaagcctctctgtcttgatgtccccaaggtagtaaggaaaggcagagagcaggggtgagcaccgagggcatggtctctggtgtcagactcaggtttccatccggcccttacaccctgggcaagttagatgatcccaggcggcaaatggggacgccacccctactgacgtggctgctgtgcagatgagtaaggtcatgaatacacttacaggacacttcctggacaggaggtgatgacctcctggccccctgcctatccacagactgtatccagatggacacagccacaccacagggagtcgttcccctccccacgctgtctcacacacacttggacacctgcagattttgagtaggaccatagctgctgagcagccacgccattgctgtggagggagccttacactttctctgcctccgaactgcacttactaggtcctcattttcttttgccatgtagtacctgggggacagggtgtctgagaaagtgaagaccaaggttattgagctgctgtacagctggaccatggccctgccagaagaagcaaagatcaaagacgcctaccacatgctgaagagacagggtacgtgtctgcctgcccgcagcctccaggcagccctcgaaggctggcccaggcaaggagagaagggaaggtttgggatccccagagtccctcctgaagagaacagcatttgtccccaggcaaggctgagtcggagttggatgggataaggtgtagcagcctgccctccaccctgctaccctttgcaggtcttgatcacagggacgtggcccttggtgtatgaggaggggtgacaaggcaaccacagcctgagtgcacgtgctgccatgtcccctttcaggcatagtgcagtctgacccaccaattcctgtggataggacgctgatcccctctccaccacctcgtcccaaaaaccctgtttttgatgatgaggagaagtccaaggtaaaggacaccctgggcctgggattttctcatacgagagtgggtggcagcaggggaatgtggtttgcactgtgctgcggggagcctctggggtttccctggggtacgggtgctgcctcttcccttcacctctgatttcctcctctctcagcttttagccaagctgctgaaaagcaaaa

SEQ ID NO: 12222 - DNA, 646 bp, Homo sapiens
ggcggaggcggaaggggaaagcctggagtcctggctcaataaagccaccaatccttccaaccgccaggaggactgggaatacataattggcttctgtgatcagatcaacaaggagctggaagggccacagatcgccgtccgactgctggcccacaagatccagtccccacaggaatgggaggcgctccaggccctgacggtgctggaggcatgcatgaagaactgtgggaggagatttcataacgaagtggggaagttccgctttttgaatgagttaatcaaagtcgtctctccaaagtacctgggggacagggtgtctgagaaagtgaagaccaaggttattgagctgctgtacagctggaccatggccctgccagaagaagcaaagatcaaagacgcctaccacatgctgaagagacagggtcttgatcacagggacgtggcccttggtgtatgaggaggggtgacaaggcaaccacagcctgagtgcacgtgctgccatgtcccctttcaggcatagtgcagtctgacccaccaattcctgtggataggacgctgatcccctctccaccacctcgtcccaaaaaccctgtttttgatgatgaggagaagtccaagcttttagccaagctgctgaaaagcaaaa

SEQ ID NO: 12223 - DNA, 1367 bp, Homo sapiens
cctcccctctcatccccaccaccaccccagccaggcccctcctgcccttctccacggggcccggcagcccgctcttccagccactgagtttccagtcccagggcagccccccgaaggggcctgagctctccctggccagcatccacgtgcccctggaatcgatcaagcctagtaggtgttggaggattgaggtgggtggggcggtggggcctatagccacggagctgtaggacatgcgacagggatggatccaggcactctttgcagggggtcccttaaagccaggcaggcctccctgcctgcattctcagtcttaagctcctcactgagcgcctctcccagattccgttaggaagcactggactcatcatgaccacggagtagcccttttctcctcaccgccggggctctgttgggtgtctctggtgctgctcctcccacactcacgtcacgttcttacaggcagtgcccttcctgtgacagcctacgataaaaacggcttccgcatcctcttccactttgccaaggagtgtcccccaggacgacctgacgtgctggtggtggtggtgtccatgctgaacacggctcccttacctgtcaagagcatcgtgctgcaggctgcagtgcccaaggtaccagtgtctccctggggccaaaacggccttatcttgaccctgttgtgtagaggcctttgcagccagcaggtggcagtgtgtgtgtgcactgcaggttccatctgggggcacctaccagttctcttcaaaggagtttctctctctttagtcaatgaaagtgaagttgcagccaccttctgggacagaactctctccatttagccccatccagccacctgcagccatcacccaggtcatgttgctggccaatccactgaaggtgagcagcaaagaacccaggggtcccagcctgaggccccagctgccccagattaggacgtcaggcccaccacctcccagctggaagtgttttgactgtaggattgacacatccctttgctgccttaggttaagtgtctgagcatggttgggggttgcggggaaaagggaccattcctctagcacagagagggtagcagaatagagggcgtcctgccaaggggccgcctgggctggatctcacttgctgccctctgtcacaggagaaggtgcggcttcggtataagctgaccttcgccctgggggagcagctgagcacagaggtgggcgaggtggaccagttccctcctgtggaacagtgggggaacctatgaccccagaggacgctgtgatctccaccttgaagccaggcaggctgccctgagacgaggagggctctggtcccgtcactctccatgccctgacaacagtgct

SEQ ID NO: 12224 - DNA, 598 bp, Homo sapiens
cctcccctctcatccccaccaccaccccagccaggcccctcctgcccttctccacggggcccggcagcccgctcttccagccactgagtttccagtcccagggcagccccccgaaggggcctgagctctccctggccagcatccacgtgcccctggaatcgatcaagcctagagtgtcccccaggacgacctgacgtgctggtggtggtggtgtccatgctgaacacggctcccttacctgtcaagagcatcgtgctgcaggctgcagtgcccaagtcaatgaaagtgaagttgcagccaccttctgggacagaactctctccatttagccccatccagccacctgcagccatcacccaggtcatgttgctggccaatccactgaaggagaaggtgcggcttcggtataagctgaccttcgccctgggggagcagctgagcacagaggtgggcgaggtggaccagttccctcctgtggaacagtgggggaacctatgaccccagaggacgctgtgatctccaccttgaagccaggcaggctgccctgagacgaggagggctctggtcccgtcactctccatgccctgacaacagtgct

SEQ ID NO: 12225 - DNA, 25022 bp, Homo sapiens
gcgagttttgaagccgcggggccgggcggctgcaatatggcggaggcggaaggggaaagcctggagtcctggctcagtgagtagccgcggccgtttctgcctgccctcgagccgctgggctgcccctgtcttcacccccacgtcccctccccgggctccacggcgtcgcctcttggcagcccacgcccggtctcgccctcgccgcgagcagcctgcgatcacgccccttccctatcagggcgccgggccccagtccggcccccgcttccctcgctgcggcgcgtcctcttgctctggcgcgcggcggcgtgaactcgggctcctgtcgggcaccgcaggctcggggaaaggcgacagccaagatcttcgggctgacatgcttcggcgctttggggagattgtggtggggtcgccgcccggcggtgacaccaggaacccagcgccccaatccctgactaagggagaagcttcggattggggctgagtctccggtagtggtgggtgctgccgactgcgttcagtcgcctggcagcttcagaattgtgaccatgtgttggagaagtgacggcttcgctcaggcagaatgcttgaagtgagaataatattccaaagagagcgatgatagagaacagagagctctacctttttcctgcagtgaccacagaagcatggtgaaatcggtgtcgggaattccccccccacacacatacatatacccccttgaatatcctaacgagtcagtgttgatagcctattctgagtaaggctgaggagcacagtctgaagctgtagttatagaagcgtattgctgtcattgcactgtgaattacagtgctacgaaggaaatgtgtgttaacctggttagcaggtagtactctgcctgagggttaataagtgaactttcctgtaggctagacctggaagcctcctttaagtggagagagaaattggactggtaatgggataggtgagatacctagtattgccttgttctgaggtctcttatttagtactgcttccgggatcttggaggtgatagctatttcctcaaattgtctgatttttcctagtaagaaacccccttcaggaggttgagcttcagtttaaaggggagcatatcccaaaagagagaaaaagtaagatcacgtttgcaaaatctgcagttgcaggcaggtcataaggcttctttatatatggaagtgttctccaaggagctcaaagtactttacagatattcattaaattagtttaccaagtattctagcaaagcaggcactactgccataatttcacaaaaagaggacatcctgactccagtcaaaccacttgcccagaaatgcccaacttgctataaccagagtggaattagtttgctttgaaggtattaatatgggtattgaataatttaaatgacctaagctgagtttaataggctacatttagagttacattttgtttttgttacttgtttttgagacagagtctcgcgcgctgttgtctaggctggagtgcaggggtgcgatcatagctcactgcagccttgaacccctgtgctcaaataagtcttctacctcagcctcctgagtagctgggactataggcacacgccaccatgcttggctaattcttttgatttttagtagagatgaggtcttgctgtgttgcccaggatggtctcaaactcgagttcaagtgatcctcccacctttcccttacaaagcgctgggattacacacgtgagctaccgcacccagcctagagtcacattatgaaatgagagggacacacttggtgggggggagtcacatggtatctgtagagacataagcttcacagttgttacgacttaatgtgaactgtaccagttgaacaaaccagcagttggggttcagcatcgtctcagtcagcgtccttgtcaccccacgtttgcctgaattgttgcagaagcctctgcttggcccagagacccaggtctctcccgtcctcacctctcctcagtccattctgctcccagaagcgcacttgtgttgaatcaaatcattccactgttgcctgtaatctggccttggttgttccaggcctttttctctgtggcttctacgttttcctgctctactcagtctgatgttcttggtttaccaatacacgttgctctccttacctggaagccctgctcccgtttcctcaactaaatgcttgaaaacccatctcagattctcttttctcacaaaccatctcttgatgacttcagtcttctttcaagtcccaccatgatcaatcaatcaatgtttaatgagtacctgctacgtggggtgttataggagttaggaagtttaagaagattttgcctttagttggatggaggtgatgctggagtggatgaagaactctcctgtaatcccagcacgttgggaggccgaggcgggtggatcacgaggtcaggagatcgagaccatcctggctaacacagtgaaaccccgtctctactaaaaaatacaaaaaaatagccaggcgtagtggcgggcgcctgtagtcccagctacacgggaggctgaggcaggagaatggtgtgaacccgagaggtggagcttgcagtgagctgggattgtgccactgcactccagcctcggtgacagagcgagactccgtctccaaaaaaaaaaaaaaaaaagatacaaggcagtgctaaaacgccggcattctctttagggaactggggatgggggaagagatgattcattgaggatactccatttgagctagccattaaataatgggaaaagttggaaaaaaaaaaacactagatggtgatgtggagagagcaaacctgtttggggcacacagtaacagaggtgtttgggaatgagggaagataaggctgggaagttaagaccagattctaccaagtctccaatttccagcccaagaagtttattttatttatttatttatttgagacagagtcttgcactgtcacccaggctggaatgcagtggcacaatctcggctcactgcaacttccgttgcttaggtgcaagcaattctccatcctcagcctcccaagtagctgggactactggtatgtgccactacacctggctcatttttgtatttttagtagagatggggtttcaccatgttggccaggctgttgtcaaactcttgacctcaagtgagccacctgcctcagctccctccaaagtgttgggattacaggcttgagctaccacgcccagcccagccgaagaagtttaaatttctgcagttatcaggccctcattccttctgtactaggtgaaatcggtgttttggtgtcttaagaggcttgatttgatataggtttcatgcgcgtccgtgtgaagagactaccaaacaggctttgtgtgagcaacatggctgtttatttcacctggatgcaggcaggctgagtccgaaaagagagtcagcaaagggtggtggattatcattagttcttacaggttttgggataggcggtgaagttaagagcaatgttttgcgggcagggatggatctcacaaagtacattctcaagggtggggagaattacgaagaaccttcttaagggtgggggagattacaaagtacattgatcagttagggtggggcagaaacaaatcacaatggtggaatgtcatcagttaaggctatttttacttcttttgtggatcttcagttacgtcaggccatctggatgtgtacgtgcaagtcataggggatgcgatggcttggcttgggctcaggcctgacattcctgccttcttatattaataagaaaaataaaacaaaatagtgttgaagtgttggggcagcgaaaatttttgtggggtggtatggagagagaatgggcgatgtttctcagggctgcttcaagtgggattaggggcggcgtgggaacctagagtgggagagattaagccgaagggagatcttgtggggatgttagaagaaacatttgtcgtatagaatgattggtgatggcctggatatggttttgtatgaattgaaaaactaagtggaataagagaaggagaaaaacaggtataaaaggtctaagaattgggaggacctaggacatctgattagagagtgcctaaggagattcagcatagtcctgccagcaaagattatttatttacttcaagagttaagagtggcagtttggggatagcacgaggagatatcacctgtgatggcttggagaaacagtgtaaaccagcagtgtaaacaagagcagggcatgtatgagtagttgagaacgttgaataggagtatgactagacagaagatagtagggatgatgacaggttttttttgggggggggggcacagtctaagttggtctggtgtctggaatgagactggggcctaataaaaaggagcatctatacaggagcttaaatgggctgtaccttgtagcattctgaggacaggtctgacttctgagaagggaaagtggtaaaagtattgtccagtcctttttaagttggtggctgagcttggtgaagtgtttttaaaagacctttagtccgttctgcttttcttgaagacggaggaccgtaagggatataaaggtttcactgaatactaagagcctgagaaactgcttggctgatttgactaataagggctggtctgttagactgtatagaggtgggaaggctaaactgaggaattgtgtctgaccgaagggaagaaatgactgcggtggccttctcagaccctgtaggaaaggcctctacttacctagtgaaagtgtctacttagactaagaggtattttagttatctgactcggggcatgttgagtaaagctaatttgccagtcctgggtgggggcaaatcttcaagcttgatgtgtagggaagggagggggcctgaataatccctgaggagtagtagaatagcagatggaacactgagaagttatttccttgaggatagatttccacaatggaaaggaaatgaggttctaagaggcgggctagtggcttgtactatagcatagcctgcctttgctgctgtgtggcgattaggcctgctggaactgccatcaataaatcaagcgtgatcagggtgaggaacaggaaagaaggaaatatggggaaatggggtgaatgtcaggtggatcagagagatacagtcatgggggtcaggtgtggtatcaggaataatgtgggaggccagattgaggtccgggccaggaacagtggtaattgtgggacttaacaaagagtgagtacagctgaaggagccggggagcagaaagtatatgcatcaggtatgaggaagaaaataatattggaagttatgagaaatgtagagagtgagttgagcatagtttgttatttttagggcctctaaaagtattaaagcagcggcagccactgcaagcagacatgagggctaggctaaaacagtaaggtcaagttgtttgggcagaaagactacagggtgcggtcctggctcttgtgtaagaattctgacacactaaccatgcctaggaaggaaaggagttgttgttttgtaagggattgaggtttgggagattaatcggacacgatcagcagggagagcacgtgtgttttcatgagaattatgccgagataggtaacagatgaggatgaaatttgggcttgactgaagtaatgggggctgtctgtgaagccttgcagcagtacagcccaggtaatttgctgagcctaatggatgtcagggtcagtccaagtgaaagcaaagagaggctgggatgacgggtgcaaaggaattgtaaagaaagcatgtttgagatccagaacagaataatggattgtggagggaggtattgaggataggagagtatatggtttggtaccatggggtggataggcaaaacaatttggttgataaggcatagatcctgaactaacttgtaaggcttgtctggttttaggacaggtaaaatgggggaattgtaaggagagtttataggctttaaaaggccatgctgtagcaggcatgtgataacaggctttactcctttcaaagcatactgtgggatgggatattggcattgagcggggtaagggtgattaggttttaatgagatggtaaggggtgcatgatcggtcgccaaggagggagtagaggtatcttatacttgtgggttaaggtgggggggaatacaagaggaggacgcaaaggaggctttggattggaaagggcagcaatgagatgtagctgtaacccaggaatagtcagggaagcagataatttagttaaagtgtctcggcctaataagggaactgggcaggtggggataactaaaaacgagtgcttaaaagagtattgtctaagttggcaccagagttggggagttttaagaggtttagaagcctggctgtcaatacccacaacagttatggaggcaagggaaacaggcccttgaaaagaaggtaatgtggagtgggtagcctccgtattgattaagaagaggacggacttactctccactgtgagagttacctaaagctcggcatctgtgatggtctatggggcttccgaggcgatcgggcagcgtcagtcttcagccgttaagccgagaagatctgggaaggagtcagagagccttgggccagagttccaggggctctgggagtggctgtcaggtgagttgaacagtccaattttcagtggggtcccacacagatgggactcgcttaggaggaatcccgggctgcgggcattccttggctcggtggccagatttctggcacttgtagcaagctcctgggggaggcagttatggaggaatgcctggccactgcggtttaggcgtttggaagttcttgtgtgctggagatgtagctggggtttgtctcacagtggaggtaaggaattgcaactcagaaatatgttgttacttggctgcctctactctattattgtacaccttgaaggcgaggttaattaagtcctgttgtggggtttgagggccggaatttaatttttggagttttatttaatgtcgggagcagattgggtaataaaacgtatattgagaataagacggccctttgacctcttagggtctagggctgtaaagcgtctcagggttgctgccgaacgagccatgaactgggctggatttttatatttgatgaaaaagagcctaaacgcttctgatttgggataaagaaaaaggagcattaaccttgactatgcctttagctccagccacctttttaagagtaaattgctgggcaggtgggggagggccagtcactgaacgaaactgtaagctggaccaggtgtgaggaggggaggtgataaaaggattctagggtggaggagcagaggctgaggaagaattgggacctagatggcctggcgacgagcagcctgaggagaaggggaaaggtcagatgggtctgtagaaaagactggaaagacccagcgacacttggggttgggactgaggggacaggcgggagggaaagaaggaggatttgggaggaatcgcattgggaacagagacttgagagggaacgaagtgtgaaaaatgcctggatgtgaggcacctcagaccatttgcccattttttgacaaaaattatttaggtcttataggatggagaaatcgaaagtgccgttttctggccatttagagccattgtcaagtttgtactggggccaagcggtgttgcagaagaaaataaggcatttaggttttaggtcaggtgcgagttgacgaggttttaagttcttgagaacacaggctaagggagaaggaggaatggaggctggaaggttgcccatagtaaaggaggcaagcccagagaaaagagagagtagagacacggagggaaggggttcgagggttcttaccctccagaaaagcaggaaaggggtcagggtgtggaaataagggattggggcacacagataagaggtcggggtgcggaaataagggattgggggttcttgccccctagaaaagcgggacttaccgctaagggtgaaggagaaggggttgaggggtacttgcccctcccccagaaatgcagagaaggggtagagacacggagagaaggggttgtggtacttgcccctcccccagaaaagcaggacttgccgctaagggtgaaggaccaaggcaggcgtccctgagtggtctgacacctttgaaacgtgagtgaataatcagagaggtgtccctgcaatgattaaacaccaaggaaaggctgccttcccagtctgtgaccagcgccagagttttgggtccacggataaaacgtgtctcgtttgtctctaccagaaaatgaaaggaattgaaattaagagaagggagagattgaagagtggaaaggagaaagtggttgagggatagtgagagaggttggagaagagagtaagaagaggccgcctacctgatttaaaattggtgagatgttccttgggctggtgggtctgaggacctgaggtcgtaggtggatctttttcacggagcaaagaacaggaggacaggggattgatctcccaagggaggtcccgcgatccgagtcatggcaccaaatttcatgcgcgtccatgtgaagagaccaccaaacaggctttgtgtgagcaacatggctgtttatttcacctggatgcaggcgggctgagtccgaaaagagagtcagcaaatggtgtggtggattatcattagttcttataggttttgggataggcggtgaagttaagagcaatgttttgcgggcagggatggatctcacaaagtacattctcaagggtggggagaattacgaagaaccttcttaagggtgggggagattacaaagtacattgatcagttagggtggggcagaaacaaatcacaatgctggaatgtcatcaggtaaggctatttttacatcttttgtggatcttcagttacttcaggccatctggatgtatacgtgcaagtcataggggatgccatggcttggcttgggctcagaggcctgacaatagggactttacataggattaggatggattagaacagaagttctagaagcaggtgagaaggagtggagggtagggataaggaaggaagggatttaagaagacattgagaaggaaaggaccacaagactgagaggaatggatgaggagagagggaagaaggagtcaaaaaagaggtgggggaataggggacttttggaaggtgcagcatttataggaatagtgacttaatagaccacatgcagtggctcattcctgtggtcccagctactcaggaggctgaggtgggagcatcgcctgagcccaggagttggaggctacagtgagccatgatcgcctactgcagcccggggcaatagagtgagacccccatctctaaaaaaagaacaagcacacgcctgtgggtggtcccagctactcaggaggttgaggtgggaggatcacttgagcctgggaggcagagactgcagtgagctgtaagagccactgcactccaacctgggtgacagagtgagaccccgtctcaaacaacaaaaaagaaaaaaaaaaacgaaagacgccaggcactgggactcacacctgtaatcctagcaccttgggagttaaaggcaggcagattgcttgagcctaggagttcaagaccagcctgagcaacatggcaaaattctgtctctaccaaaagtacaaaaaattagctaggtgtgatgtgagtgtctgtggtcccagctaggctgaggtagaagaatcatctgagcctgggaagttgaggctacagtgaagccatgatcgcaccactgcactcttgcctgagtgacagagtgagaccctgtctcaaaaaagaaaaaaaaaggaagaagaaaaagaaatggggaagtcaggaaaaagaagtgatgcttttttttttttttttttttttgagaaggagtctcactctagtcgcccaggctagagtgcagtggcacaatctcagctcattgcaacctctgccgcctgggttaaagcgattctcctgcctcagcctcccaagtagctgggattacaggcgcctgccacttcgcctggctaatttttgtagttttagtagagacagggtttcactatcttagccaggctggtcttgaactcctgacctcgcgatccacccacctcagcctctcaaaatgctgggattgcgggtgtgagccaccgtgcctgggccatacatttgtttttacactcatttctgtaccaaattagcccaattatctactgtcttgttttttgaactgattttttttttttttcatgtattgaaccaggagagcacagcctccttgagggtaaaatctgtgtctggaactttttctgtagtccctccagggtctggcatgctgacatgctgtttacttcattgtctgcgggtgcttaacaaagacttggtgattgactaagtttgtgtttccattcaggaccctagtgaaggttgacctttattccctttccagcccatgttcttgcttctgcttgtttgtaagtcatttgttacgtagatttttctttttggagatggagcctcactctgtggcccaggctggagtgcaatggcctgatctcagctcactgcagcctctgcctcctgggttcaagtggttctcctgccttagcctcctgagtagctgggatcacaggtgcgcggaaccatgcccagctaattttgtgtttttagtagagatggggtttcaccatgttggtcaggctggtctcgaactcctaacctcacgcaggtgatccgcctgcctcggcctcccaaagtgctgggattacaggcgtgagccaccgtgcccagaccatatgtatataattttttttttttttttttttggagatggagtctcactctgttgcccaggctggagtgcagtggtacaatcatggctcactgcaacctctgcctcctgggttcaagcagttctccagcctcagccttcaagtagctgagattacaggtgtgtgctaccgtgcctagctaattttagtatttttagtagagacaggatttcaccatgttgaacaggctggtcttgaactcctgacctcaaatgatccacctgccttggcctcccaaagtgctgagattacgggcgtgagccaccgcatccagcctgctatgtagatcttgttttctctggaatgtttgagccgtgctggaatggggtacccaatgctgctgtttccatccccacatgacgttttaagtcccacgagagtaggctagcgatggagtgaagctgaaaaatgaaagcaggaaatccagagacacagaaacagatgaggctttcaacagagactcgaaaatagacagaaaccatgagtcagagcagagcccggaggggcggttcgggaaggcaaggtctataggggaagctcgggtgtcacctctatgccaggtgaaggaaatgttgagtgggtgggaggctgtgtgcatctgctggggaggcagtaggcagatggaaagatcaagtcacccagaattatccccagaggttccttcccgttcctgtgggcgggtgagctctgctttctgagctgcccagagagctggaggagatagacatggaactgaccattgcagaaactagggctttttgtgcccgtgagtaggcaaagagctccctgtggatttgccataaaaaggtctatcaaggtggaagaaagtgagattctagagaaattaatacaagtgaaaagtgggcaggagtgttcttggaagtagaaatgctgttggaagtctaatagacttgggaagaagataacgtatggtgaataccagttgcttcgggggttggggggatccacattttactctgtactcagaagatgcttttccccgtgcaaaaagtgaaagtgagtgggccagtttttcttctgtcacaaggtgtatgactgttcccaaaataatagccctgggggatggggattgcttctcagaccattcaatttttgtaccctgtagacttttggtgttatgtgagaactttaagcacctgataggaattagtaacagagctacgctaatgcctgaggaaatttcagacaattggtgggagagacttggcatttggaatgtgatagctggtaggctaccatacagtaatgcaggattgccagacatttctttccaaatggctacccttgattacatttaactcccctcctttcaagctccagattttgaaggacctgttaattctctttcaagattgaagacagacaccttctttttcttctaaagaggaacctaggcggggtgcggtggctcccgcctgtaatcccagcactttgggaggccagggctggtcttgacctccttacctgaggtcaggaggcctggccaccatggcgaaaccccatctctactaaaaatacaaaaagtagccaggcatagtggcgcatgcctataatcccagctactcgggaggctgaggcaggagaatagctcgaacctgggaggtggaggttgcagtgagcctagatcgcgccactgcactccagcctgggtgacacagcgagactcaatctcaaaataaataaataaataaatatgaacctaaaccatcagaatcttccccttgcagccacaacagaaacactgccggggaggccgagccccgacctgggaagcagggtgatacactgggtgccacgggccttccctctgcctggcagctgtcgctactcagatccctgcagccctgttgccagtgaaggagctggagtctctgttatgatgtgttcatccagctggtgagtttttttttttttgttttgttttttttgtttttgtttttgttttttttttagacagagttttcacttgttgcccaggctggagtgcaatggcacgatctcggctcaaggcaacctctgcctcccaggttcaagcgattttcctgcctcagcctcctgagtagctgggactacaggcatgtgccaccatgcccagctaattctgtatttttagtagtgatggggtttctccatgttggtcaggctggtcttgaactcctgacctcaggtgatccgcctgcctcggcctcccaaagtgttgggattacaggcgtgagccactgcacccggcccagctggtgattttttttttttttttttttttttttgagacggagtctcgctgtcgcccaggctggaatgcagtggtgcgatctcagctcactgcagactccaccccccgggttcgcgccattctcctgcctcagcctaccgagtagctgggactacaggcgcccgccaccttgcccagctaactttttgtatttttagtagagagggggtttcaccgtgttaaccaggatggtctcgatctcctgacctcgtgatccgcccgcctcggcctcccaaagtgctgggattacaggcgtgagccaccacgcccggccccgtagctggtgatttttaaagttaacaaaatacaattatgagaaatcagaattcagaaagtaatgacagagagggccttgtcgggaggggctctgacaccctgctttgggccctcatagagatctggggagggagcaggagtgttttaaggggtgtgcgtcttcagccttccatttgtcttcagaacccaaagccctaaatttagcaaacagctggagagtgctttctgaagagggaggctctggacctgaatcagagatgggaacccatgtaaccaccctcagctgggctcttcagtgtaatcacaggtttgggaaggtaactgaggagagcccatgccaaatatcagaactttgcatttggtgcctggattttaaatcccaggggccctctgagaactctagtacttgtgtttgtgcttgaccatggaaggccattagagcctgggggtgctagatactcaagctgcaatcccaggcaagttgcacggtgaccagggcttagtaggggctaagtaaatgttgttggcttgacaatgatgagcattatgtgcaatttcaaaaacacttaaagcattatggaaggctaggtctggaaaaaccttttgacaggtatgtggaaaatattcgctgggcgcggtgactcacgcctgtaatcccagcactttgggaggccaaggcgggccgatcacctgaggtcgggagtttgagaccagcctgaccaacatggagaaaccccgtctctaccaaaaatacaaaattagttgggcatggtggtatgcacctgtagtcccagctacttgggaggctgaggcaggagaatcacttgaacccgggaggcagaggctgcaatgagccgagatcgtgccactgtactacagcctgggcaacaagagcgagactccatgtcaaaaaaaaaaaaaaaatttgtggttacaaatatgtatttttttatctagttcagtctgatttcagtttccccaaaaacccttcttgaccatctccacttgcttaacactgagctcatttttatatagctggagttccctttattatctttacatgtttcatgtaggcatttttttgggaatattttaattatttgtgtttgtccttttgaccttgattccactctaagcttcatgagacagaatttgttttctcttttatttgtgactttcaaaatactggacagaaagcagtatttgtatttgctctccgactgaattttttttttttctgtctccttgctactgactgttctactgaggcttctctattagagagtaaagttgaaagcaaactcttagtgcttaaaacttgcgaagaaaaccttccattgcatcctcattgctcttcctaacacttgtcctcttctttgttgtgttgcaagataaagccaccaatccttccaaccgccaggaggactgggaatacataattggcttctgtgatcagatcaacaaggagctggaagggtgagtctcagcactgtgggggcagctgagagggagcggactgggaaggggaacaaccatggccaaggagggccagccaggtagccccaggcttagtgcactggagtgtgttctgcttgtcccccaggccacagatcgccgtccgactgctggcccacaagatccagtccccacaggaatgggaggcgctccaggccctgacggtaggtccttcactctccggaggtggaaaccgcagcccttcacctgcccacgccattcctcgtgtccccatagcggttcttagggctcctgccaaaagccaacagaaagtccttgatacagactagatagatctcgaatctgttcagccagctgttccacaaatctgtgtgcattgtgccaggccctgaggcctcagaggtgactgcagtgccgtccctgccagcatggccacatggttagtgtgtgaggcagaggggctaaggaaagcagcccagagtcagggccctgagccccatgtggcgcaagagaaggcttggtgaagagatgctgacagggctgtgttgatagttcagagctggccagctgaagaaaagaggggtcggtccagttcattctgtagttaaacaatgccagtcactagcgaaggtgtcgcactgatggctgaggcccctagggcagatcctggtgtctgttcagactgagggaatttaaggtgtggaatggtgcctggccctcagtgcctccacatgctccgaaaacaaagagcagccgagatctgaggaatccggggctctagcctgactgcattcaggtcctggaaagcgaaaagaggaaatatcatctggttcacatgcacccctcagtcatatttgctgtagaacgaattccttaaaacagtgattctcagcagggcacggtggcttgtacctatagtcccagcaccctgtggggcctaggccgggaggatcgcttaagggaattcaagaccagcctaggcaacgtagtgagacattgtctctacaaaaaataaaaaaatcagccaggcacggtggcacacacctgtggtcccagctcctcgggaggctgaggttgaaggatggcttgagcctgggaagttgaggcgaaagtgagtggtgatcacaccgttgcactctagcctgaccaacatagcgagattctgtgtcaaaaaacaaaaaaaaaacgtaacaaaacccagtgattctcaacagggccctccagggaacatttggcagtgtctggaaacatttttagttgtcacacatcggggtgggggtcctcctggcatcaagtaggcagaggccagggatgctgttcgacaccctataaagtgcagagtggccccccacaacgaagaatgaccagcccaaaatgtcagccaggcctcacctgagaaaccttgctttaaaatgcagaagccaagaaagagagcctggacagtgcactcccccttagaaaccgcagtgccagggaccacaggcagcacaggaaagccaaagcgtgagttagggagataagcggagggaggagaaatatcctgtcatctttctcacagataataggatttaaacatccctcccattccctgcacaattgttggtgagcttgtggaaaaaacccaggacaccaagtcagagaaactttgtccctggacctcacctccctcattgtaaaacacgaggccagaatctttaaggaaggcaccttccaggactggcatccaggccttcttggggtcggggtctcggggtttcttgctttagtccctgcccagcttccccagcagaggtttgcagttggagggacatggtctgtgagtgatctcgttgcttaattacactgtccccgggcagtgcacactgcttttcgtgatgagctccttcctgtgggcgtgtttattcagtactctctgggtgccagggatcttgccagtgccaggttccagccccgagcacgccctcactgagcgcctctcctctgtgcggctacaggtgctggaggcatgcatgaagaactgtgggaggagatttcataacgaagtggggaagttccgctttttgaatgagttaatcaaagtcgtctctccaaaggtcagtcagcggcagattcctcgcttttagggacttcttttgtgttcattcccatctcccatcatactggctttcactgcccatccaacatctccagggagctgagattatttgtgtcttgtccttagagagctaggccctggaggtaacgggatgaccaaacaggccacagggaccggcagctttttctgaagcgccctcagcccaaatctgacaggtgatgtggtagtggctgtgtgtttgtccagggtgagggcccatgtagtgtgggactctaggcacctggcacatggcagttgtgggttttgtgggttttcttggcctgtgtcacgtggatacggggagctggcctccgtcattgctccgatgctcagctggccgtgttctgttgcacgctggtgtggcgcagctctgggcccccacttaaagcagagggaatactttaccatgctaaagacattctcatggacacccccaagataaaatgcagttgtgtttctggcaacttgtgcgtgaaaatgcactttcctcagaactcaaaatatccacccaaccatggcctgcaccacatgggcatcagggtcacaaggaagcctctctgtcttgatgtccccaaggtagtaaggaaaggcagagagcaggggtgagcaccgagggcatggtctctggtgtcagactcaggtttccatccggcccttacaccctgggcaagttagatgatcccaggcggcaaatggggacgccacccctactgacgtggctgctgtgcagatgagtaaggtcatgaatacacttacaggacacttcctggacaggaggtgatgacctcctggccccctgcctatccacagactgtatccagatggacacagccacaccacagggagtcgttcccctccccacgctgtctcacacacacttggacacctgcagattttgagtaggaccatagctgctgagcagccacgccattgctgtggagggagccttacactttctctgcctccgaactgcacttactaggtcctcattttcttttgccatgtagtacctgggggacagggtgtctgagaaagtgaagaccaaggttattgagctgctgtacagctggaccatggccctgccagaagaagcaaagatcaaagacgcctaccacatgctgaagagacagggtacgtgtctgcctgcccgcagcctccaggcagccctcgaaggctggcccaggcaaggagagaagggaaggtttgggatccccagagtccctcctgaagagaacagcatttgtccccaggcaaggctgagtcggagttggatgggataaggtgtagcagcctgccctccaccctgctaccctttgcaggtcttgatcacagggacgtggcccttggtgtatgaggaggggtgacaaggcaaccacagcctgagtgcacgtgctgccatgtcccctttcaggcatagtgcagtctgacccaccaattcctgtggataggacgctgatcccctctccaccacctcgtcccaaaaaccctgtttttgatgatgaggagaagtccaaggtaaaggacaccctgggcctgggattttctcatacgagagtgggtggcagcaggggaatgtggtttgcactgtgctgcggggagcctctggggtttccctggggtacgggtgctgcctcttcccttcacctctgatttcctcctctctcagcttttagccaagctgctgaaaagcaaaaacccagatgacctgcaggaggccaacaagctcatcaagtccatggtgaaggaagtgagtgggccccggtccttcaggcacggggtggaggagcccatggccacacagcagaagccgctttgccccggacacgggcctgttttgttctcccctgctgccagctgccctacctgtgccccggtggctgagagtgggaggaggagcacaatagcttccgcgggagcacggaagagaggagtgggttgggagcagtgttgtgaaagcagaagtatagactgggccccaggcaccccacactgaaaggagcttccgagcgtctgtacttgtgttgtggggtaaggtgtgacctggtggaagtggaaagacagtcaagtgacgctctctttctcttgaacttcttcactggggcaggacgaggcacggatccagaaggtgaccaagcgtctgcacacgttagaggaagttaacaacaacgtgagactgctcagtgagatgctgcttcattacagccaggaggactcttcggacggggacagagagctgatgaaggtgggaccgccgacggcaaaggctgcctcccggggctgcgctgcccttcaggagctcagccagcatttgctgagcacgtgccttgtcagagacacgggctgtgcacttggcagtgtattcatgaccttactcatctgcacagcagccacgtcagtagagggtggcgtccccatttgcctcctgggatcagctgacttgtccagggtgtaagggccagatggaaacctgagtctgactccagagaccacactctcggtgctcacccctgctctctccctttccttactaccttggggacatcaagacagagaggcttccttgtaaccctgatgcccatgtggtgcaggccatggttgggtggatattttgagttctgaggaacatgccagcctggaaggcaggaggggactgacttcccctgacccatcctggtgactgctacctagacaaacatcctgggtgatgtggtgtggtggtggtggctggtggcaagaagacgtgcgctgtgatcccagctttgctggtaattgaccgtggcaattggcatatcccggtcattttctgggcatgaaccctgaatgaatcagatgatctctaagggcctttgtggtttgatttttatgtccgagtctctttcaggagctgtttgatcagtgtgagaacaagaggcggactttatttaaactcgccagtgagactgaggacaatgataacagtttgggtgagtgaaagagcgacggtcagggataagccaggcatttggatatgtgggtgggaactgtcacaacaggagtgagaagtctctctttcctgctccaggggacatcctgcaagccagtgacaacctctcccgggtcatcaactcttacaaaacaattattgaagggcaggtcatcaatggcgaggtggctaccttaaccctgcctgactcggaaggtgagatgctctggtccccaactctaggctcctccagaccagcctcaggcccctatcatgaagctgcgggtgtaggctggccagcgtggtggtgttgcacaaggcccaagggagttctttgccattccaagcaatcctccggcttcccggaggcctggagatgtgggtaggaatttccccacctgctttctcgggcttgctttgcagcatcccctggcagagatgccgttggattaggccagaggctgtagcagtgacctctgtgcctagggtgctgcctcctgccacacagccactagaagacccctaattattcctgttctgctctgttgacccatccaggaaacagtcagtgcagtaaccaaggcacgctcatcgaccttgcggagctggacacgaccaacagtttgtcctccgtgttggccccagcacctactccaccctcctcaggcatcccaatcctccctccaccaccccaggcctcaggacctccacggagccgctcctctagccaggccgaggccaccctggggcccagcagcacaagcaacgccctctcctggctggacgaggagctactctgcttgggtgcggcccacagggggcgtcaggggcatcccctgacagggctctgggaggaagggtgtgtggaattaggagccctgagcggggccccagtgtgactgttggggtgggcaaagaaccctgagttggaggtactcagtgaagttcagcgaccctgagggccccagggccatcctcccggtggactctgcctcctgccctgcaccccgccccacaggccccccgcttctgcatcatggactggagcgctccattcccctctggaggctgcctgcagaacagcttctcccggcgccttcacccattgatgtcacttgtcacctgacccctcctcaggcaaggcggggctagggctgcctagctcagagcctcttctcatcctgttttcttctctattgtcaggcctcgccgacccagcccctaatgttcctcccaaagagtcagctgggaacagccagtggcacctgctccaggtaggggcacaggatcggtgacagcactactgtgccaaggacctccactttccagcgtcatgtctcctgggctgcagttagctgtccttccctccagagcgtgccagctgcagcggggaacaatgagtgcctccggggctgtcttccgtgcagtccttggagggctgcgccccgttccagcggcaggccctccccacccgccctcggctcaccaccctttctgttgttcatagagggaacagtccgacctggacttcttcagccccaggccggggaccgctgcctgtggcgcctccgatgctcctctgctccagccctcagccccctcctcaagcagctcccaagctccactgccgcctcccttcccagctcctgtggtcccagccagtgttcctgcccccagtgcgggctcctccttgttttctactggagtggccccagccttggccccaaaagttgagcccgcagtccctgggcaccatggcttggcgttgggcaacagcgcgctgcaccacctggatgccctcgatcagcttctagaagaggccaaagtgtaatgagtgggaggagatgtggggttgctgagggttgggcctgaatgtgtcagaaccagagctaactttgaaggggtgggggtgccttgtagtcccatcagtcaggctggaaggcaaggggtgggcctgggtaagagcatggtcaggggccttgggtgagagtcctgcagctctggctggctctctgacgtgctttccatccttcccacctcccaggacctcgggcttggtgaaacccactacctcccctctcatccccaccaccaccccagccaggcccctcctgcccttctccacggggcccggcagcccgctcttccagccactgagtttccagtcccagggcagccccccgaaggggcctgagctctccctggccagcatccacgtgcccctggaatcgatcaagcctagtaggtgttggaggattgaggtgggtggggcggtggggcctatagccacggagctgtaggacatgcgacagggatggatccaggcactctttgcagggggtcccttaaagccaggcaggcctccctgcctgcattctcagtcttaagctcctcactgagcgcctctcccagattccgttaggaagcactggactcatcatgaccacggagtagcccttttctcctcaccgccggggctctgttgggtgtctctggtgctgctcctcccacactcacgtcacgttcttacaggcagtgcccttcctgtgacagcctacgataaaaacggcttccgcatcctcttccactttgccaaggagtgtcccccaggacgacctgacgtgctggtggtggtggtgtccatgctgaacacggctcccttacctgtcaagagcatcgtgctgcaggctgcagtgcccaaggtaccagtgtctccctggggccaaaacggccttatcttgaccctgttgtgtagaggcctttgcagccagcaggtggcagtgtgtgtgtgcactgcaggttccatctgggggcacctaccagttctcttcaaaggagtttctctctctttagtcaatgaaagtgaagttgcagccaccttctgggacagaactctctccatttagccccatccagccacctgcagccatcacccaggtcatgttgctggccaatccactgaaggtgagcagcaaagaacccaggggtcccagcctgaggccccagctgccccagattaggacgtcaggcccaccacctcccagctggaagtgttttgactgtaggattgacacatccctttgctgccttaggttaagtgtctgagcatggttgggggttgcggggaaaagggaccattcctctagcacagagagggtagcagaatagagggcgtcctgccaaggggccgcctgggctggatctcacttgctgccctctgtcacaggagaaggtgcggcttcggtataagctgaccttcgccctgggggagcagctgagcacagaggtgggcgaggtggaccagttccctcctgtggaacagtgggggaacctatgaccccagaggacgctgtgatctccaccttgaagccaggcaggctgccctgagacgaggagggctctggtcccgtcactctccatgccctgacaacagtgcttgtagctttgatgtggaacaggggccctgggcatttctgctgagaaccaaactgctgctgtgataacctctcctttggcccctaaaaggacctgtttttatctacctgtgtgacttgaagtggccatatgctgtcaggggtgcggagtggcccctgacttcactgctgtcccgggaacatggacccccaggcttggcgtaggtgtttgcttccttctactggcattcactgaagccactggggtggggggtggggggtgggagtctctaaagagagactgtcatgggtcattccccacaagagccacatcctcacacctgacagatgcacggcccaaggggctgcagccctgttgcaattccatgcttcccccgccaaccagctcctgctgccatccccagggaggtggcccaggaaggtgcctggcccagaataaggaactggcatactgcaaagtccccagccctgcctctggtggacagcatcgtcctggaatggccacggagtgatgagttgtgtgcttgtccctggcagtggcaggctgtgtcctatggacatcttggcaggacatggaatttggcctcatgacaggcccaactagggataggaaggaaaatgaagagagccagtatttccccttctccagaagcaggtactcagctttctgggaaaagcgtgcctccagccgtggggacaggccatcctactgactacctcttgcttggcatgaaataaactgctatcctccccttggaatctaccgccactctacatcctactgctttggcctccctctcctctcaccagatggcatgtggtgtggcacctgtggctggacacaggaggcctcaggatcacaaatgttacactagacatatgtcctaatgtgctgcccagaaacctcaactgttccccagctactgaggggcactgtcagcgagatgttgggtctggaggtgatgagatcgggccacacttgagctgagtcaccagaccctattgcttcaacagtgcttggcccccgccagcttgtcccagccactctagctgctggatgtgatcctgggacatgtactccaagcctccgtcacaaaaaaaaaatcaccagctgccatagacacgggggaagcttgcggagcccaggtgaacaagctcagcaatcggacatctctggggaaaggaaggtggcacagaccatgttccctggttcctccctgccccttgccaggcttccttattccttactatgggaagaggtcatatcccttccctgcccctcgctgtctttagcaagcaggtttcactgcttcattagaagaggacaagtcaaaagtgaatcatttttcactacttaaggaataaatccaagagctttccagagactggctgctgcagccctgggaatgtctgtggaattactatgtggaaatggaactttgtgttatgctctagacattacagttatttgagtgttactcgttactgttgaggtcagtgcttcgtggcaaatggctgtactggatatcccagctctgctgcccttgttttgctgcatgttaaataaaaccattttcact

SEQ ID NO: 12226 - DNA, 5156 bp, Homo sapiens
gcgagttttgaagccgcggggccgggcggctgcaatatggcggaggcggaaggggaaagcctggagtcctggctcaataaagccaccaatccttccaaccgccaggaggactgggaatacataattggcttctgtgatcagatcaacaaggagctggaagggccacagatcgccgtccgactgctggcccacaagatccagtccccacaggaatgggaggcgctccaggccctgacggtgctggaggcatgcatgaagaactgtgggaggagatttcataacgaagtggggaagttccgctttttgaatgagttaatcaaagtcgtctctccaaagtacctgggggacagggtgtctgagaaagtgaagaccaaggttattgagctgctgtacagctggaccatggccctgccagaagaagcaaagatcaaagacgcctaccacatgctgaagagacagggcatagtgcagtctgacccaccaattcctgtggataggacgctgatcccctctccaccacctcgtcccaaaaaccctgtttttgatgatgaggagaagtccaagcttttagccaagctgctgaaaagcaaaaacccagatgacctgcaggaggccaacaagctcatcaagtccatggtgaaggaagacgaggcacggatccagaaggtgaccaagcgtctgcacacgttagaggaagttaacaacaacgtgagactgctcagtgagatgctgcttcattacagccaggaggactcttcggacggggacagagagctgatgaaggtgggaccgccgacggcaaaggctgcctcccggggctgcgctgcccttcaggagctcagccagcatttgctgagcacgtgccttgtcagagacacgggctgtgcacttggcagtgtattcatgaccttactcatctgcacagcagccacgtcagtagagggtggcgtccccatttgcctcctgggatcagctgacttgtccagggtgtaagggccagatggaaacctgagtctgactccagagaccacactctcggtgctcacccctgctctctccctttccttactaccttggggacatcaagacagagaggcttccttgtaaccctgatgcccatgtggtgcaggccatggttgggtggatattttgagttctgaggaacatgccagcctggaaggcaggaggggactgacttcccctgacccatcctggtgactgctacctagacaaacatcctgggtgatgtggtgtggtggtggtggctggtggcaagaagacgtgcgctgtgatcccagctttgctggtaattgaccgtggcaattggcatatcccggtcattttctgggcatgaaccctgaatgaatcagatgatctctaagggcctttgtggtttgatttttatgtccgagtctctttcaggagctgtttgatcagtgtgagaacaagaggcggactttatttaaactcgccagtgagactgaggacaatgataacagtttgggggacatcctgcaagccagtgacaacctctcccgggtcatcaactcttacaaaacaattattgaagggcaggtcatcaatggcgaggtggctaccttaaccctgcctgactcggaaggaaacagtcagtgcagtaaccaaggcacgctcatcgaccttgcggagctggacacgaccaacagtttgtcctccgtgttggccccagcacctactccaccctcctcaggcatcccaatcctccctccaccaccccaggcctcaggacctccacggagccgctcctctagccaggccgaggccaccctggggcccagcagcacaagcaacgccctctcctggctggacgaggagctactctgcttgggtgcggcccacagggggcgtcaggggcatcccctgacagggctctgggaggaagggtgtgtggaattaggagccctgagcggggccccagtgtgactgttggggtgggcaaagaaccctgagttggaggtactcagtgaagttcagcgaccctgagggccccagggccatcctcccggtggactctgcctcctgccctgcaccccgccccacaggccccccgcttctgcatcatggactggagcgctccattcccctctggaggctgcctgcagaacagcttctcccggcgccttcacccattgatgtcacttgtcacctgacccctcctcaggcaaggcggggctagggctgcctagctcagagcctcttctcatcctgttttcttctctattgtcaggcctcgccgacccagcccctaatgttcctcccaaagagtcagctgggaacagccagtggcacctgctccaggtaggggcacaggatcggtgacagcactactgtgccaaggacctccactttccagcgtcatgtctcctgggctgcagttagctgtccttccctccagagcgtgccagctgcagcggggaacaatgagtgcctccggggctgtcttccgtgcagtccttggagggctgcgccccgttccagcggcaggccctccccacccgccctcggctcaccaccctttctgttgttcatagagggaacagtccgacctggacttcttcagccccaggccggggaccgctgcctgtggcgcctccgatgctcctctgctccagccctcagccccctcctcaagcagctcccaagctccactgccgcctcccttcccagctcctgtggtcccagccagtgttcctgcccccagtgcgggctcctccttgttttctactggagtggccccagccttggccccaaaagttgagcccgcagtccctgggcaccatggcttggcgttgggcaacagcgcgctgcaccacctggatgccctcgatcagcttctagaagaggccaaagtgacctcgggcttggtgaaacccactacctcccctctcatccccaccaccaccccagccaggcccctcctgcccttctccacggggcccggcagcccgctcttccagccactgagtttccagtcccagggcagccccccgaaggggcctgagctctccctggccagcatccacgtgcccctggaatcgatcaagcctagcagtgcccttcctgtgacagcctacgataaaaacggcttccgcatcctcttccactttgccaaggagtgtcccccaggacgacctgacgtgctggtggtggtggtgtccatgctgaacacggctcccttacctgtcaagagcatcgtgctgcaggctgcagtgcccaagtcaatgaaagtgaagttgcagccaccttctgggacagaactctctccatttagccccatccagccacctgcagccatcacccaggtcatgttgctggccaatccactgaaggagaaggtgcggcttcggtataagctgaccttcgccctgggggagcagctgagcacagaggtgggcgaggtggaccagttccctcctgtggaacagtgggggaacctatgaccccagaggacgctgtgatctccaccttgaagccaggcaggctgccctgagacgaggagggctctggtcccgtcactctccatgccctgacaacagtgcttgtagctttgatgtggaacaggggccctgggcatttctgctgagaaccaaactgctgctgtgataacctctcctttggcccctaaaaggacctgtttttatctacctgtgtgacttgaagtggccatatgctgtcaggggtgcggagtggcccctgacttcactgctgtcccgggaacatggacccccaggcttggcgtaggtgtttgcttccttctactggcattcactgaagccactggggtggggggtggggggtgggagtctctaaagagagactgtcatgggtcattccccacaagagccacatcctcacacctgacagatgcacggcccaaggggctgcagccctgttgcaattccatgcttcccccgccaaccagctcctgctgccatccccagggaggtggcccaggaaggtgcctggcccagaataaggaactggcatactgcaaagtccccagccctgcctctggtggacagcatcgtcctggaatggccacggagtgatgagttgtgtgcttgtccctggcagtggcaggctgtgtcctatggacatcttggcaggacatggaatttggcctcatgacaggcccaactagggataggaaggaaaatgaagagagccagtatttccccttctccagaagcaggtactcagctttctgggaaaagcgtgcctccagccgtggggacaggccatcctactgactacctcttgcttggcatgaaataaactgctatcctccccttggaatctaccgccactctacatcctactgctttggcctccctctcctctcaccagatggcatgtggtgtggcacctgtggctggacacaggaggcctcaggatcacaaatgttacactagacatatgtcctaatgtgctgcccagaaacctcaactgttccccagctactgaggggcactgtcagcgagatgttgggtctggaggtgatgagatcgggccacacttgagctgagtcaccagaccctattgcttcaacagtgcttggcccccgccagcttgtcccagccactctagctgctggatgtgatcctgggacatgtactccaagcctccgtcacaaaaaaaaaatcaccagctgccatagacacgggggaagcttgcggagcccaggtgaacaagctcagcaatcggacatctctggggaaaggaaggtggcacagaccatgttccctggttcctccctgccccttgccaggcttccttattccttactatgggaagaggtcatatcccttccctgcccctcgctgtctttagcaagcaggtttcactgcttcattagaagaggacaagtcaaaagtgaatcatttttcactacttaaggaataaatccaagagctttccagagactggctgctgcagccctgggaatgtctgtggaattactatgtggaaatggaactttgtgttatgctctagacattacagttatttgagtgttactcgttactgttgaggtcagtgcttcgtggcaaatggctgtactggatatcccagctctgctgcccttgttttgctgcatgttaaataaaaccattttcact

SEQ ID NO: 12227 - DNA, 3851 bp, Homo sapiens
agagcctcttctcatcctgttttcttctctattgtcaggcctcgccgacccagcccctaatgttcctcccaaagagtcagctgggaacagccagtggcacctgctccaggtaggggcacaggatcggtgacagcactactgtgccaaggacctccactttccagcgtcatgtctcctgggctgcagttagctgtccttccctccagagcgtgccagctgcagcggggaacaatgagtgcctccggggctgtcttccgtgcagtccttggagggctgcgccccgttccagcggcaggccctccccacccgccctcggctcaccaccctttctgttgttcatagagggaacagtccgacctggacttcttcagccccaggccggggaccgctgcctgtggcgcctccgatgctcctctgctccagccctcagccccctcctcaagcagctcccaagctccactgccgcctcccttcccagctcctgtggtcccagccagtgttcctgcccccagtgcgggctcctccttgttttctactggagtggccccagccttggccccaaaagttgagcccgcagtccctgggcaccatggcttggcgttgggcaacagcgcgctgcaccacctggatgccctcgatcagcttctagaagaggccaaagtgtaatgagtgggaggagatgtggggttgctgagggttgggcctgaatgtgtcagaaccagagctaactttgaaggggtgggggtgccttgtagtcccatcagtcaggctggaaggcaaggggtgggcctgggtaagagcatggtcaggggccttgggtgagagtcctgcagctctggctggctctctgacgtgctttccatccttcccacctcccaggacctcgggcttggtgaaacccactacctcccctctcatccccaccaccaccccagccaggcccctcctgcccttctccacggggcccggcagcccgctcttccagccactgagtttccagtcccagggcagccccccgaaggggcctgagctctccctggccagcatccacgtgcccctggaatcgatcaagcctagtaggtgttggaggattgaggtgggtggggcggtggggcctatagccacggagctgtaggacatgcgacagggatggatccaggcactctttgcagggggtcccttaaagccaggcaggcctccctgcctgcattctcagtcttaagctcctcactgagcgcctctcccagattccgttaggaagcactggactcatcatgaccacggagtagcccttttctcctcaccgccggggctctgttgggtgtctctggtgctgctcctcccacactcacgtcacgttcttacaggcagtgcccttcctgtgacagcctacgataaaaacggcttccgcatcctcttccactttgccaaggagtgtcccccaggacgacctgacgtgctggtggtggtggtgtccatgctgaacacggctcccttacctgtcaagagcatcgtgctgcaggctgcagtgcccaaggtaccagtgtctccctggggccaaaacggccttatcttgaccctgttgtgtagaggcctttgcagccagcaggtggcagtgtgtgtgtgcactgcaggttccatctgggggcacctaccagttctcttcaaaggagtttctctctctttagtcaatgaaagtgaagttgcagccaccttctgggacagaactctctccatttagccccatccagccacctgcagccatcacccaggtcatgttgctggccaatccactgaaggtgagcagcaaagaacccaggggtcccagcctgaggccccagctgccccagattaggacgtcaggcccaccacctcccagctggaagtgttttgactgtaggattgacacatccctttgctgccttaggttaagtgtctgagcatggttgggggttgcggggaaaagggaccattcctctagcacagagagggtagcagaatagagggcgtcctgccaaggggccgcctgggctggatctcacttgctgccctctgtcacaggagaaggtgcggcttcggtataagctgaccttcgccctgggggagcagctgagcacagaggtgggcgaggtggaccagttccctcctgtggaacagtgggggaacctatgaccccagaggacgctgtgatctccaccttgaagccaggcaggctgccctgagacgaggagggctctggtcccgtcactctccatgccctgacaacagtgcttgtagctttgatgtggaacaggggccctgggcatttctgctgagaaccaaactgctgctgtgataacctctcctttggcccctaaaaggacctgtttttatctacctgtgtgacttgaagtggccatatgctgtcaggggtgcggagtggcccctgacttcactgctgtcccgggaacatggacccccaggcttggcgtaggtgtttgcttccttctactggcattcactgaagccactggggtggggggtggggggtgggagtctctaaagagagactgtcatgggtcattccccacaagagccacatcctcacacctgacagatgcacggcccaaggggctgcagccctgttgcaattccatgcttcccccgccaaccagctcctgctgccatccccagggaggtggcccaggaaggtgcctggcccagaataaggaactggcatactgcaaagtccccagccctgcctctggtggacagcatcgtcctggaatggccacggagtgatgagttgtgtgcttgtccctggcagtggcaggctgtgtcctatggacatcttggcaggacatggaatttggcctcatgacaggcccaactagggataggaaggaaaatgaagagagccagtatttccccttctccagaagcaggtactcagctttctgggaaaagcgtgcctccagccgtggggacaggccatcctactgactacctcttgcttggcatgaaataaactgctatcctccccttggaatctaccgccactctacatcctactgctttggcctccctctcctctcaccagatggcatgtggtgtggcacctgtggctggacacaggaggcctcaggatcacaaatgttacactagacatatgtcctaatgtgctgcccagaaacctcaactgttccccagctactgaggggcactgtcagcgagatgttgggtctggaggtgatgagatcgggccacacttgagctgagtcaccagaccctattgcttcaacagtgcttggcccccgccagcttgtcccagccactctagctgctggatgtgatcctgggacatgtactccaagcctccgtcacaaaaaaaaaatcaccagctgccatagacacgggggaagcttgcggagcccaggtgaacaagctcagcaatcggacatctctggggaaaggaaggtggcacagaccatgttccctggttcctccctgccccttgccaggcttccttattccttactatgggaagaggtcatatcccttccctgcccctcgctgtctttagcaagcaggtttcactgcttcattagaagaggacaagtcaaaagtgaatcatttttcactacttaaggaataaatccaagagctttccagagactggctgctgcagccctgggaatgtctgtggaattactatgtggaaatggaactttgtgttatgctctagacattacagttatttgagtgttactcgttactgttgaggtcagtgcttcgtggcaaatggctgtactggatatcccagctctgctgcccttgttttgctgcatgttaaataaaaccattttcactgt

SEQ ID NO: 12228 - DNA, 3438 bp, Homo sapiens
agagcctcttctcatcctgttttcttctctattgtcaggcctcgccgacccagcccctaatgttcctcccaaagagtcagctgggaacagccagtggcacctgctccaggtaggggcacaggatcggtgacagcactactgtgccaaggacctccactttccagcgtcatgtctcctgggctgcagttagctgtccttccctccagagcgtgccagctgcagcggggaacaatgagtgcctccggggctgtcttccgtgcagtccttggagggctgcgccccgttccagcggcaggccctccccacccgccctcggctcaccaccctttctgttgttcatagagggaacagtccgacctggacttcttcagccccaggccggggaccgctgcctgtggcgcctccgatgctcctctgctccagccctcagccccctcctcaagcagctcccaagctccactgccgcctcccttcccagctcctgtggtcccagccagtgttcctgcccccagtgcgggctcctccttgttttctactggagtggccccagccttggccccaaaagttgagcccgcagtccctgggcaccatggcttggcgttgggcaacagcgcgctgcaccacctggatgccctcgatcagcttctagaagaggccaaagtgtaatgagtgggaggagatgtggggttgctgagggttgggcctgaatgtgtcagaaccagagctaactttgaaggggtgggggtgccttgtagtcccatcagtcaggctggaaggcaaggggtgggcctgggtaagagcatggtcaggggccttgggtgagagtcctgcagctctggctggctctctgacgtgctttccatccttcccacctcccaggacctcgggcttggtgaaacccactacctcccctctcatccccaccaccaccccagccaggcccctcctgcccttctccacggggcccggcagcccgctcttccagccactgagtttccagtcccagggcagccccccgaaggggcctgagctctccctggccagcatccacgtgcccctggaatcgatcaagcctagtaggtgttggaggattgaggtgggtggggcggtggggcctatagccacggagctgtaggacatgcgacagggatggatccaggcactctttgcagggggtcccttaaagccaggcaggcctccctgcctgcattctcagtcttaagctcctcactgagcgcctctcccagattccgttaggaagcactggactcatcatgaccacggagtagcccttttctcctcaccgccggggctctgttgggtgtctctggtgctgctcctcccacactcacgtcacgttcttacaggcagtgcccttcctgtgacagcctacgataaaaacggcttccgcatcctcttccactttgccaaggagtgtcccccaggacgacctgacgtgctggtggtggtggtgtccatgctgaacacggctcccttacctgtcaagagcatcgtgctgcaggctgcagtgcccaagtcaatgaaagtgaagttgcagccaccttctgggacagaactctctccatttagccccatccagccacctgcagccatcacccaggtcatgttgctggccaatccactgaaggagaaggtgcggcttcggtataagctgaccttcgccctgggggagcagctgagcacagaggtgggcgaggtggaccagttccctcctgtggaacagtgggggaacctatgaccccagaggacgctgtgatctccaccttgaagccaggcaggctgccctgagacgaggagggctctggtcccgtcactctccatgccctgacaacagtgcttgtagctttgatgtggaacaggggccctgggcatttctgctgagaaccaaactgctgctgtgataacctctcctttggcccctaaaaggacctgtttttatctacctgtgtgacttgaagtggccatatgctgtcaggggtgcggagtggcccctgacttcactgctgtcccgggaacatggacccccaggcttggcgtaggtgtttgcttccttctactggcattcactgaagccactggggtggggggtggggggtgggagtctctaaagagagactgtcatgggtcattccccacaagagccacatcctcacacctgacagatgcacggcccaaggggctgcagccctgttgcaattccatgcttcccccgccaaccagctcctgctgccatccccagggaggtggcccaggaaggtgcctggcccagaataaggaactggcatactgcaaagtccccagccctgcctctggtggacagcatcgtcctggaatggccacggagtgatgagttgtgtgcttgtccctggcagtggcaggctgtgtcctatggacatcttggcaggacatggaatttggcctcatgacaggcccaactagggataggaaggaaaatgaagagagccagtatttccccttctccagaagcaggtactcagctttctgggaaaagcgtgcctccagccgtggggacaggccatcctactgactacctcttgcttggcatgaaataaactgctatcctccccttggaatctaccgccactctacatcctactgctttggcctccctctcctctcaccagatggcatgtggtgtggcacctgtggctggacacaggaggcctcaggatcacaaatgttacactagacatatgtcctaatgtgctgcccagaaacctcaactgttccccagctactgaggggcactgtcagcgagatgttgggtctggaggtgatgagatcgggccacacttgagctgagtcaccagaccctattgcttcaacagtgcttggcccccgccagcttgtcccagccactctagctgctggatgtgatcctgggacatgtactccaagcctccgtcacaaaaaaaaaatcaccagctgccatagacacgggggaagcttgcggagcccaggtgaacaagctcagcaatcggacatctctggggaaaggaaggtggcacagaccatgttccctggttcctccctgccccttgccaggcttccttattccttactatgggaagaggtcatatcccttccctgcccctcgctgtctttagcaagcaggtttcactgcttcattagaagaggacaagtcaaaagtgaatcatttttcactacttaaggaataaatccaagagctttccagagactggctgctgcagccctgggaatgtctgtggaattactatgtggaaatggaactttgtgttatgctctagacattacagttatttgagtgttactcgttactgttgaggtcagtgcttcgtggcaaatggctgtactggatatcccagctctgctgcccttgttttgctgcatgttaaataaaaccattttcactgt

SEQ ID NO: 12229 - DNA, 25023 bp, Homo sapiens
gagttttgaagccgcggggccgggcggctgcaatatggcggaggcggaaggggaaagcctggagtcctggctcagtgagtagccgcggccgtttctgcctgccctcgagccgctgggctgcccctgtcttcacccccacgtcccctccccgggctccacggcgtcgcctcttggcagcccacgcccggtctcgccctcgccgcgagcagcctgcgatcacgccccttccctatcagggcgccgggccccagtccggcccccgcttccctcgctgcggcgcgtcctcttgctctggcgcgcggcggcgtgaactcgggctcctgtcgggcaccgcaggctcggggaaaggcgacagccaagatcttcgggctgacatgcttcggcgctttggggagattgtggtggggtcgccgcccggcggtgacaccaggaacccagcgccccaatccctgactaagggagaagcttcggattggggctgagtctccggtagtggtgggtgctgccgactgcgttcagtcgcctggcagcttcagaattgtgaccatgtgttggagaagtgacggcttcgctcaggcagaatgcttgaagtgagaataatattccaaagagagcgatgatagagaacagagagctctacctttttcctgcagtgaccacagaagcatggtgaaatcggtgtcgggaattccccccccacacacatacatatacccccttgaatatcctaacgagtcagtgttgatagcctattctgagtaaggctgaggagcacagtctgaagctgtagttatagaagcgtattgctgtcattgcactgtgaattacagtgctacgaaggaaatgtgtgttaacctggttagcaggtagtactctgcctgagggttaataagtgaactttcctgtaggctagacctggaagcctcctttaagtggagagagaaattggactggtaatgggataggtgagatacctagtattgccttgttctgaggtctcttatttagtactgcttccgggatcttggaggtgatagctatttcctcaaattgtctgatttttcctagtaagaaacccccttcaggaggttgagcttcagtttaaaggggagcatatcccaaaagagagaaaaagtaagatcacgtttgcaaaatctgcagttgcaggcaggtcataaggcttctttatatatggaagtgttctccaaggagctcaaagtactttacagatattcattaaattagtttaccaagtattctagcaaagcaggcactactgccataatttcacaaaaagaggacatcctgactccagtcaaaccacttgcccagaaatgcccaacttgctataaccagagtggaattagtttgctttgaaggtattaatatgggtattgaataatttaaatgacctaagctgagtttaataggctacatttagagttacattttgtttttgttacttgtttttgagacagagtctcgcgcgctgttgtctaggctggagtgcaggggtgcgatcatagctcactgcagccttgaacccctgtgctcaaataagtcttctacctcagcctcctgagtagctgggactataggcacacgccaccatgcttggctaattcttttgatttttagtagagatgaggtcttgctgtgttgcccaggatggtctcaaactcgagttcaagtgatcctcccacctttcccttacaaagcgctgggattacacacgtgagctaccgcacccagcctagagtcacattatgaaatgagagggacacacttggtgggggggagtcacatggtatctgtagagacataagcttcacagttgttacgacttaatgtgaactgtaccagttgaacaaaccagcagttggggttcagcatcgtctcagtcagcgtccttgtcaccccacgtttgcctgaattgttgcagaagcctctgcttggcccagagacccaggtctctcccgtcctcacctctcctcagtccattctgctcccagaagcgcacttgtgttgaatcaaatcattccactgttgcctgtaatctggccttggttgttccaggcctttttctctgtggcttctacgttttcctgctctactcagtctgatgttcttggtttaccaatacacgttgctctccttacctggaagccctgctcccgtttcctcaactaaatgcttgaaaacccatctcagattctcttttctcacaaaccatctcttgatgacttcagtcttctttcaagtcccaccatgatcaatcaatcaatgtttaatgagtacctgctacgtggggtgttataggagttaggaagtttaagaagattttgcctttagttggatggaggtgatgctggagtggatgaagaactctcctgtaatcccagcacgttgggaggccgaggcgggtggatcacgaggtcaggagatcgagaccatcctggctaacacagtgaaaccccgtctctactaaaaaatacaaaaaaatagccaggcgtagtggcgggcgcctgtagtcccagctacacgggaggctgaggcaggagaatggtgtgaacccgagaggtggagcttgcagtgagctgggattgtgccactgcactccagcctcggtgacagagcgagactccgtctccaaaaaaaaaaaaaaaaaagatacaaggcagtgctaaaacgccggcattctctttagggaactggggatgggggaagagatgattcattgaggatactccatttgagctagccattaaataatgggaaaagttggaaaaaaaaaaacactagatggtgatgtggagagagcaaacctgtttggggcacacagtaacagaggtgtttgggaatgagggaagataaggctgggaagttaagaccagattctaccaagtctccaatttccagcccaagaagtttattttatttatttatttatttgagacagagtcttgcactgtcacccaggctggaatgcagtggcacaatctcggctcactgcaacttccgttgcttaggtgcaagcaattctccatcctcagcctcccaagtagctgggactactggtatgtgccactacacctggctcatttttgtatttttagtagagatggggtttcaccatgttggccaggctgttgtcaaactcttgacctcaagtgagccacctgcctcagctccctccaaagtgttgggattacaggcttgagctaccacgcccagcccagccgaagaagtttaaatttctgcagttatcaggccctcattccttctgtactaggtgaaatcggtgttttggtgtcttaagaggcttgatttgatataggtttcatgcgcgtccgtgtgaagagactaccaaacaggctttgtgtgagcaacatggctgtttatttcacctggatgcaggcaggctgagtccgaaaagagagtcagcaaagggtggtggattatcattagttcttacaggttttgggataggcggtgaagttaagagcaatgttttgcgggcagggatggatctcacaaagtacattctcaagggtggggagaattacgaagaaccttcttaagggtgggggagattacaaagtacattgatcagttagggtggggcagaaacaaatcacaatggtggaatgtcatcagttaaggctatttttacttcttttgtggatcttcagttacgtcaggccatctggatgtgtacgtgcaagtcataggggatgcgatggcttggcttgggctcaggcctgacattcctgccttcttatattaataagaaaaataaaacaaaatagtgttgaagtgttggggcagcgaaaatttttgtggggtggtatggagagagaatgggcgatgtttctcagggctgcttcaagtgggattaggggcggcgtgggaacctagagtgggagagattaagccgaagggagatcttgtggggatgttagaagaaacatttgtcgtatagaatgattggtgatggcctggatatggttttgtatgaattgaaaaactaagtggaataagagaaggagaaaaacaggtataaaaggtctaagaattgggaggacctaggacatctgattagagagtgcctaaggagattcagcatagtcctgccagcaaagattatttatttacttcaagagttaagagtggcagtttggggatagcacgaggagatatcacctgtgatggcttggagaaacagtgtaaaccagcagtgtaaacaagagcagggcatgtatgagtagttgagaacgttgaataggagtatgactagacagaagatagtagggatgatgacaggttttttttgggggggggggcacagtctaagttggtctggtgtctggaatgagactggggcctaataaaaaggagcatctatacaggagcttaaatgggctgtaccttgtagcattctgaggacaggtctgacttctgagaagggaaagtggtaaaagtattgtccagtcctttttaagttggtggctgagcttggtgaagtgtttttaaaagacctttagtccgttctgcttttcttgaagacggaggaccgtaagggatataaaggtttcactgaatactaagagcctgagaaactgcttggctgatttgactaataagggctggtctgttagactgtatagaggtgggaaggctaaactgaggaattgtgtctgaccgaagggaagaaatgactgcggtggccttctcagaccctgtaggaaaggcctctacttacctagtgaaagtgtctacttagactaagaggtattttagttatctgactcggggcatgttgagtaaagctaatttgccagtcctgggtgggggcaaatcttcaagcttgatgtgtagggaagggagggggcctgaataatccctgaggagtagtagaatagcagatggaacactgagaagttatttccttgaggatagatttccacaatggaaaggaaatgaggttctaagaggcgggctagtggcttgtactatagcatagcctgcctttgctgctgtgtggcgattaggcctgctggaactgccatcaataaatcaagcgtgatcagggtgaggaacaggaaagaaggaaatatggggaaatggggtgaatgtcaggtggatcagagagatacagtcatgggggtcaggtgtggtatcaggaataatgtgggaggccagattgaggtccgggccaggaacagtggtaattgtgggacttaacaaagagtgagtacagctgaaggagccggggagcagaaagtatatgcatcaggtatgaggaagaaaataatattggaagttatgagaaatgtagagagtgagttgagcatagtttgttatttttagggcctctaaaagtattaaagcagcggcagccactgcaagcagacatgagggctaggctaaaacagtaaggtcaagttgtttgggcagaaagactacagggtgcggtcctggctcttgtgtaagaattctgacacactaaccatgcctaggaaggaaaggagttgttgttttgtaagggattgaggtttgggagattaatcggacacgatcagcagggagagcacgtgtgttttcatgagaattatgccgagataggtaacagatgaggatgaaatttgggcttgactgaagtaatgggggctgtctgtgaagccttgcagcagtacagcccaggtaatttgctgagcctaatggatgtcagggtcagtccaagtgaaagcaaagagaggctgggatgacgggtgcaaaggaattgtaaagaaagcatgtttgagatccagaacagaataatggattgtggagggaggtattgaggataggagagtatatggtttggtaccatggggtggataggcaaaacaatttggttgataaggcatagatcctgaactaacttgtaaggcttgtctggttttaggacaggtaaaatgggggaattgtaaggagagtttataggctttaaaaggccatgctgtagcaggcatgtgataacaggctttactcctttcaaagcatactgtgggatgggatattggcattgagcggggtaagggtgattaggttttaatgagatggtaaggggtgcatgatcggtcgccaaggagggagtagaggtatcttatacttgtgggttaaggtgggggggaatacaagaggaggacgcaaaggaggctttggattggaaagggcagcaatgagatgtagctgtaacccaggaatagtcagggaagcagataatttagttaaagtgtctcggcctaataagggaactgggcaggtggggataactaaaaacgagtgcttaaaagagtattgtctaagttggcaccagagttggggagttttaagaggtttagaagcctggctgtcaatacccacaacagttatggaggcaagggaaacaggcccttgaaaagaaggtaatgtggagtgggtagcctccgtattgattaagaagaggacggacttactctccactgtgagagttacctaaagctcggcatctgtgatggtctatggggcttccgaggcgatcgggcagcgtcagtcttcagccgttaagccgagaagatctgggaaggagtcagagagccttgggccagagttccaggggctctgggagtggctgtcaggtgagttgaacagtccaattttcagtggggtcccacacagatgggactcgcttaggaggaatcccgggctgcgggcattccttggctcggtggccagatttctggcacttgtagcaagctcctgggggaggcagttatggaggaatgcctggccactgcggtttaggcgtttggaagttcttgtgtgctggagatgtagctggggtttgtctcacagtggaggtaaggaattgcaactcagaaatatgttgttacttggctgcctctactctattattgtacaccttgaaggcgaggttaattaagtcctgttgtggggtttgagggccggaatttaatttttggagttttatttaatgtcgggagcagattgggtaataaaacgtatattgagaataagacggccctttgacctcttagggtctagggctgtaaagcgtctcagggttgctgccgaacgagccatgaactgggctggatttttatatttgatgaaaaagagcctaaacgcttctgatttgggataaagaaaaaggagcattaaccttgactatgcctttagctccagccacctttttaagagtaaattgctgggcaggtgggggagggccagtcactgaacgaaactgtaagctggaccaggtgtgaggaggggaggtgataaaaggattctagggtggaggagcagaggctgaggaagaattgggacctagatggcctggcgacgagcagcctgaggagaaggggaaaggtcagatgggtctgtagaaaagactggaaagacccagcgacacttggggttgggactgaggggacaggcgggagggaaagaaggaggatttgggaggaatcgcattgggaacagagacttgagagggaacgaagtgtgaaaaatgcctggatgtgaggcacctcagaccatttgcccattttttgacaaaaattatttaggtcttataggatggagaaatcgaaagtgccgttttctggccatttagagccattgtcaagtttgtactggggccaagcggtgttgcagaagaaaataaggcatttaggttttaggtcaggtgcgagttgacgaggttttaagttcttgagaacacaggctaagggagaaggaggaatggaggctggaaggttgcccatagtaaaggaggcaagcccagagaaaagagagagtagagacacggagggaaggggttcgagggttcttaccctccagaaaagcaggaaaggggtcagggtgtggaaataagggattggggcacacagataagaggtcggggtgcggaaataagggattgggggttcttgccccctagaaaagcgggacttaccgctaagggtgaaggagaaggggttgaggggtacttgcccctcccccagaaatgcagagaaggggtagagacacggagagaaggggttgtggtacttgcccctcccccagaaaagcaggacttgccgctaagggtgaaggaccaaggcaggcgtccctgagtggtctgacacctttgaaacgtgagtgaataatcagagaggtgtccctgcaatgattaaacaccaaggaaaggctgccttcccagtctgtgaccagcgccagagttttgggtccacggataaaacgtgtctcgtttgtctctaccagaaaatgaaaggaattgaaattaagagaagggagagattgaagagtggaaaggagaaagtggttgagggatagtgagagaggttggagaagagagtaagaagaggccgcctacctgatttaaaattggtgagatgttccttgggctggtgggtctgaggacctgaggtcgtaggtggatctttttcacggagcaaagaacaggaggacaggggattgatctcccaagggaggtcccgcgatccgagtcatggcaccaaatttcatgcgcgtccatgtgaagagaccaccaaacaggctttgtgtgagcaacatggctgtttatttcacctggatgcaggcgggctgagtccgaaaagagagtcagcaaatggtgtggtggattatcattagttcttataggttttgggataggcggtgaagttaagagcaatgttttgcgggcagggatggatctcacaaagtacattctcaagggtggggagaattacgaagaaccttcttaagggtgggggagattacaaagtacattgatcagttagggtggggcagaaacaaatcacaatgctggaatgtcatcaggtaaggctatttttacatcttttgtggatcttcagttacttcaggccatctggatgtatacgtgcaagtcataggggatgccatggcttggcttgggctcagaggcctgacaatagggactttacataggattaggatggattagaacagaagttctagaagcaggtgagaaggagtggagggtagggataaggaaggaagggatttaagaagacattgagaaggaaaggaccacaagactgagaggaatggatgaggagagagggaagaaggagtcaaaaaagaggtgggggaataggggacttttggaaggtgcagcatttataggaatagtgacttaatagaccacatgcagtggctcattcctgtggtcccagctactcaggaggctgaggtgggagcatcgcctgagcccaggagttggaggctacagtgagccatgatcgcctactgcagcccggggcaatagagtgagacccccatctctaaaaaaagaacaagcacacgcctgtgggtggtcccagctactcaggaggttgaggtgggaggatcacttgagcctgggaggcagagactgcagtgagctgtaagagccactgcactccaacctgggtgacagagtgagaccccgtctcaaacaacaaaaaagaaaaaaaaaaacgaaagacgccaggcactgggactcacacctgtaatcctagcaccttgggagttaaaggcaggcagattgcttgagcctaggagttcaagaccagcctgagcaacatggcaaaattctgtctctaccaaaagtacaaaaaattagctaggtgtgatgtgagtgtctgtggtcccagctaggctgaggtagaagaatcatctgagcctgggaagttgaggctacagtgaagccatgatcgcaccactgcactcttgcctgagtgacagagtgagaccctgtctcaaaaaagaaaaaaaaaggaagaagaaaaagaaatggggaagtcaggaaaaagaagtgatgcttttttttttttttttttttttgagaaggagtctcactctagtcgcccaggctagagtgcagtggcacaatctcagctcattgcaacctctgccgcctgggttaaagcgattctcctgcctcagcctcccaagtagctgggattacaggcgcctgccacttcgcctggctaatttttgtagttttagtagagacagggtttcactatcttagccaggctggtcttgaactcctgacctcgcgatccacccacctcagcctctcaaaatgctgggattgcgggtgtgagccaccgtgcctgggccatacatttgtttttacactcatttctgtaccaaattagcccaattatctactgtcttgttttttgaactgattttttttttttttcatgtattgaaccaggagagcacagcctccttgagggtaaaatctgtgtctggaactttttctgtagtccctccagggtctggcatgctgacatgctgtttacttcattgtctgcgggtgcttaacaaagacttggtgattgactaagtttgtgtttccattcaggaccctagtgaaggttgacctttattccctttccagcccatgttcttgcttctgcttgtttgtaagtcatttgttacgtagatttttctttttggagatggagcctcactctgtggcccaggctggagtgcaatggcctgatctcagctcactgcagcctctgcctcctgggttcaagtggttctcctgccttagcctcctgagtagctgggatcacaggtgcgcggaaccatgcccagctaattttgtgtttttagtagagatggggtttcaccatgttggtcaggctggtctcgaactcctaacctcacgcaggtgatccgcctgcctcggcctcccaaagtgctgggattacaggcgtgagccaccgtgcccagaccatatgtatataattttttttttttttttttttggagatggagtctcactctgttgcccaggctggagtgcagtggtacaatcatggctcactgcaacctctgcctcctgggttcaagcagttctccagcctcagccttcaagtagctgagattacaggtgtgtgctaccgtgcctagctaattttagtatttttagtagagacaggatttcaccatgttgaacaggctggtcttgaactcctgacctcaaatgatccacctgccttggcctcccaaagtgctgagattacgggcgtgagccaccgcatccagcctgctatgtagatcttgttttctctggaatgtttgagccgtgctggaatggggtacccaatgctgctgtttccatccccacatgacgttttaagtcccacgagagtaggctagcgatggagtgaagctgaaaaatgaaagcaggaaatccagagacacagaaacagatgaggctttcaacagagactcgaaaatagacagaaaccatgagtcagagcagagcccggaggggcggttcgggaaggcaaggtctataggggaagctcgggtgtcacctctatgccaggtgaaggaaatgttgagtgggtgggaggctgtgtgcatctgctggggaggcagtaggcagatggaaagatcaagtcacccagaattatccccagaggttccttcccgttcctgtgggcgggtgagctctgctttctgagctgcccagagagctggaggagatagacatggaactgaccattgcagaaactagggctttttgtgcccgtgagtaggcaaagagctccctgtggatttgccataaaaaggtctatcaaggtggaagaaagtgagattctagagaaattaatacaagtgaaaagtgggcaggagtgttcttggaagtagaaatgctgttggaagtctaatagacttgggaagaagataacgtatggtgaataccagttgcttcgggggttggggggatccacattttactctgtactcagaagatgcttttccccgtgcaaaaagtgaaagtgagtgggccagtttttcttctgtcacaaggtgtatgactgttcccaaaataatagccctgggggatggggattgcttctcagaccattcaatttttgtaccctgtagacttttggtgttatgtgagaactttaagcacctgataggaattagtaacagagctacgctaatgcctgaggaaatttcagacaattggtgggagagacttggcatttggaatgtgatagctggtaggctaccatacagtaatgcaggattgccagacatttctttccaaatggctacccttgattacatttaactcccctcctttcaagctccagattttgaaggacctgttaattctctttcaagattgaagacagacaccttctttttcttctaaagaggaacctaggcggggtgcggtggctcccgcctgtaatcccagcactttgggaggccagggctggtcttgacctccttacctgaggtcaggaggcctggccaccatggcgaaaccccatctctactaaaaatacaaaaagtagccaggcatagtggcgcatgcctataatcccagctactcgggaggctgaggcaggagaatagctcgaacctgggaggtggaggttgcagtgagcctagatcgcgccactgcactccagcctgggtgacacagcgagactcaatctcaaaataaataaataaataaatatgaacctaaaccatcagaatcttccccttgcagccacaacagaaacactgccggggaggccgagccccgacctgggaagcagggtgatacactgggtgccacgggccttccctctgcctggcagctgtcgctactcagatccctgcagccctgttgccagtgaaggagctggagtctctgttatgatgtgttcatccagctggtgagtttttttttttttgttttgttttttttgtttttgtttttgttttttttttagacagagttttcacttgttgcccaggctggagtgcaatggcacgatctcggctcaaggcaacctctgcctcccaggttcaagcgattttcctgcctcagcctcctgagtagctgggactacaggcatgtgccaccatgcccagctaattctgtatttttagtagtgatggggtttctccatgttggtcaggctggtcttgaactcctgacctcaggtgatccgcctgcctcggcctcccaaagtgttgggattacaggcgtgagccactgcacccggcccagctggtgattttttttttttttttttttttttttgagacggagtctcgctgtcgcccaggctggaatgcagtggtgcgatctcagctcactgcagactccaccccccgggttcgcgccattctcctgcctcagcctaccgagtagctgggactacaggcgcccgccaccttgcccagctaactttttgtatttttagtagagagggggtttcaccgtgttaaccaggatggtctcgatctcctgacctcgtgatccgcccgcctcggcctcccaaagtgctgggattacaggcgtgagccaccacgcccggccccgtagctggtgatttttaaagttaacaaaatacaattatgagaaatcagaattcagaaagtaatgacagagagggccttgtcgggaggggctctgacaccctgctttgggccctcatagagatctggggagggagcaggagtgttttaaggggtgtgcgtcttcagccttccatttgtcttcagaacccaaagccctaaatttagcaaacagctggagagtgctttctgaagagggaggctctggacctgaatcagagatgggaacccatgtaaccaccctcagctgggctcttcagtgtaatcacaggtttgggaaggtaactgaggagagcccatgccaaatatcagaactttgcatttggtgcctggattttaaatcccaggggccctctgagaactctagtacttgtgtttgtgcttgaccatggaaggccattagagcctgggggtgctagatactcaagctgcaatcccaggcaagttgcacggtgaccagggcttagtaggggctaagtaaatgttgttggcttgacaatgatgagcattatgtgcaatttcaaaaacacttaaagcattatggaaggctaggtctggaaaaaccttttgacaggtatgtggaaaatattcgctgggcgcggtgactcacgcctgtaatcccagcactttgggaggccaaggcgggccgatcacctgaggtcgggagtttgagaccagcctgaccaacatggagaaaccccgtctctaccaaaaatacaaaattagttgggcatggtggtatgcacctgtagtcccagctacttgggaggctgaggcaggagaatcacttgaacccgggaggcagaggctgcaatgagccgagatcgtgccactgtactacagcctgggcaacaagagcgagactccatgtcaaaaaaaaaaaaaaaatttgtggttacaaatatgtatttttttatctagttcagtctgatttcagtttccccaaaaacccttcttgaccatctccacttgcttaacactgagctcatttttatatagctggagttccctttattatctttacatgtttcatgtaggcatttttttgggaatattttaattatttgtgtttgtccttttgaccttgattccactctaagcttcatgagacagaatttgttttctcttttatttgtgactttcaaaatactggacagaaagcagtatttgtatttgctctccgactgaattttttttttttctgtctccttgctactgactgttctactgaggcttctctattagagagtaaagttgaaagcaaactcttagtgcttaaaacttgcgaagaaaaccttccattgcatcctcattgctcttcctaacacttgtcctcttctttgttgtgttgcaagataaagccaccaatccttccaaccgccaggaggactgggaatacataattggcttctgtgatcagatcaacaaggagctggaagggtgagtctcagcactgtgggggcagctgagagggagcggactgggaaggggaacaaccatggccaaggagggccagccaggtagccccaggcttagtgcactggagtgtgttctgcttgtcccccaggccacagatcgccgtccgactgctggcccacaagatccagtccccacaggaatgggaggcgctccaggccctgacggtaggtccttcactctccggaggtggaaaccgcagcccttcacctgcccacgccattcctcgtgtccccatagcggttcttagggctcctgccaaaagccaacagaaagtccttgatacagactagatagatctcgaatctgttcagccagctgttccacaaatctgtgtgcattgtgccaggccctgaggcctcagaggtgactgcagtgccgtccctgccagcatggccacatggttagtgtgtgaggcagaggggctaaggaaagcagcccagagtcagggccctgagccccatgtggcgcaagagaaggcttggtgaagagatgctgacagggctgtgttgatagttcagagctggccagctgaagaaaagaggggtcggtccagttcattctgtagttaaacaatgccagtcactagcgaaggtgtcgcactgatggctgaggcccctagggcagatcctggtgtctgttcagactgagggaatttaaggtgtggaatggtgcctggccctcagtgcctccacatgctccgaaaacaaagagcagccgagatctgaggaatccggggctctagcctgactgcattcaggtcctggaaagcgaaaagaggaaatatcatctggttcacatgcacccctcagtcatatttgctgtagaacgaattccttaaaacagtgattctcagcagggcacggtggcttgtacctatagtcccagcaccctgtggggcctaggccgggaggatcgcttaagggaattcaagaccagcctaggcaacgtagtgagacattgtctctacaaaaaataaaaaaatcagccaggcacggtggcacacacctgtggtcccagctcctcgggaggctgaggttgaaggatggcttgagcctgggaagttgaggcgaaagtgagtggtgatcacaccgttgcactctagcctgaccaacatagcgagattctgtgtcaaaaaacaaaaaaaaaacgtaacaaaacccagtgattctcaacagggccctccagggaacatttggcagtgtctggaaacatttttagttgtcacacatcggggtgggggtcctcctggcatcaagtaggcagaggccagggatgctgttcgacaccctataaagtgcagagtggccccccacaacgaagaatgaccagcccaaaatgtcagccaggcctcacctgagaaaccttgctttaaaatgcagaagccaagaaagagagcctggacagtgcactcccccttagaaaccgcagtgccagggaccacaggcagcacaggaaagccaaagcgtgagttagggagataagcggagggaggagaaatatcctgtcatctttctcacagataataggatttaaacatccctcccattccctgcacaattgttggtgagcttgtggaaaaaacccaggacaccaagtcagagaaactttgtccctggacctcacctccctcattgtaaaacacgaggccagaatctttaaggaaggcaccttccaggactggcatccaggccttcttggggtcggggtctcggggtttcttgctttagtccctgcccagcttccccagcagaggtttgcagttggagggacatggtctgtgagtgatctcgttgcttaattacactgtccccgggcagtgcacactgcttttcgtgatgagctccttcctgtgggcgtgtttattcagtactctctgggtgccagggatcttgccagtgccaggttccagccccgagcacgccctcactgagcgcctctcctctgtgcggctacaggtgctggaggcatgcatgaagaactgtgggaggagatttcataacgaagtggggaagttccgctttttgaatgagttaatcaaagtcgtctctccaaaggtcagtcagcggcagattcctcgcttttagggacttcttttgtgttcattcccatctcccatcatactggctttcactgcccatccaacatctccagggagctgagattatttgtgtcttgtccttagagagctaggccctggaggtaacgggatgaccaaacaggccacagggaccggcagctttttctgaagcgccctcagcccaaatctgacaggtgatgtggtagtggctgtgtgtttgtccagggtgagggcccatgtagtgtgggactctaggcacctggcacatggcagttgtgggttttgtgggttttcttggcctgtgtcacgtggatacggggagctggcctccgtcattgctccgatgctcagctggccgtgttctgttgcacgctggtgtggcgcagctctgggcccccacttaaagcagagggaatactttaccatgctaaagacattctcatggacacccccaagataaaatgcagttgtgtttctggcaacttgtgcgtgaaaatgcactttcctcagaactcaaaatatccacccaaccatggcctgcaccacatgggcatcagggtcacaaggaagcctctctgtcttgatgtccccaaggtagtaaggaaaggcagagagcaggggtgagcaccgagggcatggtctctggtgtcagactcaggtttccatccggcccttacaccctgggcaagttagatgatcccaggcggcaaatggggacgccacccctactgacgtggctgctgtgcagatgagtaaggtcatgaatacacttacaggacacttcctggacaggaggtgatgacctcctggccccctgcctatccacagactgtatccagatggacacagccacaccacagggagtcgttcccctccccacgctgtctcacacacacttggacacctgcagattttgagtaggaccatagctgctgagcagccacgccattgctgtggagggagccttacactttctctgcctccgaactgcacttactaggtcctcattttcttttgccatgtagtacctgggggacagggtgtctgagaaagtgaagaccaaggttattgagctgctgtacagctggaccatggccctgccagaagaagcaaagatcaaagacgcctaccacatgctgaagagacagggtacgtgtctgcctgcccgcagcctccaggcagccctcgaaggctggcccaggcaaggagagaagggaaggtttgggatccccagagtccctcctgaagagaacagcatttgtccccaggcaaggctgagtcggagttggatgggataaggtgtagcagcctgccctccaccctgctaccctttgcaggtcttgatcacagggacgtggcccttggtgtatgaggaggggtgacaaggcaaccacagcctgagtgcacgtgctgccatgtcccctttcaggcatagtgcagtctgacccaccaattcctgtggataggacgctgatcccctctccaccacctcgtcccaaaaaccctgtttttgatgatgaggagaagtccaaggtaaaggacaccctgggcctgggattttctcatacgagagtgggtggcagcaggggaatgtggtttgcactgtgctgcggggagcctctggggtttccctggggtacgggtgctgcctcttcccttcacctctgatttcctcctctctcagcttttagccaagctgctgaaaagcaaaaacccagatgacctgcaggaggccaacaagctcatcaagtccatggtgaaggaagtgagtgggccccggtccttcaggcacggggtggaggagcccatggccacacagcagaagccgctttgccccggacacgggcctgttttgttctcccctgctgccagctgccctacctgtgccccggtggctgagagtgggaggaggagcacaatagcttccgcgggagcacggaagagaggagtgggttgggagcagtgttgtgaaagcagaagtatagactgggccccaggcaccccacactgaaaggagcttccgagcgtctgtacttgtgttgtggggtaaggtgtgacctggtggaagtggaaagacagtcaagtgacgctctctttctcttgaacttcttcactggggcaggacgaggcacggatccagaaggtgaccaagcgtctgcacacgttagaggaagttaacaacaacgtgagactgctcagtgagatgctgcttcattacagccaggaggactcttcggacggggacagagagctgatgaaggtgggaccgccgacggcaaaggctgcctcccggggctgcgctgcccttcaggagctcagccagcatttgctgagcacgtgccttgtcagagacacgggctgtgcacttggcagtgtattcatgaccttactcatctgcacagcagccacgtcagtagagggtggcgtccccatttgcctcctgggatcagctgacttgtccagggtgtaagggccagatggaaacctgagtctgactccagagaccacactctcggtgctcacccctgctctctccctttccttactaccttggggacatcaagacagagaggcttccttgtaaccctgatgcccatgtggtgcaggccatggttgggtggatattttgagttctgaggaacatgccagcctggaaggcaggaggggactgacttcccctgacccatcctggtgactgctacctagacaaacatcctgggtgatgtggtgtggtggtggtggctggtggcaagaagacgtgcgctgtgatcccagctttgctggtaattgaccgtggcaattggcatatcccggtcattttctgggcatgaaccctgaatgaatcagatgatctctaagggcctttgtggtttgatttttatgtccgagtctctttcaggagctgtttgatcagtgtgagaacaagaggcggactttatttaaactcgccagtgagactgaggacaatgataacagtttgggtgagtgaaagagcgacggtcagggataagccaggcatttggatatgtgggtgggaactgtcacaacaggagtgagaagtctctctttcctgctccaggggacatcctgcaagccagtgacaacctctcccgggtcatcaactcttacaaaacaattattgaagggcaggtcatcaatggcgaggtggctaccttaaccctgcctgactcggaaggtgagatgctctggtccccaactctaggctcctccagaccagcctcaggcccctatcatgaagctgcgggtgtaggctggccagcgtggtggtgttgcacaaggcccaagggagttctttgccattccaagcaatcctccggcttcccggaggcctggagatgtgggtaggaatttccccacctgctttctcgggcttgctttgcagcatcccctggcagagatgccgttggattaggccagaggctgtagcagtgacctctgtgcctagggtgctgcctcctgccacacagccactagaagacccctaattattcctgttctgctctgttgacccatccaggaaacagtcagtgcagtaaccaaggcacgctcatcgaccttgcggagctggacacgaccaacagtttgtcctccgtgttggccccagcacctactccaccctcctcaggcatcccaatcctccctccaccaccccaggcctcaggacctccacggagccgctcctctagccaggccgaggccaccctggggcccagcagcacaagcaacgccctctcctggctggacgaggagctactctgcttgggtgcggcccacagggggcgtcaggggcatcccctgacagggctctgggaggaagggtgtgtggaattaggagccctgagcggggccccagtgtgactgttggggtgggcaaagaaccctgagttggaggtactcagtgaagttcagcgaccctgagggccccagggccatcctcccggtggactctgcctcctgccctgcaccccgccccacaggccccccgcttctgcatcatggactggagcgctccattcccctctggaggctgcctgcagaacagcttctcccggcgccttcacccattgatgtcacttgtcacctgacccctcctcaggcaaggcggggctagggctgcctagctcagagcctcttctcatcctgttttcttctctattgtcaggcctcgccgacccagcccctaatgttcctcccaaagagtcagctgggaacagccagtggcacctgctccaggtaggggcacaggatcggtgacagcactactgtgccaaggacctccactttccagcgtcatgtctcctgggctgcagttagctgtccttccctccagagcgtgccagctgcagcggggaacaatgagtgcctccggggctgtcttccgtgcagtccttggagggctgcgccccgttccagcggcaggccctccccacccgccctcggctcaccaccctttctgttgttcatagagggaacagtccgacctggacttcttcagccccaggccggggaccgctgcctgtggcgcctccgatgctcctctgctccagccctcagccccctcctcaagcagctcccaagctccactgccgcctcccttcccagctcctgtggtcccagccagtgttcctgcccccagtgcgggctcctccttgttttctactggagtggccccagccttggccccaaaagttgagcccgcagtccctgggcaccatggcttggcgttgggcaacagcgcgctgcaccacctggatgccctcgatcagcttctagaagaggccaaagtgtaatgagtgggaggagatgtggggttgctgagggttgggcctgaatgtgtcagaaccagagctaactttgaaggggtgggggtgccttgtagtcccatcagtcaggctggaaggcaaggggtgggcctgggtaagagcatggtcaggggccttgggtgagagtcctgcagctctggctggctctctgacgtgctttccatccttcccacctcccaggacctcgggcttggtgaaacccactacctcccctctcatccccaccaccaccccagccaggcccctcctgcccttctccacggggcccggcagcccgctcttccagccactgagtttccagtcccagggcagccccccgaaggggcctgagctctccctggccagcatccacgtgcccctggaatcgatcaagcctagtaggtgttggaggattgaggtgggtggggcggtggggcctatagccacggagctgtaggacatgcgacagggatggatccaggcactctttgcagggggtcccttaaagccaggcaggcctccctgcctgcattctcagtcttaagctcctcactgagcgcctctcccagattccgttaggaagcactggactcatcatgaccacggagtagcccttttctcctcaccgccggggctctgttgggtgtctctggtgctgctcctcccacactcacgtcacgttcttacaggcagtgcccttcctgtgacagcctacgataaaaacggcttccgcatcctcttccactttgccaaggagtgtcccccaggacgacctgacgtgctggtggtggtggtgtccatgctgaacacggctcccttacctgtcaagagcatcgtgctgcaggctgcagtgcccaaggtaccagtgtctccctggggccaaaacggccttatcttgaccctgttgtgtagaggcctttgcagccagcaggtggcagtgtgtgtgtgcactgcaggttccatctgggggcacctaccagttctcttcaaaggagtttctctctctttagtcaatgaaagtgaagttgcagccaccttctgggacagaactctctccatttagccccatccagccacctgcagccatcacccaggtcatgttgctggccaatccactgaaggtgagcagcaaagaacccaggggtcccagcctgaggccccagctgccccagattaggacgtcaggcccaccacctcccagctggaagtgttttgactgtaggattgacacatccctttgctgccttaggttaagtgtctgagcatggttgggggttgcggggaaaagggaccattcctctagcacagagagggtagcagaatagagggcgtcctgccaaggggccgcctgggctggatctcacttgctgccctctgtcacaggagaaggtgcggcttcggtataagctgaccttcgccctgggggagcagctgagcacagaggtgggcgaggtggaccagttccctcctgtggaacagtgggggaacctatgaccccagaggacgctgtgatctccaccttgaagccaggcaggctgccctgagacgaggagggctctggtcccgtcactctccatgccctgacaacagtgcttgtagctttgatgtggaacaggggccctgggcatttctgctgagaaccaaactgctgctgtgataacctctcctttggcccctaaaaggacctgtttttatctacctgtgtgacttgaagtggccatatgctgtcaggggtgcggagtggcccctgacttcactgctgtcccgggaacatggacccccaggcttggcgtaggtgtttgcttccttctactggcattcactgaagccactggggtggggggtggggggtgggagtctctaaagagagactgtcatgggtcattccccacaagagccacatcctcacacctgacagatgcacggcccaaggggctgcagccctgttgcaattccatgcttcccccgccaaccagctcctgctgccatccccagggaggtggcccaggaaggtgcctggcccagaataaggaactggcatactgcaaagtccccagccctgcctctggtggacagcatcgtcctggaatggccacggagtgatgagttgtgtgcttgtccctggcagtggcaggctgtgtcctatggacatcttggcaggacatggaatttggcctcatgacaggcccaactagggataggaaggaaaatgaagagagccagtatttccccttctccagaagcaggtactcagctttctgggaaaagcgtgcctccagccgtggggacaggccatcctactgactacctcttgcttggcatgaaataaactgctatcctccccttggaatctaccgccactctacatcctactgctttggcctccctctcctctcaccagatggcatgtggtgtggcacctgtggctggacacaggaggcctcaggatcacaaatgttacactagacatatgtcctaatgtgctgcccagaaacctcaactgttccccagctactgaggggcactgtcagcgagatgttgggtctggaggtgatgagatcgggccacacttgagctgagtcaccagaccctattgcttcaacagtgcttggcccccgccagcttgtcccagccactctagctgctggatgtgatcctgggacatgtactccaagcctccgtcacaaaaaaaaaatcaccagctgccatagacacgggggaagcttgcggagcccaggtgaacaagctcagcaatcggacatctctggggaaaggaaggtggcacagaccatgttccctggttcctccctgccccttgccaggcttccttattccttactatgggaagaggtcatatcccttccctgcccctcgctgtctttagcaagcaggtttcactgcttcattagaagaggacaagtcaaaagtgaatcatttttcactacttaaggaataaatccaagagctttccagagactggctgctgcagccctgggaatgtctgtggaattactatgtggaaatggaactttgtgttatgctctagacattacagttatttgagtgttactcgttactgttgaggtcagtgcttcgtggcaaatggctgtactggatatcccagctctgctgcccttgttttgctgcatgttaaataaaaccattttcactgta

SEQ ID NO: 12230 - DNA, 4181 bp, Homo sapiens
gagttttgaagccgcggggccgggcggctgcaatatggcggaggcggaaggggaaagcctggagtcctggctcaataaagccaccaatccttccaaccgccaggaggactgggaatacataattggcttctgtgatcagatcaacaaggagctggaagggccacagatcgccgtccgactgctggcccacaagatccagtccccacaggaatgggaggcgctccaggccctgacggtgctggaggcatgcatgaagaactgtgggaggagatttcataacgaagtggggaagttccgctttttgaatgagttaatcaaagtcgtctctccaaagtacctgggggacagggtgtctgagaaagtgaagaccaaggttattgagctgctgtacagctggaccatggccctgccagaagaagcaaagatcaaagacgcctaccacatgctgaagagacaggcttttagccaagctgctgaaaagcaaaaacccagatgacctgcaggaggccaacaagctcatcaagtccatggtgaaggaagacgaggcacggatccagaaggtgaccaagcgtctgcacacgttagaggaagttaacaacaacgtgagactgctcagtgagatgctgcttcattacagccaggaggactcttcggacggggacagagagctgatgaaggagctgtttgatcagtgtgagaacaagaggcggactttatttaaactcgccagtgagactgaggacaatgataacagtttgggggacatcctgcaagccagtgacaacctctcccgggtcatcaactcttacaaaacaattattgaagggcaggtcatcaatggcgaggtggctaccttaaccctgcctgactcggaaggaaacagtcagtgcagtaaccaaggcacgctcatcgaccttgcggagctggacacgaccaacagtttgtcctccgtgttggccccagcacctactccaccctcctcaggcatcccaatcctccctccaccaccccaggcctcaggacctccacggagccgctcctctagccaggccgaggccaccctggggcccagcagcacaagcaacgccctctcctggctggacgaggagctactctgcttgggtgcggcccacagggggcgtcaggggcatcccctgacagggctctgggaggaagggtgtgtggaattaggagccctgagcggggccccagtgtgactgttggggtgggcaaagaaccctgagttggaggtactcagtgaagttcagcgaccctgagggccccagggccatcctcccggtggactctgcctcctgccctgcaccccgccccacaggccccccgcttctgcatcatggactggagcgctccattcccctctggaggctgcctgcagaacagcttctcccggcgccttcacccattgatgtcacttgtcacctgacccctcctcaggcaaggcggggctagggctgcctagctcagagcctcttctcatcctgttttcttctctattgtcaggcctcgccgacccagcccctaatgttcctcccaaagagtcagctgggaacagccagtggcacctgctccagagggaacagtccgacctggacttcttcagccccaggccggggaccgctgcctgtggcgcctccgatgctcctctgctccagccctcagccccctcctcaagcagctcccaagctccactgccgcctcccttcccagctcctgtggtcccagccagtgttcctgcccccagtgcgggctcctccttgttttctactggagtggccccagccttggccccaaaagttgagcccgcagtccctgggcaccatggcttggcgttgggcaacagcgcgctgcaccacctggatgccctcgatcagcttctagaagaggccaaagtgacctcgggcttggtgaaacccactacctcccctctcatccccaccaccaccccagccaggcccctcctgcccttctccacggggcccggcagcccgctcttccagccactgagtttccagtcccagggcagccccccgaaggggcctgagctctccctggccagcatccacgtgcccctggaatcgatcaagcctagcagtgcccttcctgtgacagcctacgataaaaacggcttccgcatcctcttccactttgccaaggagtgtcccccaggacgacctgacgtgctggtggtggtggtgtccatgctgaacacggctcccttacctgtcaagagcatcgtgctgcaggctgcagtgcccaagtcaatgaaagtgaagttgcagccaccttctgggacagaactctctccatttagccccatccagccacctgcagccatcacccaggtcatgttgctggccaatccactgaaggagaaggtgcggcttcggtataagctgaccttcgccctgggggagcagctgagcacagaggtgggcgaggtggaccagttccctcctgtggaacagtgggggaacctatgaccccagaggacgctgtgatctccaccttgaagccaggcaggctgccctgagacgaggagggctctggtcccgtcactctccatgccctgacaacagtgcttgtagctttgatgtggaacaggggccctgggcatttctgctgagaaccaaactgctgctgtgataacctctcctttggcccctaaaaggacctgtttttatctacctgtgtgacttgaagtggccatatgctgtcaggggtgcggagtggcccctgacttcactgctgtcccgggaacatggacccccaggcttggcgtaggtgtttgcttccttctactggcattcactgaagccactggggtggggggtggggggtgggagtctctaaagagagactgtcatgggtcattccccacaagagccacatcctcacacctgacagatgcacggcccaaggggctgcagccctgttgcaattccatgcttcccccgccaaccagctcctgctgccatccccagggaggtggcccaggaaggtgcctggcccagaataaggaactggcatactgcaaagtccccagccctgcctctggtggacagcatcgtcctggaatggccacggagtgatgagttgtgtgcttgtccctggcagtggcaggctgtgtcctatggacatcttggcaggacatggaatttggcctcatgacaggcccaactagggataggaaggaaaatgaagagagccagtatttccccttctccagaagcaggtactcagctttctgggaaaagcgtgcctccagccgtggggacaggccatcctactgactacctcttgcttggcatgaaataaactgctatcctccccttggaatctaccgccactctacatcctactgctttggcctccctctcctctcaccagatggcatgtggtgtggcacctgtggctggacacaggaggcctcaggatcacaaatgttacactagacatatgtcctaatgtgctgcccagaaacctcaactgttccccagctactgaggggcactgtcagcgagatgttgggtctggaggtgatgagatcgggccacacttgagctgagtcaccagaccctattgcttcaacagtgcttggcccccgccagcttgtcccagccactctagctgctggatgtgatcctgggacatgtactccaagcctccgtcacaaaaaaaaaatcaccagctgccatagacacgggggaagcttgcggagcccaggtgaacaagctcagcaatcggacatctctggggaaaggaaggtggcacagaccatgttccctggttcctccctgccccttgccaggcttccttattccttactatgggaagaggtcatatcccttccctgcccctcgctgtctttagcaagcaggtttcactgcttcattagaagaggacaagtcaaaagtgaatcatttttcactacttaaggaataaatccaagagctttccagagactggctgctgcagccctgggaatgtctgtggaattactatgtggaaatggaactttgtgttatgctctagacattacagttatttgagtgttactcgttactgttgaggtcagtgcttcgtggcaaatggctgtactggatatcccagctctgctgcccttgttttgctgcatgttaaataaaaccattttcactgta

SEQ ID NO: 12231 - DNA, 25002 bp, Homo sapiens; identical to SEQ ID NO: 12189

SEQ ID NO: 12232 - DNA, 4034 bp, Homo sapiens
gggcggctgcaatatggcggaggcggaaggggaaagcctggagtcctggctcaccacaacagaaacactgccggggaggccgagccccgacctgggaagcagggtgatacactgggtgccacgggccttccctctgcctggcagctgtcgctactcagatccctgcagccctgttgccagtgaaggagctggagtctctgttatgatgtgttcatccagctgataaagccaccaatccttccaaccgccaggaggactgggaatacataattggcttctgtgatcagatcaacaaggagctggaagggccacagatcgccgtccgactgctggcccacaagatccagtccccacaggaatgggaggcgctccaggccctgacggtgctggaggcatgcatgaagaactgtgggaggagatttcataacgaagtggggaagttccgctttttgaatgagttaatcaaagtcgtctctccaaagtacctgggggacagggtgtctgagaaagtgaagaccaaggttattgagctgctgtacagctggaccatggccctgccagaagaagcaaagatcaaagacgcctaccacatgctgaagagacagggcatagtgcagtctgacccaccaattcctgtggataggacgctgatcccctctccaccacctcgtcccaaaaaccctgtttttgatgatgaggagaagtccaagcttttagccaagctgctgaaaagcaaaaacccagatgacctgcaggaggccaacaagctcatcaagtccatggtgaaggaagacgaggcacggatccagaaggtgaccaagcgtctgcacacgttagaggaagttaacaacaacgtgagactgctcagtgagatgctgcttcattacagccaggaggactcttcggacggggacagagagctgatgaaggagctgtttgatcagtgtgagaacaagaggcggactttatttaaactcgccagtgagactgaggacaatgataacagtttgggggacatcctgcaagccagtgacaacctctcccgggtcatcaactcttacaaaacaattattgaagggcaggtcatcaatggcgaggtggctaccttaaccctgcctgactcggaaggaaacagtcagtgcagtaaccaaggcacgctcatcgaccttgcggagctggacacgaccaacagtttgtcctccgtgttggccccagcacctactccaccctcctcaggcatcccaatcctccctccaccaccccaggcctcaggacctccacggagccgctcctctagccaggccgaggccaccctggggcccagcagcacaagcaacgccctctcctggctggacgaggagctactctgcttgggcctcgccgacccagcccctaatgttcctcccaaagagtcagctgggaacagccagtggcacctgctccagagggaacagtccgacctggacttcttcagccccaggccggggaccgctgcctgtggcgcctccgatgctcctctgctccagccctcagccccctcctcaagcagctcccaagctccactgccgcctcccttcccagctcctgtggtcccagccagtgttcctgcccccagtgcgggctcctccttgttttctactggagtggccccagccttggccccaaaagttgagcccgcagtccctgggcaccatggcttggcgttgggcaacagcgcgctgcaccacctggatgccctcgatcagcttctagaagaggccaaagtgacctcgggcttggtgaaacccactacctcccctctcatccccaccaccaccccagccaggcccctcctgcccttctccacggggcccggcagcccgctcttccagccactgagtttccagtcccagggcagccccccgaaggggcctgagctctccctggccagcatccacgtgcccctggaatcgatcaagcctagcagtgcccttcctgtgacagcctacgataaaaacggcttccgcatcctcttccactttgccaaggagtgtcccccaggacgacctgacgtgctggtggtggtggtgtccatgctgaacacggctcccttacctgtcaagagcatcgtgctgcaggctgcagtgcccaagtcaatgaaagtgaagttgcagccaccttctgggacagaactctctccatttagccccatccagccacctgcagccatcacccaggtcatgttgctggccaatccactgaaggagaaggtgcggcttcggtataagctgaccttcgccctgggggagcagctgagcacagaggtgggcgaggtggaccagttccctcctgtggaacagtgggggaacctatgaccccagaggacgctgtgatctccaccttgaagccaggcaggctgccctgagacgaggagggctctggtcccgtcactctccatgccctgacaacagtgcttgtagctttgatgtggaacaggggccctgggcatttctgctgagaaccaaactgctgctgtgataacctctcctttggcccctaaaaggacctgtttttatctacctgtgtgacttgaagtggccatatgctgtcaggggtgcggagtggcccctgacttcactgctgtcccgggaacatggacccccaggcttggcgtaggtgtttgcttccttctactggcattcactgaagccactggggtggggggtggggggtgggagtctctaaagagagactgtcatgggtcattccccacaagagccacatcctcacacctgacagatgcacggcccaaggggctgcagccctgttgcaattccatgcttcccccgccaaccagctcctgctgccatccccagggaggtggcccaggaaggtgcctggcccagaataaggaactggcatactgcaaagtccccagccctgcctctggtggacagcatcgtcctggaatggccacggagtgatgagttgtgtgcttgtccctggcagtggcaggctgtgtcctatggacatcttggcaggacatggaatttggcctcatgacaggcccaactagggataggaaggaaaatgaagagagccagtatttccccttctccagaagcaggtactcagctttctgggaaaagcgtgcctccagccgtggggacaggccatcctactgactacctcttgcttggcatgaaataaactgctatcctccccttggaatctaccgccactctacatcctactgctttggcctccctctcctctcaccagatggcatgtggtgtggcacctgtggctggacacaggaggcctcaggatcacaaatgttacactagacatatgtcctaatgtgctgcccagaaacctcaactgttccccagctactgaggggcactgtcagcgagatgttgggtctggaggtgatgagatcgggccacacttgagctgagtcaccagaccctattgcttcaacagtgcttggcccccgccagcttgtcccagccactctagctgctggatgtgatcctgggacatgtactccaagcctccgtcacaaaaaaaaaatcaccagctgccatagacacgggggaagcttgcggagcccaggtgaacaagctcagcaatcggacatctctggggaaaggaaggtggcacagaccatgttccctggttcctccctgccccttgccaggcttccttattccttactatgggaagaggtcatatcccttccctgcccctcgctgtctttagcaagcaggtttcactgcttcattagaagaggacaagtcaaaagtgaatcatttttcactacttaaggaataaatccaagagctttccagagactggctgctgcagccctgggaatgtctgtggaattactatgtggaaatggaactttgtgttatgctctagacattacagttatttgagtgttactcgttactgttgaggtcagtgcttcgtggcaaatggctgtactggatatcccagctctgctgcccttgttttgctgcatgttaaataaaaccattttcactgta

SEQ ID NO: 12233 - DNA, 25011 bp, Homo sapiens
agactctcgcgagttttgaagccgcggggccgggcggctgcaatatggcggaggcggaaggggaaagcctggagtcctggctcagtgagtagccgcggccgtttctgcctgccctcgagccgctgggctgcccctgtcttcacccccacgtcccctccccgggctccacggcgtcgcctcttggcagcccacgcccggtctcgccctcgccgcgagcagcctgcgatcacgccccttccctatcagggcgccgggccccagtccggcccccgcttccctcgctgcggcgcgtcctcttgctctggcgcgcggcggcgtgaactcgggctcctgtcgggcaccgcaggctcggggaaaggcgacagccaagatcttcgggctgacatgcttcggcgctttggggagattgtggtggggtcgccgcccggcggtgacaccaggaacccagcgccccaatccctgactaagggagaagcttcggattggggctgagtctccggtagtggtgggtgctgccgactgcgttcagtcgcctggcagcttcagaattgtgaccatgtgttggagaagtgacggcttcgctcaggcagaatgcttgaagtgagaataatattccaaagagagcgatgatagagaacagagagctctacctttttcctgcagtgaccacagaagcatggtgaaatcggtgtcgggaattccccccccacacacatacatatacccccttgaatatcctaacgagtcagtgttgatagcctattctgagtaaggctgaggagcacagtctgaagctgtagttatagaagcgtattgctgtcattgcactgtgaattacagtgctacgaaggaaatgtgtgttaacctggttagcaggtagtactctgcctgagggttaataagtgaactttcctgtaggctagacctggaagcctcctttaagtggagagagaaattggactggtaatgggataggtgagatacctagtattgccttgttctgaggtctcttatttagtactgcttccgggatcttggaggtgatagctatttcctcaaattgtctgatttttcctagtaagaaacccccttcaggaggttgagcttcagtttaaaggggagcatatcccaaaagagagaaaaagtaagatcacgtttgcaaaatctgcagttgcaggcaggtcataaggcttctttatatatggaagtgttctccaaggagctcaaagtactttacagatattcattaaattagtttaccaagtattctagcaaagcaggcactactgccataatttcacaaaaagaggacatcctgactccagtcaaaccacttgcccagaaatgcccaacttgctataaccagagtggaattagtttgctttgaaggtattaatatgggtattgaataatttaaatgacctaagctgagtttaataggctacatttagagttacattttgtttttgttacttgtttttgagacagagtctcgcgcgctgttgtctaggctggagtgcaggggtgcgatcatagctcactgcagccttgaacccctgtgctcaaataagtcttctacctcagcctcctgagtagctgggactataggcacacgccaccatgcttggctaattcttttgatttttagtagagatgaggtcttgctgtgttgcccaggatggtctcaaactcgagttcaagtgatcctcccacctttcccttacaaagcgctgggattacacacgtgagctaccgcacccagcctagagtcacattatgaaatgagagggacacacttggtgggggggagtcacatggtatctgtagagacataagcttcacagttgttacgacttaatgtgaactgtaccagttgaacaaaccagcagttggggttcagcatcgtctcagtcagcgtccttgtcaccccacgtttgcctgaattgttgcagaagcctctgcttggcccagagacccaggtctctcccgtcctcacctctcctcagtccattctgctcccagaagcgcacttgtgttgaatcaaatcattccactgttgcctgtaatctggccttggttgttccaggcctttttctctgtggcttctacgttttcctgctctactcagtctgatgttcttggtttaccaatacacgttgctctccttacctggaagccctgctcccgtttcctcaactaaatgcttgaaaacccatctcagattctcttttctcacaaaccatctcttgatgacttcagtcttctttcaagtcccaccatgatcaatcaatcaatgtttaatgagtacctgctacgtggggtgttataggagttaggaagtttaagaagattttgcctttagttggatggaggtgatgctggagtggatgaagaactctcctgtaatcccagcacgttgggaggccgaggcgggtggatcacgaggtcaggagatcgagaccatcctggctaacacagtgaaaccccgtctctactaaaaaatacaaaaaaatagccaggcgtagtggcgggcgcctgtagtcccagctacacgggaggctgaggcaggagaatggtgtgaacccgagaggtggagcttgcagtgagctgggattgtgccactgcactccagcctcggtgacagagcgagactccgtctccaaaaaaaaaaaaaaaaaagatacaaggcagtgctaaaacgccggcattctctttagggaactggggatgggggaagagatgattcattgaggatactccatttgagctagccattaaataatgggaaaagttggaaaaaaaaaaacactagatggtgatgtggagagagcaaacctgtttggggcacacagtaacagaggtgtttgggaatgagggaagataaggctgggaagttaagaccagattctaccaagtctccaatttccagcccaagaagtttattttatttatttatttatttgagacagagtcttgcactgtcacccaggctggaatgcagtggcacaatctcggctcactgcaacttccgttgcttaggtgcaagcaattctccatcctcagcctcccaagtagctgggactactggtatgtgccactacacctggctcatttttgtatttttagtagagatggggtttcaccatgttggccaggctgttgtcaaactcttgacctcaagtgagccacctgcctcagctccctccaaagtgttgggattacaggcttgagctaccacgcccagcccagccgaagaagtttaaatttctgcagttatcaggccctcattccttctgtactaggtgaaatcggtgttttggtgtcttaagaggcttgatttgatataggtttcatgcgcgtccgtgtgaagagactaccaaacaggctttgtgtgagcaacatggctgtttatttcacctggatgcaggcaggctgagtccgaaaagagagtcagcaaagggtggtggattatcattagttcttacaggttttgggataggcggtgaagttaagagcaatgttttgcgggcagggatggatctcacaaagtacattctcaagggtggggagaattacgaagaaccttcttaagggtgggggagattacaaagtacattgatcagttagggtggggcagaaacaaatcacaatggtggaatgtcatcagttaaggctatttttacttcttttgtggatcttcagttacgtcaggccatctggatgtgtacgtgcaagtcataggggatgcgatggcttggcttgggctcaggcctgacattcctgccttcttatattaataagaaaaataaaacaaaatagtgttgaagtgttggggcagcgaaaatttttgtggggtggtatggagagagaatgggcgatgtttctcagggctgcttcaagtgggattaggggcggcgtgggaacctagagtgggagagattaagccgaagggagatcttgtggggatgttagaagaaacatttgtcgtatagaatgattggtgatggcctggatatggttttgtatgaattgaaaaactaagtggaataagagaaggagaaaaacaggtataaaaggtctaagaattgggaggacctaggacatctgattagagagtgcctaaggagattcagcatagtcctgccagcaaagattatttatttacttcaagagttaagagtggcagtttggggatagcacgaggagatatcacctgtgatggcttggagaaacagtgtaaaccagcagtgtaaacaagagcagggcatgtatgagtagttgagaacgttgaataggagtatgactagacagaagatagtagggatgatgacaggttttttttgggggggggggcacagtctaagttggtctggtgtctggaatgagactggggcctaataaaaaggagcatctatacaggagcttaaatgggctgtaccttgtagcattctgaggacaggtctgacttctgagaagggaaagtggtaaaagtattgtccagtcctttttaagttggtggctgagcttggtgaagtgtttttaaaagacctttagtccgttctgcttttcttgaagacggaggaccgtaagggatataaaggtttcactgaatactaagagcctgagaaactgcttggctgatttgactaataagggctggtctgttagactgtatagaggtgggaaggctaaactgaggaattgtgtctgaccgaagggaagaaatgactgcggtggccttctcagaccctgtaggaaaggcctctacttacctagtgaaagtgtctacttagactaagaggtattttagttatctgactcggggcatgttgagtaaagctaatttgccagtcctgggtgggggcaaatcttcaagcttgatgtgtagggaagggagggggcctgaataatccctgaggagtagtagaatagcagatggaacactgagaagttatttccttgaggatagatttccacaatggaaaggaaatgaggttctaagaggcgggctagtggcttgtactatagcatagcctgcctttgctgctgtgtggcgattaggcctgctggaactgccatcaataaatcaagcgtgatcagggtgaggaacaggaaagaaggaaatatggggaaatggggtgaatgtcaggtggatcagagagatacagtcatgggggtcaggtgtggtatcaggaataatgtgggaggccagattgaggtccgggccaggaacagtggtaattgtgggacttaacaaagagtgagtacagctgaaggagccggggagcagaaagtatatgcatcaggtatgaggaagaaaataatattggaagttatgagaaatgtagagagtgagttgagcatagtttgttatttttagggcctctaaaagtattaaagcagcggcagccactgcaagcagacatgagggctaggctaaaacagtaaggtcaagttgtttgggcagaaagactacagggtgcggtcctggctcttgtgtaagaattctgacacactaaccatgcctaggaaggaaaggagttgttgttttgtaagggattgaggtttgggagattaatcggacacgatcagcagggagagcacgtgtgttttcatgagaattatgccgagataggtaacagatgaggatgaaatttgggcttgactgaagtaatgggggctgtctgtgaagccttgcagcagtacagcccaggtaatttgctgagcctaatggatgtcagggtcagtccaagtgaaagcaaagagaggctgggatgacgggtgcaaaggaattgtaaagaaagcatgtttgagatccagaacagaataatggattgtggagggaggtattgaggataggagagtatatggtttggtaccatggggtggataggcaaaacaatttggttgataaggcatagatcctgaactaacttgtaaggcttgtctggttttaggacaggtaaaatgggggaattgtaaggagagtttataggctttaaaaggccatgctgtagcaggcatgtgataacaggctttactcctttcaaagcatactgtgggatgggatattggcattgagcggggtaagggtgattaggttttaatgagatggtaaggggtgcatgatcggtcgccaaggagggagtagaggtatcttatacttgtgggttaaggtgggggggaatacaagaggaggacgcaaaggaggctttggattggaaagggcagcaatgagatgtagctgtaacccaggaatagtcagggaagcagataatttagttaaagtgtctcggcctaataagggaactgggcaggtggggataactaaaaacgagtgcttaaaagagtattgtctaagttggcaccagagttggggagttttaagaggtttagaagcctggctgtcaatacccacaacagttatggaggcaagggaaacaggcccttgaaaagaaggtaatgtggagtgggtagcctccgtattgattaagaagaggacggacttactctccactgtgagagttacctaaagctcggcatctgtgatggtctatggggcttccgaggcgatcgggcagcgtcagtcttcagccgttaagccgagaagatctgggaaggagtcagagagccttgggccagagttccaggggctctgggagtggctgtcaggtgagttgaacagtccaattttcagtggggtcccacacagatgggactcgcttaggaggaatcccgggctgcgggcattccttggctcggtggccagatttctggcacttgtagcaagctcctgggggaggcagttatggaggaatgcctggccactgcggtttaggcgtttggaagttcttgtgtgctggagatgtagctggggtttgtctcacagtggaggtaaggaattgcaactcagaaatatgttgttacttggctgcctctactctattattgtacaccttgaaggcgaggttaattaagtcctgttgtggggtttgagggccggaatttaatttttggagttttatttaatgtcgggagcagattgggtaataaaacgtatattgagaataagacggccctttgacctcttagggtctagggctgtaaagcgtctcagggttgctgccgaacgagccatgaactgggctggatttttatatttgatgaaaaagagcctaaacgcttctgatttgggataaagaaaaaggagcattaaccttgactatgcctttagctccagccacctttttaagagtaaattgctgggcaggtgggggagggccagtcactgaacgaaactgtaagctggaccaggtgtgaggaggggaggtgataaaaggattctagggtggaggagcagaggctgaggaagaattgggacctagatggcctggcgacgagcagcctgaggagaaggggaaaggtcagatgggtctgtagaaaagactggaaagacccagcgacacttggggttgggactgaggggacaggcgggagggaaagaaggaggatttgggaggaatcgcattgggaacagagacttgagagggaacgaagtgtgaaaaatgcctggatgtgaggcacctcagaccatttgcccattttttgacaaaaattatttaggtcttataggatggagaaatcgaaagtgccgttttctggccatttagagccattgtcaagtttgtactggggccaagcggtgttgcagaagaaaataaggcatttaggttttaggtcaggtgcgagttgacgaggttttaagttcttgagaacacaggctaagggagaaggaggaatggaggctggaaggttgcccatagtaaaggaggcaagcccagagaaaagagagagtagagacacggagggaaggggttcgagggttcttaccctccagaaaagcaggaaaggggtcagggtgtggaaataagggattggggcacacagataagaggtcggggtgcggaaataagggattgggggttcttgccccctagaaaagcgggacttaccgctaagggtgaaggagaaggggttgaggggtacttgcccctcccccagaaatgcagagaaggggtagagacacggagagaaggggttgtggtacttgcccctcccccagaaaagcaggacttgccgctaagggtgaaggaccaaggcaggcgtccctgagtggtctgacacctttgaaacgtgagtgaataatcagagaggtgtccctgcaatgattaaacaccaaggaaaggctgccttcccagtctgtgaccagcgccagagttttgggtccacggataaaacgtgtctcgtttgtctctaccagaaaatgaaaggaattgaaattaagagaagggagagattgaagagtggaaaggagaaagtggttgagggatagtgagagaggttggagaagagagtaagaagaggccgcctacctgatttaaaattggtgagatgttccttgggctggtgggtctgaggacctgaggtcgtaggtggatctttttcacggagcaaagaacaggaggacaggggattgatctcccaagggaggtcccgcgatccgagtcatggcaccaaatttcatgcgcgtccatgtgaagagaccaccaaacaggctttgtgtgagcaacatggctgtttatttcacctggatgcaggcgggctgagtccgaaaagagagtcagcaaatggtgtggtggattatcattagttcttataggttttgggataggcggtgaagttaagagcaatgttttgcgggcagggatggatctcacaaagtacattctcaagggtggggagaattacgaagaaccttcttaagggtgggggagattacaaagtacattgatcagttagggtggggcagaaacaaatcacaatgctggaatgtcatcaggtaaggctatttttacatcttttgtggatcttcagttacttcaggccatctggatgtatacgtgcaagtcataggggatgccatggcttggcttgggctcagaggcctgacaatagggactttacataggattaggatggattagaacagaagttctagaagcaggtgagaaggagtggagggtagggataaggaaggaagggatttaagaagacattgagaaggaaaggaccacaagactgagaggaatggatgaggagagagggaagaaggagtcaaaaaagaggtgggggaataggggacttttggaaggtgcagcatttataggaatagtgacttaatagaccacatgcagtggctcattcctgtggtcccagctactcaggaggctgaggtgggagcatcgcctgagcccaggagttggaggctacagtgagccatgatcgcctactgcagcccggggcaatagagtgagacccccatctctaaaaaaagaacaagcacacgcctgtgggtggtcccagctactcaggaggttgaggtgggaggatcacttgagcctgggaggcagagactgcagtgagctgtaagagccactgcactccaacctgggtgacagagtgagaccccgtctcaaacaacaaaaaagaaaaaaaaaaacgaaagacgccaggcactgggactcacacctgtaatcctagcaccttgggagttaaaggcaggcagattgcttgagcctaggagttcaagaccagcctgagcaacatggcaaaattctgtctctaccaaaagtacaaaaaattagctaggtgtgatgtgagtgtctgtggtcccagctaggctgaggtagaagaatcatctgagcctgggaagttgaggctacagtgaagccatgatcgcaccactgcactcttgcctgagtgacagagtgagaccctgtctcaaaaaagaaaaaaaaaggaagaagaaaaagaaatggggaagtcaggaaaaagaagtgatgcttttttttttttttttttttttgagaaggagtctcactctagtcgcccaggctagagtgcagtggcacaatctcagctcattgcaacctctgccgcctgggttaaagcgattctcctgcctcagcctcccaagtagctgggattacaggcgcctgccacttcgcctggctaatttttgtagttttagtagagacagggtttcactatcttagccaggctggtcttgaactcctgacctcgcgatccacccacctcagcctctcaaaatgctgggattgcgggtgtgagccaccgtgcctgggccatacatttgtttttacactcatttctgtaccaaattagcccaattatctactgtcttgttttttgaactgattttttttttttttcatgtattgaaccaggagagcacagcctccttgagggtaaaatctgtgtctggaactttttctgtagtccctccagggtctggcatgctgacatgctgtttacttcattgtctgcgggtgcttaacaaagacttggtgattgactaagtttgtgtttccattcaggaccctagtgaaggttgacctttattccctttccagcccatgttcttgcttctgcttgtttgtaagtcatttgttacgtagatttttctttttggagatggagcctcactctgtggcccaggctggagtgcaatggcctgatctcagctcactgcagcctctgcctcctgggttcaagtggttctcctgccttagcctcctgagtagctgggatcacaggtgcgcggaaccatgcccagctaattttgtgtttttagtagagatggggtttcaccatgttggtcaggctggtctcgaactcctaacctcacgcaggtgatccgcctgcctcggcctcccaaagtgctgggattacaggcgtgagccaccgtgcccagaccatatgtatataattttttttttttttttttttggagatggagtctcactctgttgcccaggctggagtgcagtggtacaatcatggctcactgcaacctctgcctcctgggttcaagcagttctccagcctcagccttcaagtagctgagattacaggtgtgtgctaccgtgcctagctaattttagtatttttagtagagacaggatttcaccatgttgaacaggctggtcttgaactcctgacctcaaatgatccacctgccttggcctcccaaagtgctgagattacgggcgtgagccaccgcatccagcctgctatgtagatcttgttttctctggaatgtttgagccgtgctggaatggggtacccaatgctgctgtttccatccccacatgacgttttaagtcccacgagagtaggctagcgatggagtgaagctgaaaaatgaaagcaggaaatccagagacacagaaacagatgaggctttcaacagagactcgaaaatagacagaaaccatgagtcagagcagagcccggaggggcggttcgggaaggcaaggtctataggggaagctcgggtgtcacctctatgccaggtgaaggaaatgttgagtgggtgggaggctgtgtgcatctgctggggaggcagtaggcagatggaaagatcaagtcacccagaattatccccagaggttccttcccgttcctgtgggcgggtgagctctgctttctgagctgcccagagagctggaggagatagacatggaactgaccattgcagaaactagggctttttgtgcccgtgagtaggcaaagagctccctgtggatttgccataaaaaggtctatcaaggtggaagaaagtgagattctagagaaattaatacaagtgaaaagtgggcaggagtgttcttggaagtagaaatgctgttggaagtctaatagacttgggaagaagataacgtatggtgaataccagttgcttcgggggttggggggatccacattttactctgtactcagaagatgcttttccccgtgcaaaaagtgaaagtgagtgggccagtttttcttctgtcacaaggtgtatgactgttcccaaaataatagccctgggggatggggattgcttctcagaccattcaatttttgtaccctgtagacttttggtgttatgtgagaactttaagcacctgataggaattagtaacagagctacgctaatgcctgaggaaatttcagacaattggtgggagagacttggcatttggaatgtgatagctggtaggctaccatacagtaatgcaggattgccagacatttctttccaaatggctacccttgattacatttaactcccctcctttcaagctccagattttgaaggacctgttaattctctttcaagattgaagacagacaccttctttttcttctaaagaggaacctaggcggggtgcggtggctcccgcctgtaatcccagcactttgggaggccagggctggtcttgacctccttacctgaggtcaggaggcctggccaccatggcgaaaccccatctctactaaaaatacaaaaagtagccaggcatagtggcgcatgcctataatcccagctactcgggaggctgaggcaggagaatagctcgaacctgggaggtggaggttgcagtgagcctagatcgcgccactgcactccagcctgggtgacacagcgagactcaatctcaaaataaataaataaataaatatgaacctaaaccatcagaatcttccccttgcagccacaacagaaacactgccggggaggccgagccccgacctgggaagcagggtgatacactgggtgccacgggccttccctctgcctggcagctgtcgctactcagatccctgcagccctgttgccagtgaaggagctggagtctctgttatgatgtgttcatccagctggtgagtttttttttttttgttttgttttttttgtttttgtttttgttttttttttagacagagttttcacttgttgcccaggctggagtgcaatggcacgatctcggctcaaggcaacctctgcctcccaggttcaagcgattttcctgcctcagcctcctgagtagctgggactacaggcatgtgccaccatgcccagctaattctgtatttttagtagtgatggggtttctccatgttggtcaggctggtcttgaactcctgacctcaggtgatccgcctgcctcggcctcccaaagtgttgggattacaggcgtgagccactgcacccggcccagctggtgattttttttttttttttttttttttttgagacggagtctcgctgtcgcccaggctggaatgcagtggtgcgatctcagctcactgcagactccaccccccgggttcgcgccattctcctgcctcagcctaccgagtagctgggactacaggcgcccgccaccttgcccagctaactttttgtatttttagtagagagggggtttcaccgtgttaaccaggatggtctcgatctcctgacctcgtgatccgcccgcctcggcctcccaaagtgctgggattacaggcgtgagccaccacgcccggccccgtagctggtgatttttaaagttaacaaaatacaattatgagaaatcagaattcagaaagtaatgacagagagggccttgtcgggaggggctctgacaccctgctttgggccctcatagagatctggggagggagcaggagtgttttaaggggtgtgcgtcttcagccttccatttgtcttcagaacccaaagccctaaatttagcaaacagctggagagtgctttctgaagagggaggctctggacctgaatcagagatgggaacccatgtaaccaccctcagctgggctcttcagtgtaatcacaggtttgggaaggtaactgaggagagcccatgccaaatatcagaactttgcatttggtgcctggattttaaatcccaggggccctctgagaactctagtacttgtgtttgtgcttgaccatggaaggccattagagcctgggggtgctagatactcaagctgcaatcccaggcaagttgcacggtgaccagggcttagtaggggctaagtaaatgttgttggcttgacaatgatgagcattatgtgcaatttcaaaaacacttaaagcattatggaaggctaggtctggaaaaaccttttgacaggtatgtggaaaatattcgctgggcgcggtgactcacgcctgtaatcccagcactttgggaggccaaggcgggccgatcacctgaggtcgggagtttgagaccagcctgaccaacatggagaaaccccgtctctaccaaaaatacaaaattagttgggcatggtggtatgcacctgtagtcccagctacttgggaggctgaggcaggagaatcacttgaacccgggaggcagaggctgcaatgagccgagatcgtgccactgtactacagcctgggcaacaagagcgagactccatgtcaaaaaaaaaaaaaaaatttgtggttacaaatatgtatttttttatctagttcagtctgatttcagtttccccaaaaacccttcttgaccatctccacttgcttaacactgagctcatttttatatagctggagttccctttattatctttacatgtttcatgtaggcatttttttgggaatattttaattatttgtgtttgtccttttgaccttgattccactctaagcttcatgagacagaatttgttttctcttttatttgtgactttcaaaatactggacagaaagcagtatttgtatttgctctccgactgaattttttttttttctgtctccttgctactgactgttctactgaggcttctctattagagagtaaagttgaaagcaaactcttagtgcttaaaacttgcgaagaaaaccttccattgcatcctcattgctcttcctaacacttgtcctcttctttgttgtgttgcaagataaagccaccaatccttccaaccgccaggaggactgggaatacataattggcttctgtgatcagatcaacaaggagctggaagggtgagtctcagcactgtgggggcagctgagagggagcggactgggaaggggaacaaccatggccaaggagggccagccaggtagccccaggcttagtgcactggagtgtgttctgcttgtcccccaggccacagatcgccgtccgactgctggcccacaagatccagtccccacaggaatgggaggcgctccaggccctgacggtaggtccttcactctccggaggtggaaaccgcagcccttcacctgcccacgccattcctcgtgtccccatagcggttcttagggctcctgccaaaagccaacagaaagtccttgatacagactagatagatctcgaatctgttcagccagctgttccacaaatctgtgtgcattgtgccaggccctgaggcctcagaggtgactgcagtgccgtccctgccagcatggccacatggttagtgtgtgaggcagaggggctaaggaaagcagcccagagtcagggccctgagccccatgtggcgcaagagaaggcttggtgaagagatgctgacagggctgtgttgatagttcagagctggccagctgaagaaaagaggggtcggtccagttcattctgtagttaaacaatgccagtcactagcgaaggtgtcgcactgatggctgaggcccctagggcagatcctggtgtctgttcagactgagggaatttaaggtgtggaatggtgcctggccctcagtgcctccacatgctccgaaaacaaagagcagccgagatctgaggaatccggggctctagcctgactgcattcaggtcctggaaagcgaaaagaggaaatatcatctggttcacatgcacccctcagtcatatttgctgtagaacgaattccttaaaacagtgattctcagcagggcacggtggcttgtacctatagtcccagcaccctgtggggcctaggccgggaggatcgcttaagggaattcaagaccagcctaggcaacgtagtgagacattgtctctacaaaaaataaaaaaatcagccaggcacggtggcacacacctgtggtcccagctcctcgggaggctgaggttgaaggatggcttgagcctgggaagttgaggcgaaagtgagtggtgatcacaccgttgcactctagcctgaccaacatagcgagattctgtgtcaaaaaacaaaaaaaaaacgtaacaaaacccagtgattctcaacagggccctccagggaacatttggcagtgtctggaaacatttttagttgtcacacatcggggtgggggtcctcctggcatcaagtaggcagaggccagggatgctgttcgacaccctataaagtgcagagtggccccccacaacgaagaatgaccagcccaaaatgtcagccaggcctcacctgagaaaccttgctttaaaatgcagaagccaagaaagagagcctggacagtgcactcccccttagaaaccgcagtgccagggaccacaggcagcacaggaaagccaaagcgtgagttagggagataagcggagggaggagaaatatcctgtcatctttctcacagataataggatttaaacatccctcccattccctgcacaattgttggtgagcttgtggaaaaaacccaggacaccaagtcagagaaactttgtccctggacctcacctccctcattgtaaaacacgaggccagaatctttaaggaaggcaccttccaggactggcatccaggccttcttggggtcggggtctcggggtttcttgctttagtccctgcccagcttccccagcagaggtttgcagttggagggacatggtctgtgagtgatctcgttgcttaattacactgtccccgggcagtgcacactgcttttcgtgatgagctccttcctgtgggcgtgtttattcagtactctctgggtgccagggatcttgccagtgccaggttccagccccgagcacgccctcactgagcgcctctcctctgtgcggctacaggtgctggaggcatgcatgaagaactgtgggaggagatttcataacgaagtggggaagttccgctttttgaatgagttaatcaaagtcgtctctccaaaggtcagtcagcggcagattcctcgcttttagggacttcttttgtgttcattcccatctcccatcatactggctttcactgcccatccaacatctccagggagctgagattatttgtgtcttgtccttagagagctaggccctggaggtaacgggatgaccaaacaggccacagggaccggcagctttttctgaagcgccctcagcccaaatctgacaggtgatgtggtagtggctgtgtgtttgtccagggtgagggcccatgtagtgtgggactctaggcacctggcacatggcagttgtgggttttgtgggttttcttggcctgtgtcacgtggatacggggagctggcctccgtcattgctccgatgctcagctggccgtgttctgttgcacgctggtgtggcgcagctctgggcccccacttaaagcagagggaatactttaccatgctaaagacattctcatggacacccccaagataaaatgcagttgtgtttctggcaacttgtgcgtgaaaatgcactttcctcagaactcaaaatatccacccaaccatggcctgcaccacatgggcatcagggtcacaaggaagcctctctgtcttgatgtccccaaggtagtaaggaaaggcagagagcaggggtgagcaccgagggcatggtctctggtgtcagactcaggtttccatccggcccttacaccctgggcaagttagatgatcccaggcggcaaatggggacgccacccctactgacgtggctgctgtgcagatgagtaaggtcatgaatacacttacaggacacttcctggacaggaggtgatgacctcctggccccctgcctatccacagactgtatccagatggacacagccacaccacagggagtcgttcccctccccacgctgtctcacacacacttggacacctgcagattttgagtaggaccatagctgctgagcagccacgccattgctgtggagggagccttacactttctctgcctccgaactgcacttactaggtcctcattttcttttgccatgtagtacctgggggacagggtgtctgagaaagtgaagaccaaggttattgagctgctgtacagctggaccatggccctgccagaagaagcaaagatcaaagacgcctaccacatgctgaagagacagggtacgtgtctgcctgcccgcagcctccaggcagccctcgaaggctggcccaggcaaggagagaagggaaggtttgggatccccagagtccctcctgaagagaacagcatttgtccccaggcaaggctgagtcggagttggatgggataaggtgtagcagcctgccctccaccctgctaccctttgcaggtcttgatcacagggacgtggcccttggtgtatgaggaggggtgacaaggcaaccacagcctgagtgcacgtgctgccatgtcccctttcaggcatagtgcagtctgacccaccaattcctgtggataggacgctgatcccctctccaccacctcgtcccaaaaaccctgtttttgatgatgaggagaagtccaaggtaaaggacaccctgggcctgggattttctcatacgagagtgggtggcagcaggggaatgtggtttgcactgtgctgcggggagcctctggggtttccctggggtacgggtgctgcctcttcccttcacctctgatttcctcctctctcagcttttagccaagctgctgaaaagcaaaaacccagatgacctgcaggaggccaacaagctcatcaagtccatggtgaaggaagtgagtgggccccggtccttcaggcacggggtggaggagcccatggccacacagcagaagccgctttgccccggacacgggcctgttttgttctcccctgctgccagctgccctacctgtgccccggtggctgagagtgggaggaggagcacaatagcttccgcgggagcacggaagagaggagtgggttgggagcagtgttgtgaaagcagaagtatagactgggccccaggcaccccacactgaaaggagcttccgagcgtctgtacttgtgttgtggggtaaggtgtgacctggtggaagtggaaagacagtcaagtgacgctctctttctcttgaacttcttcactggggcaggacgaggcacggatccagaaggtgaccaagcgtctgcacacgttagaggaagttaacaacaacgtgagactgctcagtgagatgctgcttcattacagccaggaggactcttcggacggggacagagagctgatgaaggtgggaccgccgacggcaaaggctgcctcccggggctgcgctgcccttcaggagctcagccagcatttgctgagcacgtgccttgtcagagacacgggctgtgcacttggcagtgtattcatgaccttactcatctgcacagcagccacgtcagtagagggtggcgtccccatttgcctcctgggatcagctgacttgtccagggtgtaagggccagatggaaacctgagtctgactccagagaccacactctcggtgctcacccctgctctctccctttccttactaccttggggacatcaagacagagaggcttccttgtaaccctgatgcccatgtggtgcaggccatggttgggtggatattttgagttctgaggaacatgccagcctggaaggcaggaggggactgacttcccctgacccatcctggtgactgctacctagacaaacatcctgggtgatgtggtgtggtggtggtggctggtggcaagaagacgtgcgctgtgatcccagctttgctggtaattgaccgtggcaattggcatatcccggtcattttctgggcatgaaccctgaatgaatcagatgatctctaagggcctttgtggtttgatttttatgtccgagtctctttcaggagctgtttgatcagtgtgagaacaagaggcggactttatttaaactcgccagtgagactgaggacaatgataacagtttgggtgagtgaaagagcgacggtcagggataagccaggcatttggatatgtgggtgggaactgtcacaacaggagtgagaagtctctctttcctgctccaggggacatcctgcaagccagtgacaacctctcccgggtcatcaactcttacaaaacaattattgaagggcaggtcatcaatggcgaggtggctaccttaaccctgcctgactcggaaggtgagatgctctggtccccaactctaggctcctccagaccagcctcaggcccctatcatgaagctgcgggtgtaggctggccagcgtggtggtgttgcacaaggcccaagggagttctttgccattccaagcaatcctccggcttcccggaggcctggagatgtgggtaggaatttccccacctgctttctcgggcttgctttgcagcatcccctggcagagatgccgttggattaggccagaggctgtagcagtgacctctgtgcctagggtgctgcctcctgccacacagccactagaagacccctaattattcctgttctgctctgttgacccatccaggaaacagtcagtgcagtaaccaaggcacgctcatcgaccttgcggagctggacacgaccaacagtttgtcctccgtgttggccccagcacctactccaccctcctcaggcatcccaatcctccctccaccaccccaggcctcaggacctccacggagccgctcctctagccaggccgaggccaccctggggcccagcagcacaagcaacgccctctcctggctggacgaggagctactctgcttgggtgcggcccacagggggcgtcaggggcatcccctgacagggctctgggaggaagggtgtgtggaattaggagccctgagcggggccccagtgtgactgttggggtgggcaaagaaccctgagttggaggtactcagtgaagttcagcgaccctgagggccccagggccatcctcccggtggactctgcctcctgccctgcaccccgccccacaggccccccgcttctgcatcatggactggagcgctccattcccctctggaggctgcctgcagaacagcttctcccggcgccttcacccattgatgtcacttgtcacctgacccctcctcaggcaaggcggggctagggctgcctagctcagagcctcttctcatcctgttttcttctctattgtcaggcctcgccgacccagcccctaatgttcctcccaaagagtcagctgggaacagccagtggcacctgctccaggtaggggcacaggatcggtgacagcactactgtgccaaggacctccactttccagcgtcatgtctcctgggctgcagttagctgtccttccctccagagcgtgccagctgcagcggggaacaatgagtgcctccggggctgtcttccgtgcagtccttggagggctgcgccccgttccagcggcaggccctccccacccgccctcggctcaccaccctttctgttgttcatagagggaacagtccgacctggacttcttcagccccaggccggggaccgctgcctgtggcgcctccgatgctcctctgctccagccctcagccccctcctcaagcagctcccaagctccactgccgcctcccttcccagctcctgtggtcccagccagtgttcctgcccccagtgcgggctcctccttgttttctactggagtggccccagccttggccccaaaagttgagcccgcagtccctgggcaccatggcttggcgttgggcaacagcgcgctgcaccacctggatgccctcgatcagcttctagaagaggccaaagtgtaatgagtgggaggagatgtggggttgctgagggttgggcctgaatgtgtcagaaccagagctaactttgaaggggtgggggtgccttgtagtcccatcagtcaggctggaaggcaaggggtgggcctgggtaagagcatggtcaggggccttgggtgagagtcctgcagctctggctggctctctgacgtgctttccatccttcccacctcccaggacctcgggcttggtgaaacccactacctcccctctcatccccaccaccaccccagccaggcccctcctgcccttctccacggggcccggcagcccgctcttccagccactgagtttccagtcccagggcagccccccgaaggggcctgagctctccctggccagcatccacgtgcccctggaatcgatcaagcctagtaggtgttggaggattgaggtgggtggggcggtggggcctatagccacggagctgtaggacatgcgacagggatggatccaggcactctttgcagggggtcccttaaagccaggcaggcctccctgcctgcattctcagtcttaagctcctcactgagcgcctctcccagattccgttaggaagcactggactcatcatgaccacggagtagcccttttctcctcaccgccggggctctgttgggtgtctctggtgctgctcctcccacactcacgtcacgttcttacaggcagtgcccttcctgtgacagcctacgataaaaacggcttccgcatcctcttccactttgccaaggagtgtcccccaggacgacctgacgtgctggtggtggtggtgtccatgctgaacacggctcccttacctgtcaagagcatcgtgctgcaggctgcagtgcccaaggtaccagtgtctccctggggccaaaacggccttatcttgaccctgttgtgtagaggcctttgcagccagcaggtggcagtgtgtgtgtgcactgcaggttccatctgggggcacctaccagttctcttcaaaggagtttctctctctttagtcaatgaaagtgaagttgcagccaccttctgggacagaactctctccatttagccccatccagccacctgcagccatcacccaggtcatgttgctggccaatccactgaaggtgagcagcaaagaacccaggggtcccagcctgaggccccagctgccccagattaggacgtcaggcccaccacctcccagctggaagtgttttgactgtaggattgacacatccctttgctgccttaggttaagtgtctgagcatggttgggggttgcggggaaaagggaccattcctctagcacagagagggtagcagaatagagggcgtcctgccaaggggccgcctgggctggatctcacttgctgccctctgtcacaggagaaggtgcggcttcggtataagctgaccttcgccctgggggagcagctgagcacagaggtgggcgaggtggaccagttccctcctgtggaacagtgggggaacctatgaccccagaggacgctgtgatctccaccttgaagccaggcaggctgccctgagacgaggagggctctggtcccgtcactctccatgccctgacaacagtgcttgtagctttgatgtggaacaggggccctgggcatttctgctgagaaccaaactgctgctgtgataacctctcctttggcccctaaaaggacctgtttttatctacctgtgtgacttgaagtggccatatgctgtcaggggtgcggagtggcccctgacttcactgctgtcccgggaacatggacccccaggcttggcgtaggtgtttgcttccttctactggcattcactgaagccactggggtggggggtggggggtgggagtctctaaagagagactgtcatgggtcattccccacaagagccacatcctcacacctgacagatgcacggcccaaggggctgcagccctgttgcaattccatgcttcccccgccaaccagctcctgctgccatccccagggaggtggcccaggaaggtgcctggcccagaataaggaactggcatactgcaaagtccccagccctgcctctggtggacagcatcgtcctggaatggccacggagtgatgagttgtgtgcttgtccctggcagtggcaggctgtgtcctatggacatcttggcaggacatggaatttggcctcatgacaggcccaactagggataggaaggaaaatgaagagagccagtatttccccttctccagaagcaggtactcagctttctgggaaaagcgtgcctccagccgtggggacaggccatcctactgactacctcttgcttggcatgaaataaactgctatcctccccttggaatctaccgccactctacatcctactgctttggcctccctctcctctcaccagatggcatgtggtgtggcacctgtggctggacacaggaggcctcaggatcacaaatgttacactagacatatgtcctaatgtgctgcccagaaacctcaactgttccccagctactgaggggcactgtcagcgagatgttgggtctggaggtgatgagatcgggccacacttgagctgagtcaccagaccctattgcttcaacagtgcttggcccccgccagcttgtcccagccactctagctgctggatgtgatcctgggacatgtactccaagcctccgtcacaaaaaaaaaatcaccagctgccatagacacgggggaagcttgcggagcccaggtgaacaagctcagcaatcggacatctctggggaaaggaaggtggcacagaccatgttccctggttcctccctgccccttgccaggcttccttattccttactatgggaagaggtcatatcccttccctgcccctcgctgtctttagcaagcaggtttcactgcttcattagaagaggacaagtcaaaagtgaatcatttttcactacttaaggaataaatccaagagctttccagagactggctgctgcagccctgggaatgtctgtggaattactatgtggaaatggaactttgtgttatgctctagacattacagttatttgagtgttactcgttactgttgaggtcagtgcttcgtggcaaatggctgtactggatatcccagctctgctgcccttgttttgctgcatgtt

SEQ ID NO: 12234 - DNA, 3670 bp, Homo sapiens
agactctcgcgagttttgaagccgcggggccgggcggctgcaatatggcggaggcggaaggggaaagcctggagtcctggctcaataaagccaccaatccttccaaccgccaggaggactgggaatacataattggcttctgtgatcagatcaacaaggagctggaagggccacagatcgccgtccgactgctggcccacaagatccagtccccacaggaatgggaggcgctccaggccctgacggtgctggaggcatgcatgaagaactgtgggaggagatttcataacgaagtggggaagttccgctttttgaatgagttaatcaaagtcgtctctccaaagtacctgggggacagggtgtctgagaaagtgaagaccaaggttattgagctgctgtacagctggaccatggccctgccagaagaagcaaagatcaaagacgcctaccacatgctgaagagacagggcatagtgcagtctgacccaccaattcctgtggataggacgctgatcccctctccaccacctcgtcccaaaaaccctgtttttgatgatgaggagaagtccaagcttttagccaagctgctgaaaagcaaaaacccagatgacctgcaggaggccaacaagctcatcaagtccatggtgaaggaagacgaggcacggatccagaaggtgaccaagcgtctgcacacgttagaggaagttaacaacaacgtgagactgctcagtgagatgctgcttcattacagccaggaggactcttcggacggggacagagagctgatgaaggagctgtttgatcagtgtgagaacaagaggcggactttatttaaactcgccagtgagactgaggacaatgataacagtttgggggacatcctgcaagccagtgacaacctctcccgggtcatcaactcttacaaaacaattattgaagggcaggtcatcaatggcgaggtggctaccttaaccctgcctgactcggaaggaaacagtcagtgcagtaaccaaggcacgctcatcgaccttgcggagctggacacgaccaacagtttgtcctccgtgttggccccagcacctactccaccctcctcaggcatcccaatcctccctccaccaccccaggcctcaggacctccacggagccgctcctctagccaggccgaggccaccctggggcccagcagcacaagcaacgccctctcctggctggacgaggagctactctgcttgggcctcgccgacccagcccctaatgttcctcccaaagagtcagctgggaacagccagtggcacctgctccagagggaacagtccgacctggacttcttcagccccaggccggggaccgctgcctgtggcgcctccgatgctcctctgctccagccctcagccccctcctcaagcagctcccaagctccactgccgcctcccttcccagctcctgtggtcccagccagtgttcctgcccccagtgcgggctcctccttgttttctactggagtggccccagccttggccccaaaagttgagcccgcagtccctgggcaccatggcttggcgttgggcaacagcgcgctgcaccacctggatgccctcgatcagcttctagaagaggccaaagtgacctcgggcttggtgaaacccactacctcccctctcatccccaccaccaccccagccaggcccctcctgcccttctccacggggcccggcagcccgctcttccagccactgagtttccagtcccagggcagccccccgaaggggcctgagctctccctggccagcatccacgtgcccctggaatcgatcaagcctagcagtgcccttcctgtgacagcctacgataaaaacggcttccgcatcctcttccactttgccaaggagtgtcccccaggacgacctgacgtgctggtggtggtggtgtccatgctgaacacggctcccttacctgtcaagagcatcgtgctgcaggctgcagtgcccaagtcaatgaaagtgaagttgcagccaccttctgggacagaactctctccatttagccccatccagccacctgcagccatcacccaggtcatgttgctggccaatccactgaaggagaaggtgcggcttcggtataagctgaccttcgccctgggggagcagctgagcacagaggtgggcgaggtggaccagttccctcctgtggaacagtgggggaacctatgaccccagaggacgctgtgatctccaccttgaagccaggcaggctgccctgagacgaggagggctctggtcccgtcactctccatgccctgacaacagtgcttgtagctttgatgtggaacaggggccctgggcatttctgctgagaaccaaactgctgctgtgataacctctcctttggcccctaaaaggacctgtttttatctacctgtgtgacttgaagtggccatatgctgtcaggggtgcggagtggcccctgacttcactgctgtcccgggaacatggacccccaggcttggcggaggtggcccaggaaggtgcctggcccagaataaggaactggcatactgcaaagtccccagccctgcctctggtggacagcatcgtcctggaatggccacggagtgatgagttgtgtgcttgtccctggcagtggcaggctgtgtcctatggacatcttggcaggacatggaatttggcctcatgacaggcccaactagggataggaaggaaaatgaagagagccagtatttccccttctccagaagcaggtactcagctttctgggaaaagcgtgcctccagccgtggggacaggccatcctactgactacctcttgcttggcatgaaataaactgctatcctccccttggaatctaccgccactctacatcctactgctttggcctccctctcctctcaccagatggcatgtggtgtggcacctgtggctggacacaggaggcctcaggatcacaaatgttacactagacatatgtcctaatgtgctgcccagaaacctcaactgttccccagctactgaggggcactgtcagcgagatgttgggtctggaggtgatgagatcgggccacacttgagctgagtcaccagaccctattgcttcaacagtgcttggcccccgccagcttgtcccagccactctagctgctggatgtgatcctgggacatgtactccaagcctccgtcacaaaaaaaaaatcaccagctgccatagacacgggggaagcttgcggagcccaggtgaacaagctcagcaatcggacatctctggggaaaggaaggtggcacagaccatgttccctggttcctccctgccccttgccaggcttccttattccttactatgggaagaggtcatatcccttccctgcccctcgctgtctttagcaagcaggtttcactgcttcattagaagaggacaagtcaaaagtgaatcatttttcactacttaaggaataaatccaagagctttccagagactggctgctgcagccctgggaatgtctgtggaattactatgtggaaatggaactttgtgttatgctctagacattacagttatttgagtgttactcgttactgttgaggtcagtgcttcgtggcaaatggctgtactggatatcccagctctgctgcccttgttttgctgcatgtt

SEQ ID NO: 12235 - DNA, 2363 bp, Homo sapiens
gcctggattctcccagagattgcctggaacaccagctcgggtcctcgcacaccatcctgcgggtgcagcccagaactgtcttctgaggaagaggtgctctcctgggcccccactgtccccaggcctcagcaaggcaagtgaggtgctgccgtcatccaggctggacagttcagtgatttgcctgaggccccacagcagagttcaactggagacagagaaaccagctagaggcagagggaggtaacacggagtcccccagaaaggtctgggctgcgcgtgcttcaggtaacctcccttgaccttcaggagaacgagaaggctgcctgatcagagagtccctgaagaagattctgtggctacaggcttcagcagagtgtgagggagaccccggttatttcctcagctatttccaccaaatcctcctgtctttcgtggccaacaccccaggcaaggcttggggcccccgtctgctgctggacgcagagccatgaagaagaagttagtggtgctgggcctgctggccgtggtcctggtgctggtcattgtcggcctctgtctctggctgccctcagcctccaaggaacctgacaaccatgtgtacaccagggctgccgtggccgcggatgccaagcagtgctcgaagattgggagggatgcactgcgggacggtggctctgcggtggatgcagccattgcagccctgttgtgtgtggggctcatgaatgcccacagcatgggcatcgggggtggcctcttcctcaccatctacaacagcaccacacgaaaagctgaggtcatcaacgcccgcgaggtggcccccaggctggcctttgccaccatgttcaacagctcggagcagtcccagaagggggggctgtcggtggcggtgcctggggagatccgaggctatgagctggcacaccagcggcatgggcggctgccctgggctcgcctcttccagcccagcatccagctggcccgccagggcttccccgtgggcaagggcttggcggcagccctggaaaacaagcggaccgtcatcgagcagcagcctgtcttgtgtgaggtgttctgccgggatagaaaggtgcttcgggagggggagagactgaccctgccgcagctggctgacacctacgagacgctggccatcgagggtgcccaggccttctacaacggcagcctcacggcccagattgtgaaggacatccaggcggccgggggcattgtgacagctgaggacctgaacaactaccgtgctgagctgatcgagcacccgctgaacatcagcctgggagacgtggtgctgtacatgcccagtgcgccgctcagcgggcccgtgctggccctcatcctcaacatcctcaaagggtacaacttctcccgggagagcgtggagagccccgagcagaagggcctgacgtaccaccgcatcgtagaggctttccggtttgcctacgccaagaggaccctgcttggggaccccaagtttgtggatgtgactgaggtggtccgcaacatgacctccgagttcttcgctgcccagctccgggcccagatctctgacgacaccactcacccgatctcctactacaagcccgagttctacacgccggatgacgggggcactgctcacctgtctgtcgtcgcagaggacggcagtgctgtgtccgccaccagcaccatcaacctctactttggctccaaggtccgctccccggtcagcgggatcctgttcaataatgaaatggacgacttcagctctcccagcatcaccaacgagtttggggtacccccctcacctgccaatttcatccagccagggaagcagccgctctcgtccatgtgcccgacgatcatggtgggccaggacggccaggtccggatggtggtgggagctgctgggggcacacagatcaccacggccactgcactggccatcatctacaacctctggttcggctatgacgtgaagcgggccgtggaggagccccggctgcacaaccagcttctgcccaacgtcacgacagtggagagaaacattgaccaggcagtgactgcagccctggagacccggcaccatcacacccagatcgcgtccaccttcatcgctgtggtgcaagccatcgtccgcacggctggtggctgggcagctgcctcggactccaggaaaggcggggagcctgccggctactgagtgctccaggaggacaaggctgacaagcaatccagggacaagatactcaccaggaccaggaaggggactctgggggaccggcttcccctgtgagcagcagagcagcacaataaatgaggccactgtgccaggctccaggtggcctccctggcctgtctccccactc

SEQ ID NO: 12236 - DNA, 25786 bp, Homo sapiens
cagaccgggcgtcgggtgagcccagaagtgagagcagttggctgtgccccagtgctgtgtgacccagaggcgccgctcaccctctctgagctggtggacatcataggtggggaagctcaggtcagggcactcccatgagtgtctggaggcctgagtcccattctcagctctgccatatgcttgctgcgctctagaggagttcctcttcctctccaagcctcggtttatgtacccgtgcagtgggagtgagttgcacttcggggtgaagggggcaagacttgtgtgggcgcatcctgcagaaggatcccacaggtgggcagagccctgggttctttatccgactgggtctgggctgggggcctctgtttcttggctgatgagtttatgtgagtttgagtgaggtatgcgagtgggtgaaggagggctggggggagtcacctgacttgtgcgaagaagctcttgagagagccgtggcttcttggaattaagaggaaagagtgcagcatgaacagacaggccctggaggatctggcagccctgagtgggggcggggggtcagctctggagtagagccagagctgtgatggggttgggggaccctgtgtccttgggccatgcttgcctcgctcctgggttctgtttgtggctgtggattggggtggggcagggccggttgtgcgaggggtcattgcccaactccagggggcgcctgccacctctcagctatatatatagggatatatatagttctttcgacaggtttccagcaggtagtggttattaaatcttactgaaggggtgttttttctgattctcggctctgtgccgcaagggtggaaactgtgagagacagattccaactccacgtctgggtagtaagcatccagtccagggctgtaggcagtcctggggaagacgccagagatctgtgcattctcatatcgagggatagcgactccaggctgggggctggcagggtaaggggtgggtgggtcctgggcttacccgcaggtctgcagacttcctggggccagctgacctcgtaaaatcccttttgtctaagcttcagtttcctgcctgtgaatggggttggggctgtgctctggtttcacccttgtggctctggggttgtggtgacaaagccatcaagctgggttgaaggattaaccaggaaacttcagactggctgccgtgtctacctcttcctcatactcctctctctgctgcatcctgggaagctgctctgctcagcctaaatgaggctcagttgtgtgtgtgcgcacgtgcttgcacgtgtgttggaagtgggtgatactgacaccagagtctgtgtctctgggtgagtgaggcttgcacatttctcgggacagggaactcactaccttatgtgcccaggacaagagctgtggggtctggagaagacttctaggccagcccctgcagtccttcctcaggtgacatggcttccccagacccacttccccctaggtgccctctctgcattcagggggtagagggctgactgggacagaatgtgacacactcagcatgtgaggaaaagcctccttcattctgtaggccctacctctattaacatgtcctttgataaagtgcctcccctcctgtctcccctctctggaatcctcagctgctgccaggcttcagctgtgccccattgaaggcagctctgtctccctactttccccagcccagggttttccttttggggtcagctgcagggatctgggccatcctttgcccactcagactttctttctgcccacctgctgctgtgaatcctgtatgtcatatatatatataaaatatgtaatatattatatattatatgtaatatataatatataaagtatattatataatatgtattatattatatattatataatatgtaatatattatataatatataatatgtattatattatatattatataatatgtaatatattatataatatataatatgtattatattatatattatataatatgtattatattatatattatataatatgtattatatattatataatatgtattatatattatataatatgtattatatattatataatatgtattatatattatataatatgtattatatattatataatatgtattatatattatataatattataatatgtattatatattatataatattatataatatgtattatatattatataacaatatataatgtgtattatatataatataatattatataatgtgtattatatattatataatattatataatgtgtattatatattatataatattatataatgtgtattatatattatataatattatataatgtgtattatatatataatattatataatgtgtattatatatataatattatataatgtgtattatatatataatattatataatgtgtattatatatttaatattatataatgtgtattatatatttaatattatataatgtgtattatatattatataatattatataatgtgtattatatattatataatattatataatgtgtattatatattatataatatatgatgtgtattatatattatatattatatgatgtgtattatatattatataatatatgatgtgtattatatattatataatatatgatgtgtattatatattatataatattatatgatgtgtattatatattatatataatatataatattatatataatatattacatataatatatcatatattatatttatataatttatataatatatcatatattatatttatataatttatataatatatcatatattatatttatataatttatataatatatcatatattatatttatataatttatataatatatcatataaatatattatatatagtattatatatataaaattatactttaagttctagggtacatgtgcacaacgtacaggtttgttacatatgtatacatgtgccatgttggtgtgctgcacccattaacttgtcatttacattaggtatatctcctaatgctatccctccccgttcccctcaccccacaacaggccccagtgtgtgatgttccccttcctgtgtccaagtgttctcattgtttaattccaacctatgagtgagaacatgcatgtcttatatgctctcaggcagagaggaaactgctgagcaggccggggcaggggacagagccctgtggctctccactttagacccctcctggctgactgccatggaatgcagccacttagcagggccaaatcccctgatgttcctgttggctgtctagccttcagggacaggtcatgggaccttggttcctgccctgtcatcttcccagtcaccctgatcttcacggggaggaatagcctgggaaaggacttggtcacagcacctccaccctagggctattgaggatctcacagttgtgtgtctggtgggttctgtccagagcccatttgagagcagtggatgacaggacaggcctatgtgacccaggcaggcagcaatattgggtcagccttcatgtccccttctgtcagctggggcagcctggaagcatgattgtggggtaggtgttatgggcacggaatagacctcaggtggaggctgcaggggctctccggcaccgtagacacagcaggcccaggagcaggggagggagccatgactcagggagactctggcccatatccttggcagatgagggccacaggggaatgggcagcactgtccaaagtcccctgggctgggtccgcagctgttcctggctcagacttcttggtgggctggtcagaaacatgcagtaacttggggcagttaccaggtggccaagcctgcactgctgggctctgtgagcttgggccagctcaggccctctctgggccctgcctttctgggctgttcgggtggttccttgggcctggggtgctaatgtttctggatgggcagcagaaccagtctgcactcagggccccaggccatgttcccggaacacacctttagcattgacagcagcgtgtggtgaggccccttaggctgggttctggtctagtgccaggggcaccactactccaccgcctccagagccatctctgggacactggctgtgagttcagatgttctgaacagggacagggagagccagagggaaccagcctggggctcactggaggggctcgtgggcagacagcgccctttggagggaactgagtctgaaaggaaggaaaccctttccccggctcatagcacctgccatccagggccctcccagggctgcgtgaactttagtcacgtggtgacaggccgagtcaccatgccaagtcactgtgcgcctccttgctgctgtgacgtcagcttccccatcctcccagccaggctggacctccgtgagaggcctgcctgtcctgcaccctgtgcagatgcctcccactgtccgccggggctgctgggcacgccctggctggtctcttggactaggtaagctcatgagtcctctggccgctcctgctccttccctgcctctgctcctcctcggaggtggccacccccagatcccagtcccaattcggaggccccctgaggagtgctgcagggggccacaggcgtggctctgagccactctggagagtggcggggggcccagccagttctgtggctgggactttcccaggcagacaagtctgtctcttcctccccagcgggtgcagcccagaactgtcttctgaggaagaggtgctctcctgggcccccactgtccccaggcctcaggtaagcccatcagggtcccaaggaagggggtctgggtttgaggccaaccatggcagctgacctactttctagcctcagtttcccctagtgtgtgcagctctcacgctgtttgggtgagaaccaggcctctgggcttggacattctttcagtgagtttttagggtggagggatgggaaatggaagcccaggacctcagcagggtgtcttcctccgatccggggacatctgcctgtgggaggctgggcccaccctcccttgctgacctgccctgggaggaagggacagggcccagcactgcctactcccctccctgttcttcccagcagtctgagcctggctgggtgtcccctgctcctccagcagcctacttgggcctttgggtagacagattaacagacaggcgaggctgggtcatggttggaccaccccaggaccctgaccgggggctcagctcatgaccctgagcctgggagagatgaggccatgccctccagggcactcagcatgacccggcccagtggacgggactgggtagcttccttggtgcagggggctgtcatgctaggacggggtcactgaccaggccaggcccctgccccatgacttgtggtggaaatgtccttttgtttttgtttttttgcattttttttgagacggagtttcactcttgttgcccaggctggagtgcagtggtgcaatcttgcctcactgcaacctccacctcctgggttcaagcaattctcctgcctcagctcctgagtagctgggattacaggcacctgccaccatgcctggctaattttttgtatttttagtggagatgggggtttcaccatgttggccaggctgttctcaaactcttcacctcaggtgatccacctgcctctgcctcccaaagtgctgggattataggtgtgagccactgcacccggccatgtgatgggaatgttctgtgtccataatagatgctgcatattgctggcccagctcctgaggctctttggacctccaggaatcggtgtctctatcaggaacccttaaccctgacccggactcccagctgggacccggggtgtcggagtggcaagagcgctgtcaggcctggtgaagggtgtgagctgtccaacggggcagggaggaggcagggcctgttctgcagttggacagacagagccctctagctgctttctggaagactgaagggcaggtgatgttggagggagggagtgcaggcaggggctgtgagggagttcaggtcagaaacaggtggcgcctggattcaggctgtggtggtcacggtggggatgaggggctgctttggattgtgctggggatgtggggtggtgcgctgctgcatgactactgccaggtctctctgctcttagtgtctgcatccagggctgggagggggtcaaatgaatcacactatcggccccaggcccaccaagcctggggaggtggccacccttccatgatggcatttggatgttccctgtgtgtggggagggcacagggactccattcgtagaccacctctgggacagtgtgtctgcctctgaggtcagacgctctgcactgggacagggtggagtggagggaaatccagcttggggctcattggaggggcttgctggcagacaccgccctttgtgggaaactgactgtgggagaggggaaccccaacctctgtcaccacatccctcttccctgttgtcacacctgtcacctgctgccatagccatgagacttcccaagggtcactgctgccactcactgcacagcctggaagggagtccacaggggacatacagtgagcaagagacctgtgccactcaggcctcctgggggtgtccccagtgcagccatgatgataatcacagctaccattcaccaagccctgcccacagtctaacctactctattcacaacactcccagcagcaaggcaagtgaggtgctgccgtcatccaggctggacagttcagtgatttgcctgaggccccacagcaggtgagtggcaagtccagcatcagagcagggcaggctggcggtgccccctgagccccctttgccatgctgaccacatgcacatcctgggcttctgcaggaatgccctgtcccctacctgccctgctccgtgcaaaaccctctttgagctgtgcctgggagacatgctgagagaattcatggaaacaaatgtgttactgacagcctctttgcctccagagttcaactggagacagagaaaccagctagaggcagagggaggtaacacggagtcccccagaaaggtctgggctgcgcgtgcttcaggtaacctcccttgaccttcaggagaacgagaaggctgcctgatcagagagtccctgaagaagattctgtggctacaggcttcagcagagtgtgagggagaccccggttatttcctcagctatttccaccaaatcctcctgtctttcgtggccaacaccccaggcaaggcttggggcccccgtctgctgctggacggtaagtcctggccccgtggcagtgaatctgtggggcgctctgattgtgggcactatggaagctaaaccccatgctccaggtggggtggagggtcttcagaggactcctggacagtgccaggctctaggctggggtgggggacacaggagaaaccaggccaggcccatccctactggagcttctccctaagcagtggaggctcagccactgtaaggaggtaggcaaggccctgcagaaagaggggtgtggaaatctgggggctcccaggaagggccgctgctggagatggggttcttaccaggatgggctctgaagataagcagggaggatttgggagggcagagatgaggcccagagcttctggcagagggcatggcctgcgcaaaggtctgggggccggacagcctgcacgtattctgggaagcgggaaggagacacaggccttgtgtttctgaggcccgactttagactgtgccctgttggggaggggccagggaatgtctgaggctaggcctgaccctgcttcttaccccgtgggtgcagcagagccatgaagaagaagttagtggtgctgggcctgctggccgtggtcctggtgctggtcattgtcggcctctgtctctggctgccctcagcctccaaggaacctgacaaccatgtgtacaccagggctgccgtggccgcggatgccaagcagtgctcgaagattgggaggtgagcagggcagggcatgggacatgggccctgaaaactgggcaagtggacctgagcaataccttcacccccctgagactcagtttccccatgtgtaagcttcgcttggactctctcagtagcctttgggaaggggacagtgactccgagagcagggtgtgggtctctagagccaaacagggccccttttctcagttctaagagtctctgtctctttggaataaactgcactgttttgttgtttggttgttatttttacttatttcttcctatctatctatctatctatctatctatcatctatctatctatctatctatctatctatctatctatctatctatctatctatctactatctatctatctatttatttagagatggagttttgctctgttgccaggctggagtgcagtggtgcaatctcagttaactgcaacctccgcctcccaagttcaagtgattctcatgcctaagtctcccaagtagctgggattacaggcgtgcgccaccacgcccaacaaatttgtgtgtgtgtgtgtgtgtgtgtgtgtgtgtgtgtgtgtgtgtgtgtttccaagacagagtatcgctctgttacccaggctggagggcagtggtgcaatcttggcttactgcaacctccacctcccaggttcaagtgattctcctgcctcagcctccacagtagctgagactacaggcatgtgccaccatgcccagctaatttttgtatttttagtagagacagggttttgctatgttggccaggctggtcttgaactcctgaccttgtgatcctcccacctctgcctctcaaagtgctgggattaaggtgtgagccactgctcctggcctaattatggtgtttttagtagagatggggtttcaccatgttggtcaggctggtcttgaactcctgacctcaggtaatccacccacctgggcctcccaaagtgttgggattacaggtgtgagccaccacgcccggcttattctttttttttttttttttttttggttaggagacaatttctttctttctttttttttattttattttattattattatactttaagttttagggtacatgtgcacaatgtgcaggtttgttacatatgtacatatgtacacatgtgccatgttggtgtgctgcacccaccaactcatcatttagcattaggtatatctcccaatgccatccctcccccctccccccaaggaacactgttgcccaaacagggacatgaagggcttattcttttttgttgttgttttgttttgttttgttttttgagacggagtctcacgctgtctcccaggctggagtgcagtggcgcaatctcggctcgctgcaacctccgtctcctggattcaggtgattctcctgcctcagcctcctgagtagctgatattacaggcatccgccaccacgcccggctaatttttgtatttttagtagagacagggtttcaccataatggtctggctggtctcaaactcctgacctcaggtgatccgcctgccttggcctcccaaagtgctgggattacaggcatgagccaccatgcccggccgggcttattctttttttaaggtggagtcttactctgttacccaggctggagtataggggagcgatcatagcccactgcagcctcaaactcttgggtttaagtgatcttcccgcctcagcttcctaaagtgctgggattacaggtgtgagccatggtgcctggcttctactgttttattctattttagactcttatctcatgttatatacaaagatcagttccctcctaaagacttaaacagaaaaaatattatgtttttcatattttgagacagggtcttgttctgtcacccaggctggagtgcagtggcatgatcatagctcactgcagccttgaactcttgggcttaagcgatcctcccacctcagccccctgagtagctaggactacaggcgtgcatcacacctgactaattaaaaaagactgttttctagagatggtctcactctattgcccaggctggtcttgaactcctggcctcaagtgatcctccaccttggcctcccaaagtgctgagattacaggtgtaagccaccatctctagccgggaaaaaaaatgttattaataaagtatagcaatttccctttttgtcccagttataaaagtcatgtacatttgtttgcttgataaagaggaaactgtctgggcaaggtggtccacacctgtaatcccagcactttgggaggttgaggcgggcagaccacccgaggtcaggagttcgagaccagcctggccaacatggtgcactctgtccctactaaaaatataaaaagttagccgggcatggtggtgtgcgcctgtaatcccagctactcaggaggctgaggcaggggaatcacttgaacccaggaggcagaggttgcagtgagctaagatcatgccactgcactccagcctgggcaactgagtgaaactccctctcagaaaaaaaaaaagaaagaaaagaaaagaaaaagaggaaactgtaatcccagcactttgggaggttgaggcgataggattgctttagaccatgagttcgagaccagcttgggcaacatagaaagaccctatctctacaaaaaagacaaaaaattgccaggtgtggtggttcttacctgtagtcccagctactcagcagactgaagtgggaggattgcttgagcccaggaggtcaaagctgcattgagccaagactgtgccactgcacttcatcctgggtgacaaagtgagaccctgtctcataaaacaaaggctgggcacagtggctcatgcctgtaataccagcactttgggaggccaaggtgggtggatcacttgagcacaggagttcttgaccagcctgggcaacatgatgaaaccccatctctacaaaatacacaaacaaacaaaattggctgggcatggtggcatgtgcccatagtcccagctacttgggaggctgagatgggagggtcaattgagcccaggagactgaggctgcagtgatctgagatcacaccactgcactccagcctgagcaacaaagagagactttgtctcaaaaaaaaaaaaaaaaaaaaaaaaaaaaagaggccaaggcaggcggatcatgaggtcaagagatagagaccagcctggccaacatggtgaaaccccgtctctactaaaaatacaaaaattagctgggcgtggtggcatgcacctgtagtcccagctactcaggaggctgaggcaggagaatggcttgaacccgggaggcagaggttgcagtgagctgagatcgtgccactgcactccagcctggcaatagagcaagactccatctcaaaaaaaaaaaaaaaaagaaagaaagaaactaaaaacaaaaaccccaaaactcgaatggacttctcttccatcctcctttgggcaggtgggcagcagggtgtgtatgcggggccagggtggaagcctgcaggttctcatgcctttatgtgccacatggcagggatgcactgcgggacggtggctctgcggtggatgcagccattgcagccctgttgtgtgtggggctcatgaatgcccacagcatgggcatcgggggtggcctcttcctcaccatctacaacagcaccacacgtgagtgcctcgggagaggagagggagaggggcagggggtgtgggttgggccgaggcacagctgggcggtccccaggctcacgtggcataaagggtttgggtgggcgggcctgcctacctgcttctccttctaggaaaagctgaggtcatcaacgcccgcgaggtggcccccaggctggcctttgccaccatgttcaacagctcggagcagtcccagaagggtaagccatgcggcagacttggggcgtgggtgcagagctggctgagccaccgggaaggggccttgcccacaggagcctgctcccgtcagggttcaggggcagttctgtcaccccccatcccttcctgtccccatagcaccctcccacaatgagtggtcaggaccatcatcaccatggtaaagggccgggagcttctgttatttctgctaaggcctccggggccactctgtgcagcacatggagagaataattattatgctagcagacctcatggaccagggctcactggggcccacactctgctctgtgcttttcacccatgagcctctcacaaccctccctgctcctttgggctaggggatgctgtgtggattcccattttacagggtggggatgctgaggctcagacaggtcacgcaaatcagttgaggtcacacagctgggaggtggtgaagctaaaattgaacccaggctgtctataccgtgccttttcaacaggcatcccattcactcatttgttcatttgtggggatggtgctctagaatgtgaggtggagtctctcttttctaatctggtcttaagtggagaggaggcccccaaattccccaggtacctgaagggaagccactgtccatccaggaagccactgtctgtcctcaaaggtggtacagtagattgtgagataaaagttggaggatgggagggtctcaacaactcacgcctctaatcctagcactttaggaggccaagtcaggaggagcgcatgagcccaggagtttgagacctgcctgggcaacatagcaagactccatctctacaaaaaacggaaaaaaaaattagctaggtgtggcggtgtgtgcttatgttcccagctacttgggaggctaaggtgggaggatcacttgagcccaggaggttgaggctgcagtgagccatgattgtaccactacactctagcttgggcaacaaagtgagaccctgccaaaaaaaaaaaaaaggctgggcctttttttcacaggctcacgcctgtaatcccagcactttgggaggctgaggcagatggatcacctaggtcaggagttcaagaccagcctggccaacatagtgaaaccctttctctactaaaagtacaataattagtcaggcgtggtggcacaggcctgtaatcccagctactcaggaggctaaggcaggagaatcgcttgaacccaggaggaggagattgcagtgagccgagatcatgccactgcactccagtctgggcaacaagaatgaagctccgtctcaaaaaaaaaaaaagttggaggatggaggggcaggacacactcaccatagcaggtcttagacttcaggtgggggtcctgggtggtgccctttggagtcttctgcaacatactcaatctttgacttttttcttttttttttcttttttttttttttgtcacccagactgtcgcccaggctggagtgcagtggcacgatctcggctcactgcaagctctgcctcctgagttcacgccattctcctgcctcagcctcccgaatagctgggactacaggcgcctgccaccacgcccagctaattttttgtattttttagtagagacgggttttcactatgttgcccaggctggtctcgatctcctgacctcgtgatcccccggcctcggcctcccaaagtgctggaattacaggcgtgagccactgtgcccgatcaatctttcatttttttttaatactcattgagaaactcagcatttgtagacatgaagttgctcagggtaagagaatgcgggaatcataggcttggcaccttgtggactcttagaatcatttatttaacttgaatgtattgagtattctcttaaagaatcagctgttgttcctgaagctggggtgaaaaacaaagatggcagatgaaatctgtgacactccaggtgggaggagaaactaggcaggtgcaggtgtgttacgggctgtagaaaaacaggtctggagggcctcaaaatctgggactgtatagagggtgacctagtcagggaaggggacatctgagcaaagacccagaggcagagatggggtcaggggagttatctcctggtctgctatccaggtgtgatggcagggacagagccctgtggggagctggggaggctgcagcaagtgatccaagggaaatggcccaggttgtgtgggatctcttaggttatggtgaagcctctgcttcctgtctgagggaagtgggggctcgtggagtatgtgagtggaaggggatggatctggcctatggaccccgtgggttgctgtgtaaggggcagggagcatgtggggacctgtctggaggtcactgcagtaattcgtggagagggtgctgggaagtggctgacgctggacagacacacttggaagtggagtctgtggatttgaggatgggttgggtgtgacgcttgtgtagggagtccccggggacccctgatcttttgtctgtacctggaaggatggggtgaccctaatggagacaggcagggttctcaggaagcaggttgagcagacactcaggagctcggttttgggcacgttgaagtttgagatgctttcttcgagcaggcaggtagatcctcaggtctggtgatcggaggagcagcccaggccagcaggtcaatttgagagttgtcagtgcataaatggaggctgaagctcagatgtcaagcagaccaccaggagagagagcaaagacagaggggagagtaggagctaggatggcaggcgggggagactcgggtggagccaggtgctgggatgcaggggcagctctcagggaaagtgatgagcccagtaaagctgagagggggcactgggtctggcagtgtgggggtcaccagagaacttggcaagtgtgctggcatgagagtctgattggcctgaggtcaggagaagattttttttctgatattgatacatgatattttctatatttatgggtacatgtgagtgcttgttacatgcatagagtgtataatgatcaaggcagggtatttggagtctccgtcaccttgaatatttttcatttctgggtgttagcaccatagtcctctcttcgttactttgaaatatacaaaatactgttgctaagcatcgtcaccctggtctgctatcaaagattagaacttctcctgtcttggctgggcacggtggctcacacctgtcatcccagcaccttggaaggctgaggtgggtggatgacctgaggtcaggagtttgaaaccagcctggccaacatggcaaaaccccatctgtactaaaaatacaaaaattagcctggcgtgctggcctgtgcctgtaataccagctactcgggaggctgaggcaggagaatcgcttgaacctgggaggcggaggttgtagtgagctgagatcatgccactgcactgtagtctgggagacagagcaagactccatctcaaaaacaaacaaagaagaaaaacaaaacaaaacaaaaaataacttctgtctaactacaaggtggaaggaatcatgtgctgggtgtcagaccttccgggatgtatgtgcagcttctaggaattgaaaccaccagctcttggaaacttgtgccaggcttcagggtgggagaggcagttctagagccacagctgccaagccaagccaaatggccccatcatctctcgcaagagcaggagagtccctgggggcagaggccatagttgtacctttctgggcaaagggtcagtgtctgtagtgtccttatgggcagcggggctcaggggggaagcaggcccaggggtgtgtttccaatgacctcctcaaaagtcagaactggaaggcaaaaccccttataggctgagtgcacctgtaatcccagcatgttgggatgctgaggtgggaggattgcttgaggccagagtttgagaccagtcttggcaacgtagcaagacccctgtctctacaaaaaataaaaataaaaaattaggctgggaatggtggctcacgcctgtaatcccagaactctgagaggctgaggaggatggatcacctgatgttaggagttcaagaccagcctgaccaacctggtgaaaccccgtctctactaaaaatacaaaaattagcaaggcatggtggtgcatgcctgtaatcccagctacttgggaggctgaggcaggagaattgcttgaactcgggaggtggaggttggagtgagccaagattgtgccattgcactccagcctgggcaacaagagtgaaactccatctcagaaaaaaaaaaaaaaaaaaaaaagccctgtgtagtggggtatgtctgtagtcttaggtacttcagaggctgaggtaggaggatcgcttgagcctgggaagccaaggctgcagtgagccatgattgcaccactgcactccagctgggacaacagaatgagaccctgtctcaaaacagacaaacaaacaaaaacccttatagttggatggagaaactgaggctgggagaggggacaggacggaggttaaggctcagtcttgcctctctggggccgtagaaaagaggcagggagccctttcttggggctggctgtgtcttgaaggtggcctgtgcttgacctcggtcaaggtgggatctgctcttgttttggcacattctcgtggagcccatgagtcttacaggataaggccttgtggtcagtgagatgggagggggtctggcctggcacaggattttagacatgcaggcacctgcacagacagacacctcatcctgggacagcaaaacccagccgcatgctactgcttcccctgctgtgccctcctcagacatccctggtccatgtacactcctacctgctgagcccctcctaaaaaaaaaaattaaacatcccctcctaaaaaaaaacaattaaaattaaaaaataaatttaaaaattaaaaatccccttctgctaggtgtgctgttcacgcctgtaatctcagcgactcaggaggctgaggtgggaggatcgcttgaatccaggagttcgagatcgggctgggcaagatggcaagaccccaactcaaaaaagaaaaaaaaaaaatctttcctcctaagcctcattgccccatctgtaaaatgagtcagggactgtgcctgggatgctgcctgcgagagatcccgatgtcccccactcagggtcactaactatggctctctctccccaggggggctgtcggtggcggtgcctggggagatccgaggctatgagctggcacaccagcggcatgggcggctgccctgggctcgcctcttccagcccagcatccagctggcccgccagggcttccccgtgggcaagggcttggcggcagccctggaaaacaagcggaccgtcatcgagcagcagcctgtcttgtggtatgtctgtgggtgcggccccctgacacaggcagggcaggcacagcccaaggaccttgcaggccgtagcagcagtggagcagccctctgccttcaggaccctgtgctgataatgggatgaggagatacagacccttcccaccacgtgtggggacacattctgagcgtggggtcccagtggccactgtggctggccatgtgtcctgagtggcaagggacactaggaagctcccggaagggacactaggaagacgagcgctgagtgacagggccacccacctgtgacaggcgctgcccctgttctgctccgttctcctgtgtggacgggtgtgaggggtggtctagctgagtccaccccacctgctgcctcacatgagccccctctgccccagtgaggtgttctgccgggatagaaaggtgcttcgggagggggagagactgaccctgccgcagctggctgacacctacgagacgctggccatcgagggtgcccaggccttctacaacggcagcctcacggcccagattgtgaaggacatccaggcggccggtgagtgggtaacctcaggggcctgggtgaggaactctgcagtggaaaccctgagctgtagcccagagctatggggtcctcctgtcttgcctgagcctgcaggaagttcctggtggaggagggtcagtgactggccatgtgggtccacagctcctgcttatatcaaaaccaagagaggccacacagtccaggagagcaagtccctgttggggtaaatgcaggtgtaggcaagagccagggctagggaagcactagaatacagcctgaagatccaggaggacttcttggaggaggtggcggctgggctgcagataactttgttaggcagagagaggaagggattcctagcagaggaacagctgggctaaggcccagtagagggcgctttgattcaccaagagggttacaagggatgagggtctccttgagagaggcatggggaaggggatttgtggggcaggggcctggagcttggctgtggctttcttcaggtaatttttgtcacgtttcatggaggagggtgattagcgtgtcgacctttaccactgaggctggaaattggcatgccaataccctgtctgtctggagctgactccaggagaattaagagcctccctcctctattcattcatcatgaggagaagaggccaagcggcagggagactggcaggaattctccagttagaaaaggccctctgagccaggcgcggtggctcacgtctgtaatcccagcactttgggaggccgaggcgggtggatcacctgaggtcaggagttcaagaccagcctggccaacatggcgaaaccctgtctctactaaaaatgcaaaattagtcaggcatggtaggttgtgcctgtaatcccagctacttgggaggctgtgccaggagaatcgctagaacctggggggctgaggttgcagtgagccgagattgcaccactgcactccacagagtgagattccatctcaaaaaaaaaaaaagaaagaaagaaaaggccctctgaggccaagcttggtgtctcatgcctgtaatcccaacactttgggaggctgaggtagaagttgaggccaggaggtccaagacaagcctgggcaacatagtgagtctacaaaaaaaatattgagaaactacataaatatagtgggggtgggggtggggaacaagaaaacaaaaaattcaaagcatagtgaaaagaaatatagcaaaacccggccgggcatggtggctcacgcctgtaatcccagcactttgagaggccgaggcgtgtggatcacggggtcaggagatcgagaccatcctggctaacacagtgaaacctgtctctactaaaaatacaaaaaaattagccacgtgtggtggcgggcgcctgcagtcccagctacttgggaggctgaggcaggagaatggcgtgaacctgggaggtggagcttgcagtgagccgatatcgcgccactgcactccagcctgggcgatagagcgagactccgtctcaaaaaacaaaaaaaaagtagcaaaacacaacaaaaaaattaaaatttgctgggtgtagttgtgcctttagtctcagctactggggagggtctgctggaggatcacttgagcccaggagttcaaggctgtgattaagccactgcactccagcctgggtgacagagcaagatcctatctctaaaaaaaaaaaagaaaagaaaacactctgtggccacagatgagagaaggcagacaggaagccagtaagccaagcaggcaaagggcaggtggccccagcccggctgttgggtggtgagcagtgtcagggagacaggagtgccggagctgatgaggttcccaaggaggtgaggttgcctgtggccccctcccagggcacagtcccacccctccagtagtgcactctgtcctccctggtaggtacaggcttttccccaccaccatggtgcagccatgcctgcccccaacaccactgctgcagctccatcctccacgcagtggtgcagccccatcccagcacccatttgagctgctgtcccattgcagggggcattgtgacagctgaggacctgaacaactaccgtgctgagctgatcgagcacccgctgaacatcagcctgggagacgtggtgctgtacatgcccagtgcgccgctcagcgggcccgtgctggccctcatcctcaacatcctcaaaggtgagtggtcgcaccacagccgtgtggtaggacccatgacactgcctctctctccccacgccccacccctcctgcatctctgctcgccccccatgccacgtctttccatcactgagctcccgaggtgtgtccctgcgtcacagttcaccatgtcctgaaggaggcagtgcagagcgacagggctgaagcgggcaatgctcaagggttggaggaggaacaggagtcatcaggagggagagaggtgcaggagctcagggctgcagggccggtccagagggtaccccggtccagtgggtgaccctgccacttggtcattgaatggccagagctgatgcgtgacgtgaggtccaggctcgggagccctcaccttacttcactctcaccacagccttctgaagcagctgctgctattggttattaaacgctccttgaggtgggcaaagtggctcaggcaggtgttaaccctctgagcccctcagagcctctggggctcagcaacatgcacctggctctgatcaaccagggtacaacttctcccgggagagcgtggagagccccgagcagaagggcctgacgtaccaccgcatcgtagaggctttccggtttgcctacgccaagaggaccctgcttggggaccccaagtttgtggatgtgactgaggtaaggggcaggggctggcccactgtgggtgtggggcctgccatagaggcatcaggtgggctccccagggtggctacagcctcacatatgctttatgaatccattcctgccacagacttcgattgcgggcctactgtgtgctcggatggactcgtgggtgacccccagtcttggcttctgccgcacagaactgacagtgtggggaattagtggccaccctcctacctcaggtcctttgcacatgctgtggttctcgagtgctcagtgctgagatgaggaatgcatgggggcattgcagccctcgggcatggtgagatggatgggtgaaagggagagggccaggtgaacagagaccttggccacccactccctgtcactccaaactaacgcttcccagatgccaccctcagccctgcaccacctgacccactcactcagtagttgccccagctccacactgggtccctataagaccctgtcatatcccttcccgctgaggatcctcacatccctccttacctacttgggtccttggcattcctgggcggatctgcagacccccccacactgaccagtgacctcccaggaggggcgtcagctgcccaggtggtgtcttctctttccccgtgagcattctgcacctctgactcccgctgcagccagtgacctggtgtcttgtctctctgaggggacagagccactgcagtgtgtccctctgccctcctttttggctaaggccagctccttcatctactcgctggctcggggtgctgttcctacaatgctcctttctgcctctgatgatttacttctttatcacggcttattcccgaaagaaaggcagctgttgttgctctagaaacttctatctgctgcctccttctgtcctttgctcctcttagagcaaacatggctgggctatgtcctctctcccttcagggtatcccctcccctgctctatccccatgccaccagatcgccatgtccagcctcagtttccccatcaggccccactcagcagcatctcacacagctcaccacactctcctcgagttttcattttgcaaattttcgcacctacaaaaatgtaaaaaaaccccaaaactgcccaagcatcaatgctcccttttcctggagtctgcagtgtggatgtttctgtcggatttcctaactctctccgtctccacccacatctattgggattcgtgtttttctgagggattccacagtaggttactgatgtcgcacctcagggtgtgtctcaaaagtgagacttgaacatagcacagcaggatgtcggggtgacacaacctgttgtcccttctctttacctacagtaggctcccttggctgttttgtttttgttgtgtttttgtttgtacacagagtctctgtcatccaggttggagtgcagtggtgtgatcttggctcactgcagcctcaacctccagggctcaagcaatcctcccacttcagccccctgaacagctgggaccagaggcacgtgccaccaaacctggataatttttgtattttttttagagacagggtcttgcccagactggtctcaaactcccgggatcaaactatcttcccacctcagcctcccaaagcgctgggattacaggtgtgtttttttttttgagacagagtctcgctctgttgcccaggctggagtgcagtggcgctatctcggctcactgtaagctccgcctcctgggttcacgccattctcctgcctcagcctcccgagtagctgggattacaggcgcccgccacaccgcccagctaattttttgtatttttagtagagagggggtttcaccgtgatcgcgatctcctgacctcgtgatccgcctgcctcggcctcccaaagtgctgggattacaggcatgagccaccgtgcctggcctgttttgttgatttttaaagcccagggcagtagtcttggaaaatgtcccacatcgtggatttgcctttctgtttccttgagggcagattcagacagaacacctttccctgggattggtcaactaatccgtggggtgttgctgaaactttattttattttattttatttttgagacggagtctcgctctgtcccccaggctgtcccccaggctggagtgcagtggcgggatctccgctcactgcaagctccgcctcccaggttcacgccattctcctgcctcagccccccaagtagctgggactacatgtgcccaccaccgcgcccagctaattttttgtatttttagtagagacggggtttcactgtgttagccaggatggtctcgatctcctgacgtcgtgatccgccctcccaaagtgctgggattacaggcctcggcctcccaaagtgctgggattacaggcgtgagccaccgcgcccggtgttgaaactcccttgaggcattttcttcggccttcgggtccatcctctgtctcctccttgacctcctcatctcctcgccactgccttggggaccttggccaggctcatggcatccagcagccactcaatgtcaatacctccatgttcatctctcagcccgcccttgcccgtgaacccatgcttatttatttattttttttaatacgtgcacccatgctcttcaggtctgatgaagtatccaaaatcaagctcctgaccatccccaaacctgccccttctgcagggtttacctcgctagtcggcgccatccttgattcttctctttctcccacccaggccatcatctcttgcctggttgatacccacagcctcccctttgggctttatccttatccccatcatagctgccagagggatcctgtgaaaacactccccagcctgctcattcctctgccctaagcctgcatggcacagagcaaaagccagttgttatgggacctaggaagtcctgtgggatgggccccagcctgcatcttcatcctcttctccccaccccactccattcactctctgcctatcactcaccagcctataccacctgcctcagggcctttgcactgaccatttaggccacattccaggctcttttcacacgttgcctcctctgagaagccctccctgaccactctgcccatacctcatgcctcttgattccccttacctggcttgtggtttcagcactttccctgtgtgtgtttgtttttcttggcatgagagcaggacctaagtgtctgttccctgttgattccccagtgccaggcatgcagtgcaaactctagaaatattttttgcatgaaggaatgagtgattgaatgcagcaagggtctggaggctgaggaccaggcagacagacattcagagttgctggaacgcgacagagacagggagtcagactggtcatgcaaggtcctgggcctgcccttgggtcctggggagccacggaaggttgtgggtgccagagggttgcggtcagagtcacagtcaagggccttctgagacctgtgccccctccccaccctccctccccacctcctcaggccagctctggggtctcggcaggtggtccgcaacatgacctccgagttcttcgctgcccagctccgggcccagatctctgacgacaccactcacccgatctcctactacaagcccgagttctacacgccggatgacgggggcactgctcacctgtctgtcgtcgcagaggacggcagtgctgtgtccgccaccagcaccatcaacctctagtaggggctgctgggccgcctgggtgggaaagggccaggggcgggtggcccagggactgcccacttatccagtaaggtggctccgtcacctcttttcctggtgggaaactgaggcccaaccttggtagcttatcctgggcctctcagtgagtatgtttgagcctcagtgggtggatagggaccaggctgggccaggcaaggtcgggcactgtctgacctggctgggcggtagctttggctccaaggtccgctccccggtcagcgggatcctgttcaataatgaaatggacgacttcagctctcccagcatcaccaacgagtttggggtacccccctcacctgccaatttcatccagccaggtatggggtggaggtccgggggtgggggactggggtggagaggggcgggtgtcctgggcaggcagctgacgggcatccctgtcttctcccatcggccgcagggaagcagccgctctcgtccatgtgcccgacgatcatggtgggccaggacggccaggtccggatggtggtgggagctgctgggggcacacagatcaccacggccactgcactggtatgtgtcacaccttttctccctggccgtgcccaccctgcacagcccccaagccatgctgatcacactcccatgccccaggccatcatctacaacctctggttcggctatgacgtgaagcgggccgtggaggagccccggctgcacaaccagcttctgcccaacgtcacgacagtggagagaaacattgaccaggtgggccgggggttggagaaactgagtcaaggtgtggggccccagggcatcctgggctggaggcctggatcatcacagagtggacaatggttggtgtcctctctctagtgcctgggccatctggagcccctgtgccatgagggccaagccccctgctccagtgagacccagcaggccccaacctgctcttcctgatgacctggcccgaaatggcaccacctgggctgaggcctgtgaccacacagatgtggttcaggtggcatctggagccctgctcaggcttcccctctcctcccacccccaggcagtgactgcagccctggagacccggcaccatcacacccagatcgcgtccaccttcatcgctgtggtgcaagccatcgtccgcacggctggtggctgggcagctgcctcggactccaggaaaggcggggagcctgccggctactgagtgctccaggaggacaaggctgacaagcaatccagggacaagatactcaccaggaccaggaaggggactctgggggaccggcttcccctgtgagcagcagagcagcacaataaatgaggccactgtgccaggctccaggtggcctccctggcctgtctcccc

SEQ ID NO: 12237 - DNA, 2540 bp, Homo sapiens
cagaccgggcgtcgggtgagcccagaagtgagagcagttggctgtgccccagtgctgtgtgacccagaggcgccgctcaccctctctgagctggtggacatcatagcgggtgcagcccagaactgtcttctgaggaagaggtgctctcctgggcccccactgtccccaggcctcagatgctgcatattgctggcccagctcctgaggctctttggacctccaggaatcggtgtctctatcaggaacccttaaccctgacccggactcccagctgggacccggggtgtcggagtggcaagagcgctgtcaggcctggtgaagggtgtgagctgtccaacggggcagggaggaggcagggcctgttctgcagttggacagacagagccctctagctgctttctggaagactgaagggcagcaaggcaagtgaggtgctgccgtcatccaggctggacagttcagtgatttgcctgaggccccacagcaggagaacgagaaggctgcctgatcagagagtccctgaagaagattctgtggctacaggcttcagcagagtgtgagggagaccccggttatttcctcagctatttccaccaaatcctcctgtctttcgtggccaacaccccaggcaaggcttggggcccccgtctgctgctggacgcagagccatgaagaagaagttagtggtgctgggcctgctggccgtggtcctggtgctggtcattgtcggcctctgtctctggctgccctcagcctccaaggaacctgacaaccatgtgtacaccagggctgccgtggccgcggatgccaagcagtgctcgaagattgggagggatgcactgcgggacggtggctctgcggtggatgcagccattgcagccctgttgtgtgtggggctcatgaatgcccacagcatgggcatcgggggtggcctcttcctcaccatctacaacagcaccacacgaaaagctgaggtcatcaacgcccgcgaggtggcccccaggctggcctttgccaccatgttcaacagctcggagcagtcccagaagggggggctgtcggtggcggtgcctggggagatccgaggctatgagctggcacaccagcggcatgggcggctgccctgggctcgcctcttccagcccagcatccagctggcccgccagggcttccccgtgggcaagggcttggcggcagccctggaaaacaagcggaccgtcatcgagcagcagcctgtcttgtgtgaggtgttctgccgggatagaaaggtgcttcgggagggggagagactgaccctgccgcagctggctgacacctacgagacgctggccatcgagggtgcccaggccttctacaacggcagcctcacggcccagattgtgaaggacatccaggcggccgggggcattgtgacagctgaggacctgaacaactaccgtgctgagctgatcgagcacccgctgaacatcagcctgggagacgtggtgctgtacatgcccagtgcgccgctcagcgggcccgtgctggccctcatcctcaacatcctcaaagggtacaacttctcccgggagagcgtggagagccccgagcagaagggcctgacgtaccaccgcatcgtagaggctttccggtttgcctacgccaagaggaccctgcttggggaccccaagtttgtggatgtgactgaggtggtccgcaacatgacctccgagttcttcgctgcccagctccgggcccagatctctgacgacaccactcacccgatctcctactacaagcccgagttctacacgccggatgacgggggcactgctcacctgtctgtcgtcgcagaggacggcagtgctgtgtccgccaccagcaccatcaacctctactttggctccaaggtccgctccccggtcagcgggatcctgttcaataatgaaatggacgacttcagctctcccagcatcaccaacgagtttggggtacccccctcacctgccaatttcatccagccagggaagcagccgctctcgtccatgtgcccgacgatcatggtgggccaggacggccaggtccggatggtggtgggagctgctgggggcacacagatcaccacggccactgcactggccatcatctacaacctctggttcggctatgacgtgaagcgggccgtggaggagccccggctgcacaaccagcttctgcccaacgtcacgacagtggagagaaacattgaccaggcagtgactgcagccctggagacccggcaccatcacacccagatcgcgtccaccttcatcgctgtggtgcaagccatcgtccgcacggctggtggctgggcagctgcctcggactccaggaaaggcggggagcctgccggctactgagtgctccaggaggacaaggctgacaagcaatccagggacaagatactcaccaggaccaggaaggggactctgggggaccggcttcccctgtgagcagcagagcagcacaataaatgaggccactgtgccaggctccaggtggcctccctggcctgtctcccc

SEQ ID NO: 12238 - DNA, 25804 bp, Homo sapiens
gttttggtgtgctgctggatgaccagaccgggcgtcgggtgagcccagaagtgagagcagttggctgtgccccagtgctgtgtgacccagaggcgccgctcaccctctctgagctggtggacatcataggtggggaagctcaggtcagggcactcccatgagtgtctggaggcctgagtcccattctcagctctgccatatgcttgctgcgctctagaggagttcctcttcctctccaagcctcggtttatgtacccgtgcagtgggagtgagttgcacttcggggtgaagggggcaagacttgtgtgggcgcatcctgcagaaggatcccacaggtgggcagagccctgggttctttatccgactgggtctgggctgggggcctctgtttcttggctgatgagtttatgtgagtttgagtgaggtatgcgagtgggtgaaggagggctggggggagtcacctgacttgtgcgaagaagctcttgagagagccgtggcttcttggaattaagaggaaagagtgcagcatgaacagacaggccctggaggatctggcagccctgagtgggggcggggggtcagctctggagtagagccagagctgtgatggggttgggggaccctgtgtccttgggccatgcttgcctcgctcctgggttctgtttgtggctgtggattggggtggggcagggccggttgtgcgaggggtcattgcccaactccagggggcgcctgccacctctcagctatatatatagggatatatatagttctttcgacaggtttccagcaggtagtggttattaaatcttactgaaggggtgttttttctgattctcggctctgtgccgcaagggtggaaactgtgagagacagattccaactccacgtctgggtagtaagcatccagtccagggctgtaggcagtcctggggaagacgccagagatctgtgcattctcatatcgagggatagcgactccaggctgggggctggcagggtaaggggtgggtgggtcctgggcttacccgcaggtctgcagacttcctggggccagctgacctcgtaaaatcccttttgtctaagcttcagtttcctgcctgtgaatggggttggggctgtgctctggtttcacccttgtggctctggggttgtggtgacaaagccatcaagctgggttgaaggattaaccaggaaacttcagactggctgccgtgtctacctcttcctcatactcctctctctgctgcatcctgggaagctgctctgctcagcctaaatgaggctcagttgtgtgtgtgcgcacgtgcttgcacgtgtgttggaagtgggtgatactgacaccagagtctgtgtctctgggtgagtgaggcttgcacatttctcgggacagggaactcactaccttatgtgcccaggacaagagctgtggggtctggagaagacttctaggccagcccctgcagtccttcctcaggtgacatggcttccccagacccacttccccctaggtgccctctctgcattcagggggtagagggctgactgggacagaatgtgacacactcagcatgtgaggaaaagcctccttcattctgtaggccctacctctattaacatgtcctttgataaagtgcctcccctcctgtctcccctctctggaatcctcagctgctgccaggcttcagctgtgccccattgaaggcagctctgtctccctactttccccagcccagggttttccttttggggtcagctgcagggatctgggccatcctttgcccactcagactttctttctgcccacctgctgctgtgaatcctgtatgtcatatatatatataaaatatgtaatatattatatattatatgtaatatataatatataaagtatattatataatatgtattatattatatattatataatatgtaatatattatataatatataatatgtattatattatatattatataatatgtaatatattatataatatataatatgtattatattatatattatataatatgtattatattatatattatataatatgtattatatattatataatatgtattatatattatataatatgtattatatattatataatatgtattatatattatataatatgtattatatattatataatatgtattatatattatataatattataatatgtattatatattatataatattatataatatgtattatatattatataacaatatataatgtgtattatatataatataatattatataatgtgtattatatattatataatattatataatgtgtattatatattatataatattatataatgtgtattatatattatataatattatataatgtgtattatatatataatattatataatgtgtattatatatataatattatataatgtgtattatatatataatattatataatgtgtattatatatttaatattatataatgtgtattatatatttaatattatataatgtgtattatatattatataatattatataatgtgtattatatattatataatattatataatgtgtattatatattatataatatatgatgtgtattatatattatatattatatgatgtgtattatatattatataatatatgatgtgtattatatattatataatatatgatgtgtattatatattatataatattatatgatgtgtattatatattatatataatatataatattatatataatatattacatataatatatcatatattatatttatataatttatataatatatcatatattatatttatataatttatataatatatcatatattatatttatataatttatataatatatcatatattatatttatataatttatataatatatcatataaatatattatatatagtattatatatataaaattatactttaagttctagggtacatgtgcacaacgtacaggtttgttacatatgtatacatgtgccatgttggtgtgctgcacccattaacttgtcatttacattaggtatatctcctaatgctatccctccccgttcccctcaccccacaacaggccccagtgtgtgatgttccccttcctgtgtccaagtgttctcattgtttaattccaacctatgagtgagaacatgcatgtcttatatgctctcaggcagagaggaaactgctgagcaggccggggcaggggacagagccctgtggctctccactttagacccctcctggctgactgccatggaatgcagccacttagcagggccaaatcccctgatgttcctgttggctgtctagccttcagggacaggtcatgggaccttggttcctgccctgtcatcttcccagtcaccctgatcttcacggggaggaatagcctgggaaaggacttggtcacagcacctccaccctagggctattgaggatctcacagttgtgtgtctggtgggttctgtccagagcccatttgagagcagtggatgacaggacaggcctatgtgacccaggcaggcagcaatattgggtcagccttcatgtccccttctgtcagctggggcagcctggaagcatgattgtggggtaggtgttatgggcacggaatagacctcaggtggaggctgcaggggctctccggcaccgtagacacagcaggcccaggagcaggggagggagccatgactcagggagactctggcccatatccttggcagatgagggccacaggggaatgggcagcactgtccaaagtcccctgggctgggtccgcagctgttcctggctcagacttcttggtgggctggtcagaaacatgcagtaacttggggcagttaccaggtggccaagcctgcactgctgggctctgtgagcttgggccagctcaggccctctctgggccctgcctttctgggctgttcgggtggttccttgggcctggggtgctaatgtttctggatgggcagcagaaccagtctgcactcagggccccaggccatgttcccggaacacacctttagcattgacagcagcgtgtggtgaggccccttaggctgggttctggtctagtgccaggggcaccactactccaccgcctccagagccatctctgggacactggctgtgagttcagatgttctgaacagggacagggagagccagagggaaccagcctggggctcactggaggggctcgtgggcagacagcgccctttggagggaactgagtctgaaaggaaggaaaccctttccccggctcatagcacctgccatccagggccctcccagggctgcgtgaactttagtcacgtggtgacaggccgagtcaccatgccaagtcactgtgcgcctccttgctgctgtgacgtcagcttccccatcctcccagccaggctggacctccgtgagaggcctgcctgtcctgcaccctgtgcagatgcctcccactgtccgccggggctgctgggcacgccctggctggtctcttggactaggtaagctcatgagtcctctggccgctcctgctccttccctgcctctgctcctcctcggaggtggccacccccagatcccagtcccaattcggaggccccctgaggagtgctgcagggggccacaggcgtggctctgagccactctggagagtggcggggggcccagccagttctgtggctgggactttcccaggcagacaagtctgtctcttcctccccagcgggtgcagcccagaactgtcttctgaggaagaggtgctctcctgggcccccactgtccccaggcctcaggtaagcccatcagggtcccaaggaagggggtctgggtttgaggccaaccatggcagctgacctactttctagcctcagtttcccctagtgtgtgcagctctcacgctgtttgggtgagaaccaggcctctgggcttggacattctttcagtgagtttttagggtggagggatgggaaatggaagcccaggacctcagcagggtgtcttcctccgatccggggacatctgcctgtgggaggctgggcccaccctcccttgctgacctgccctgggaggaagggacagggcccagcactgcctactcccctccctgttcttcccagcagtctgagcctggctgggtgtcccctgctcctccagcagcctacttgggcctttgggtagacagattaacagacaggcgaggctgggtcatggttggaccaccccaggaccctgaccgggggctcagctcatgaccctgagcctgggagagatgaggccatgccctccagggcactcagcatgacccggcccagtggacgggactgggtagcttccttggtgcagggggctgtcatgctaggacggggtcactgaccaggccaggcccctgccccatgacttgtggtggaaatgtccttttgtttttgtttttttgcattttttttgagacggagtttcactcttgttgcccaggctggagtgcagtggtgcaatcttgcctcactgcaacctccacctcctgggttcaagcaattctcctgcctcagctcctgagtagctgggattacaggcacctgccaccatgcctggctaattttttgtatttttagtggagatgggggtttcaccatgttggccaggctgttctcaaactcttcacctcaggtgatccacctgcctctgcctcccaaagtgctgggattataggtgtgagccactgcacccggccatgtgatgggaatgttctgtgtccataatagatgctgcatattgctggcccagctcctgaggctctttggacctccaggaatcggtgtctctatcaggaacccttaaccctgacccggactcccagctgggacccggggtgtcggagtggcaagagcgctgtcaggcctggtgaagggtgtgagctgtccaacggggcagggaggaggcagggcctgttctgcagttggacagacagagccctctagctgctttctggaagactgaagggcaggtgatgttggagggagggagtgcaggcaggggctgtgagggagttcaggtcagaaacaggtggcgcctggattcaggctgtggtggtcacggtggggatgaggggctgctttggattgtgctggggatgtggggtggtgcgctgctgcatgactactgccaggtctctctgctcttagtgtctgcatccagggctgggagggggtcaaatgaatcacactatcggccccaggcccaccaagcctggggaggtggccacccttccatgatggcatttggatgttccctgtgtgtggggagggcacagggactccattcgtagaccacctctgggacagtgtgtctgcctctgaggtcagacgctctgcactgggacagggtggagtggagggaaatccagcttggggctcattggaggggcttgctggcagacaccgccctttgtgggaaactgactgtgggagaggggaaccccaacctctgtcaccacatccctcttccctgttgtcacacctgtcacctgctgccatagccatgagacttcccaagggtcactgctgccactcactgcacagcctggaagggagtccacaggggacatacagtgagcaagagacctgtgccactcaggcctcctgggggtgtccccagtgcagccatgatgataatcacagctaccattcaccaagccctgcccacagtctaacctactctattcacaacactcccagcagcaaggcaagtgaggtgctgccgtcatccaggctggacagttcagtgatttgcctgaggccccacagcaggtgagtggcaagtccagcatcagagcagggcaggctggcggtgccccctgagccccctttgccatgctgaccacatgcacatcctgggcttctgcaggaatgccctgtcccctacctgccctgctccgtgcaaaaccctctttgagctgtgcctgggagacatgctgagagaattcatggaaacaaatgtgttactgacagcctctttgcctccagagttcaactggagacagagaaaccagctagaggcagagggaggtaacacggagtcccccagaaaggtctgggctgcgcgtgcttcaggtaacctcccttgaccttcaggagaacgagaaggctgcctgatcagagagtccctgaagaagattctgtggctacaggcttcagcagagtgtgagggagaccccggttatttcctcagctatttccaccaaatcctcctgtctttcgtggccaacaccccaggcaaggcttggggcccccgtctgctgctggacggtaagtcctggccccgtggcagtgaatctgtggggcgctctgattgtgggcactatggaagctaaaccccatgctccaggtggggtggagggtcttcagaggactcctggacagtgccaggctctaggctggggtgggggacacaggagaaaccaggccaggcccatccctactggagcttctccctaagcagtggaggctcagccactgtaaggaggtaggcaaggccctgcagaaagaggggtgtggaaatctgggggctcccaggaagggccgctgctggagatggggttcttaccaggatgggctctgaagataagcagggaggatttgggagggcagagatgaggcccagagcttctggcagagggcatggcctgcgcaaaggtctgggggccggacagcctgcacgtattctgggaagcgggaaggagacacaggccttgtgtttctgaggcccgactttagactgtgccctgttggggaggggccagggaatgtctgaggctaggcctgaccctgcttcttaccccgtgggtgcagcagagccatgaagaagaagttagtggtgctgggcctgctggccgtggtcctggtgctggtcattgtcggcctctgtctctggctgccctcagcctccaaggaacctgacaaccatgtgtacaccagggctgccgtggccgcggatgccaagcagtgctcgaagattgggaggtgagcagggcagggcatgggacatgggccctgaaaactgggcaagtggacctgagcaataccttcacccccctgagactcagtttccccatgtgtaagcttcgcttggactctctcagtagcctttgggaaggggacagtgactccgagagcagggtgtgggtctctagagccaaacagggccccttttctcagttctaagagtctctgtctctttggaataaactgcactgttttgttgtttggttgttatttttacttatttcttcctatctatctatctatctatctatctatcatctatctatctatctatctatctatctatctatctatctatctatctatctatctactatctatctatctatttatttagagatggagttttgctctgttgccaggctggagtgcagtggtgcaatctcagttaactgcaacctccgcctcccaagttcaagtgattctcatgcctaagtctcccaagtagctgggattacaggcgtgcgccaccacgcccaacaaatttgtgtgtgtgtgtgtgtgtgtgtgtgtgtgtgtgtgtgtgtgtgtgtttccaagacagagtatcgctctgttacccaggctggagggcagtggtgcaatcttggcttactgcaacctccacctcccaggttcaagtgattctcctgcctcagcctccacagtagctgagactacaggcatgtgccaccatgcccagctaatttttgtatttttagtagagacagggttttgctatgttggccaggctggtcttgaactcctgaccttgtgatcctcccacctctgcctctcaaagtgctgggattaaggtgtgagccactgctcctggcctaattatggtgtttttagtagagatggggtttcaccatgttggtcaggctggtcttgaactcctgacctcaggtaatccacccacctgggcctcccaaagtgttgggattacaggtgtgagccaccacgcccggcttattctttttttttttttttttttttggttaggagacaatttctttctttctttttttttattttattttattattattatactttaagttttagggtacatgtgcacaatgtgcaggtttgttacatatgtacatatgtacacatgtgccatgttggtgtgctgcacccaccaactcatcatttagcattaggtatatctcccaatgccatccctcccccctccccccaaggaacactgttgcccaaacagggacatgaagggcttattcttttttgttgttgttttgttttgttttgttttttgagacggagtctcacgctgtctcccaggctggagtgcagtggcgcaatctcggctcgctgcaacctccgtctcctggattcaggtgattctcctgcctcagcctcctgagtagctgatattacaggcatccgccaccacgcccggctaatttttgtatttttagtagagacagggtttcaccataatggtctggctggtctcaaactcctgacctcaggtgatccgcctgccttggcctcccaaagtgctgggattacaggcatgagccaccatgcccggccgggcttattctttttttaaggtggagtcttactctgttacccaggctggagtataggggagcgatcatagcccactgcagcctcaaactcttgggtttaagtgatcttcccgcctcagcttcctaaagtgctgggattacaggtgtgagccatggtgcctggcttctactgttttattctattttagactcttatctcatgttatatacaaagatcagttccctcctaaagacttaaacagaaaaaatattatgtttttcatattttgagacagggtcttgttctgtcacccaggctggagtgcagtggcatgatcatagctcactgcagccttgaactcttgggcttaagcgatcctcccacctcagccccctgagtagctaggactacaggcgtgcatcacacctgactaattaaaaaagactgttttctagagatggtctcactctattgcccaggctggtcttgaactcctggcctcaagtgatcctccaccttggcctcccaaagtgctgagattacaggtgtaagccaccatctctagccgggaaaaaaaatgttattaataaagtatagcaatttccctttttgtcccagttataaaagtcatgtacatttgtttgcttgataaagaggaaactgtctgggcaaggtggtccacacctgtaatcccagcactttgggaggttgaggcgggcagaccacccgaggtcaggagttcgagaccagcctggccaacatggtgcactctgtccctactaaaaatataaaaagttagccgggcatggtggtgtgcgcctgtaatcccagctactcaggaggctgaggcaggggaatcacttgaacccaggaggcagaggttgcagtgagctaagatcatgccactgcactccagcctgggcaactgagtgaaactccctctcagaaaaaaaaaaagaaagaaaagaaaagaaaaagaggaaactgtaatcccagcactttgggaggttgaggcgataggattgctttagaccatgagttcgagaccagcttgggcaacatagaaagaccctatctctacaaaaaagacaaaaaattgccaggtgtggtggttcttacctgtagtcccagctactcagcagactgaagtgggaggattgcttgagcccaggaggtcaaagctgcattgagccaagactgtgccactgcacttcatcctgggtgacaaagtgagaccctgtctcataaaacaaaggctgggcacagtggctcatgcctgtaataccagcactttgggaggccaaggtgggtggatcacttgagcacaggagttcttgaccagcctgggcaacatgatgaaaccccatctctacaaaatacacaaacaaacaaaattggctgggcatggtggcatgtgcccatagtcccagctacttgggaggctgagatgggagggtcaattgagcccaggagactgaggctgcagtgatctgagatcacaccactgcactccagcctgagcaacaaagagagactttgtctcaaaaaaaaaaaaaaaaaaaaaaaaaaaaagaggccaaggcaggcggatcatgaggtcaagagatagagaccagcctggccaacatggtgaaaccccgtctctactaaaaatacaaaaattagctgggcgtggtggcatgcacctgtagtcccagctactcaggaggctgaggcaggagaatggcttgaacccgggaggcagaggttgcagtgagctgagatcgtgccactgcactccagcctggcaatagagcaagactccatctcaaaaaaaaaaaaaaaaagaaagaaagaaactaaaaacaaaaaccccaaaactcgaatggacttctcttccatcctcctttgggcaggtgggcagcagggtgtgtatgcggggccagggtggaagcctgcaggttctcatgcctttatgtgccacatggcagggatgcactgcgggacggtggctctgcggtggatgcagccattgcagccctgttgtgtgtggggctcatgaatgcccacagcatgggcatcgggggtggcctcttcctcaccatctacaacagcaccacacgtgagtgcctcgggagaggagagggagaggggcagggggtgtgggttgggccgaggcacagctgggcggtccccaggctcacgtggcataaagggtttgggtgggcgggcctgcctacctgcttctccttctaggaaaagctgaggtcatcaacgcccgcgaggtggcccccaggctggcctttgccaccatgttcaacagctcggagcagtcccagaagggtaagccatgcggcagacttggggcgtgggtgcagagctggctgagccaccgggaaggggccttgcccacaggagcctgctcccgtcagggttcaggggcagttctgtcaccccccatcccttcctgtccccatagcaccctcccacaatgagtggtcaggaccatcatcaccatggtaaagggccgggagcttctgttatttctgctaaggcctccggggccactctgtgcagcacatggagagaataattattatgctagcagacctcatggaccagggctcactggggcccacactctgctctgtgcttttcacccatgagcctctcacaaccctccctgctcctttgggctaggggatgctgtgtggattcccattttacagggtggggatgctgaggctcagacaggtcacgcaaatcagttgaggtcacacagctgggaggtggtgaagctaaaattgaacccaggctgtctataccgtgccttttcaacaggcatcccattcactcatttgttcatttgtggggatggtgctctagaatgtgaggtggagtctctcttttctaatctggtcttaagtggagaggaggcccccaaattccccaggtacctgaagggaagccactgtccatccaggaagccactgtctgtcctcaaaggtggtacagtagattgtgagataaaagttggaggatgggagggtctcaacaactcacgcctctaatcctagcactttaggaggccaagtcaggaggagcgcatgagcccaggagtttgagacctgcctgggcaacatagcaagactccatctctacaaaaaacggaaaaaaaaattagctaggtgtggcggtgtgtgcttatgttcccagctacttgggaggctaaggtgggaggatcacttgagcccaggaggttgaggctgcagtgagccatgattgtaccactacactctagcttgggcaacaaagtgagaccctgccaaaaaaaaaaaaaaggctgggcctttttttcacaggctcacgcctgtaatcccagcactttgggaggctgaggcagatggatcacctaggtcaggagttcaagaccagcctggccaacatagtgaaaccctttctctactaaaagtacaataattagtcaggcgtggtggcacaggcctgtaatcccagctactcaggaggctaaggcaggagaatcgcttgaacccaggaggaggagattgcagtgagccgagatcatgccactgcactccagtctgggcaacaagaatgaagctccgtctcaaaaaaaaaaaaagttggaggatggaggggcaggacacactcaccatagcaggtcttagacttcaggtgggggtcctgggtggtgccctttggagtcttctgcaacatactcaatctttgacttttttcttttttttttcttttttttttttttgtcacccagactgtcgcccaggctggagtgcagtggcacgatctcggctcactgcaagctctgcctcctgagttcacgccattctcctgcctcagcctcccgaatagctgggactacaggcgcctgccaccacgcccagctaattttttgtattttttagtagagacgggttttcactatgttgcccaggctggtctcgatctcctgacctcgtgatcccccggcctcggcctcccaaagtgctggaattacaggcgtgagccactgtgcccgatcaatctttcatttttttttaatactcattgagaaactcagcatttgtagacatgaagttgctcagggtaagagaatgcgggaatcataggcttggcaccttgtggactcttagaatcatttatttaacttgaatgtattgagtattctcttaaagaatcagctgttgttcctgaagctggggtgaaaaacaaagatggcagatgaaatctgtgacactccaggtgggaggagaaactaggcaggtgcaggtgtgttacgggctgtagaaaaacaggtctggagggcctcaaaatctgggactgtatagagggtgacctagtcagggaaggggacatctgagcaaagacccagaggcagagatggggtcaggggagttatctcctggtctgctatccaggtgtgatggcagggacagagccctgtggggagctggggaggctgcagcaagtgatccaagggaaatggcccaggttgtgtgggatctcttaggttatggtgaagcctctgcttcctgtctgagggaagtgggggctcgtggagtatgtgagtggaaggggatggatctggcctatggaccccgtgggttgctgtgtaaggggcagggagcatgtggggacctgtctggaggtcactgcagtaattcgtggagagggtgctgggaagtggctgacgctggacagacacacttggaagtggagtctgtggatttgaggatgggttgggtgtgacgcttgtgtagggagtccccggggacccctgatcttttgtctgtacctggaaggatggggtgaccctaatggagacaggcagggttctcaggaagcaggttgagcagacactcaggagctcggttttgggcacgttgaagtttgagatgctttcttcgagcaggcaggtagatcctcaggtctggtgatcggaggagcagcccaggccagcaggtcaatttgagagttgtcagtgcataaatggaggctgaagctcagatgtcaagcagaccaccaggagagagagcaaagacagaggggagagtaggagctaggatggcaggcgggggagactcgggtggagccaggtgctgggatgcaggggcagctctcagggaaagtgatgagcccagtaaagctgagagggggcactgggtctggcagtgtgggggtcaccagagaacttggcaagtgtgctggcatgagagtctgattggcctgaggtcaggagaagattttttttctgatattgatacatgatattttctatatttatgggtacatgtgagtgcttgttacatgcatagagtgtataatgatcaaggcagggtatttggagtctccgtcaccttgaatatttttcatttctgggtgttagcaccatagtcctctcttcgttactttgaaatatacaaaatactgttgctaagcatcgtcaccctggtctgctatcaaagattagaacttctcctgtcttggctgggcacggtggctcacacctgtcatcccagcaccttggaaggctgaggtgggtggatgacctgaggtcaggagtttgaaaccagcctggccaacatggcaaaaccccatctgtactaaaaatacaaaaattagcctggcgtgctggcctgtgcctgtaataccagctactcgggaggctgaggcaggagaatcgcttgaacctgggaggcggaggttgtagtgagctgagatcatgccactgcactgtagtctgggagacagagcaagactccatctcaaaaacaaacaaagaagaaaaacaaaacaaaacaaaaaataacttctgtctaactacaaggtggaaggaatcatgtgctgggtgtcagaccttccgggatgtatgtgcagcttctaggaattgaaaccaccagctcttggaaacttgtgccaggcttcagggtgggagaggcagttctagagccacagctgccaagccaagccaaatggccccatcatctctcgcaagagcaggagagtccctgggggcagaggccatagttgtacctttctgggcaaagggtcagtgtctgtagtgtccttatgggcagcggggctcaggggggaagcaggcccaggggtgtgtttccaatgacctcctcaaaagtcagaactggaaggcaaaaccccttataggctgagtgcacctgtaatcccagcatgttgggatgctgaggtgggaggattgcttgaggccagagtttgagaccagtcttggcaacgtagcaagacccctgtctctacaaaaaataaaaataaaaaattaggctgggaatggtggctcacgcctgtaatcccagaactctgagaggctgaggaggatggatcacctgatgttaggagttcaagaccagcctgaccaacctggtgaaaccccgtctctactaaaaatacaaaaattagcaaggcatggtggtgcatgcctgtaatcccagctacttgggaggctgaggcaggagaattgcttgaactcgggaggtggaggttggagtgagccaagattgtgccattgcactccagcctgggcaacaagagtgaaactccatctcagaaaaaaaaaaaaaaaaaaaaaagccctgtgtagtggggtatgtctgtagtcttaggtacttcagaggctgaggtaggaggatcgcttgagcctgggaagccaaggctgcagtgagccatgattgcaccactgcactccagctgggacaacagaatgagaccctgtctcaaaacagacaaacaaacaaaaacccttatagttggatggagaaactgaggctgggagaggggacaggacggaggttaaggctcagtcttgcctctctggggccgtagaaaagaggcagggagccctttcttggggctggctgtgtcttgaaggtggcctgtgcttgacctcggtcaaggtgggatctgctcttgttttggcacattctcgtggagcccatgagtcttacaggataaggccttgtggtcagtgagatgggagggggtctggcctggcacaggattttagacatgcaggcacctgcacagacagacacctcatcctgggacagcaaaacccagccgcatgctactgcttcccctgctgtgccctcctcagacatccctggtccatgtacactcctacctgctgagcccctcctaaaaaaaaaaattaaacatcccctcctaaaaaaaaacaattaaaattaaaaaataaatttaaaaattaaaaatccccttctgctaggtgtgctgttcacgcctgtaatctcagcgactcaggaggctgaggtgggaggatcgcttgaatccaggagttcgagatcgggctgggcaagatggcaagaccccaactcaaaaaagaaaaaaaaaaaatctttcctcctaagcctcattgccccatctgtaaaatgagtcagggactgtgcctgggatgctgcctgcgagagatcccgatgtcccccactcagggtcactaactatggctctctctccccaggggggctgtcggtggcggtgcctggggagatccgaggctatgagctggcacaccagcggcatgggcggctgccctgggctcgcctcttccagcccagcatccagctggcccgccagggcttccccgtgggcaagggcttggcggcagccctggaaaacaagcggaccgtcatcgagcagcagcctgtcttgtggtatgtctgtgggtgcggccccctgacacaggcagggcaggcacagcccaaggaccttgcaggccgtagcagcagtggagcagccctctgccttcaggaccctgtgctgataatgggatgaggagatacagacccttcccaccacgtgtggggacacattctgagcgtggggtcccagtggccactgtggctggccatgtgtcctgagtggcaagggacactaggaagctcccggaagggacactaggaagacgagcgctgagtgacagggccacccacctgtgacaggcgctgcccctgttctgctccgttctcctgtgtggacgggtgtgaggggtggtctagctgagtccaccccacctgctgcctcacatgagccccctctgccccagtgaggtgttctgccgggatagaaaggtgcttcgggagggggagagactgaccctgccgcagctggctgacacctacgagacgctggccatcgagggtgcccaggccttctacaacggcagcctcacggcccagattgtgaaggacatccaggcggccggtgagtgggtaacctcaggggcctgggtgaggaactctgcagtggaaaccctgagctgtagcccagagctatggggtcctcctgtcttgcctgagcctgcaggaagttcctggtggaggagggtcagtgactggccatgtgggtccacagctcctgcttatatcaaaaccaagagaggccacacagtccaggagagcaagtccctgttggggtaaatgcaggtgtaggcaagagccagggctagggaagcactagaatacagcctgaagatccaggaggacttcttggaggaggtggcggctgggctgcagataactttgttaggcagagagaggaagggattcctagcagaggaacagctgggctaaggcccagtagagggcgctttgattcaccaagagggttacaagggatgagggtctccttgagagaggcatggggaaggggatttgtggggcaggggcctggagcttggctgtggctttcttcaggtaatttttgtcacgtttcatggaggagggtgattagcgtgtcgacctttaccactgaggctggaaattggcatgccaataccctgtctgtctggagctgactccaggagaattaagagcctccctcctctattcattcatcatgaggagaagaggccaagcggcagggagactggcaggaattctccagttagaaaaggccctctgagccaggcgcggtggctcacgtctgtaatcccagcactttgggaggccgaggcgggtggatcacctgaggtcaggagttcaagaccagcctggccaacatggcgaaaccctgtctctactaaaaatgcaaaattagtcaggcatggtaggttgtgcctgtaatcccagctacttgggaggctgtgccaggagaatcgctagaacctggggggctgaggttgcagtgagccgagattgcaccactgcactccacagagtgagattccatctcaaaaaaaaaaaaagaaagaaagaaaaggccctctgaggccaagcttggtgtctcatgcctgtaatcccaacactttgggaggctgaggtagaagttgaggccaggaggtccaagacaagcctgggcaacatagtgagtctacaaaaaaaatattgagaaactacataaatatagtgggggtgggggtggggaacaagaaaacaaaaaattcaaagcatagtgaaaagaaatatagcaaaacccggccgggcatggtggctcacgcctgtaatcccagcactttgagaggccgaggcgtgtggatcacggggtcaggagatcgagaccatcctggctaacacagtgaaacctgtctctactaaaaatacaaaaaaattagccacgtgtggtggcgggcgcctgcagtcccagctacttgggaggctgaggcaggagaatggcgtgaacctgggaggtggagcttgcagtgagccgatatcgcgccactgcactccagcctgggcgatagagcgagactccgtctcaaaaaacaaaaaaaaagtagcaaaacacaacaaaaaaattaaaatttgctgggtgtagttgtgcctttagtctcagctactggggagggtctgctggaggatcacttgagcccaggagttcaaggctgtgattaagccactgcactccagcctgggtgacagagcaagatcctatctctaaaaaaaaaaaagaaaagaaaacactctgtggccacagatgagagaaggcagacaggaagccagtaagccaagcaggcaaagggcaggtggccccagcccggctgttgggtggtgagcagtgtcagggagacaggagtgccggagctgatgaggttcccaaggaggtgaggttgcctgtggccccctcccagggcacagtcccacccctccagtagtgcactctgtcctccctggtaggtacaggcttttccccaccaccatggtgcagccatgcctgcccccaacaccactgctgcagctccatcctccacgcagtggtgcagccccatcccagcacccatttgagctgctgtcccattgcagggggcattgtgacagctgaggacctgaacaactaccgtgctgagctgatcgagcacccgctgaacatcagcctgggagacgtggtgctgtacatgcccagtgcgccgctcagcgggcccgtgctggccctcatcctcaacatcctcaaaggtgagtggtcgcaccacagccgtgtggtaggacccatgacactgcctctctctccccacgccccacccctcctgcatctctgctcgccccccatgccacgtctttccatcactgagctcccgaggtgtgtccctgcgtcacagttcaccatgtcctgaaggaggcagtgcagagcgacagggctgaagcgggcaatgctcaagggttggaggaggaacaggagtcatcaggagggagagaggtgcaggagctcagggctgcagggccggtccagagggtaccccggtccagtgggtgaccctgccacttggtcattgaatggccagagctgatgcgtgacgtgaggtccaggctcgggagccctcaccttacttcactctcaccacagccttctgaagcagctgctgctattggttattaaacgctccttgaggtgggcaaagtggctcaggcaggtgttaaccctctgagcccctcagagcctctggggctcagcaacatgcacctggctctgatcaaccagggtacaacttctcccgggagagcgtggagagccccgagcagaagggcctgacgtaccaccgcatcgtagaggctttccggtttgcctacgccaagaggaccctgcttggggaccccaagtttgtggatgtgactgaggtaaggggcaggggctggcccactgtgggtgtggggcctgccatagaggcatcaggtgggctccccagggtggctacagcctcacatatgctttatgaatccattcctgccacagacttcgattgcgggcctactgtgtgctcggatggactcgtgggtgacccccagtcttggcttctgccgcacagaactgacagtgtggggaattagtggccaccctcctacctcaggtcctttgcacatgctgtggttctcgagtgctcagtgctgagatgaggaatgcatgggggcattgcagccctcgggcatggtgagatggatgggtgaaagggagagggccaggtgaacagagaccttggccacccactccctgtcactccaaactaacgcttcccagatgccaccctcagccctgcaccacctgacccactcactcagtagttgccccagctccacactgggtccctataagaccctgtcatatcccttcccgctgaggatcctcacatccctccttacctacttgggtccttggcattcctgggcggatctgcagacccccccacactgaccagtgacctcccaggaggggcgtcagctgcccaggtggtgtcttctctttccccgtgagcattctgcacctctgactcccgctgcagccagtgacctggtgtcttgtctctctgaggggacagagccactgcagtgtgtccctctgccctcctttttggctaaggccagctccttcatctactcgctggctcggggtgctgttcctacaatgctcctttctgcctctgatgatttacttctttatcacggcttattcccgaaagaaaggcagctgttgttgctctagaaacttctatctgctgcctccttctgtcctttgctcctcttagagcaaacatggctgggctatgtcctctctcccttcagggtatcccctcccctgctctatccccatgccaccagatcgccatgtccagcctcagtttccccatcaggccccactcagcagcatctcacacagctcaccacactctcctcgagttttcattttgcaaattttcgcacctacaaaaatgtaaaaaaaccccaaaactgcccaagcatcaatgctcccttttcctggagtctgcagtgtggatgtttctgtcggatttcctaactctctccgtctccacccacatctattgggattcgtgtttttctgagggattccacagtaggttactgatgtcgcacctcagggtgtgtctcaaaagtgagacttgaacatagcacagcaggatgtcggggtgacacaacctgttgtcccttctctttacctacagtaggctcccttggctgttttgtttttgttgtgtttttgtttgtacacagagtctctgtcatccaggttggagtgcagtggtgtgatcttggctcactgcagcctcaacctccagggctcaagcaatcctcccacttcagccccctgaacagctgggaccagaggcacgtgccaccaaacctggataatttttgtattttttttagagacagggtcttgcccagactggtctcaaactcccgggatcaaactatcttcccacctcagcctcccaaagcgctgggattacaggtgtgtttttttttttgagacagagtctcgctctgttgcccaggctggagtgcagtggcgctatctcggctcactgtaagctccgcctcctgggttcacgccattctcctgcctcagcctcccgagtagctgggattacaggcgcccgccacaccgcccagctaattttttgtatttttagtagagagggggtttcaccgtgatcgcgatctcctgacctcgtgatccgcctgcctcggcctcccaaagtgctgggattacaggcatgagccaccgtgcctggcctgttttgttgatttttaaagcccagggcagtagtcttggaaaatgtcccacatcgtggatttgcctttctgtttccttgagggcagattcagacagaacacctttccctgggattggtcaactaatccgtggggtgttgctgaaactttattttattttattttatttttgagacggagtctcgctctgtcccccaggctgtcccccaggctggagtgcagtggcgggatctccgctcactgcaagctccgcctcccaggttcacgccattctcctgcctcagccccccaagtagctgggactacatgtgcccaccaccgcgcccagctaattttttgtatttttagtagagacggggtttcactgtgttagccaggatggtctcgatctcctgacgtcgtgatccgccctcccaaagtgctgggattacaggcctcggcctcccaaagtgctgggattacaggcgtgagccaccgcgcccggtgttgaaactcccttgaggcattttcttcggccttcgggtccatcctctgtctcctccttgacctcctcatctcctcgccactgccttggggaccttggccaggctcatggcatccagcagccactcaatgtcaatacctccatgttcatctctcagcccgcccttgcccgtgaacccatgcttatttatttattttttttaatacgtgcacccatgctcttcaggtctgatgaagtatccaaaatcaagctcctgaccatccccaaacctgccccttctgcagggtttacctcgctagtcggcgccatccttgattcttctctttctcccacccaggccatcatctcttgcctggttgatacccacagcctcccctttgggctttatccttatccccatcatagctgccagagggatcctgtgaaaacactccccagcctgctcattcctctgccctaagcctgcatggcacagagcaaaagccagttgttatgggacctaggaagtcctgtgggatgggccccagcctgcatcttcatcctcttctccccaccccactccattcactctctgcctatcactcaccagcctataccacctgcctcagggcctttgcactgaccatttaggccacattccaggctcttttcacacgttgcctcctctgagaagccctccctgaccactctgcccatacctcatgcctcttgattccccttacctggcttgtggtttcagcactttccctgtgtgtgtttgtttttcttggcatgagagcaggacctaagtgtctgttccctgttgattccccagtgccaggcatgcagtgcaaactctagaaatattttttgcatgaaggaatgagtgattgaatgcagcaagggtctggaggctgaggaccaggcagacagacattcagagttgctggaacgcgacagagacagggagtcagactggtcatgcaaggtcctgggcctgcccttgggtcctggggagccacggaaggttgtgggtgccagagggttgcggtcagagtcacagtcaagggccttctgagacctgtgccccctccccaccctccctccccacctcctcaggccagctctggggtctcggcaggtggtccgcaacatgacctccgagttcttcgctgcccagctccgggcccagatctctgacgacaccactcacccgatctcctactacaagcccgagttctacacgccggatgacgggggcactgctcacctgtctgtcgtcgcagaggacggcagtgctgtgtccgccaccagcaccatcaacctctagtaggggctgctgggccgcctgggtgggaaagggccaggggcgggtggcccagggactgcccacttatccagtaaggtggctccgtcacctcttttcctggtgggaaactgaggcccaaccttggtagcttatcctgggcctctcagtgagtatgtttgagcctcagtgggtggatagggaccaggctgggccaggcaaggtcgggcactgtctgacctggctgggcggtagctttggctccaaggtccgctccccggtcagcgggatcctgttcaataatgaaatggacgacttcagctctcccagcatcaccaacgagtttggggtacccccctcacctgccaatttcatccagccaggtatggggtggaggtccgggggtgggggactggggtggagaggggcgggtgtcctgggcaggcagctgacgggcatccctgtcttctcccatcggccgcagggaagcagccgctctcgtccatgtgcccgacgatcatggtgggccaggacggccaggtccggatggtggtgggagctgctgggggcacacagatcaccacggccactgcactggtatgtgtcacaccttttctccctggccgtgcccaccctgcacagcccccaagccatgctgatcacactcccatgccccaggccatcatctacaacctctggttcggctatgacgtgaagcgggccgtggaggagccccggctgcacaaccagcttctgcccaacgtcacgacagtggagagaaacattgaccaggtgggccgggggttggagaaactgagtcaaggtgtggggccccagggcatcctgggctggaggcctggatcatcacagagtggacaatggttggtgtcctctctctagtgcctgggccatctggagcccctgtgccatgagggccaagccccctgctccagtgagacccagcaggccccaacctgctcttcctgatgacctggcccgaaatggcaccacctgggctgaggcctgtgaccacacagatgtggttcaggtggcatctggagccctgctcaggcttcccctctcctcccacccccaggcagtgactgcagccctggagacccggcaccatcacacccagatcgcgtccaccttcatcgctgtggtgcaagccatcgtccgcacggctggtggctgggcagctgcctcggactccaggaaaggcggggagcctgccggctactgagtgctccaggaggacaaggctgacaagcaatccagggacaagatactcaccaggaccaggaaggggactctgggggaccggcttcccctgtgagcagcagagcagcacaataaatgaggccactgtgccaggctccaggtggcctccctggcctgtc

SEQ ID NO: 12239 - DNA, 2630 bp, Homo sapiens
gttttggtgtgctgctggatgaccagaccgggcgtcgggtgagcccagaagtgagagcagttggctgtgccccagtgctgtgtgacccagaggcgccgctcaccctctctgagctggtggacatcataggtggggaagctcaggtcagggcactcccatgagtgtctggaggcctgagtcccattctcagctctgccatatgcttgctgcgctctagaggagttcctcttcctctccaagcctcggtttatgtacccgtgcagtgggagtgagttgcacttcggggtgaagggggcaagacttgtgtgggcgcatcctgcagaaggatcccacagcgggtgcagcccagaactgtcttctgaggaagaggtgctctcctgggcccccactgtccccaggcctcagcaaggcaagtgaggtgctgccgtcatccaggctggacagttcagtgatttgcctgaggccccacagcagagttcaactggagacagagaaaccagctagaggcagagggaggtaacacggagtcccccagaaaggtctgggctgcgcgtgcttcaggtaacctcccttgaccttcaggagaacgagaaggctgcctgatcagagagtccctgaagaagattctgtggctacaggcttcagcagagtgtgagggagaccccggttatttcctcagctatttccaccaaatcctcctgtctttcgtggccaacaccccaggcaaggcttggggcccccgtctgctgctggacgcagagccatgaagaagaagttagtggtgctgggcctgctggccgtggtcctggtgctggtcattgtcggcctctgtctctggctgccctcagcctccaaggaacctgacaaccatgtgtacaccagggctgccgtggccgcggatgccaagcagtgctcgaagattgggagggatgcactgcgggacggtggctctgcggtggatgcagccattgcagccctgttgtgtgtggggctcatgaatgcccacagcatgggcatcgggggtggcctcttcctcaccatctacaacagcaccacacgaaaagctgaggtcatcaacgcccgcgaggtggcccccaggctggcctttgccaccatgttcaacagctcggagcagtcccagaagggggggctgtcggtggcggtgcctggggagatccgaggctatgagctggcacaccagcggcatgggcggctgccctgggctcgcctcttccagcccagcatccagctggcccgccagggcttccccgtgggcaagggcttggcggcagccctggaaaacaagcggaccgtcatcgagcagcagcctgtcttgtgtgaggtgttctgccgggatagaaaggtgcttcgggagggggagagactgaccctgccgcagctggctgacacctacgagacgctggccatcgagggtgcccaggccttctacaacggcagcctcacggcccagattgtgaaggacatccaggcggccgggggcattgtgacagctgaggacctgaacaactaccgtgctgagctgatcgagcacccgctgaacatcagcctgggagacgtggtgctgtacatgcccagtgcgccgctcagcgggcccgtgctggccctcatcctcaacatcctcaaagggtacaacttctcccgggagagcgtggagagccccgagcagaagggcctgacgtaccaccgcatcgtagaggctttccggtttgcctacgccaagaggaccctgcttggggaccccaagtttgtggatgtgactgaggtggtccgcaacatgacctccgagttcttcgctgcccagctccgggcccagatctctgacgacaccactcacccgatctcctactacaagcccgagttctacacgccggatgacgggggcactgctcacctgtctgtcgtcgcagaggacggcagtgctgtgtccgccaccagcaccatcaacctctactttggctccaaggtccgctccccggtcagcgggatcctgttcaataatgaaatggacgacttcagctctcccagcatcaccaacgagtttggggtacccccctcacctgccaatttcatccagccagggaagcagccgctctcgtccatgtgcccgacgatcatggtgggccaggacggccaggtccggatggtggtgggagctgctgggggcacacagatcaccacggccactgcactggccatcatctacaacctctggttcggctatgacgtgaagcgggccgtggaggagccccggctgcacaaccagcttctgcccaacgtcacgacagtggagagaaacattgaccaggcagtgactgcagccctggagacccggcaccatcacacccagatcgcgtccaccttcatcgctgtggtgcaagccatcgtccgcacggctggtggctgggcagctgcctcggactccaggaaaggcggggagcctgccggctactgagtgctccaggaggacaaggctgacaagcaatccagggacaagatactcaccaggaccaggaaggggactctgggggaccggcttcccctgtgagcagcagagcagcacaataaatgaggccactgtgccaggctccaggtggcctccctggcctgtc

SEQ ID NO: 12240 - DNA, 1817 bp, Homo sapiens
attgaatgcagcaagggtctggaggctgaggaccaggcagacagacattcagagttgctggaacgcgacagagacagggagtcagactggtcatgcaaggtcctgggcctgcccttgggtcctggggagccacggaaggttgtgggtgccagagggttgcggtcagagtcacagtcaagggccttctgagacctgtgccccctccccaccctccctccccacctcctcaggccagctctggggtctcggcaggtggtccgcaacatgacctccgagttcttcgctgcccagctccgggcccagatctctgacgacaccactcacccgatctcctactacaagcccgagttctacacgccggatgacgggggcactgctcacctgtctgtcgtcgcagaggacggcagtgctgtgtccgccaccagcaccatcaacctctagtaggggctgctgggccgcctgggtgggaaagggccaggggcgggtggcccagggactgcccacttatccagtaaggtggctccgtcacctcttttcctggtgggaaactgaggcccaaccttggtagcttatcctgggcctctcagtgagtatgtttgagcctcagtgggtggatagggaccaggctgggccaggcaaggtcgggcactgtctgacctggctgggcggtagctttggctccaaggtccgctccccggtcagcgggatcctgttcaataatgaaatggacgacttcagctctcccagcatcaccaacgagtttggggtacccccctcacctgccaatttcatccagccaggtatggggtggaggtccgggggtgggggactggggtggagaggggcgggtgtcctgggcaggcagctgacgggcatccctgtcttctcccatcggccgcagggaagcagccgctctcgtccatgtgcccgacgatcatggtgggccaggacggccaggtccggatggtggtgggagctgctgggggcacacagatcaccacggccactgcactggtatgtgtcacaccttttctccctggccgtgcccaccctgcacagcccccaagccatgctgatcacactcccatgccccaggccatcatctacaacctctggttcggctatgacgtgaagcgggccgtggaggagccccggctgcacaaccagcttctgcccaacgtcacgacagtggagagaaacattgaccaggtgggccgggggttggagaaactgagtcaaggtgtggggccccagggcatcctgggctggaggcctggatcatcacagagtggacaatggttggtgtcctctctctagtgcctgggccatctggagcccctgtgccatgagggccaagccccctgctccagtgagacccagcaggccccaacctgctcttcctgatgacctggcccgaaatggcaccacctgggctgaggcctgtgaccacacagatgtggttcaggtggcatctggagccctgctcaggcttcccctctcctcccacccccaggcagtgactgcagccctggagacccggcaccatcacacccagatcgcgtccaccttcatcgctgtggtgcaagccatcgtccgcacggctggtggctgggcagctgcctcggactccaggaaaggcggggagcctgccggctactgagtgctccaggaggacaaggctgacaagcaatccagggacaagatactcaccaggaccaggaaggggactctgggggaccggcttcccctgtgagcagcagagcagcacaataaatgaggccactgtgccaggctccaggtggcctccctggcctgtc

SEQ ID NO: 12241 - DNA, 968 bp, Homo sapiens
attgaatgcagcaagggtctggaggctgaggaccaggcagacagacattcagagttgctggaacgcgacagagacagggagtcagactggtcatgcaaggccagctctggggtctcggcaggtggtccgcaacatgacctccgagttcttcgctgcccagctccgggcccagatctctgacgacaccactcacccgatctcctactacaagcccgagttctacacgccggatgacgggggcactgctcacctgtctgtcgtcgcagaggacggcagtgctgtgtccgccaccagcaccatcaacctctactttggctccaaggtccgctccccggtcagcgggatcctgttcaataatgaaatggacgacttcagctctcccagcatcaccaacgagtttggggtacccccctcacctgccaatttcatccagccagggaagcagccgctctcgtccatgtgcccgacgatcatggtgggccaggacggccaggtccggatggtggtgggagctgctgggggcacacagatcaccacggccactgcactggccatcatctacaacctctggttcggctatgacgtgaagcgggccgtggaggagccccggctgcacaaccagcttctgcccaacgtcacgacagtggagagaaacattgaccaggcagtgactgcagccctggagacccggcaccatcacacccagatcgcgtccaccttcatcgctgtggtgcaagccatcgtccgcacggctggtggctgggcagctgcctcggactccaggaaaggcggggagcctgccggctactgagtgctccaggaggacaaggctgacaagcaatccagggacaagatactcaccaggaccaggaaggggactctgggggaccggcttcccctgtgagcagcagagcagcacaataaatgaggccactgtgccaggctccaggtggcctccctggcctgtc

SEQ ID NO: 12242 - DNA, 1751 bp, Homo sapiens
agggagtcagactggtcatgcaaggtcctgggcctgcccttgggtcctggggagccacggaaggttgtgggtgccagagggttgcggtcagagtcacagtcaagggccttctgagacctgtgccccctccccaccctccctccccacctcctcaggccagctctggggtctcggcaggtggtccgcaacatgacctccgagttcttcgctgcccagctccgggcccagatctctgacgacaccactcacccgatctcctactacaagcccgagttctacacgccggatgacgggggcactgctcacctgtctgtcgtcgcagaggacggcagtgctgtgtccgccaccagcaccatcaacctctagtaggggctgctgggccgcctgggtgggaaagggccaggggcgggtggcccagggactgcccacttatccagtaaggtggctccgtcacctcttttcctggtgggaaactgaggcccaaccttggtagcttatcctgggcctctcagtgagtatgtttgagcctcagtgggtggatagggaccaggctgggccaggcaaggtcgggcactgtctgacctggctgggcggtagctttggctccaaggtccgctccccggtcagcgggatcctgttcaataatgaaatggacgacttcagctctcccagcatcaccaacgagtttggggtacccccctcacctgccaatttcatccagccaggtatggggtggaggtccgggggtgggggactggggtggagaggggcgggtgtcctgggcaggcagctgacgggcatccctgtcttctcccatcggccgcagggaagcagccgctctcgtccatgtgcccgacgatcatggtgggccaggacggccaggtccggatggtggtgggagctgctgggggcacacagatcaccacggccactgcactggtatgtgtcacaccttttctccctggccgtgcccaccctgcacagcccccaagccatgctgatcacactcccatgccccaggccatcatctacaacctctggttcggctatgacgtgaagcgggccgtggaggagccccggctgcacaaccagcttctgcccaacgtcacgacagtggagagaaacattgaccaggtgggccgggggttggagaaactgagtcaaggtgtggggccccagggcatcctgggctggaggcctggatcatcacagagtggacaatggttggtgtcctctctctagtgcctgggccatctggagcccctgtgccatgagggccaagccccctgctccagtgagacccagcaggccccaacctgctcttcctgatgacctggcccgaaatggcaccacctgggctgaggcctgtgaccacacagatgtggttcaggtggcatctggagccctgctcaggcttcccctctcctcccacccccaggcagtgactgcagccctggagacccggcaccatcacacccagatcgcgtccaccttcatcgctgtggtgcaagccatcgtccgcacggctggtggctgggcagctgcctcggactccaggaaaggcggggagcctgccggctactgagtgctccaggaggacaaggctgacaagcaatccagggacaagatactcaccaggaccaggaaggggactctgggggaccggcttcccctgtgagcagcagagcagcacaataaatgaggccactgtgccaggctccaggtggcctccctggcctgtctccccactc

SEQ ID NO: 12243 - DNA, 1033 bp, Homo sapiens
agggagtcagactggtcatgcaaggtcctgggcctgcccttgggtcctggggagccacggaaggttgtgggtgccagagggttgcggtcagagtcacagtcaagggccttctgagacctgtgccccctccccaccctccctccccacctcctcaggccagctctggggtctcggcaggtggtccgcaacatgacctccgagttcttcgctgcccagctccgggcccagatctctgacgacaccactcacccgatctcctactacaagcccgagttctacacgccggatgacgggggcactgctcacctgtctgtcgtcgcagaggacggcagtgctgtgtccgccaccagcaccatcaacctctactttggctccaaggtccgctccccggtcagcgggatcctgttcaataatgaaatggacgacttcagctctcccagcatcaccaacgagtttggggtacccccctcacctgccaatttcatccagccagggaagcagccgctctcgtccatgtgcccgacgatcatggtgggccaggacggccaggtccggatggtggtgggagctgctgggggcacacagatcaccacggccactgcactggccatcatctacaacctctggttcggctatgacgtgaagcgggccgtggaggagccccggctgcacaaccagcttctgcccaacgtcacgacagtggagagaaacattgaccaggcagtgactgcagccctggagacccggcaccatcacacccagatcgcgtccaccttcatcgctgtggtgcaagccatcgtccgcacggctggtggctgggcagctgcctcggactccaggaaaggcggggagcctgccggctactgagtgctccaggaggacaaggctgacaagcaatccagggacaagatactcaccaggaccaggaaggggactctgggggaccggcttcccctgtgagcagcagagcagcacaataaatgaggccactgtgccaggctccaggtggcctccctggcctgtctccccactc

SEQ ID NO: 12244 - DNA, 1589 bp, Homo sapiens
aggccagctctggggtctcggcaggtggtccgcaacatgacctccgagttcttcgctgcccagctccgggcccagatctctgacgacaccactcacccgatctcctactacaagcccgagttctacacgccggatgacgggggcactgctcacctgtctgtcgtcgcagaggacggcagtgctgtgtccgccaccagcaccatcaacctctagtaggggctgctgggccgcctgggtgggaaagggccaggggcgggtggcccagggactgcccacttatccagtaaggtggctccgtcacctcttttcctggtgggaaactgaggcccaaccttggtagcttatcctgggcctctcagtgagtatgtttgagcctcagtgggtggatagggaccaggctgggccaggcaaggtcgggcactgtctgacctggctgggcggtagctttggctccaaggtccgctccccggtcagcgggatcctgttcaataatgaaatggacgacttcagctctcccagcatcaccaacgagtttggggtacccccctcacctgccaatttcatccagccaggtatggggtggaggtccgggggtgggggactggggtggagaggggcgggtgtcctgggcaggcagctgacgggcatccctgtcttctcccatcggccgcagggaagcagccgctctcgtccatgtgcccgacgatcatggtgggccaggacggccaggtccggatggtggtgggagctgctgggggcacacagatcaccacggccactgcactggtatgtgtcacaccttttctccctggccgtgcccaccctgcacagcccccaagccatgctgatcacactcccatgccccaggccatcatctacaacctctggttcggctatgacgtgaagcgggccgtggaggagccccggctgcacaaccagcttctgcccaacgtcacgacagtggagagaaacattgaccaggtgggccgggggttggagaaactgagtcaaggtgtggggccccagggcatcctgggctggaggcctggatcatcacagagtggacaatggttggtgtcctctctctagtgcctgggccatctggagcccctgtgccatgagggccaagccccctgctccagtgagacccagcaggccccaacctgctcttcctgatgacctggcccgaaatggcaccacctgggctgaggcctgtgaccacacagatgtggttcaggtggcatctggagccctgctcaggcttcccctctcctcccacccccaggcagtgactgcagccctggagacccggcaccatcacacccagatcgcgtccaccttcatcgctgtggtgcaagccatcgtccgcacggctggtggctgggcagctgcctcggactccaggaaaggcggggagcctgccggctactgagtgctccaggaggacaaggctgacaagcaatccagggacaagatactcaccaggaccaggaaggggactctgggggaccggcttcccctgtgagcagcagagcagcacaataaatgaggccactgtgccaggctccaggtggcctccctggcctgtc

SEQ ID NO: 12245 - DNA, 952 bp, Homo sapiens
aggccagctctggggtctcggcaggtggtccgcaacatgacctccgagttcttcgctgcccagctccgggcccagatctctgacgacaccactcacccgatctcctactacaagcccgagttctacacgccggatgacgggggcactgctcacctgtctgtcgtcgcagaggacggcagtgctgtgtccgccaccagcaccatcaacctctactttggctccaaggtccgctccccggtcagcgggatcctgttcaataatgaaatggacgacttcagctctcccagcatcaccaacgagtttggggtacccccctcacctgccaatttcatccagccagggaagcagccgctctcgtccatgtgcccgacgatcatggtgggccaggacggccaggtccggatggtggtgggagctgctgggggcacacagatcaccacggccactgcactggtatgtgtcacaccttttctccctggccgtgcccaccctgcacagcccccaagccatgctgatcacactcccatgccccaggccatcatctacaacctctggttcggctatgacgtgaagcgggccgtggaggagccccggctgcacaaccagcttctgcccaacgtcacgacagtggagagaaacattgaccaggcagtgactgcagccctggagacccggcaccatcacacccagatcgcgtccaccttcatcgctgtggtgcaagccatcgtccgcacggctggtggctgggcagctgcctcggactccaggaaaggcggggagcctgccggctactgagtgctccaggaggacaaggctgacaagcaatccagggacaagatactcaccaggaccaggaaggggactctgggggaccggcttcccctgtgagcagcagagcagcacaataaatgaggccactgtgccaggctccaggtggcctccctggcctgtc

SEQ ID NO: 12246 - DNA, 1724 bp, Homo sapiens
gacagggagtcagactggtcatgcaaggtcctgggcctgcccttgggtcctggggagccacggaaggttgtgggtgccagagggttgcggtcagagtcacagtcaagggccttctgagacctgtgccccctccccaccctccctccccacctcctcaggccagctctggggtctcggcaggtggtccgcaacatgacctccgagttcttcgctgcccagctccgggcccagatctctgacgacaccactcacccgatctcctactacaagcccgagttctacacgccggatgacgggggcactgctcacctgtctgtcgtcgcagaggacggcagtgctgtgtccgccaccagcaccatcaacctctagtaggggctgctgggccgcctgggtgggaaagggccaggggcgggtggcccagggactgcccacttatccagtaaggtggctccgtcacctcttttcctggtgggaaactgaggcccaaccttggtagcttatcctgggcctctcagtgagtatgtttgagcctcagtgggtggatagggaccaggctgggccaggcaaggtcgggcactgtctgacctggctgggcggtagctttggctccaaggtccgctccccggtcagcgggatcctgttcaataatgaaatggacgacttcagctctcccagcatcaccaacgagtttggggtacccccctcacctgccaatttcatccagccaggtatggggtggaggtccgggggtgggggactggggtggagaggggcgggtgtcctgggcaggcagctgacgggcatccctgtcttctcccatcggccgcagggaagcagccgctctcgtccatgtgcccgacgatcatggtgggccaggacggccaggtccggatggtggtgggagctgctgggggcacacagatcaccacggccactgcactggtatgtgtcacaccttttctccctggccgtgcccaccctgcacagcccccaagccatgctgatcacactcccatgccccaggccatcatctacaacctctggttcggctatgacgtgaagcgggccgtggaggagccccggctgcacaaccagcttctgcccaacgtcacgacagtggagagaaacattgaccaggtgggccgggggttggagaaactgagtcaaggtgtggggccccagggcatcctgggctggaggcctggatcatcacagagtggacaatggttggtgtcctctctctagtgcctgggccatctggagcccctgtgccatgagggccaagccccctgctccagtgagacccagcaggccccaacctgctcttcctgatgacctggcccgaaatggcaccacctgggctgaggcctgtgaccacacagatgtggttcaggtggcatctggagccctgctcaggcttcccctctcctcccacccccaggcagtgactgcagccctggagacccggcaccatcacacccagatcgcgtccaccttcatcgctgtggtgcaagccatcgtccgcacggctggtggctgggcagctgcctcggactccaggaaaggcggggagcctgccggctactgagtgctccaggaggacaaggctgacaagcaatccagggacaagatactcaccaggaccaggaaggggactctgggggaccggcttcccctgtgagcagcagagcagcacaataaatgaggccactgtgccaggctcc

SEQ ID NO: 12247 - DNA, 853 bp, Homo sapiens
gacagggagtcagactggtcatgcaaggtggtccgcaacatgacctccgagttcttcgctgcccagctccgggcccagatctctgacgacaccactcacccgatctcctactacaagcccgagttctacacgccggatgacgggggcactgctcacctgtctgtcgtcgcagaggacggcagtgctgtgtccgccaccagcaccatcaacctctactttggctccaaggtccgctccccggtcagcgggatcctgttcaataatgaaatggacgacttcagctctcccagcatcaccaacgagtttggggtacccccctcacctgccaatttcatccagccagggaagcagccgctctcgtccatgtgcccgacgatcatggtgggccaggacggccaggtccggatggtggtgggagctgctgggggcacacagatcaccacggccactgcactggccatcatctacaacctctggttcggctatgacgtgaagcgggccgtggaggagccccggctgcacaaccagcttctgcccaacgtcacgacagtggagagaaacattgaccaggcagtgactgcagccctggagacccggcaccatcacacccagatcgcgtccaccttcatcgctgtggtgcaagccatcgtccgcacggctggtggctgggcagctgcctcggactccaggaaaggcggggagcctgccggctactgagtgctccaggaggacaaggctgacaagcaatccagggacaagatactcaccaggaccaggaaggggactctgggggaccggcttcccctgtgagcagcagagcagcacaataaatgaggccactgtgccaggctcc

SEQ ID NO: 12248 - DNA, 715 bp, Homo sapiens
ctcacgccttcgccgtagcatctttcgcagcggaccgaagagaagaaaagtaggccagagccgaactctcttcctgccaagatgtctattggtgtgccgattaaagtactgcatgaggccgagggccacattgtgacatgtgagacgaacaccggtgaggtatatcgggggaagctcattgaagcagaggacaacatgaactgccagatgtccaacatcacagtcacatacagagatggccgagtggcacagctggagcaggtatacatccgtggcagcaaaatccgctttctgattttgcctgacatgctgaagaacgcacccatgttaaagagcatgaaaaataaaaaccaaggctcaggggctggccgaggaaaagctgctattctcaaggcccaagtggccgcaagaggaagaggacgtggaatgggacgtggaaacatctttcaaaagcgaagataattttctaagttgaacagaactttgtccttttttctttcaggctctggctccgctactgcatcgtgtgcttctgtccaagaggcagagagactgaaactatctgctgccgcctggattctcccagagattgcctggaacaccagctcgggtcctcgcacaccatcctgcgggtgcagcccagaactgtcttctgaggaagaggtgctctcctgggcccccactgtccccaggcctcagcaaggcaagtgaggtg
